United States Patent Application Publication US 2015/0052636 A1 - sequence listing, part 16

SEQ ID NO: 54473 - DNA, 433 bp, Populus trichocarpa
  Intron number 1 from transcript POPTR_0021s00350.1 (locus POPTR_0021s00350) derived from phytozome v7.0 (chr-ID scaf fold_21; pos 105102 to 105534 reverse strand)
tgttacagcttcaacaacaccccttaagaactaaggtctgtatttgaaaaccatctctccgtttttttatgtgtattcttgtttgttttggatttggttttgatgggttgctttgattgaggaagaaatcgatgaaagtttgaatcttttctagttttttctttttttcttggcttgattttttatgggttatttggttgagggaagaatgtgatgaaagtttgggtctttgcagttttctgaatttttttaaaatgggaaattgaggtcaactgccctcttgataattgcaaatgttttgagtttggaagtgaaaattgagatctaaattattaaattgttaacctttgtgaattagtaatgcgatctgatgttgtaagaaaatttttgtaatgcaggcaattacagcaggggtgttgtcagctctcagtga

SEQ ID NO: 54474 - DNA, 719 bp, Populus trichocarpa
  Intron number 1 from transcript POPTR_0003s21880.1 (locus POPTR_0003s21880) derived from phytozome v7.0 (chr-ID scaf fold_3; pos 19860766 to 19861484)
tcacagggttgggattccttgaagaccatgcaatacatagttttttttaatgagatatattgactaaaggtcactttttttattagaaatttagtaagagatgataaccctttttctagtggattgtttctattagagcccatgtttttgttcttaattttgggtttccttctttgaggaatcggtgcattttttcccaaataagctctttattttttggtggtttagttacagtataagacggagaggagaaagtgtttttttatgaagatattttttatttattttttctattcattagtttggcattcatagctgttccttctgatctcctagattttgcaagttaatcatgcactaattcgttagcaaaaaaaagattggttctgtcttctttgattttcttttcctttcttgtagtttttgtgtgtcattgacagttaaaattcttactacttcacattataatgaaagaggtacctgtcaactctgaattacaaatgttagctgaagttgcatgtgcgtggaaatttttggttttttagtgtttagatctgattctattatttggtgtgcaatggtatcatgtgattataacacaatgatgccatgtgagaataagataggaataaggattaactatttcttggtttgcagagaatgtgatttccattaaatcttgaggtttggaaattaggaacggtcaactacttggaagc

SEQ ID NO: 54475 - DNA, 881 bp, Populus trichocarpa
  Intron number 1 from transcript POPTR_1059s00200.1 (locus POPTR_1059s00200) derived from phytozome v7.0 (chr-ID scaf fold_1059; pos 3101 to 3981 reverse strand)
ggctcttcttacttctctggggacttttgagtttggtggcatttcattctctgccatctctcagggaaattctccattgaattcttcaagttctgggtttatcagtgagtataagctaccaatgtttgttcttcacttgctgtttgtctttggtacctgtcctgcaagttttaactggttctggattgatgaacagggattttagtccagacaagttttactattaaattcataagtcttaactgctagttgaggttgatcggagtaattttaaattggtttttggtgaagataaggcacaacctcatgcatgcaaagtaaggccaggaatgatcaaagggtgcacttgaagcaacataaacttcaagtgacttgttagatacatttgttggttacttctccagaacttctagatcactgtttactagtgttttacataatcagtcttccaaattttctctgatatacttagaattgaagcagcctataaccctactgttttgaggtagtaatcgataggatgatgcttcagaaagaattgtggtcttcaaaaattagctttcatgaagaaaagatctaactcaattctgttgtagtcggtcttttaagtaatcgctgtcaagttcatccctgagctatagctgctgttgattagttgttgatggattgttgatcacatgtaacttagtgctttaattctatacctgaaagcccttcgatgaatttaattgcagatacagttgcaaatgcggattgcaaatttaaaagaaacgaagttgttgcagagaggtgggttgattcaaagagaagtaaagatgggactgatgatgagagagtttcgttattgcattcagcttggagtgccttgctatccgaatcag

SEQ ID NO: 54476 - DNA, 985 bp, Populus trichocarpa
  Intron number 2 from transcript POPTR_0003s07630.1 (locus POPTR_0003s07630) derived from phytozome v7.0 (chr-ID scaf fold_3; pos 9162541 to 9163525 reverse strand)
acaaggctcgccgcttgggctataaggccaagcaggtagcacttcgattgccatttttagcaagtagtctttcttgttgtgctttgttaaatcatttactgctatttcaattgtcagctttcgtttgctaggttatgagcttcagttacacgtaagctctacaagtagtctttcttgttgtgttttgttaactgattgagtttcaagcgctttaatgttttgttttgtggattacttttagagtcatttcatccgaaatgtgtgaagtgagaagtatttttaagtgtttctctctttgttggttccactttttggttctcgtataagttcctggcttttctgtatctgacttgcactaagtctggagggcatagtttgttttggctgatgtgtgtagttctgagccactatgaatggacataaccagcctgtgatcatgtaaatgttgccattgcctagttaatgcatgcattttgtgattcctgctggctaagcagcgtcttgatgtgtattcattcttccctaggagggtgcatacatacaatgatggaatgcttcttgagaccagtgatatcaaaataatcgatcatccgaccaaatgggctcacgccttgttggactcgtttttttctcgatctgatactgttcttgtggttcttttttggaatttgttgttattgatgtcttcaattttatcatctagttgaaccgggaagaaactgtttggatgtgaaattagtaagttggattttcactttactttttatgtccaaacaatcagtttgtcttctaatagaccactaggaatttgtgattttgatagttaggtgaatttttataacattggaagttataaaaatggagatcagtaatgccattgttgatccaagctagtaaagttgctattcctgcccttgttttttcacaaaattgtgtagtgcttttaaatctgcatggatgctgaaaattgattatttttagggat

SEQ ID NO: 54477 - DNA, 364 bp, Populus trichocarpa
  Intron number 1 from transcript POPTR_0003s07630.1 (locus POPTR_0003s07630) derived from phytozome v7.0 (chr-ID scaf fold_3; pos 9163633 to 9163996 reverse strand)
ggtactctctctctctctctctctctctctctctctctctccaacattctttcttttcacctattaatatctcaaatctctcatttttttcttatattctgatctgctaacttctttaggtattaccatagaccagattttgtttttctttcttgtctatgtagtttcctacttggttttgacaaggattttatgcgaactgtgttacatgcgtttctcgtaaattcattttcaaagaaaataaatagtaggctattgttaaattctcaatctagtgaatttttgagtatgctgtgaagagtgtaatgtttttttttttggtgggtttgatgaaaataggggcttacaagtacgtttctgagct

SEQ ID NO: 54478 - DNA, 599 bp, Populus trichocarpa
  Intron number 3 from transcript POPTR_0003s13600.2 (locus POPTR_0003s13600) derived from phytozome v7.0 (chr-ID scaf fold_3; pos 13945436 to 13946034)
catctttaggccctgttgctgaagacatgttccattggcaagctacgattatgggtcctgctgatagtccatatgcagggggggtctttctggttacaattcattttcctccagactatccatttaaacctcctaaggtacataattgacttaacaaggtcatcatcgcttagcagtttcatattttcctccctgacttgtcacttcctttgaactaccattatgtgattggacattccgaataatggtactttctcatatttggtatactagcatgaacatttatagcctgaaccattaacaaacatggcaggattttgttttcatcttgagatgctatgtgtaagctgatatgtctgttgctgaagagctgtgctagacatcacagccaacttaaaacaagcgagaggtttcccattcttctttgatgtctttgaaatggctttgttggttatcaccatttgttttaacgttctgagaagtttcatagaatgggtgaattttttattttcttgcagttctattttacttactgtgttgccattcttttggatattcttgcaggttgctttcaggacaaaggtctttcacccaaatat

SEQ ID NO: 54479 - DNA, 816 bp, Populus trichocarpa
  Intron number 1 from transcript POPTR_0013s12230.1 (locus POPTR_0013s12230) derived from phytozome v7.0 (chr-ID scaf fold_13; pos 12854322 to 12855137)
cttctgggcatcactaacttggccctgtacaccaagtaagttctctccatatctttaattctcaaagtttacagtctttattttcttctttttgctctttctcgaaagggttactcaaaaacagctattcttcagaagggttttcttttctttgatcatcaacttttatgaagctctgcttttgtgttgaagtttggttcttttctcccatacttgttttttgagtttggttttttaggtgagtattatgcactgatctattctattttattttacaactattttttttttatcgatgaccagtttttttaggtaagtctactactttttttctaagggaaatttgaaccccacaagaataactcttaattgatactccacgttttgagttatcttcttatgtccaaggaattgcttgaagggttataaatgaatttcaaatttatagacttttaggtgtgttaagtgtatagatttatatggataatgtttatacaagcgggtgcaagaatttaatataatttttatgtcggtccaatacattattgatgtaaagttttgattttgagcttaaattaaacaaaaaatcttttaaattattgatgtgaagtttgcttctgcagttttcttttttgtgctgatgtttgtttctgtagttgtttttatatttctttcttttaatgagtgaaaattgaggttatctgaagagtatagtcaaagcaaaagagcagggagctgattttttttttcacttactgaatttttgtttaaattccggcagaaaatagaagctgagaggattgcaatcatactact

SEQ ID NO: 54480 - DNA, 637 bp, Populus trichocarpa
  Intron number 2 from transcript POPTR_0014s05270.1 (locus POPTR_0014s05270) derived from phytozome v7.0 (chr-ID scaf fold_14; pos 3988551 to 3989187)
caataaaccttcgatcacctttgtaccctgaagtcagggttttcgcctttcccccacttactttgcaagggatgaagttcggttatagtttttttattttttattactccatgtattcctattaaagtttggttgcagttctttttttctagatcaaaacactaggctgctagctgcttgtttgttttagtaccttctccttcttctagctaacttggggcaactgcatgatgcttgaggaagaactcttggctgtaaatatacaatatctagttcagaaacccccaatatccatgatatatggaacattatgctatacaatccctgaaccgtgtattttactagaaaatctaatttggcttgtttggttagtagaagaaactgagcaagcaactagttgctccaaacgatccactgtgataaaaagtttgagatgtcatgaaagtcagactcctgataaatttgatgttttgcatagtattgacttatagtgtataatttatatatagaattcgatgttttgagatgccatgaaagttcttgctagtgagtatgcatagaattattttgagaagttaattttatagctagtggtgactcttgttttatttgtcatgcgagcagaaaacttccacaa

SEQ ID NO: 54481 - DNA, 455 bp, Populus trichocarpa
  Intron number 1 from transcript POPTR_0003s15100.1 (locus POPTR_0003s15100) derived from phytozome v7.0 (chr-ID scaf fold_3; pos 14958847 to 14959301 reverse strand)
gtccacggtatccttggaaggtatgattttttctttaattttttttcaatttttttatcaataattactagttatcatgatttctttgcgttatttattgaattttttgatctggagttggtttatttttgttgaatacgagataaaaaatgtaaactttctctgaaagttgtccttttttattttgatgaattttcaccctcaattcctgaatttggaattcaattacttctgttgattgcccccagtctagtgatttttttttaaaatctgggtttggtttatttttgttgattatgagatcaaaatgtcaacttcctcttgaagtttgtctttttttgagctaactgaatttttaggcttaattattgaattagttctgttgtttgctaattgtgggcgttttgcttgaatgatcagtaacactgattggaagtttggagcagagcagtttg

SEQ ID NO: 54482 - DNA, 478 bp, Populus trichocarpa
  Intron number 1 from transcript POPTR_1727s00200.2 (locus POPTR_1727s00200) derived from phytozome v7.0 (chr-ID scaf fold_1727; pos 1512 to 1989 reverse strand)
tcagtcttagccgtcttgcagggaattggttgcaggtgtgtaatccgtactcctacctttcacctttagtgaggggcaatgtgatctatgctaagtgtcgccgagctaagagcagggcggatataaaaacgtgtgtgattaaagagatatgaataaaaattaaattacttactgtaagtaatttaggcattgtttttctttctagattttgagttttatgctctggctattgtgggattgctgttgatttagtgtttgatttagttatgctaacaaatcttgagttactttcatttttcataatcttttagcaagaaatgaaatttcttgattcttgtgctcttatttttgggttctgggttttaaagcacttacctttttgttgcatttttctttgcttatttaagattttgttttgttggtatttgcagcgactgaattttggtttgttttgaaacagggactctttgtggtgatt

SEQ ID NO: 54483 - DNA, 426 bp, Populus trichocarpa
  Intron number 2 from transcript POPTR_0019s09750.1 (locus POPTR_0019s09750) derived from phytozome v7.0 (chr-ID scaf fold_19; pos 11352827 to 11353252)
aattgggttagagccgcaggagtgccagtaaacaacgataatgatttttatttatacaaacgctgttgtgaagggttattacaagaaccatgtcaagttacatactttgagcaccaaatcaaatatgacagatttcccttctgtaatgttatgattagagatgaataatgtttcttttctttttttatttttcaacacaaagagtgttaacaaggatcaacacggtcactggagttgcttatatggatgaaccaaccatcatggcatgggaattgatgtacgaacctcgctgctaggttgactactctagaaagaatgtaaatgtaagaaacaacaaccatgaataattgattatttttgcaggtagctatcaggttaattataatatcatctattaattaatgattgtctttaaatctgacaggg

SEQ ID NO: 54484 - DNA, 470 bp, Populus trichocarpa
  Intron number 1 from transcript POPTR_0018s10020.1 (locus POPTR_0018s10020) derived from phytozome v7.0 (chr-ID scaf fold_18; pos 11068926 to 11069395 reverse strand)
gtcttttactcggtaattttatctgacatgtagacttcatttgctgaaactccatttattttgttttgttttattttatattttcctactgcatatagataaatagatagatagatcttggagtctgttttttcaattcttagttgaatcaacgtgaatatttatgagacaaaaagtttctctgaaatcccatgtcgcagtagcaagtttgatccttcctcgtgaagaggataactttggtcctttcaagtgttaatggtttgctgccggttttctcacttctgctagagaaaggtggcttatagtgtctaaaatggtggtgttattttaaaatgtttgtgggattgagaatgctgtataactgcattgattccattggaaataaaataagcctatatatttcatgggttttctttcaacttcactacgctgcagatacggagaaattctatactgaagttcaagaaatc

SEQ ID NO: 54485 - DNA, 955 bp, Populus trichocarpa
  Intron number 2 from transcript POPTR_0006s02740.1 (locus POPTR_0006s02740) derived from phytozome v7.0 (chr-ID scaf fold_6; pos 1735758 to 1736712)
tctcagtggattctccaaacgttacaccattagtaagtttctgttctcttccttgattacaattttattattaattgtgtttgtcttttcttttggctacatactatattatatcatgcatgtaaataccataattcaaacaaatattgtttgttttatttgttttttggcatgattctatttaaaaacaccaaaattcttcatggtttcttgtctttatatttatttttctacttgaccagaaatatatagctcacttttttatagcatggagaatattttgtgttctagttttatacatttttttctaaatttattttatttttcacatctacacattaattaaaatcattaaaaaatatttaaaagttattaatttgatattttctcaactaaaacaataatttcaaaaacactttaacatgcatgcccaaaaaaacaaacactctagtaatctccttgttttgaatagattaattagtaattaatcactagattaaacaaattaatgtcatgagtaatgaaacacagtctacttccttgatctttttgtctcgttaacgttttctttttggtattttagaaaaagggatgaacaaaaagtactttgcgtaaacacatgctaaacctaatctcttgtcaaattatttcatgagtgggtctcattatattgatgtttttggcttttttaaaagttttcaaacctaatcaagcacttttttattagcttccatttcaagatatggtagggcacatgagaatatatagacattgatgttctagattttgtatgcctttcatcaatattttcccagaacaaaaccaaatttattaaattagtgtggttaaaatctcgatcgagtgaatctaaaataatattatttttaaaagtaaaatttgaaaatcaaattaaattttagctttgaaacccaactcaatcaagtttcaagttaga

SEQ ID NO: 54486 - DNA, 819 bp, Populus trichocarpa
  Intron number 1 from transcript POPTR_0013s08090.1 (locus POPTR_0013s08090) derived from phytozome v7.0 (chr-ID scaf fold_13; pos 7013257 to 7014075)
caaaggtaagaagatggatgaatcatactcatctggaaaaaataggaagacaaatttgtagtaagcctatatctcttaaacaatcaaacaaactagtgatcgaatttagagacactcctaaagccaagatctttgaagatgttgatgtcataaaaaaaaagattaaacttttaaaaaatatgtaattggtgtttgtccctcaattctgggaagtatcacttagatataaaatcaaaatcatttattgtgcacaagatgatatcaaagaaaaaacagaaaacaagttcaagccttgtgattaggatgtttaagtccttcaatcaggaagttcaagccttacaattagaagttcatgccatacaatcaggaagttttaaaccctacaattaagaagttctagccctagaattaaaagtttcgaccctgctataaagaggtttaaaccttacaaattaggaggtttatagtagaatatcataatcaagtaggttaaactaaactatataatcgagatgctattttagatttataattgaggttggtcatctctcaagttgacccaattagattttttaattgaggttggtcacctctcaagtagatccatttatatttgagttgaggttggtttcatctcgagtcgatctatttagattttctagtcaaggttggtcgcctctcaagttgctcattttatatttctaattgaggttgttaatctctcaagttgatccatttagactttctaatcgaggctgatagctgctgaaattgaccattttagattttcaattaaggttggttgcctctcaagttgac

SEQ ID NO: 54487 - DNA, 546 bp, Populus trichocarpa
  Intron number 1 from transcript POPTR_0013s01270.1 (locus POPTR_0013s01270) derived from phytozome v7.0 (chr-ID scaf fold_13; pos 697525 to 698070 reverse strand)
ctcctctgtgtcatcttcttccatctctttctcaggtatcaaacaaccttctttctctgtatgtatatacgttatttttcttatattaaaggaacaatctttactgtaaattaaaacctgtatttgatttaaagtctcttttgtggttttagtaataattttagttttaatttcaattattaacctgctcttatgggttctttctagaggggatttaatttattcattagctcttaaaagggtagctaaaggttttttcttttcttttttctttgggatttggtgctttttcgggttggttttaaggcgtatatgaaaggaatggttttggaatctgatctgttttttattttttattttatctatcgtggtttatgttaatacagatcggttatgagaaatgactggtaattaatgaagtttcctggcaggattcgcattaatcttgttagcccatttgaaccaggagataagctagaaagaaagagaaaatcctaattcaagaatcttgggatttattttgatataatttgatttgatgtgtag

SEQ ID NO: 54488 - DNA, 417 bp, Populus trichocarpa
  Intron number 3 from transcript POPTR_0003s19630.1 (locus POPTR_0003s19630) derived from phytozome v7.0 (chr-ID scaf fold_3; pos 18312108 to 18312524 reverse strand)
gaatcagatttggtttggcaactcagaaggaaattgtaagtagaattctgtcttggttgtttgcttgctcatgttatttaaagcatttcaattggtgtaatggttttcttgaatcatttgttgtttcttcggattgatgtgcaacatttgaacgtagaggtaccttttgttgctaacagagtacctctagagtctattaaaaatttatttcaaggcaccagttatgatgttattaatgtaaaattcacttttgattaataagttttcacttttcagcatgtttgccaggattacaatttatttctaactggcattcactgtatttctagcttcaaatcctctaattgttataaattgatgcccgtgcaaattttgttgacagtgtacagcatccatcagtgattgccctatcagcca

SEQ ID NO: 54489 - DNA, 728 bp, Populus trichocarpa
  Intron number 2 from transcript POPTR_0003s19630.1 (locus POPTR_0003s19630) derived from phytozome v7.0 (chr-ID scaf fold_3; pos 18312571 to 18313298 reverse strand)
aggcgaggtaaaggcaaaactttggaatttatcaggtatttgggctattatttttaacttttctaatttttatttgttattgcatgactcttactgtgtttggttcccgagaaagctgaggaaatgacaaagagaggaccgaaattaatatgttttattgctctttggttttgagttagttgtaactcagaaagaacaaagaaattatcattttgttctattttagctttttttttatgatccttacttctctgtgctatttttttccatatatgtttgtttcaattgacaaaaatacaacaccttttctttgtacgtagtttttttaatgcttttcactcctagtccgtgaatttaacaataaaagtgaaatgagcacgtccagtgctgggatttttataaactatctctgtgttttgtatatttgcatgtgtttttgggccaatgagttgagtcctccttaacgagtcccttttgcttgcaacatttctattccttgtttaagttttggttttggttatacatgattttttcagattgctatgcatgatagtgcctatggttcttctattttaatcagtgaaatcttctaatttatttatccatttgtcaactagaagttgaaatgtttatttgggtattttaaagcgctcttgtctttctgtggtatctgacttctttttggcaattatgtttacagcataggttgaggtaacagttaaagaaat

SEQ ID NO: 54490 - DNA, 531 bp, Populus trichocarpa
  Intron number 2 from transcript POPTR_2298s00200.1 (locus POPTR_2298s00200) derived from phytozome v7.0 (chr-ID scaf fold_2298; pos 838 to 1368 reverse strand)
gacctcaaaacaaggaggttaattggttggattgggtaggttgcaaaatagggtttgctagtaatcttttaatgatggttgtgttgctattattattattattaaaaaaacaaaaattataaacctgatttgaaaaataaaattaaaaaacacaaaaattttgactaaaggaccaagaaaaaaaaatcaagaaaagaaccaaactgaaattattattattattattattattattattattatcaaaacaacaaatatatgaagtataaaattaaaatccataaaaactttaataaaagagaaaagaaaaaaaataaatataaaaatagaaggatttaattgaaaaaaattatatatatatatataattgaagaattaaattaaaagaaataaaactttaataaaaaaacaagataagtagcttgtatccatatgctaaatgtacagataatcattcttagtgtttatattagagatacataaaacctctatcgttgttaattttgttttagcactaaagaagaagcttaa

SEQ ID NO: 54491 - DNA, 1057 bp, Populus trichocarpa
  Intron number 1 from transcript POPTR_0003s12740.1 (locus POPTR_0003s12740) derived from phytozome v7.0 (chr-ID scaf fold_3; pos 13228227 to 13229283)
aggttttcgagttttccggaaaccgttacactattgtgagtgatttttttcttgacaacatgaatgggtttcgacgttttgtgtttgaattgaaagttttggtttttttattcagtgtgtttagggttaaagctggaaagaaattgggtcttgcgtttggtttgctagcttttttgactttttcttggtgggattttggggttttaagtaattttttgggttaacctctcgccttggatatctagttgctattggtctctttgttgaagggcttttgagtttgtgcttgttattgagtgctggaggttatttttaattttttttttgttgttaaatcaggagggaattgggtttaggtttgttgcttgctcaaaataagtgaggaagatatgaaagtttagagcttttcaatgtcagttgtttcattctcatgtgttgcgaaggctgtacctgtttgtttttggctatctaatgtttgatctgttttctttatcaatgtggtttttattctggacctgtattcgtaagaatttggagtttgcgtgagggcctgaaaaagcggggcgaagtctccctagcttgaacttgaagtggcttgaagaaaatgtactattacaagaaaaggaattgatttttttatggtattcagatttctcatttcttgtcttcgaattacctgttttctttgatttactggttcaaatgcagcagtggttttgagctgctatgttggaatgagactgcagttagtttcattgattgcatccggggttttaatgtttgaaaaatcccttatttagtgtgtcgagtttgttgaggtgaagttaggttagctaattggacaatttgaactttaaattttcaactgtttgtgtgtttaaatttgatgtgggaatgcacgctggttttgagaccttggtggaatcatggttgcatttgctttttttttttttttatattctttaattgttcatgtcatcaacgaattatatttctcagtttctgcttttgcttttctgcaggaagatcctgtacttctagctcctgaaactaaaga

SEQ ID NO: 54492 - DNA, 1016 bp, Populus trichocarpa
  Intron number 1 from transcript POPTR_0019s00500.1 (locus POPTR_0019s00500) derived from phytozome v7.0 (chr-ID scaf fold_19; pos 296107 to 297122)
gcttccccaagcccttgtaccaggtacccctgatgatcatttctttctttctttcaaagtgttttgctttttgattctttggactattttgttatctggggtgatctgatttcagcttgtgatgagtacttttggaaattaagaccatatgattgatcatattgctaggaggattaattaattttttattgattttgactgttaaaattgtgattaaatggttaaacatgcccgtgtctataattagtttctgggattttgaggcacccttgaagctagccactattgatttgttgaattgaaatgattgttacgtcaagaattacatttgaatgatggctgatgagtgaaggatgattctgtaaaagaaaacaatatctaatctactatgatttcttagatgttatgatttgtcttggaagtaaagacaattcattacttaagaattataatcgattattgatctgaacagaatagctcataggaggttctgctctaaataaaaccgaatggagaagatgcactaatgatgcggttgaaagtgctttacctctgacaacgcactttaagcaacaaaagcatgaaaatcatgttgaaagtttgtgaaaataatgatgtcatatatgtggtctgagtagtttgggttttggttgaagcctagccaactctgaaatggtgtgtgagattagccttgtataattgattttgctgggataaatgtcatgcacaatccatatccatatttgcacaagtgaatcccaaggatgcaaagacacgctccaaacaagataactagataaaaaacccgacatgcttgaactgtgctcttttgtcaaatgtcaagatgacaatacttcttttgatagtatatagctatatgagaaacttaaatgacttacgcgcttaactttttcttgctagtattgcctttctacaagtgtgtccttaccatttatgctgtacttgtgtgggcttttaacactgtgactttgacatgtgccttaggctacacctct

SEQ ID NO: 54493 - DNA, 695 bp, Populus trichocarpa
  Intron number 1 from transcript POPTR_0003s10210.1 (locus POPTR_0003s10210) derived from phytozome v7.0 (chr-ID scaf fold_3; pos 11294726 to 11295420 reverse strand)
ccagtacccaccatggagatgttggggttcaagaatctctctcagaactttcgtaccgacagtgaggagctattcaaaagctggcttacaaatggagaggcgagcaaaaaaaatttaatcttgatttcagcatccaagtctcaagctcatcatttgcttttctgcctttgcaggattgactgacatctatacatgccatgagttttctctttttttctcttgtttccaaaatcaaaacacaatcacaagtagttggctgacttttactacatcttccttgacagaaaaataagattagactgacaaaacatcacaatttgtgtagtgaaatgaacttggtaatggtctaatttatttgtcaattagttggtcaactttgattattgccaggctttcgattcatggattgtcattaagtgattgataatctgaagaagtggccataggagttatcaaaccaaaacacattaactcctcatctgctagatttgaacttgtctgtttaaaataaagcatctgccttgcggttttattcagaaagaccagaatttttcaccaagttaaaagctatattccatagcaaaaccttactcatgcggggtttgcagttcaggaaatcactccttttttttatttctttttcccataggatgggttgggtttctttctgactgatggacttttcttttttcaga

SEQ ID NO: 54494 - DNA, 545 bp, Populus trichocarpa
  Intron number 1 from transcript POPTR_0018s03090.2 (locus POPTR_0018s03090) derived from phytozome v7.0 (chr-ID scaf fold_18; pos 2751543 to 2752087)
gcattttgtttctcttctttctctcaggtcattatctcactccatttatttattttgtctatttttgatcgtgtgaaataggaacgaatttgagtctatttttttttttggagatttaattggttaatgcaattgttattgatttttttttatataattttgaaatgtaatttgttcctttttttttaagatttaatgtttcttaattaatgtgattctaattgtaatcgaagatcaaagctagatgatttgattttttttttagttttctatttttgaacaagtaattcctgagaattctgaatctttgttttttagattttatgtacttttgatttatcaattaatcaacttacttattattgaattagatgttttttttatattctatttttgaatttgtgtgttaatttatgagattaggttgataaatgtaatttaggtttgattttgcttgtgttttaagctatttaagtttcctaattttttcgtatttgggttgttttgcaggttaagttcctgaattagaaattatttgagtaaat

SEQ ID NO: 54495 - DNA, 663 bp, Populus trichocarpa
  Intron number 3 from transcript POPTR_0003s10840.1 (locus POPTR_0003s10840) derived from phytozome v7.0 (chr-ID scaf fold_3; pos 11703750 to 11704412 reverse strand)
atccaaagttgaaagaaaggtaggtctggaaattttattttgattgccaatgctatgaaattgctgcgttctatttctggtgtgttactgactacaagctccctgtgggcctagtgcctgaaatcagaatgagggtggtttttgaatgattgttgatttattgcaggaacttgtccaatgttatgtttcttcttaattgttgagctttgtgtcatgtcatttgattcaatatgcttgttaaactagctacttcctgatattgatgtgttagttattaacatgcttgtttatatgagactaactgcttcatatgtgcaacaaaagatgtatcttgtgtttgcagaacactgttggtgtgctgtcttttctacttgatgtaactgaactaaactgttcagcaggtccttgtaagaagaggagcataatttttccagttcaaattagtctgcagtgtcagtgatttttacataaagccttttggttttattttgttttgatgcttgttctcgcagtgcatgatagatccaacttaggtgttctatcaaagtttggttggtcttcctcaccagaatttacatatactctctgcatatgtactcaaacatggtgtaatggattttttttaattattttctgactttagctttgagaagtccccaagtc

SEQ ID NO: 54496 - DNA, 967 bp, Populus trichocarpa
  Intron number 3 from transcript POPTR_0006s11430.1 (locus POPTR_0006s11430) derived from phytozome v7.0 (chr-ID scaf fold_6; pos 8661224 to 8662190)
gttccgaggaagccttgagaatcatctatttcgaagtatgccttcttttgccttatgttcctcttcgattattgcatttgttgttaccaattacagctgttaatggtacataatgctccattatgattgaaaaggaaattgttactgctgtaagtgacaatatggtatggttgaatttttctgcaatgatcaaagattacatctttctgctaaaagatgcattcttttcctgctcttcattcttttgatgttttatagcaataattggaaggataatttcctactgtcataaccacctgtattcaagaccgtgggctgcttttatttgaaatatacactcctagttcttgcacctttcatgtgttccaattcaacaaagatgaacatcgtttttatggttgcctgccaaattacaagagtttcttgttctatgtatagactgacaatagttatttgaaatggcatctactattttgagaatatgccactatatctgtagcttcccaattagggtcgttaactcgatttattgttttacgggaggttctctcatcgaagagttctaaatccactgtattataaactttcatgtgtttcaatttgtttggggaatatgatgcaaattgtttcaaaaattatatttgttgggattttcaattctttaggagaagatactagactctttggaaaacatctaccataaggatgaaaacattttactatacagtgattgatgaaaaaacatagatgatctatcatcttctacaatctgtaattttgcattttgatgatgatttattgctgagtgttggtcccaactggattttctcgttagttctggtgagaacatttatataatcatgctcagcattagaatctgtaacctcaatgtttttgttaacttgagttgctatgaacttttccgaggtatttagaagcaacagttccattatcttgggccacaaga

SEQ ID NO: 54497 - DNA, 913 bp, Populus trichocarpa
  Intron number 1 from transcript POPTR_0013s01240.1 (locus POPTR_0013s01240) derived from phytozome v7.0 (chr-ID scaf fold_13; pos 684032 to 684944 reverse strand)
gctcctcttagtactgaagatcccggtaattcaaggtacatattcacattcgtatccgtatacatatacatacacgtataaatatctgcttggtgtttttgttgttaattaatcatttaatttgattgattttagcaatgtgatgtagaattgagagtgttagctaaaatgagatacgaaataagaggtttttgcagtgtgattttgtggagatttttagtgtgttttattgttagttaatgtcgaaaatgtgtggcaaatagataattgttgatgggttttttagttttgaagtgaaagttagtggatttgtatggaggtaatgtggaatatagctgcattgaaggaaagtttcgaaggagttatttttggttgtatgtgtgttttgggaattgtgatctgttggtagctgttggtgatgcgtgattatcttcttgttagattgaaatgggtgttgaaaatgtttgtcgatgatgggagaatcagatgtttttttctaaatggtagtgcaagagcatggtagaggttgaatcgaactgggttatatggatttgagatctcttattgcctgcaattctcaaatatcggattggtttctgtaggtatttttagtcaaaggcttttatggaattgcttatgaggagtgaaatggttgtgttggaaggtggtttgaagattggggatggttctactttaagctaaacgatttttgaaagaatttttgatagatgtgaatattaacttaaatactctctaggtatttcttctgaattttaaacactgattgtttttactgttgctttcttaatggttgagcatttactgtaaattttaatggtatcctggtaggaacattaagagttgttgtcttgatgcagtaaaggtgcatttacagtaggtttacctccagctt

SEQ ID NO: 54498 - DNA, 312 bp, Populus trichocarpa
  Intron number 1 from transcript POPTR_0006s22440.1 (locus POPTR_0006s22440) derived from phytozome v7.0 (chr-ID scaf fold_6; pos 21454929 to 21455240)
caccccatttcaaaccccttcttgttttcatcgaggtaattatttgattaatctctctcaaatgaagaattcatatatataccatggcatcttttgaagttttttctttttagtttggttgctgggaagtggatgtgagagtgtaagaaaagtttgaaatcaaccaagaaaaaagattgcttagttgttctccatgtttattggctaccaaacaagacgaattaagtaggcttttatgtatatatatatatttcctttttattgttttccttatttaaataagttaatgtgattaattgcagcataggttct

SEQ ID NO: 54499 - DNA, 1052 bp, Populus trichocarpa
  Intron number 2 from transcript POPTR_0006s29310.1 (locus POPTR_0006s29310) derived from phytozome v7.0 (chr-ID scaf fold_6; pos 26725369 to 26726420 reverse strand)
tcgtggaaggattattttataagaggtagtagctctttattgcgtttctgttttcctatatcatatttaaaactagtgtcgaaattggagttgataattgttgggtttgttgtgttttagttgtttttcttctgtaaatgatgtttgggaatcaattctaggtactttaaaatttaaatactgaactcagtaatgaagtcatggatttcgaataagaattccgtaggatcaagatttttcatttgttcagggatgatagtccgaattggctgcgaaaatggctggaaaagctgttgaattggtcactgttcttattttctctctctcttatgatagagtgagttaacattttggtttaagaattaactgacctttgataaaacctagtgtctttctcttcttacagggattctgtgctagtttccgtaactgatctgtagtgagattggaaagcccttttgttttgattatcattgaatattatgtatcacctagttaccgaaacaggatgttatcctggttagagtggagtcgtggtaaattgaagataagttggtgtctcaaaaggtgttggcagtctcgtgtaaaatacatgctgctttctgaatgacatttcaacttcaaaagaagaaaattttcagtggactgctccttttggtttacaatgaaactctgtgttgatttgaaatcaattagcttctgtagtgaaagcgcatttggcttattcatataaggatagccatagccagccctgctaatgtgcttctatgtgaattatatgattatgcaaataaggagtagcacacgagtcctagacactgggagatgctaccatctaaagaatatttttaattaacaatttcatcagctacttcaggtgatgagatataatggattttattgtttaagttttactactgtttttttttgaaatcttctattgattctgctgtgaaattattataacttgccaattaacttttctatcaactaatgctacagatggactttccctttcacagttgtaccaacagctcttggaactgcattcg

SEQ ID NO: 54500 - DNA, 630 bp, Populus trichocarpa
  Intron number 2 from transcript POPTR_0047s00220.1 (locus POPTR_0047s00220) derived from phytozome v7.0 (chr-ID scaf fold_47; pos 33624 to 34253 reverse strand)
atttagagacggaaaaagttgtccaggctctccaggtttgttttcagtatatatattttttcaatcagattttgttgaaaatagcactcaatttattgttgtaaactctaccacaaagcaattcactcaaattatctgaaatataagacttacaaaaagataagattgaaacaaaacaacccacttcactttttatactgtaagtagttaaagaaaacagttagactctacttatgtgtcccaactagaagggattattaacttaatgaagtttgacaatttcaacaataactctaacaacctaacagccgcaagaataggaattaggagaataacaaagagagtagttttccttagcatatttgagctcgaagtcaaagttattgttttttcttcttttgatatctcataaaatgtgaattccctcttagcttcattttctgtgatctctgcgttcgcatttgctagtgtttttgacgtgaaacagtctttaagcttttaattggagctcatgaggcattccttattacaacttcaatccaaattatttttgccattaaattgtatgtgcaaagagacatattactgtttgcaggctgcgaatttagggatcaaattacctcgacctcg

SEQ ID NO: 54501 - DNA, 942 bp, Populus trichocarpa
  Intron number 1 from transcript POPTR_0019s03750.1 (locus POPTR_0019s03750) derived from phytozome v7.0 (chr-ID scaf fold_19; pos 3850605 to 3851546 reverse strand)
agaaagcttcaatctttgctttcattcagtttttggtgagtttttatgagcctatttagagctttttttgggtttgaagttctatactttatgtgaatcatcatgaaatcttgatgatattgtttgttttagctaataaagattgatgcccagattttgtttttgtttcttttagtcaatttcattgtgtttttttatgaggttttggctgattgtgagttggattgctagctcatttattgcccttttgtgttgtgggtttacttcgaatttttttggtcatggtgttttaatctgatttgattcatctttagtcgaattcagtgatgggagttgttttgggatggttggtattggttttgtgtgtgtgtggaaattgtggttttgatgtgttgaacttgatgatcatctctacccgcgatggagtttttgatggtttatgctagtgactgctgcagattttagtttctagggtgtctgtgtggatgttatttggttttgagctaattgtaactgattgaattggattgtgtagtgtgattgatttataagatcgtgtctttgtttttgttgctttttttccccagtttttgttgctaattctttctcaagtgtttatgtaacgattatcatctgaacaattttgctttcttaattccttatgatatttcatgtttccaacacatgttgaattaaattgatgagatgttgagactgactgtttccattccaatcttatctcactgaactaacttgcttttcgatgtcctttagtaatgtatttagctgcatacactttacagctcctggaaagtaggctgtataatttttgaaatgccgtaggctaacagctttggtgaccagaatgaatgtcaccattttggatttggtctttttcttctcacaggtgccagaatcaaatttcattcctggtgtcttcta

SEQ ID NO: 54502 - DNA, 548 bp, Populus trichocarpa
  Intron number 2 from transcript POPTR_0013s05410.1 (locus POPTR_0013s05410) derived from phytozome v7.0 (chr-ID scaf fold_13; pos 3867270 to 3867817)
gacacttatcttcctcaatctaatcgcctcacaaggttagattgatttgtctctgtaacaggacatttcttcaactttctggcctggtgtttgacgctttttttggtggagtttttcttgttttttctcagcaaccaaacagagaattaaaaagtccccaactgagaaatgaggttggaagattgcttcttgttccgtgtttggtggccgagaaagtttaaaataaaattcggatttgaattaatgtgactcatcttgttttggtatcctaattttgattgataggataattctgatttacgaaagaaatatgtcgggttctttcttgtcatccttcttttggttgatgatcaaagagaagaaattaaaaatagttttttttttctttcatataatgagatttatgtttttgtttgttttagatcccaattcccaggcaaagactaaactgtgacttaaaaacctgaacgataaaatctgaaatcttgattctgtggatatggttggatgcaggaattctgaagcagcgatacttaggtccagtgtga

SEQ ID NO: 54503 - DNA, 596 bp, Populus trichocarpa
  Intron number 1 from transcript POPTR_0003s11570.1 (locus POPTR_0003s11570) derived from phytozome v7.0 (chr-ID scaf fold_3; pos 12365908 to 12366503 reverse strand)
ggcctttacagttggtttcttatccatctgtcaaggtgagacagttttttgtttttgtcatgagagtttatttgtgagatttcgtgtggttttgattgttaaagtctggttttttggcacttttttgtttcttatcttgggaaattttgtgcatcttctgttataagaatttgttggtgtggttttgatttgttaaattgatttttgatgagcactctggctttgtagtagattctgtactatgggatctgctgggttttggcattggttgccaatggaaatcacagattttgttgatttatgtgaattttggataattattgatattttgctttcgggtaattattgcggagtttctattaattaaagccatctgtattgaatgtttttccctttgattgattttctgggactatgtttgattttattttggtttattgagcgatcagttttaatttttgattcttcagaatgtgatgctgactgcttttttctttttgttaaattttgaaatgagatttaaggcttctgctgttgcatatttaacttgcatgtccacagttgatagggattcgaacaagtttgccattgccttc

SEQ ID NO: 54504 - DNA, 463 bp, Populus trichocarpa
  Intron number 2 from transcript POPTR_0006s06210.1 (locus POPTR_0006s06210) derived from phytozome v7.0 (chr-ID scaf fold_6; pos 4421220 to 4421682)
ccaagtaatttaattccctcaatctttcagttatttcgctggagatatttcttcattttatgataatttatagctggcaagtggattgtagtttatagttttaatttacagctgtcattttaattttatggattaatacatcaatttggtcactacagtataataaagattgaatcttttgattaataatgtcagagcttttaaggactttttttattctttctcctcttccactattgattatgcatttgtaggttcttcttgaaaatgattctttccgaccccacttatcagcacacaatgttgattactgttaaagctaaaatcatttgtttcttgagctggaaatgtgattggatgtcggaaagaaagtgaatccaatgtttgtgttaataagtctagtggaacttttttaatctttttctgttgtgtgtgtgattgtagggaggtggaggctggtcta

SEQ ID NO: 54505 - DNA, 556 bp, Populus trichocarpa
  Intron number 2 from transcript POPTR_0006s15450.1 (locus POPTR_0006s15450) derived from phytozome v7.0 (chr-ID scaf fold_6; pos 12836837 to 12837392 reverse strand)
ggctcctgtaagtattgccttttactgtaagaaaagtttatattaaattttctcacttagatgtcaatgataagtacatttatagtggcagctgaaattatgctctgaataatcatttaggttttaaacttttgtgaaattattgggacaaacatgtttttctaggatcaaacatggtgtttgtttaaagaatttccagtcttctattcaataatagcattattgaattagatgtctaagatttccttagtttccattcttttgtgtgcatggtagttataagagcacaaaggaggcagagaggtagtactcaatatcctccctcttttagagttctaggcttcaaagttgacttaggggatgaaattatgcatatcaacagttctgccagatacttgtatatacatataagataaatccatattcaccacctgcaattctagtgcctgcattataaattcttgggcatataagagggatacgtgcaaatcttttggcatgtaaatttggaaatgtatttcatctttctacactgtttttcctgaatgttgaacag

SEQ ID NO: 54506 - DNA, 948 bp, Populus trichocarpa
  Intron number 1 from transcript POPTR_0013s11050.1 (locus POPTR_0013s11050) derived from phytozome v7.0 (chr-ID scaf fold_13; pos 11710959 to 11711906 reverse strand)
attggccggtgcttttggcggtcttcttctcttcagtcagtctctctctttccctgtcattcatctgaattttcttatcctcttgtttcgttaatgaatataatggcttgtggttctgggctttcttcatttctcttttctgcggttatttgatactgccaccctaattattttgtattgagtcagggttttgtagctaatttacaagtttcgatgtttactttggccttattcttcactgttgttattttagtagttaacccggatttattcgtttgattttacattgaaatttccttttttttcaaggatttgtgagtgacaaatgttatgttttctgaatagaacaatgggggttaaatttattaataatttcctcattgttaaatctgtgggacctatcgattaagaatagcaataaacaaacttgcatttatctaacagagttcgtaaaatataaaaagtgaaagcttcccgtagttaacccggatttattcttttgattttacattgaaatttcctttttttttaggatttgtgagtgacaaaatgttatgttttctgaagagaacaatgggggttaaatttattaataatttcctcattggtaaatctgtgggcctatcgattaagaattgcaataagcaaacttgcatttatctaacagagttcgtaaaatgtaaaaagtgaaagcttcctgtagtactgcgtcttttaagtttcgaggatctgaatggtttagatagcttatttattaggcacctggcattttgtgctcggtgtgaaaacttggtctaatgtatggatagttctactcttgactggttacattatatttttgcccttcagtgagaatcttaaattcatcaatgttttcatatatatatatatttatttatttattttcaaatagggaccccagtgactcgctgggcatctatagctttc

SEQ ID NO: 54507 - DNA, 937 bp, Populus trichocarpa
  Intron number 2 from transcript POPTR_0006s26280.1 (locus POPTR_0006s26280) derived from phytozome v7.0 (chr-ID scaf fold_6; pos 24527532 to 24528468)
ttaaaccaacttgaggtaaattttctttcaaactgtttcgtggtatacagatttgtttataggcataaaaactggagaggaatagaacgaggccaatttaatgtgttaaatttgtgttttgtgtgtgctatgagccattttgtgatgctctaattccttttgttgctgttctttcttgttctttatcttttgtcatgtggcattatatatttggttacctctagacttcttttccttttttcctctctcttctgttctaacttctaatgtcagttcttggttgtaatttttgcaagaattatttgatttgttatgattttagattgttcacaagtttagcttgctttcttcactatttcataaatgtgagttgataaaataccagggtgagtgaaatgttctgtcttgtatgttagagtgaaatgcaaggagaacttttctggtggaaattacacgatttgctttatgtgcaaagttagtgggattatcttatatgcacttgctttactcggcttacatttctgaattctgagtgaaggatttcaaaatgtctagtctgcatgttcattaacttgaggggttgtcccttgttttggtgaaagttagatgcacatttacatatacagaatctcttgtaaattggtctaaattcgttgaattttgcataattattttggtgtgctgttttgattattgagagttaagtggtgaactacaaggcagcttttggcccatgctatataacctgctgataatgtgattttttgacaattccagtatgctgaaaaagaacatagtagaaattgcattttggatcagtattttggttttctaaatttgattcctacctcatttcatctttccactttttgggtcatcctaatatgttggttctcatgcagtttgacactcttgagtcttctggaaaccttccaga

SEQ ID NO: 54508 - DNA, 927 bp, Populus trichocarpa
  Intron number 3 from transcript POPTR_0013s05490.1 (locus POPTR_0013s05490) derived from phytozome v7.0 (chr-ID scaf fold_13; pos 3923534 to 3924460 reverse strand)
ctcttgcctcttgcaagatttcttacacaaccaaagtatgcttcttgtccttttctatgatattgaaataaagctccttgttttccttagttgaacgttctactactataccattctgtattgcttgcattctgtggggatttggatgtttctcgtgaaaactctgccattacatcatatgtgatacgttttctttgcatcgtaggagatggcttaagttattttagattgtgcatattagattcagtgactaatgagtctattggctggaagttgcttaattccaatcttggtaatgttatcattggcttgttacttgtcttttctctatgtattgttgcttgtaacattttctagaaatatacaagacaagcactggcaccacatattgttatatatatcagttgtgaattctatacatgatgtactgagaaatagctgcaagaggtttgcagatgttattcttcatttgtgatagtttgtaaacatgctatacccaagtatcagaacattttttgaattactccggacaaacaacggaatccatttatgattttttgcttaacatatagatggttgttactcaaacttaacgtgagcgggtttattccaagtatctgagctgtggaagaaattatgggtattagttaaataccacgtaatattctgcaatgatcaaccgagtgttgtgtaacttaaggatttcaaccctttgtgttattttgtttaacatatagattcaattgctgaaatcaaatcctcttaccagccttcactctactgtattctttcgcactatatttgcatatcatgtctggtatctgaccatgctctcggtgtttagaatcttgtctaattcaatcaaattacaatgtgtcatgtttttttgcaggggacaagcacaaggtggcagaggtggtggtcgtg

SEQ ID NO: 54509 - DNA, 300 bp, Populus trichocarpa
  Intron number 1 from transcript POPTR_0013s05490.1 (locus POPTR_0013s05490) derived from phytozome v7.0 (chr-ID scaf fold_13; pos 3924763 to 3925062 reverse strand)
aaggccctccttctgaagtaataggtgtgctcttttttattctattttccctctttagctagcttgttttctttcctgtatatgctttctagtttgtttcagctaagaagctgcataaatgtgttttaaagttttgatctttgaaagctaatgattgagatttacctgcaactgtgaagaatggtagctggtgggtgaattgaaaattaaaactttttatagcacttgatcaaggagggactggtgttcgttgatttattgacgggttttgtttttttgtagaggtttcatcgtttcttc

SEQ ID NO: 54510 - DNA, 454 bp, Populus trichocarpa
  Intron number 1 from transcript POPTR_0018s14090.1 (locus POPTR_0018s14090) derived from phytozome v7.0 (chr-ID scaf fold_18; pos 14345621 to 14346074 reverse strand)
ggaaatctattcgttcagggtaaatttcagaggcaatcagaatagaatcaaaagagattttaagagattacgaatagagtaaggccttgaatgccattcagccagtaggagttcagtagggcttcttcttttttttcttttttcagtgtatggtatatttggttgattcgaaaaaaagtggtttttcaaaattctgatcctcttttggatgatttgttctactttgttttatcccgtttatgtatttggatcaaagttcttaggtaactatttatattactgtattggaacagaaaagatgtaaagaaactcactagagacagatttatgtctatttcttcaatcaaaaatgttttttccttccatatttgtcccttttatccattaacaataaccaaacacgactttgtggatgattttccctacaatgctttcgatttatccaggtcagctg

SEQ ID NO: 54511 - DNA, 1008 bp, Populus trichocarpa
  Intron number 2 from transcript POPTR_0013s11780.1 (locus POPTR_0013s11780) derived from phytozome v7.0 (chr-ID scaf fold_13; pos 12429462 to 12430469 reverse strand)
catttgattctgcagcacgctcaagctgtgttactgtaagaaccattttgtgtctcattcctaaattgattcctggatgcacggatgcacataccctttatgctattttcaactgccttgtgagccaaatcagcttgtaaattgcatatgagactaaaaacatgattaggaatattgtgttttgacttgttaagaacaagagtgtgagagcaaactaatcgctggacagtacatgtaacatcttgatatttgaatgacattcctgctctgggagacattggttgagtatatctcattccagtagctcgttggccccagtagcttaaagtttagtatttcaaaattaaagtttgaaagaggaacggattgagatactttagtatgtatatctaagaaccaagaaccatccataaatctgtttcagccaaagctgcccaatagttcatagtgccatgataactggtggtctcctacaactactagacactgaagttttagattagctgtccggtggaatcaaagcaaggccatgaaaataaacatgacagggaccgaaattttttatattcttggtataaagacacgcaggcatgtcttttagaacgtccatacctaatcatatagcacgaaacatttagaacgtccatacctaatcatacaggttacccagattaagccctagaaactgtatgtgcattttttgcgtggccaatttttttggagaaattaattccttccagatatttgcaatgtatagacatttcaaatcacttgtgtttgttaaatagttctaatttgtttctgagaattctattttcatctgtcctcttacatgggttgccattttgttcttcacgtgcaattgattggaggcttggttttgaaatggaaaggttatttcctgaaggcagtgtaattgtcttttttaatgcattgtatatttttcggccaataaattggaaaattctaacttctgattgcagcctgatcttgttacagctgctccta

SEQ ID NO: 54512 - DNA, 228 bp, Populus trichocarpa
  Intron number 1 from transcript POPTR_0006s29340.1 (locus POPTR_0006s29340) derived from phytozome v7.0 (chr-ID scaf fold_6; pos 26740672 to 26740899)
ggctgatctctgcaccattactctcctttcttctggtacttgtcttaaagaaaaacccaattgcctccttttaaattacttgatcagcatgtctctccacttgcactttttttttctggtttacaattatgggttagtttctgaatgacaaaaagtgaagaacttgataagcttttcggagaaatgggtttgatttattttaacttaattaacatggcagaggttcaa

SEQ ID NO: 54513 - DNA, 949 bp, Populus trichocarpa
  Intron number 2 from transcript POPTR_0006s29340.1 (locus POPTR_0006s29340) derived from phytozome v7.0 (chr-ID scaf fold_6; pos 26741420 to 26742368)
caataacaaaccccggtatgcttcatctccaatttagcatgcagtgattttagttattgctaattaacttggtaattatgaatgtgactttgcgttgtttatgatcaagttttaatcctgtttttgttcatgttagtgcaattgctatttcactttagatgtgtcacaaaagttcttgaacgtttgattttggaattctgttgtggaaattatgaaataagctactataggttacagggcagaagtttctgcttgaacctcaaaaggtaatttcccaagtacctatgtcttctaattcgaagtgaatgtgttggattccattttgtctgatgtttcccctggagatacctggtaatattggaaccaacacatttattaccatttgcagctgtgtttgctgattttggaatgtaatttgtaatgtttcagctgcattttcataaccacatgtcttcattgcagctctccctattaagttcaattctatagcacactagcctagcatgtaatgatttgatttaattttcattttagtaggacccatagatgcttccatattaacttctatgttttccaaaattacgagattgaaataaatggcaatgcaattgcatcacctgggttactgccataatggaaactgcatataaataaaggtcggattatattcaaattgttgtatcaagtagcttgaaatgacatgaatttacagtggagaccatgaaaattaggttagtacatttgatggcatagctgctcaagttgctcgagctatttatcctggtcatagtaaatgaattgtggttatgctttgttgttcttggacctatgaaagcatgatagtagagctgcttttgagtaaggtgacaggctatatttccagctgcgctcttacaatctcctttgactctcagggaccaagaaacaaaggtggcggtcaaagtctctg

SEQ ID NO: 54514 - DNA, 959 bp, Populus trichocarpa
  Intron number 1 from transcript POPTR_0013s02600.2 (locus POPTR_0013s02600) derived from phytozome v7.0 (chr-ID scaf fold_13; pos 1539494 to 1540452 reverse strand)
gttggtatgttttttattcagccatgaaaattaggataaaaataattttgcatggaattcaaagcatattatctcaaaccatgagattgacaggtaaaaattgagtgaaagtgcctcttatatcaagtctgtctgaatgaggacaatgttgtatgatgcaagttgttacttgtgctggtatgtccagtataattgctgcataattgcatttattatctctaaaatattcccctttccctaaagctttcaaccttttcttttccccctgttccaataatgttcatgtactttgaaaggtcaatttgaatgttatttcatgatgggggcatttgctttctttacacggaagaagtaaaagaaggaaaggctaatgttggagaatatatcctatttataagggaaaatagattaatcatcaatgcccctataatattaactactttagttagaacattgtgttatagaatatttacttttaatggtattgtcattatcaatgaagtaagtaatgcatgccattgattctgttttagaaggtaatctatctaaaaaaaattgtaagctttgtaccttaaaaaaataaaatgtgttagatttagctatatatattcctaaaatgttgtaagagtgacattgtttggtatgagttactgtttttcttaccttgcgttttacaccataattctttcttctgtgagaatgatactatctgtttcattgcttcaaaactcacaattccaaaccttaccttaattttgcttccttcagaatggacatgaatcattctagagaattggaactctttttttttttttttttatcatcagaattggaatttatttaaaatatattctattaagagacctagaaagttgtaataaagtggtatcaatatgagatcatcaatctcaattgttatgattacaaggtttttttttctttgcaggagaagaggacca

SEQ ID NO: 54515 - DNA, 739 bp, Populus trichocarpa
  Intron number 2 from transcript POPTR_0278s00210.1 (locus POPTR_0278s00210) derived from phytozome v7.0 (chr-ID scaf fold_278; pos 31014 to 31752 reverse strand)
ttctattgtttctccagattcttaatttgtttcaggtgaagttcggtcggaaacttaaggttagcggttttaacatagcatagacagctgtgccatgtaatctctgtatgatgcaaagatgaggttggagatctttatccatgaagaattgaatttcttttatctgttgatagtattgatgctgggcgcgttggggtgagatatgagggacgaatgattacatcatatatgaatttggctaaaatttgtaatcatggagagtgatactgcattacctatttattgtcatgaattcccatttctcatgattggattgaggtccttttcgtttccttgatctaattgatatctttttaatcatttggtgagcttaattatagttcctctttagcttgatgccttccatgctcggttgaattgctgcctctgaattttgaaattcgaaggcatctgtgaagtatgctccaagttgctactaccatttcagacgcctgctcattacaagccttttatttaccctgttaaataatattcattcattcatctctttgattgatatattcattttcaaccaattgttctaagaacttgtaataattgtatattgaataatgaatgagtttgtcgtaagtaatgatttaaatacttacctcatttcctttcttatctcaaattctttgtggcgctcatgaattattcaaaagaccaaaattcaccagcctgctaccgaaaaacctat

SEQ ID NO: 54516 - DNA, 489 bp, Populus trichocarpa
  Intron number 2 from transcript POPTR_0018s09260.1 (locus POPTR_0018s09260) derived from phytozome v7.0 (chr-ID scaf fold_18; pos 10112140 to 10112628)
tgcagtcgtcgaggtgtttcattaattattcaagggtataaatattttttgttgaacttctccatggtttggttactgaaaaaaaagttagatttgtcaaggaaataaaaccaaaaccaagcttgtttaatctagttttcaatttgaaattccacaatgagcctgtgtaaatttctttttttttctctttgagctgatcatacatttatccataaatgaactgaatggctgattgtttttttaattaattcattgttgcttttttttttctcctgtttttcttcaataatttgtcaaaacagtttcttaatctgaactatctgcgtcatgcacgtgtccatgtgggttttctaatgcacaaggttcaaaagtaagtaagatacaaaatttgatagtacaaatatgctattgttatttgcagctatttgatagttgattccttcaatatcattttctatcacaaatttactctgagaggggtgcaggttg

SEQ ID NO: 54517 - DNA, 994 bp, Populus trichocarpa
  Intron number 1 from transcript POPTR_0006s21010.1 (locus POPTR_0006s21010) derived from phytozome v7.0 (chr-ID scaf fold_6; pos 20126092 to 20127085)
ccaaacgcgccatcggcgtcgagatcaacaagcaggtatattaatctccttgtatccttaactgtatcttagggtttttggtaagagttttctagtgcactttatgtgtttggtgatttgtttgtgtgaaaatgataggcttttacttataggttcgatatgtatagacagtttgcttcgtggttgacatgggtttcttttttatatctaaaagatgctgtgagggtatctatttgtgattttgtttttgttattgatgaatttgaggttgtcttataaggtttttttttttactttgtttgaagatttgagcttattttcataaccagtaattttgaagctgaagtaactagctgggttggttttacttttttggtttaattactgcttagacatctttgcttgtgcttagcttttgaactgtttaatttagccattttgtatgagattgaggtaaccaacctgccacgcccaccatacgtggactatgctctttcgcttccctgtccgtgaaggtggatcaaagaagggtccaaaccgagctcacacctccttcattgtcgttggtcctttctttcgtcgtggtcctttttttattaaatcttttcttttgatttgtttctgctgaatattcaaatgagcccctgtatcattggttgcatgacatgggtgatctctttttagcttgaactgtagacggccttatttaagtattcatggaaaacgagcgtgaagattatatctttgtttaataggtttttactgaatttccatctgacattattacacaccattgctcagcgtggcctcatattttgtgctttgcatatcaccgtaacggattgacctgcctgtttgtttctgagatggttgcttgtgttgttttagtgattgatgctttttactgtttactataatttgagcaatggaaggcttccatgttaatccctttcatttttacaggtgggtaacagaatcattaggaagaggatcc

SEQ ID NO: 54518 - DNA, 370 bp, Populus trichocarpa
  Intron number 3 from transcript POPTR_0014s10790.1 (locus POPTR_0014s10790) derived from phytozome v7.0 (chr-ID scaf fold_14; pos 8070917 to 8071286 reverse strand)
ccgtttccttggattgaaggttggcctaatccaacgtatgtcacatacttttacatgtgtttactacatgttccatttcctttactacacaagcacgtgcacttatgtgtgtgtatatgtctagattatgcacttttcattcttacatgaatgaatgggcatggctcaggtcttgattttttaactgttttcaattaatcctgcctgcctatacgaggaggtgtactgtatttgcatctgctgttctcttcttgtacttggaagcttgagtcttcttcctttttgtagtctctgggtattgcttcttcattttagcttgtgaatttgattgtcacgataacataagtgtttgttttcattggcagagaat

SEQ ID NO: 54519 - DNA, 933 bp, Populus trichocarpa
  Intron number 1 from transcript POPTR_0014s13370.1 (locus POPTR_0014s13370) derived from phytozome v7.0 (chr-ID scaf fold_14; pos 9839282 to 9840214)
tcggtggactgatttgcaggtcttctcggtggtgggtctgccgctgtgactagctgagacgccgcagatggcaggggcgccgctgctggaaacccgattacagtggatgatgaacagtgatttgaacagtgaatagtgaacagtagattcttgtaatcagaacagtagggttttgatcatggaatttttttttttacagtagggtttcacataaacgcatagatcgtttaattgtaagaacaattaaaagccgtgctctgataccaaatttgatgcgggacaacaagcaaaagaattaaagccgggaaaagaaagaagcctagaggaagaagaggagaagaagaaagccaaagaagagaagagaggagagtagggagatgcaaaatctgcaaattttcattaatcatcaataatttccttacatttagaaaagtagggtatttatactaaaaccctaactagaataagcaattgggcttatggcccattaaataaaatatccaacaataattaaatccaacccaacaaataaaaccaaattcataaaccttaactaaaagtccatatgaattaagcccaaaaacataagttaaagcccaatttctcaatggtttgggctatcctccatcgtctataattatacgcacgcgtaaccaatgtttccggttcgatgtccccatcagcatttttgtccgtgatactggtgttgatctaattgatatagtattatttctgttaatgccttgattggaccggaaatgcttgtaaaaacaagaccgtatattttttaagaattgtccagcaaattttctggactttatagacaagatgtaaatgacgattatatgttttgtagacaagttgttggtggagatttggcttcaaacatgttctccaggcgcagtcacaacaaatccacaggcactcttgtga

SEQ ID NO: 54520 - DNA, 485 bp, Populus trichocarpa
  Intron number 2 from transcript POPTR_0014s17170.1 (locus POPTR_0014s17170) derived from phytozome v7.0 (chr-ID scaf fold_14; pos 13333583 to 13334067)
ttacaggtaagaacaggcaggctatatgattaattttgtttttttcttgtattatatgtgtaaaatatttattaattaacatagtccaatgtgcactagttcatgaaccatttgtcaatacaacatgattggtgttgctgtccatatgccaggagcatgctatatttttaacctaaactttatttgatcaggtcagaatactgatcatattataactctaaaatgtgacaaggcgactttttctttttcacaataaggtgattttgaagtcaccataattaagctgacttgttaagtaactgatcttacgaagaagaaaaaatgctttatacattatttatttatttttgatgtttgaattcggtaaatatacattaattatcattattattatatgcaaatgacagatcaaacaagcaattatatatatatatggattaattatcattattaaatgcaactgacaggtcaaacaagcaatatca

SEQ ID NO: 54521 - DNA, 943 bp, Populus trichocarpa
  Intron number 3 from transcript POPTR_1726s00200.1 (locus POPTR_1726s00200) derived from phytozome v7.0 (chr-ID scaf fold_1726; pos 1507 to 2449)
cctggaagctctttactaacagagaaaattataaggtatcgatcaaataggaacatcttttttattgtttttcttgcttactgcaaacacatgatatcttataactttatgttttacggactcccctttctgaaagtaagtggaaaactttatgcgtctttgcaatctggcaaatatctaaaatgcttgcttgattctcatggccaaggaaaatccttaaagctgcattacgacccgctgttaattaacatgctctacaggattgatgcgagttaaccttttgttttgtctatcttgcattcactttcatggccaaggaacattcttaaagctgcgttgctgcccacgtttaatgtcctctactagattaatgcgaaaagggcttttgttttctctatcttgcattcatgggcaagagatgatgttttcctttcaagtgctatgaaacctagcatccctcttctgtatgtactctctctctatatatatatatatagtttactctagggggttttaacattcattgagaaagggaatgttggagtttgaagtgattcatcctgaaaactgaaactttactgtttgatatctaaaagattttcatcatctttacttggtgtagtactctgttgaaattcatttcctttttttttttattcatctgccaatcatgtttctgccaaaatgttatcaagtgctcctgagtctcgattaccccccattcttccaataacgacatggaaatttgcatcatataaaacttggtagtgaattctagattggtactgattattctaaatttgagaagagatatatccgtgcgtgagaaatcagaattataccatgtaaggatagacggaatttgaaatgcatatagatgttattttaaagtgttctttcttctgcagggttctgtttgttttctcctggggctctttttcat

SEQ ID NO: 54522 - DNA, 810 bp, Populus trichocarpa
  Intron number 4 from transcript POPTR_0019s08500.1 (locus POPTR_0019s08500) derived from phytozome v7.0 (chr-ID scaf fold_19; pos 10020388 to 10021197 reverse strand)
acagggagcccccacagcgtttcattagacgcagggtacccttttcttatctctttgcttaattaattatcattatcattattaattcgcaatgctgttacaaatgtatatttaatttgtttttttatggatttgatttgattttctttttcttttttaaatgtttagaaattgatggtttacttgttgatgatggtagatcattttgtgccttgtaattttaatggttgtaatcccttgtgaggtctgtatcttgttcgtcgaaacagatcctttttcaatatgttattgttctgcttgtcatttacaatagtgcattgccaggtattggatgtccatggtgtagaatatccatttagatgcatttacaaacattcttaatttacaagatgatgttctttgcttgttagttgaagtttgtattcttgattctaggcttttgttttttgatttgtaagcattgaatgtggggaactgagtcatgaaattaaagtcattttctccattttattttcctttgtgtagtatgttagcttttctcgtgtgaatgtggctgtttgtgtatctgtatttacaactttcttgtggctgccgtcttgatcctaagccaatccgagcaaatgatactgttaatttagccctgtttgggattgcgccccaaacatagggcggccaaatttcaatatttttttgtttaaaattaatttttttcatgttctaaaatgaaaaaaaaatatagatattttattttgagcgaaaaacattttgtgcaatcaaactccttatttcttgtgttttatatatcgcagg

SEQ ID NO: 54523 - DNA, 349 bp, Populus trichocarpa
  Intron number 1 from transcript POPTR_0013s07570.1 (locus POPTR_0013s07570) derived from phytozome v7.0 (chr-ID scaf fold_13; pos 6397694 to 6398042)
ggctacttcttttgctcctgtttcagtctcatcaggtatataatttcttcttctttttagcttataaagggtttcttgattgtttatttatttcctgagaaaacaaagcaagatttttctactttcgttagaaacaattctaacgttaatgattgatagtttttttcttcttttttgagaaaagataataatcttgtatggagtattattatcttgtaatgttttgaaaatcttgatcatgagaattgaagtgctgttatagtataagagaagaaaatggtgggagtttgtgttttatttgggtttgggtgtaggtggaggatcccaacttaagccacgtgaactttgg

SEQ ID NO: 54524 - DNA, 380 bp, Populus trichocarpa
  Intron number 1 from transcript POPTR_0018s02520.1 (locus POPTR_0018s02520) derived from phytozome v7.0 (chr-ID scaf fold_18; pos 2310106 to 2310485)
gccgagaaaatttacagagacaaaacgcaccagaggtaagtgacccaattgtcatacttagccgctgacttttacattaaagtttactttcttgaattattcaaaaaacaggcctttgtcaactaaaaagcgttgacttggttatcctataaatgaattgatttctttctttttatgtctgatcttgactggagggttttttttttttttttttgtggttgtgatcacacatctattgtttccaatgtttatttttagaccccaattcaaaacttttaaagagtggacctttcacttttgttatttcggaagaaatggcttttcttcatgtgctgattcttgttatcttgtctttgaatagatataaaaataacaaggca

SEQ ID NO: 54525 - DNA, 809 bp, Populus trichocarpa
  Intron number 2 from transcript POPTR_0018s02520.1 (locus POPTR_0018s02520) derived from phytozome v7.0 (chr-ID scaf fold_18; pos 2310664 to 2311472)
tcattgttcaggagacagaggcagttcaagctaaggtgggtgtggtgtatgtttaattttggtttcttgttttcttagaatgtttgttttgttgtgtgatgttttgcttatttatttatttcagtttcttgtattaaaaaaagagagtcaatttagtttctttgttgtcaaggtcagtgtttggtgccttgaaggtctaattgaggaatacattgaatttgtttctataagcaactggtcatagattacaacattttagattctgataatagaacaaccatactgtggttgactgatagttgagcatataatataaattatggctgacaatgtcaaggccaagatacatgagatgatgctcattagggtcaatacagtttctcggtgccttgaagttgtcttaagaagagactgcaaaatgttaggttctgacaatggaaaaatagacggcggctgactaattatcgagcatgtaattaaagtcatggttgacaatgtcaaggccaagatatatgagataatgtttccttagctcgggttgggtaatggacacctgctgaagatgcaaggattagagggaatcaaaaccatggcaatgaaatattgggttcatgtgcatatttcagtttggtttagccttgctgtctgtgtcagtttgtgtttgagatgcaccaactctaacatcttgaaattattcatcccaaatgatgcacttaaatagaaccgtgggaattgatgcacttaataaaactgtgccaatagattacttcagaatggtttggttctggttatgttacaggctgggaggt

SEQ ID NO: 54526 - DNA, 735 bp, Populus trichocarpa
  Intron number 1 from transcript POPTR_0018s13430.1 (locus POPTR_0018s13430) derived from phytozome v7.0 (chr-ID scaf fold_18; pos 13757895 to 13758629)
tgctgtcaagaaattgggaagcaaggacttagacagtggcaggtgattgtattttattgttgatcttgcaatttgggagtcttcagttagccaaatatgcatgattagtatcagaatgagaggtttcgttggatgagcctcctgtcttgatttaatatttattttctggtggctgctgaacttgtacatttcattctagatatttagctgtattgtctgcaattaaaaaaggataataatttgttgagatgtggcatgaattcaaatctttattgtataaggacttcaattttggcatgaattcaaatctttattgtataaggacttcaattttaactcacacagtacaatgaaagacttgtgattgttttgtctagaaaaatattaggattatgactaagatattttctcaatttattaggcctagttttttgttttttttaaggatgatctggtatgctcttatgttctagaagagagctagcatgagaaactcgtagtgtgccatgaggattagatgtatctgagattcgggttcgatagttcttcaaaacttgtactggttccgattatagtaaaatttctcttcaattatgaatataggcatagacgaaccatgtaaaatctttgtgatattctctatatttttatgtttgatccttcattgtgtacttcctttatatgtcactggtacagacagaggttggtttcttggcaaagctttctcatcccaac

SEQ ID NO: 54527 - DNA, 599 bp, Populus trichocarpa
  Intron number 1 from transcript POPTR_0022s00490.1 (locus POPTR_0022s00490) derived from phytozome v7.0 (chr-ID scaf fold_22; pos 184423 to 185021)
acaattgtaaagccatgaagggatggttgcaaagtcaaaccttcttctaacatgatgaatgtaaagccatttatgcatacttcctgtttctgacaatagctgagaaaatttctgaagcacagcctgccaatgccatgaaacttcttgaagtgcaaggcttaatactggcatcacaacataggtgtttatgaggaaaaagcaggctcctgtgttaaccctgacactatctgcttttattattttgtttttcccgtttttctctccatgggagtggagagggggatagagaacagtgcttcactagagagaggactgcatgacatgcatggataagcctttttttttgcgggagaataattttgttttcaaccatggttatactttccgcttataaaatggttgtgcaatatcatatctaatgtataaacctttatgcttgtcctaaataactacagctgtatgatgaaaagcacagaaaagtagtataggtcatacatggattaactatattaaagtttaccaaggctcaaatccttgtaatgtgtgtaaatcttcattaattcttattgtttttttccctcccttttttgagtgcagat

SEQ ID NO: 54528 - DNA, 513 bp, Populus trichocarpa
  Intron number 3 from transcript POPTR_0018s04250.1 (locus POPTR_0018s04250) derived from phytozome v7.0 (chr-ID scaf fold_18; pos 3583114 to 3583626)
aagaaatagcgtgggctaatcatctatctgtacaggtgaatttcaatcctgaaatttaaactgtttccttactttattcttctaaagttactatgtatttcagttgccactaccctcacatggcacaactttgactggaaaattgtggagaaaccaaaaacttgattaaaaaccaaacccttttctgttccatgtcaataagaaggcagtcataggaggtgtatcagcatacagaaattagtttgttcaagacaaatttgatgttgatacctcttctgttcagcatcttcaatagttgtcttctttccacttttgtctgtcctagagaaaacaaaaggcacaggttgttgcacttttccggtgtaccccatcatgcaacatttatccccttcctggtgttcattcatctttaatgtttgtgctgtggtagttttttgtgctctagatatggttctttgagaaaaaccattttaagagcttatggtgttaaggctctcattgtctgctgcaggc

SEQ ID NO: 54529 - DNA, 984 bp, Populus trichocarpa
  Intron number 1 from transcript POPTR_0014s04760.1 (locus POPTR_0014s04760) derived from phytozome v7.0 (chr-ID scaf fold_14; pos 3669711 to 3670694)
actctggccagggaagcacacctttcaacacacaggtgcagctcttcactattgtttcctctttctataacatggcttgttgtgcttaacagatttgttcataaagatgagacaaattaagatggttagaagtattaatagtgattgtcttttccacactggttatagcatggaacgtagggatcaatttttttttttttttttgtgcattctctcgtaacatctggaaatcaatcacccaaggttgcaattaaaggtgagaaaaaaaccgaaaaactgattaaatcgagaaaaccgaaaaaaaaaaaaccgaaaaaaccgaaccgtaaaaaaaaccgattaaaccggttaaaattttgaaaaaaccagccggtttggttttggttttataagcaaaaaaccaaaaaaaccaaaccgagaaaaaccgggaaaaaaacagagccaaactggtttgaactgatttttgtcctaaaaaaccgaaccgaaaccagtcagtttgaaccggtttcagtttttttaaaatttttttataaaaaccgaaccgaaccaaaaatgatcacccctgattataacttagctgcattaacccttttacttctcccattaataattgattgattcactcattaacccttttacttctctcagtacttctcccatcaacctaataattgttggagcactatcactcaataacagaggaaggatttaattaacactcacaattgattctgccaacacattttggtgaaatacaaaacactaattaataatactatcacaccttaatttctttatcagaattcatacaatatattaacactaacacaaacttcatagtatttctaacattcatgtttatttttcaattatttacttaatatacttaattctaataaacaagtttaataactaacaataatttcttttgccaataaaaaactttcagctgcaaaacaccggtcagggaagcacatctttcag

SEQ ID NO: 54530 - DNA, 536 bp, Populus trichocarpa
  Intron number 1 from transcript POPTR_0018s02160.1 (locus POPTR_0018s02160) derived from phytozome v7.0 (chr-ID scaf fold_18; pos 1920106 to 1920641)
gatcaggtttgtgttcttttgaaatttgggtctgttttagttttttgatttatgtagtttacttttagaattagttgaagttgcactcactttgagagttggtcaaagtctttagcttggttaactgaatttgagagtatcatgattgttaaaatcttgattattgaacattgtcacgattcaagcttgaatttggatataaattgattgatagtgtgaggggctagtgcattttgtcgtgatgtaaattgattgatggcgttatagtagaagttgctggttgtatagagactatggcttgaagcagatggcttcctgctggcttctttttgggaatgataagtcaacccagccaaaaaaaaaatccgaatgatgttcccctcatgcttcaatggggaaaattgggagaaattggtcgtgtttgaagattttccttgttttcggcgttattattggttaaatttccattatttgctcatctcaaatcttacacaatcacagggctatatagttctcaacagaccttgggcatttgt

SEQ ID NO: 54531 - DNA, 800 bp, Populus trichocarpa
  Intron number 1 from transcript POPTR_0013s14160.1 (locus POPTR_0013s14160) derived from phytozome v7.0 (chr-ID scaf fold_13; pos 14459836 to 14460635)
ctgctacgggagagcctattaggtcgaagaacgaggttcaggtaaatttttgctgcttttgctgctattttatgtgtgaatcagttttttcttattgtacattgtttaatgtccaaggcattggaattattagttcttgctttgtcattgatcatgtgagtacgatctatggagttaaatatagaaatgcaaggtgtttttatacacattctttctggcaagtaaatgttagggcaatttattgtgttacatggcatagtctagcggtgtattgtttcttcactttccagaagatgaaggtttagcagcttaacatgaatactgtttgaaaacaaattttttgttgtagttactggtgctccagcccaattaacttaaggtttatgtaagaatacaattagaggactgtgaaaaaaaaaataacaataaaaactaaaaagtcttcgttccttctctatttgatatagtcactgatttttatggttcttcattaacaggttaattgctttgataatgataatgcaatttactattaatgttagtttaagaataggaatttttgacttggctcctctgtgtgtgactttctatggacccagaataaggctatactgttatacccattgatggcaagtatgcagagcatgacttcttctttgtattcctgagttaggttgcagatcaaaatttgatccagtggctcactattcaggcgtttcaatgttttgtttttatgtcatattgctaatcaaataaacttgtgccaaatctgcagtttctctctcctgttcctcctgttc

SEQ ID NO: 54532 - DNA, 759 bp, Populus trichocarpa
  Intron number 1 from transcript POPTR_0019s04360.1 (locus POPTR_0019s04360) derived from phytozome v7.0 (chr-ID scaf fold_19; pos 4466691 to 4467449)
aaagcaggagcttggcacttgaagctcccgtacaggtaattaatctttgaaaatgatatcaacttcgatccctgttagatgatgtcatgctagaaagaaatacttcagattgcttaaattcccaatttttgaaacgaattaacacctctaattatgtttctttaattgtggatttggtttgaattgggttttttctagcagattgcttcttcattattaggaattcatatatgttctttcattaaattgaaaattttgagagaaataataggattaatcaactagttttcaagtacatgtttcgaatcaaattccaaaagttatagctctgtaaattttttgactttaattttttcaactgtttagtgacgatttatatcatttcagcataatgatacttattttatttttatttttttatcggaataatttaatcaattattggatataggcacttgctcttcttcattaggcattaccatttgctcttctatttttttaagtctcgagaaggataaagtatttttgtatgtataatatgaataaataagtatttttgtaaatgtatttgttatgcggttaatggagcgatttgctcttctatttttatttttttttgtatataaattgtgtcattcaacattttttatatatagcatagtgataataagaatacatcagaatcaaactttgttttatagacattaatccaaatatctaatcatatgcttctttatctttaatttcagaagcgaagaa

SEQ ID NO: 54533 - DNA, 544 bp, Populus trichocarpa
  Intron number 1 from transcript POPTR_0003s04550.1 (locus POPTR_0003s04550) derived from phytozome v7.0 (chr-ID scaf fold_3; pos 5263329 to 5263872 reverse strand)
tataggattgcttcaagattagcttcatcaattgggtattgatttctttcgtcacgtaacttcttgatatataaaatatgtgtgaatggagcagctaataattctctactgtgcttcttttgtttttctatcttttcacagctcctctgcttcaaagaagcaggtactaccaccggcctctccctctttcttcaatggcatatcgactttttatttattaataagcaataaatgatcgagaaattcgatttatatgtgaaaaatgaacctgggttaactaagcccagatagatacttgcatctcttttagtcaaatgttcttcactgtgagcaaatggaggtcatggttagtttgattatttcaaaactgagtctttttgggtcggtccattcctatgaaatacactttgatttgagtggtttggctgttctatgtgattcttgcttgaggttgttcatccgggcatttactcatcttgacaagcttattggttaatgctgtcaattgggtagttatccagtagggtcacatacagtagaagtt

SEQ ID NO: 54534 - DNA, 646 bp, Populus trichocarpa
  Intron number 2 from transcript POPTR_0018s07090.1 (locus POPTR_0018s07090) derived from phytozome v7.0 (chr-ID scaf fold_18; pos 7267479 to 7268124 reverse strand)
aagaagtcgccattaagctcgtaagtttccttgtaattgatttccctttcgattttatttgttgttgttgttgttgttgttgttgttgttattttgtttgattaagttaatagatgtttcctaattttacttttgactgagagtggaaatgttgtcagtaaattttagctataaaggaggaatctactgagtctgagtgaatttcaaataaatgttggcacttgacttcttttgaattaagaaaatcacataccatgatttgattcaatttttagcatatgctgcagttccttttcttttctttttctttttatgcattcccacaatatatggcgtgtgaactaattatgcttcccgagtatgaatttcttcttacgactgatgttttgatgtgaggagtttattcgagtgtgatgttgatcaagtttataatgtcatgagttggtttcatgctgtcgagtgcgatgtcattgacttttcaatatatttaccagcttgatttgtttcaatgatttgtggtgttctgtgttttttaatattctttgtgggtttgaaactaaatgattgtattttaactgtgcatgatccttgtgttatctcttaatgttcaggagaacatcaagacaaaacatcctcagttgctata

SEQ ID NO: 54535 - DNA, 494 bp, Populus trichocarpa
  Intron number 1 from transcript POPTR_0018s09000.1 (locus POPTR_0018s09000) derived from phytozome v7.0 (chr-ID scaf fold_18; pos 9890730 to 9891223 reverse strand)
gggttcttaagttggctgattttggccaggtaaataatgggtttcttttcttttttaaggagattgattgattatggtagtgtctgtattggatcttgctgcagtaaacaaatgttttagatcgagtgttttttgtatcagtatccatttatgcataaaatattgcatttagcgagtaaatgttaaatctttgatgctttaggtctgccttttgaattggctagatcagtttttcatggtctttgatgcattttgtttgaatggaagaaagaaattcagcaaaaaaagggattcgaatttcttatcttacttcaatgatcatttgaggtccgtgcattcttcataatctctactctgctttggcatttcttaatgttttggtgagattggtgctctgtgtgaatgttgatgtggtgacgagttgaagtttttctctctatagttttcaagttgtgaaaagctaattgttactttatttccaggcgaggatactc

SEQ ID NO: 54536 - DNA, 683 bp, Populus trichocarpa
  Intron number 1 from transcript POPTR_0006s05810.1 (locus POPTR_0006s05810) derived from phytozome v7.0 (chr-ID scaf fold_6; pos 4106213 to 4106895 reverse strand)
attgctacttgtgctttaactctctcctcaagaaggtaatataagttgttctcactttttgttagcagttttttctactatgcaaatccacagcctttttatttttaatttcttcaagaataggtagcatgcatgctaatatgctaataaaagttttcaaaaagaagctgttttggtttgaaagcttaagattaagaagtttattgttgaattctagatgttgccttgatgtgtagaacattacaaaacaatcccaacctttcttatattcactactcctattttccactttggttttgaagattcatgggattttggaaaaacattgattaatcctaagtttttttttttttttgtcctcctcctttgagtttccaagtttcaacactactgcagctcaactattcaagtgatcatgtcgctcttagagactaaatatagaggaagattaatagtctgtttgtttatagtatatttttctccagagccgaaggagattttggaccttttcttgtattttgtaggtacaaaaaattgcctgaaataagtgaatgcatgagtacatgaaaaaaaaaattattcaacatttatagaagtgaaatagataattatgaacacaggaataagggattaagggtgtgatttcagtaatttcgggacatcttggttggaatttgacactc

SEQ ID NO: 54537 - DNA, 542 bp, Populus trichocarpa
  Intron number 2 from transcript POPTR_0018s05100.1 (locus POPTR_0018s05100) derived from phytozome v7.0 (chr-ID scaf fold_18; pos 4573155 to 4573696 reverse strand)
ctggaagcttcaacaacagcgtcgcagaacagcaggttggttgtgttttattcttctcagattttgaagcaactgatttaactctattgaagcaattagtttatggatgtaatagggatttattcaacacaaaatcagtgattgaggcacaatgtaacttaagaagtcagataatgccgttctttttgtttctttgctatggtttaattagaattctttaactaattcatgcttttataattcctatgaattatctgagattctgatcaagtcttttctaattgaaaaaatgcaccatgacaagaaacacttgcaatggtggtgttcttctcttctctcgtatttatttttattgctgttttaattattttttgttcatcataaatttgatcagttgcattaaaaaaagtctgcttgattttgagcttctatctttccccttgtttgaattcatttggaacaagtttttgctgaacatttcttcttgataacttttgtgttgctcaggcagttttggaaactgttgccagagttaaatcgaa

SEQ ID NO: 54538 - DNA, 468 bp, Populus trichocarpa
  Intron number 2 from transcript POPTR_0014s10300.3 (locus POPTR_0014s10300) derived from phytozome v7.0 (chr-ID scaf fold_14; pos 7737205 to 7737672)
tgaattcgtgagtttattatacccttttgattcttgacttgctatggattgcttttttatcctttcttttttcgggttcacttggtgaagatttagaggtctcttttttcttttttgggttaatgggtgtagattattttgattgatctgattctgcacaagacaaaagcgtatagacatcttctcttcaatgtaattaatcagcataccgtcaattttgaggtacaagctgctgcctttagttatgttggcttcttacggtttataagctttgcgttcttaatttggacactctcttatggtgtattcttccagaatgcttcgaggatattaatgcttctaatcagagttttttggcgggggcaaacttatatttatttatgcactttctgtttcagtatttgtaattattgctatggtgcatatgggttattaactctaacatagggctgctttgcagggttcgtt

SEQ ID NO: 54539 - DNA, 535 bp, Populus trichocarpa
  Intron number 5 from transcript POPTR_0014s10300.3 (locus POPTR_0014s10300) derived from phytozome v7.0 (chr-ID scaf fold_14; pos 7738057 to 7738591)
ctaaacacatcgattcaaatctccaggtaaatgtttgtttcggtatcatgctgtttcttcctttcatttatttcttggacttgcaatattaggagtgtgaagcactaatatcaactgccatgtgtgccactcattgttttttaggacaaactcatgatggagattaccttgaggggggtttttttaatccaaattagtataattatctataaatctgtttttatgcgtgcataacaatggactgggatagatgtcgtgtatgatcattggctacttgtggtctgacacctctgtctatgtgaaacagatgtctaagatcattaaagagatatggccaaaataaggcaagatagagaaaagtagtttttgttaccgaacttttagaattatgtacgcttctgttgacaattatactggtgatatttgatctagattatctgcgtcaaccatagaaaataaaagaatagtgtaatttgacttggtcttccttaacttcacaggtgcaaagacattttgcttgccatcctagtttcaa

SEQ ID NO: 54540 - DNA, 451 bp, Populus trichocarpa
  Intron number 1 from transcript POPTR_0013s00470.1 (locus POPTR_0013s00470) derived from phytozome v7.0 (chr-ID scaf fold_13; pos 197169 to 197619 reverse strand)
tccctgcaggtatgatgattttacttgtccttttgaagtttttgcttcatagggtgtgtggtttttggtgttttttttactagccaagaaagatcggatcctgttcacaatttaatttggcttttcttggtgttgttttgattgattttgtgacggggttatgtgactggtgtaagagactgcattgactgaaatagaaaagggtttgttaagatttgcagtgttgtagagaattataaagaaacaaagatgaattagaaatcttttgaatcattgatgatttcttttattagatctcaagttttgttattgaaagaggagaagtgcaggtgctgcaacatcagcaggatatgttctggtctgtaatggttttttaatattctagtctttttgtgctgtttgtgagttgatgttcatgattttatatgttcatgatgaacaggtgttaaag

SEQ ID NO: 54541 - DNA, 446 bp, Populus trichocarpa
  Intron number 1 from transcript POPTR_0013s08030.3 (locus POPTR_0013s08030) derived from phytozome v7.0 (chr-ID scaf fold_13; pos 6936634 to 6937079 reverse strand)
ttggacgaggagaagttcaaggaaactgttcataagtaagtcttttcttgttttgggtgtttcgtttcatctcaatgctatgtttggatgctgagaaaacatgggtagactataaaaatcaaaagtccatgcttgttaaatggatatcgtaaaaacaaataaatcttcatcatatttttgtctttggcttagatgaaggcagggtttggttttcctggttctaaattttattagaaaattgcattaattttgacttcatgaagccacataaatatttttacactgcttaccactatgtaccatcattctgtttcctgacttctcagctaggaatggtgataatgaacatgaacttgaatagaatgctaatgttctgtttttgttttgtgtgttgtcatcaaatgctgattttaaggttagagcaagagtctggttttttcttcaat

SEQ ID NO: 54542 - DNA, 799 bp, Populus trichocarpa
  Intron number 1 from transcript POPTR_0006s18470.1 (locus POPTR_0006s18470) derived from phytozome v7.0 (chr-ID scaf fold_6; pos 16901036 to 16901834 reverse strand)
cgctttctatttcattccgttcacttctctcctttgtaagcatctccctttctcgtttatggatattcaaatattggttttaaggttctagtacattttcctactctattctgatttatttattattttcccttttatttttaatttgatttttcacttgagcacggtgtgaaagaaattaaatctaattaaatcgaatcgatattttgttttttttattcatttaattacatgtataaacaagacacaggaaagatatttgataaatatcctatttaattatttcttaagctagggtttctattattattgttatggtttgaaatcagtgtttatgttgatgccttgttaccttttttcttgttgcttgcaaattattttgatccagtatgaacctgcaaatattttgctagttgcaaagagaacatttccgtatggaggtttgcaaaatcctgctagttgtgttggaaacttctgtaaagtgttatctattatagaggagtttaagcagtagaaacttagtcgcagtacttaaatggtcgtggaaaagttggatctgattgctgtttatggccgtgtctttttgttttaagatataatttttttctttctcattttgatgttaatggtggtttgtgtacctaggtatgttgatgcagtgcacatgtatttttcgagggcttctatctttttttacttcctttttagcttatagaagtcttctttttggtctgtggcttatgtgcattgttttggtttaacagggtatagttggcaattcatttgtcctgattaaaga

SEQ ID NO: 54543 - DNA, 541 bp, Populus trichocarpa
  Intron number 1 from transcript POPTR_0018s11740.1 (locus POPTR_0018s11740) derived from phytozome v7.0 (chr-ID scaf fold_18; pos 12378138 to 12378678)
gccttcttgagatctccgagcgtgtttgtcagttttctttcattcttaagaaagattgcaatttttcttttctttttgaattttaagttcattttttatttagggagagaattggttgattgtgtttgaataattgagtcatgttttgaagtgggtttgattcaaaaaatttcctttttgtgttaggatggtaagaaaatgtattgtggagaatgcaattcggggttgtggattttgattattacttgagttgtactcatttttagacgtctattagaaactcattagcttaattacagcagtaagttaaaaagtaatgaattcatttgtatatcgtagggattttgaaatttgaaaatttttggggcttggtggcttgagtcaagaggattatgtttgggatcgtttagaaaagatataattttttggtgccttgtgggggggttatgacttaaaacaacaactgggttaagtattaatttgatggctgacatttacacattctgtgtgaatgcagtgtttgattgctgctttaacattg

SEQ ID NO: 54544 - DNA, 607 bp, Populus trichocarpa
  Intron number 1 from transcript POPTR_0006s20220.1 (locus POPTR_0006s20220) derived from phytozome v7.0 (chr-ID scaf fold_6; pos 19266974 to 19267580 reverse strand)
agggtatgtttcaacctgttattttttcttctctttcgttcttcttgtgtgaatcttggaacatgatttatcaattttttttgttgcctctttagtaaacagttttgatttttaacaaattctacatgtgtttgtgaaagtgtggtattaactattgatatgttgtgttcttaagttttgttgttctgctttattaatttgctgttgattggagtttgcggaattatttgtttgaattgtctttgtatgcatagtttgaatttgtaattcattacttctgtccattcgagtttcagttttttgccttttagagggtttggactaattctaattgtttgttcattaactccctctattagaactgaaatattctttattttctgtttaattgtgattggcagatttataggactgttgctagtaatcgggttctcttactcaattatactcctgaattttggagtgcatgtaatttgaatctaaattatagtatatgggactttgaatttttactgtcaaatctcgttcaaattcagatttcttttcttacattttacgtatggtgtttgcagttacaactaccaatcaagcagtcactgcgctggaa

SEQ ID NO: 54545 - DNA, 802 bp, Populus trichocarpa
  Intron number 1 from transcript POPTR_0014s07240.1 (locus POPTR_0014s07240) derived from phytozome v7.0 (chr-ID scaf fold_14; pos 5471263 to 5472064)
catacttttcttcgtcaacaaaggtgagaatttcaaattcctttctttaccttctctctacttccctggctttctctccataccttttgttttatttttattttcaaaaaatcgacaattactttctctctcttttgaatttgcaaaaattctcttctatgttcgattgacttaaatttctttttcacgggctcatccagttaatcacaatcatctgcagttctttttcatctgttttctgggttttgtacagtgatcataaccatcctcattatttataatcctgattttacctgtaccaaattacaattacatagaatcctgaatgtgttttttttttgttgaatttaatggaatttaacaaaaacccttttgaattctgtgcatattaatgcaaaatcattcttctttttggtcccttttagaaaatttgaagaggttttgctctgtctaacaatttcaactagttttttcgaagttacattaactacgtgagtgattagggaatgaattctaattattcagcttgtaaaaggtcccagctccttgttagcttcttgggagcttgtggttttcatgatttttttttacattgaatttgacatcagggtttttggtagttgagctgttttaggaggatgagatgagagtgaactgaaactttaaatttaagcatttggttatttcaatattggaatctgcttgaacagtggatgttatttaatgaagttgttagtaaatatatatatatatattttttgaatcaggttttgagattcaaacagatcaaggtgtttttagt

SEQ ID NO: 54546 - DNA, 679 bp, Populus trichocarpa
  Intron number 2 from transcript POPTR_0014s07240.1 (locus POPTR_0014s07240) derived from phytozome v7.0 (chr-ID scaf fold_14; pos 5472202 to 5472880)
tctctcgttcttggcgagattttggtgagtatttactcttatgtttagactgaaatctttaaacattttgcagttgttttgatatccacagaagcacattgcaaacatctgtttttccttttgatatgaagtattcttatcagaatggctgtgttctttaagtgatcgtctaagttgttgccaaagaaaaaaatggatgacacttgttgcaataaatgttggtcggtactttatttttgcatttctttcctcttgtttttgtagtcaatttaggcacaaacatttattatctcattcaaattgaaatttgtaatcaattactttggtggtagctgcaatctaattagattctcctcaaggttcctttatgccattgtccctgagttctactctaagggtatcttcttaatcacctgttgctgttgccaatacagttttcaattatttctcaacaggttgcatcccagttgttttcaactttgctgtataaaaaatcaatgaacattattttttgatagtttttgaaaattggtcttgacaacctgatcaatttcaatcttgattgaaattttagtgatggttgcagggtttgggtagagaaagtttccctttaacattgaatcttgtttttgtaactgaaggttttgattgggtttggtttgcttcacagtgattgcaa

SEQ ID NO: 54547 - DNA, 379 bp, Populus trichocarpa
  Intron number 1 from transcript POPTR_0531s00200.1 (locus POPTR_0531s00200) derived from phytozome v7.0 (chr-ID scaf fold_531; pos 8153 to 8531)
gaaggtattagcacccctaacgcaccctacctgaggtaagctgcttcgtgactttgatgtgttaaagaagttttaataattgtcttttcatcggatattagaaatacaacttacatgtaagttaataattcttgaccgtgatccaatcaaaatattaaattcttctttaatctttacaattttatcttaaataaaaataaaacatccataaaacaaatataaacacacccatacactttcactatattttctttttcttttcttttgttgttacattcacaataccaattatacaaattcaaaaaataactaaacaaaaattacattaaacaatttaaaattagcctcaaaacaatctggaattacagggattgccatc

SEQ ID NO: 54548 - DNA, 1005 bp, Populus trichocarpa
  Intron number 2 from transcript POPTR_0019s15040.1 (locus POPTR_0019s15040) derived from phytozome v7.0 (chr-ID scaf fold_19; pos 15665455 to 15666459 reverse strand)
gagctttggaatattgatcctaaaagagctaaaaggtgtgaacttttttgttttttgattatgggttttgcttaaaattttattcttttatgggtttttgtaggaaattggtgtgcatttgctttaaatttgagataggtaatgtttttggttttatggtttaagttttgtagttttttggatgtggaagatggggaaagttagctagttgcttgctggatttaaaattggtttcaggggttagattcttggttctgattggtcaatattttttgtttcatcttgggatctatgatgattcatgctgtcacataactgttaagttgtctgtgtttagacctgcttgttgaattgttgtatttttcgggactggagagtcttttcttcttcttctactgtttatcaaataatatgatgaattttatagtctttgtggcaaatggatactttagtatatattgaagcctacaaggtagtcaagaaaccggtttatcgtctaagatagatttcgactggcttgttagttcgagtatttttcttcaatatatgcttacttgtaattcaccagccactttggcatacttgagatttaaagtaatggtgcattatgctgggatttagaaatgttaagcttcaatagttttcttcaatttaggctggcttgtcattcaccaaccactttggcatacctgacatttaactttatggtggcttgtggtgggattttagaaatgtcggtaaccgctacttatcaggtgattggatttactatttaacttttgtagttttaagggcctttagatgtttaaaagtataatcaccccaaatatgtttttcatagttttcttttgacaatgaatgcatgaacaaagacaagcaaagacgtggataattgatttgcgaattagttttcttcaaaaattggtggcatcccttttgggtatgctgacaacatagttgttgttcacaggatacttgcaaataggcagtctgccgcccgctcta

SEQ ID NO: 54549 - DNA, 392 bp, Populus trichocarpa
  Intron number 1 from transcript POPTR_0003s19790.1 (locus POPTR_0003s19790) derived from phytozome v7.0 (chr-ID scaf fold_3; pos 18429017 to 18429408 reverse strand)
gaaagactgacagaataaaatacaatcatcatgtagattcttctaatcatatccagttcatttcaactttatgctctgaatctttgctttgttgtgtttccttttaataattgtttcttacattatccaaaacttgcatttttttggaaatttgtttttgcattgttttggccagctaatccattaaccaccacttctatcaaggcgatgccttgtttttccaaattttcattgccttctggtttctttgtcgatttcgtaagaaccctttttgaattcttgcttttaggatgtttttctattgattatttcaaattcttttttacatattaacatatgccaacgtgtttgatgcagagaagaagctgatcaaggccctccttttcttttct

SEQ ID NO: 54550 - DNA, 541 bp, Populus trichocarpa
  Intron number 1 from transcript POPTR_0006s12260.1 (locus POPTR_0006s12260) derived from phytozome v7.0 (chr-ID scaf fold_6; pos 9408137 to 9408677)
aagaccgaggtaaggttactggaaataataggtatgaccaaaattaccatatgaaggttgagatttttcttttagtagtgatttaggagttgaggagttctttgattggttagctaaatgtgattgattttatgagtatacaggaattttagattcgaggatggtaaaaattgtagggtttaaattgaagcatgtggtattagtctagtgggataggctattaaagactatgagacgagaaggttgaagacctattgagacatgggagcggatgacgcaattgttgagaggtagatttttaccccctaattatgatcagcttttgttccataagtatcagaggtgttcccaagattctcaaatcatgcattaatatacagcagaattttagcacttagctaagtcaaataatctgcatgaaactgatgggcaacaagttgctagatatgttgagtgaccgaaaccagccattagagatagaattgggctttggatgctattaaacgttatcaaggcataaaatatagctttgaaggcagag

SEQ ID NO: 54551 - DNA, 478 bp, Populus trichocarpa
  Intron number 1 from transcript POPTR_0013s11580.1 (locus POPTR_0013s11580) derived from phytozome v7.0 (chr-ID scaf fold_13; pos 12221880 to 12222357)
cttggtgcacccattgcaagcgcctcgctcccgaggtttctcctcctttctcttattcttatagcttttactgaacttaatgccaagctcatactttcttgataagatctggagaaaaaatttagacaatttttgtttgatctcatctcagtttttatgtattgattactgtgatgctatgattaatgacgtgattgtaaagatcataatattttttttcttttaatttgagattacagtttgctagtgttttttttttccgtgatcttttaactgaaattattcataattcagaaatctaagtctcattttttttttttaggtttttaaataggcagccttttgagatatagatttatagatattgttcgagttgaagaaatttagttttttttttgttaatcagtcagcacaatgcatagtgtgattattcgttacagtatattttttaattaattattttttatttttcagttag

SEQ ID NO: 54552 - DNA, 825 bp, Populus trichocarpa
  Intron number 1 from transcript POPTR_0003s13040.1 (locus POPTR_0003s13040) derived from phytozome v7.0 (chr-ID scaf fold_3; pos 13445140 to 13445964 reverse strand)
ctgagctcaaagaagagctcaattctcagtacaaggtccgttcgtcgtccttctcctttccattttgatcgcgttgttagatctgtctgattttgactgattgatttcgttgaactttcttctgcaactagaatttcattggaggattgacttttttattaattatgttcttgttgctgagaaatcgtataaaattacgctgggatttccttaggtttggttttttgtttattattatatagtgagaattgaaatggagctattagggatcatgtgatgcaaaatatcctttcgtgaaggaaatctattgtatagttttcatgtttggcattatggattttaggaattcaggtgcggtttggaagaactgctctccagcaagaaagaatgcatttaaaaacgtcatgtcatgcaatgtgaagatcttgcgactgataaagtgctttatcgagctaggttcttacctaagcacaggaatatactgaatgattttgaatatctcactaggatgtttgggtttttagcgtaatggatcttgaacatattctacagggttttgtaatgataatgaatgttataacagtattccatgcattactagcaaggagtttttttttttttttttttgttgctagtactcatttcatgtagttcttggacttgaaattagttgcaatatgggagtattgtgatgttcctttggtttattggatattgggttcatttcatcctcttattttaataactatagcctagcagtttttcactagaatcggtgtgaagcttctcctcattgctatcttatcaagcaggataagagaaaag

SEQ ID NO: 54553 - DNA, 552 bp, Populus trichocarpa
  Intron number 1 from transcript POPTR_0003s06240.1 (locus POPTR_0003s06240) derived from phytozome v7.0 (chr-ID scaf fold_3; pos 7719611 to 7720162 reverse strand)
tcaactcggcctctagcttctttttccttcctgtgagtttcaactcgctctctccttttccttttcatatatttttttgttaattttatatgatattacctgagcctcaaaagatgcaaatttgtttcacaaattacgcttgattttaaccatcattttcaatgattttcaatagagcttagaaatcctaaatttgcgcattgcaattgaattttcttgcactaactaaaaaaaatcagtttcttttttctgaatttatctttgtttacacttgattaagctgcaaagtgcgaagtttttcatgtaaaattctgaactaggaaaattacagttggtaagccatgaagtaatttggttttgattgatcatgtggaaattagggattatttggattttgatgcaatcttctttagaaacctgatttagtgtagtttttatgtttcagttctttgtgatggataaagtttagattttttagaggtaaagagttaactatttgttgtgtgttttttgtttattgtctggagttttcagtttgtgtatttgagttgc

SEQ ID NO: 54554 - DNA, 428 bp, Populus trichocarpa
  Intron number 1 from transcript POPTR_0013s11590.1 (locus POPTR_0013s11590) derived from phytozome v7.0 (chr-ID scaf fold_13; pos 12240248 to 12240675 reverse strand)
atatcgaagctaatttcggtgagtttttttttaaatcttttttttttgtttgttttggtgtttagttgctaagaaagtgtagggaaaatgaaagaatgtgagtcccttttattgctagagctgaaaagatggaaacttttcattgaattaagctttatatgccagttagggatcttaaaagtttgaattttttcttagatttttgttaattagctattggaaataaaaatcctatttaaatatggttgattttaatctgttggaaactggttggaattatgggtttatgagaaaatttaaggaacttgaatgtcagaattgttgatgcaagaatgttgtgcatacatagtttcttacatgtgtatgattacatgctgattattcattttgttgataaattcagctccggcaataaagggctcaggtga

SEQ ID NO: 54555 - DNA, 879 bp, Populus trichocarpa
  Intron number 4 from transcript POPTR_0014s02710.1 (locus POPTR_0014s02710) derived from phytozome v7.0 (chr-ID scaf fold_14; pos 2250580 to 2251458)
ttataatttcagcttccgaggatcgaacgtgtaaggttgatgtgatctttgttgaaaacaagtatctttccatttgttattcatgtgatttataatttattttcattaacttggctattttgattcatacttctatcaatcaattggttgataagatgtttaattgatcaggatataatgagctataagtggctattttggttttactagtacgcatgttccaagtttatttatggaatcatgtgacatgagttattaattgtaagatatggaaatttgttttgataactgaattcattatatagtgatatctgattgcttaaaaaggttatcagaggatccatcctagtatctgtgttgggctggtgcattttaatcaaattagattttaaactttagtagttttaaattctgtacccgggaacagtttggggaaaaataacatgtttcttcaataaacttacatcaggatatactttgatgtttttatttgctggcatgatttttgagtgacttggatcatccagttccttctgcagaaagactctaatcctaaatggggactgtattttttttatttatttatttgttcaaataagaaaattgcattgcaatttgatttatgatcatgctatttctgaactaaattccacatggttttgtctattatcttttgcttggcactctatcctcagaaacatatttggttcattgtatgtattatgatgtagtttgtggagccgtgtggcactcttccaaatttttttaaatgcatgtattttgcttttaatttgtttcatgatataagctaaccttttattcatttcaatgtggattgtgttaggtgtggagtttatctaaggggatattattaagaaa

SEQ ID NO: 54556 - DNA, 605 bp, Populus trichocarpa
  Intron number 2 from transcript POPTR_0006s08620.1 (locus POPTR_0006s08620) derived from phytozome v7.0 (chr-ID scaf fold_6; pos 6301288 to 6301892)
cttcttctggacatctttcttatcttggaggagaggttagaaattacaagtcattcatgaatttgcttttttcttattaatgactgttgctgtttaatttaaaatttggaaactggtgttttatttcttatcttcaataagacgttgaggaacattaccccctccagtaatgtgttattggatatgccaatctaatccttggaagaacaagaaagaaaaacaaattctttgttgcattgcaatggatattcctttcatatcgtagctcatttccacatgaaaaaggattccagcctgcgaaatgggagcagcctaaactgtaaaaggaggccctgcttaaattaattatgagaacaatgtttgactggatctcatctatcataatcaaatggaatagtttgttttactttgtctaatattgagcatgatatgcttggcatgactataccatggtgtgtttgggacatttcgataggatttttttttttacctaactatccggatttcgagattttcatattctaagttttatttgttgatcattgttgataaaaagtctttcttttacagtggaggcgagaagttgcttttgctggttttgaggt

SEQ ID NO: 54557 - DNA, 850 bp, Populus trichocarpa
  Intron number 2 from transcript POPTR_0014s14560.1 (locus POPTR_0014s14560) derived from phytozome v7.0 (chr-ID scaf fold_14; pos 10658932 to 10659781 reverse strand)
aaggttactttcaacaagtaagatattcagtctttgtgtcataagctgattccttgagaacccatttgttcaaaaactaagattatcgtgtatttcaattcttgctttgcctggtgatcttcttggtgttttttgagtaaaacagaagataaaatctgctcgtttatttgtagagcattttggagggggttaggcatagggaaaaaagaatttgtgttgcttcatgctataggtgttcatgtcgaaacttaagaaactgatatttgctatgaccatgacacaatttgattcaagtggtagtattacaagtctatttatgcaggcttgaaagccattgcagagcgataccccacggtttcactcagcttatggtgcaaattcttcataacagtcaggaatcaggatgcatatatatttgtatattctggcttgtagacttgaattcatagcaattcatataggctttaatatcaaaagtttctaagataataatgcttgcttgtgagtaggaatcgtactgaacactatttcatgaaagtaactaccgaatccacaatttacccaagcatatatgatgcggtctatggtactaaatccaccccttttatcaactgatttcaaatttccttggttcttatagcttttgtaatttgaaggtctttgagaactgccacttttttagcatggttaaattataattactctggcctttcctattcttcatgatgcctgatgtctcatgtgaaaatgtcacttggatgcttttctttgacctttcctatttagctcctgatttaccaactcactctgtgaccatcatctccagatttggtttctcaaactcgtatat

SEQ ID NO: 54558 - DNA, 526 bp, Populus trichocarpa
  Intron number 3 from transcript POPTR_0006s14570.1 (locus POPTR_0006s14570) derived from phytozome v7.0 (chr-ID scaf fold_6; pos 11907444 to 11907969 reverse strand)
tatctgctcttctcggtcaggtgtaactcattgattttgatgcttgtagtggttcatattcaatattattgattttctggcaagcttgtgccttcccttttgaaaagcaagaatacaaaaacacacattttgaataaaaaaatgaaattgaataaagatacaagagtaatttggatatcatgccatcttccaattaataaacaagctgaacaaatatcaaaataatcaagcttatttttgaaaatgtgacacaaatttgcatagcagtttcgtataagaggctctatgttgcgtcttgcatgttgaattagttctgaacatggatggtgggaacactggtggtagatagcaattatggaaataaattgagaatgagaccaaacccttcaaattttcctagtgagcgactgtcatgggagactgagatggagcttaccttcatgtggtagggtacaaatgttgctgtatctctatataactttccctgtacttttgcaggcgtgtgttgagtacagtcgtggacatt

SEQ ID NO: 54559 - DNA, 935 bp, Populus trichocarpa
  Intron number 1 from transcript POPTR_0019s08070.1 (locus POPTR_0019s08070) derived from phytozome v7.0 (chr-ID scaf fold_19; pos 9443620 to 9444554)
aaacctcgtcctggtgttaaaggaagccacaagaagtgaagtttattacaagaaataataacaataataatagtaattattattattgttgttgctgctattgttgttgttgttaattgtatcttttccctttattttggtttctgggtatgtttgtggtgtttggatgatgttatgtttttgaggatgatggtattgtgaaataattttttttaaaatctttgatgtcatatgggtgttttccaaaatttattgctgctcttttctgatttggttaaatcttggattttgtttcctatactgtgatgatgatgatgttattagctgtgtgtaattaaaatcactagttggccattgataagcatgaaattagccacgattgccagcgtagcagtgtgctgccaggcaaggaagctaggcagtcgctgctacggatgagggaaagtttcttcttctttctccttctcgatggtaattgaatagcctttctttggtgccttaggaatgtcgcctagtctagtaagggcagctggaaggaatggtatgttggtctgagaatgaatagactaaaaggaatggaatcttgtagcttgttgagctgttattcacacttccaaaattcaatatccagtccacggactaggagtaggcttctaaacacgtgaagttcactatgttgttatttcttttgaaattatgattttcatctgcgtagcttgacttgttgatcgtgcattaccgtttgtgagaatagaatattgcttatcttgtggtggaagtgtaatgatgttcagaatgcatgttaatatttctctaggatgtttgctagtggaatttagaagatatttgattttgggtcataatatggattattttatttatcgattttgattatttcagtaattttggggaaggaagttcaaagtcatcttgac

SEQ ID NO: 54560 - DNA, 891 bp, Populus trichocarpa
  Intron number 1 from transcript POPTR_0003s22260.1 (locus POPTR_0003s22260) derived from phytozome v7.0 (chr-ID scaf fold_3; pos 20103446 to 20104336 reverse strand)
aaggttgaaattgaaaggaaaaacaataattgaaatgaataattaccaaaaaacccgcaatacttttcatccggtttaatttagatgttgtttgaaattgtgtttcaaacaatatttcatgaaaatttaacagttttatttttaaaaaaaattattttttttatatttttgtattgttttgattattggtgttaatttttttaaaaaaaatattattttgatatatttccgagcaaaaaatactttaaaaaacaactattaccacaatttcaactacctaactcatgtaacacccacttcatatcagatatacatgatcccatgtagtgccttttgctctatatttggaatggaatgcgaggcaaccgtatttcctccaaaaacttagttagagctaaaatatacatgatccctagaccatccatttaagaaacctccatagtatgtcagccacaaaatcataaccatatttcctctcttggtaatgtggttatagctacttttgcctcaatctgacccctccaacctgttctaataacaaaaggaaacaacgcaagcaaaatcctgacgtgcctaactgcatatatctcacctcccgtagccatacttctctacatggctatggcttcgtgagcccatatggtcgttgcttgcttatggttacagcttctttaatcccgcactgaatgtatatttttggtaagtgtttcatttagcaccacaggtaaataactaatccagtgagaacttaagctattaaagacaaacaattgtgattgccaacgttttgaagaaacaaaattctgctatattcaagttttcttcatggctgatcataacaagcttggcttctcagctaggcgcggtgctcctccacctctagtctctctt

SEQ ID NO: 54561 - DNA, 1004 bp, Populus trichocarpa
  Intron number 1 from transcript POPTR_0014s00300.1 (locus POPTR_0014s00300) derived from phytozome v7.0 (chr-ID scaf fold_14; pos 120635 to 121638)
aaagatagcgacacatctttcagagtggtgcatattggcatatgagcggcggtgcagcaacgatcgactttttttctcctccacttattttctctctcccatgccttggtatacgtgcaaagctctttgtgtcctccagtttttatttgttttgggtttggtcttcattcttttgatttctatttttgttagattcaatgctttttaagtttgttttgtttttaatttcatctctaatcatttaatctaattagatcttcttatataatctagtccttcttctttttattgctatttttttatcctttttttatgttttttttttaattatgtcattgggagtttgatttaattttgtttggtttccattttggtccttattttttttatccttttctttatttattttgtttttcaatttagtccctaattagtttctttcaattatttttgtgcattgtttagtcctcattattttaattttagttattttaaatttttatttttttatggtttgaaattttttgtgtggtttttttatgtttgttttttacagtgtattgttaatcttataacttagtccactcgtttcgatgataaatattatttttttaacctgatttgtctcatgttattaatccaatgaatattattttttaacccagtccactaattttgaaaaaatttaatctaatatgtttcatgttattgttatttgaatattatttttttactttttgaaaaaatttggagaggcctgcgtggcacgcgagtcccgtctgtactataactaaaacctgtacttcatcccacttatggcagaaatctgcaagcaattttacatttcgcactcaatagtacacatggcctataggagttgaatcttcacgcattgaatatcccaccattttgtttatcattgaactcaagttacttgtctgtgataaaatatggttgtttgtttgccagatttacccaacatcagtgagatcaacaggcattgg

SEQ ID NO: 54562 - DNA, 801 bp, Populus trichocarpa
  Intron number 1 from transcript POPTR_0018s08850.1 (locus POPTR_0018s08850) derived from phytozome v7.0 (chr-ID scaf fold_18; pos 9776451 to 9777251)
ttggcgatcgggttgttgccgagaaggtagcatggctgttttacttcttttgtgattttagggaggttttaagtgagtaaattcaatgttgaactaaggcacacttccatcattgagattgcaagttaattcaaaggtttatcgtcatgatgtcacgtaagactgagattttgtttgaataatgagagactttgaccaatgggcgtttggtctagtggtaattagcaagtaggagggataactttagattcacatttattgtggagggcaataaaattccatacaagatgtcgcatggatgaggaaaatgtgtaaagtgttaatcctggaagactgagtaggaacttattttgcctttgttagtgctacaatcagtacgatttttcttctttgttagatttagtgaatggtgcaataattgttctctggagagtggtttgaaatggatagtttaggatgaagtgaacgtagacggatacaaatagatagactttttgtttatactttctacttttttcaatattaaaaggtttgctatgctgagtagcggttcaggcatgccataaaactcaaataattgaactgagttgtataacattttccaattatcaaattttttgaatgcataataattgtttctctaatttcaataaaaatgatgcatactgaacctatggaccttgttagggcatttccagttgtttgaatctctattttaaaatgtctaattttcgtaagaagtatcatgcgtaacagctatattacttgaaattgtcaggtttcatactatttcagaaagcc

SEQ ID NO: 54563 - DNA, 797 bp, Populus trichocarpa
  Intron number 1 from transcript POPTR_0019s14180.1 (locus POPTR_0019s14180) derived from phytozome v7.0 (chr-ID scaf fold_19; pos 14932482 to 14933278)
caacagtgtctttaccacaacctggctagagaaaggtacggtctttctccttctttttttatttttcttgtgccaattgctttgatttttgttttctcaaaatgggttccttttgattttttgtgtttattggttttgattcatgaagtttgcaggtttgtggagatggggttgtttttttatttgagagaatgaattatgtttgcctgtttttgagctaagagttgttaattttcctttataggttgatattggtatgttattatggattaatgtttttgtattgctatatgtgttggaaaagatttcatttttcttttctttttatgtttatgcatagattgatttattgtttctttgaatatcagaaatgtgtttctgcttcattgtgtttttttattatggtttgttgctgaggggaaaaagaaaaaaaattgaaatctaattgagctagaagaaatcttttatatgggctcaaggtaattggctgctgcatttgttatatcatattaatgattgttattttctggtcattttttaatggatgattatatatcatttgtatcttgatgaagaagtctcttccgttttcttattgcagcaagtgttagttgttttttcccctttgtttgcttgtcttgattgtaacaatccaatgtggaacttgagatgttattgattatcatggatattgattgtatcaccgttctgaactgtgttttccttcagctttcttgtttaatcatgaaagccatttattttaagtttttttccttattttcaggccagcatctctt

SEQ ID NO: 54564 - DNA, 304 bp, Populus trichocarpa
  Intron number 1 from transcript POPTR_0003s06560.1 (locus POPTR_0003s06560) derived from phytozome v7.0 (chr-ID scaf fold_3; pos 8051435 to 8051738)
agttttggagcttattagcactgaagttgatccaagtaagtaaagtagtatttctccactctaaataaaagggtgatcatcattagcacttgttttggattctctaataatgactcattatacttattttcagttctctttgtttgatatgaagaatcaaactctcatgatcatatgggttgatttgcatgtttgacataattaagctcccttctttcattagatcatagaaacttagaattcaataacgatcttaattggctctgtagaaagcaaggaaccaaagagaagcaagaaagctgcg

SEQ ID NO: 54565 - DNA, 377 bp, Populus trichocarpa
  Intron number 1 from transcript POPTR_0013s01960.1 (locus POPTR_0013s01960) derived from phytozome v7.0 (chr-ID scaf fold_13; pos 1130341 to 1130717)
ttattcactctgttatcttgcaggttagttttgtcgatggattgtgttatttggttgtttggtatttattgatttatttggttctgtaattttgtttgatctgtgatgccaataaaggctactagttttgactatcttgtgtatttttctctgatgctgattgatcaaaagtttgatttatgttgaattccaaatccaagtttcttaatcgccaaagaagctttcgaggtctgttttccgttcctttgggtttttctttattataattcctttttgctgctcttctgtttatgggttaaaactgatttttgctatttttttttgggttttgtagatattcagagtgccatttcgaaaataaatcctgagcttttaaa

SEQ ID NO: 54566 - DNA, 966 bp, Populus trichocarpa
  Intron number 2 from transcript POPTR_0019s12170.1 (locus POPTR_0019s12170) derived from phytozome v7.0 (chr-ID scaf fold_19; pos 13294694 to 13295659 reverse strand)
aacggaaaatcgatcccaggagagttaagaggtaagcatccacatagcaccatttaaattttttcatcttcgaagcataacttttttttggataaattaattgaattagcagaaggtaaaattcaaatgagattggttctgacccttcttctgatttgcaaattatatgataatttatgtaattttaacctttttgtttctttttttcttttaatttttgaggttctattgaaagaatgtgaagccataaatgttgtttcattaattaatgtggatgtcagttagtttaggtatctttaacatgaaaagaagaggtcaagatgggatgggagaaattaactcgaggatatttagcttgagaaaaaaattattgattcaaccactgcatagtcttagattagagaaagcaaaaactagtttatatgaatgctaaattataaaaaattacactgaatttcgagttaaattaaacttagtttctaaattttattttctttttttaatctgagtgctttaaattttattttatttttgataaaaaaaataggtatttttgtttattctaactacaaatgatatttataaacactatatatattgtgaaaataagtgatttgaaaaaattataaaattaatagagagacgaaaacgtggacgtagagccttttttttttttttaccaaaagatagttcatggtactcaaataaaaaaaattcccaagagctaaattcagtttgaccaaagttcggtatgattttaggtaatttagccttatatttatatatatactagataataaatatgattaatttaggacctatatgcacgtacaattgcaaatgcaacgagaaagaatcatattctagtcactaacttaatttgagtgatcatatggttttcattattaattttttgtttttgcattattagaatcttggcaaacagacaatctgctcaaagatcac

SEQ ID NO: 54567 - DNA, 622 bp, Populus trichocarpa
  Intron number 2 from transcript POPTR_0014s06390.1 (locus POPTR_0014s06390) derived from phytozome v7.0 (chr-ID scaf fold_14; pos 4855357 to 4855978)
ctaatcggattctcctccttgctgctctctctgaggtaatgttttatatgtatatatgatgctagaaattgcttatttcttttttggttttgacgtaatttttttagtagctggctttgttgcattctgggatgtgagtttaatagaatagaatttgaaaaactgaggctttattggtggaaatgaaatttaataggtgaattgttagagatttgagaaatgtggttgaaaggaaaaaaaaacattaatatatagtcaatgtcataaaataaacaaattcaataccatgttaaaaacacaaacaaatacaagcaactaccaaagacattattttatgacattgactatattcagtaaaaagacaatatacaggagaatggactccactgacaatgatgattgtatagtgaaattcatgataaaataaagattatatagtgatagattttaacttctgtttgcttttactttcatataaataaaataaatagctttgaatattgtatgcaatgtgtttattgtcttacatttcttggcctgttaactttattggctgtcattaatgcttgttttcatctgtcattcagggtacgactgttgttgacaatttgttgaatagtga

SEQ ID NO: 54568 - DNA, 681 bp, Populus trichocarpa
  Intron number 2 from transcript POPTR_0019s03800.1 (locus POPTR_0019s03800) derived from phytozome v7.0 (chr-ID scaf fold_19; pos 3873426 to 3874106 reverse strand)
gtagaagttgcagtgagcatttagaaaactacagggtacaacagattatttgtgccagagagtttgtggaaggtttaagtgaataggattcgttgtgatgggagtaaaatgttgtgtatatggttgttgtgagttcattttgatttgtgaaagatttcatgcatagttggttcttcgacttggaaaaaattatctaatgattcctgcaacaaaatatatttgtaattggattgctagtatctggcaccttgtgtctttatatttgtttgtattttcaattttctgtggcctcaattttagatgactttggtaggtgatatgttgaggcttctagccattgtttttacaatatcaagtggaagcaaacatctgaaatggttactacagtttctctgagagtctagttacagagaataagggagtttgttcaaattttattgatgttgtctttaactgttcactaaattgttgaaggaatggagtgggttccatatatcttaggcaaatcttactgagcaagatggaatgctgtcattatgttcattccaattctcagtcttatttgcaattaagatataatgttaaaaaggctggctgaatcagctttcaatgatgcatgtttaaattaatttatccttttgttctcttgttttaatgagcttttcattgttcattgtagat

SEQ ID NO: 54569 - DNA, 817 bp, Populus trichocarpa
  Intron number 1 from transcript POPTR_0013s11900.1 (locus POPTR_0013s11900) derived from phytozome v7.0 (chr-ID scaf fold_13; pos 12529566 to 12530382)
gcagccaagttgaagcaaagtgtgtcttgaatctggtgagactcgagttctgctgcttctctttgtttttgttttattgaaagcttgctgctttttatcgcttcttacaattatatgtcttgtgttcgtttgttttggtcgcaagttataagcttttttgatttacggtcttgaataaatgattggatgttttgatttgtgcttgctttaatggtttgcttaagagttttggaatggtatttggggaattgggtaattcattggattgaaaaaagatgggatttttaggatggattaggctttgtgttggtatagattcttgtttagagcttcttctattttttttttataaaagaagaagagatcgaggatgtttcttcagtaaagtttggatttttttttatttgtatctgagcttaatagaattgattatgggttaaatgagagagaatttggatcttgagttagagtgaggggtttgactttagatgcaaaaagttgggttttatttctgtctttgcattgaaggatgctgatctcatcagtaaatgtgtggaggaaaattttttgttgattttctatcatgatatgggaaatcgatagtgtatttcaaaaactactggtaatcagggggaaaatggtaatgaaaggttacttgatcgagattttggtcttgtattttttgtttagaaatcaattttccaagttcagaaatttattttattgcgcactaaagcttaggattttgatgaagattttctaattcctcgcataaattccagctttttgttagcattgatccacacatactaagagt

SEQ ID NO: 54570 - DNA, 443 bp, Populus trichocarpa
  Intron number 1 from transcript POPTR_0013s05500.1 (locus POPTR_0013s05500) derived from phytozome v7.0 (chr-ID scaf fold_13; pos 3929869 to 3930311)
gtctgctatcactcgcacttctctcggccccaacggtacttcccatctatttctggatcctctacttttctgggtttttgctgtgtctttagggtttttgcttttgattgtctcacattccaagttttgtgctgtgccactactggataagtagggtttttgctacatttctgtgttttgtttttgaattatcaatgaatgacaagtgaatctaaaagctgttaagtgagaaagaaaccaatgcttgcacttgtaatttgaaattgaaggcaggaaaggcttggatttaggttcatacattaggaattcagttaccaaatctaaatgattttagtcacatgtatggggatcttcttttctgggttttctccaatatatttttccttccttacatggattaattattttgaagctatttctttgttttttggctgtgaccaggt

SEQ ID NO: 54571 - DNA, 971 bp, Populus trichocarpa
  Intron number 1 from transcript POPTR_0006s27210.1 (locus POPTR_0006s27210) derived from phytozome v7.0 (chr-ID scaf fold_6; pos 25192787 to 25193757 reverse strand)
ggtaaaattgtcaactacttcaatttctgtatgttcaattagataattcgttttcatttgagtttaataatttcttttttagtagacttgcatgaattttatgctatttttttaattaagtattagctcaggatggactggttaagtggtcgctgaattgcgatttgatcgattgatcttgtcaacaccgagtttgattaggggggtaattaaggtgcaattagaattaatttagctgttttttgcacatggaaaatgatgataaatcatatggaagttaatttatgcgaaatggactggcattctatgtgacatcatgcagaatcatctcattaattgtatcgtgattggaagaactctgcgcatttggtatcattattggaacatctccgtgcatttaattcagtgcatgattaattagttgatttaatttggcatgtgtgttatattttgatcacgtgtatttagaatcgcgatcagaataacaccgtagatttagtatggcatttgaaagaacttcatgcatctattaaagcaaatatgatttctggcaatttattcgtttaattttgctggccttttcattgttggaatcaagactcatgcttcggccagtagtacagcatgcatgtgtcaaccagtctagagattgtaaatggaaatggtttttattaaccacaaattttgcttaaatacctgatgagaaatatgaaatctttaaagaaatgttctttatggagagaagggtaactatatttgcatctcttatgtagttttttgtttttcactttcttgactctgatatattcatttcattttttctcaggttttctttcataattgccctgtcatttgctataacaatgcaatttagtagctataattctatttctgctagcaataaaaattttcaatacatggaaggataaaaaatgttcttttgcagagtgggcgagaaaccgtttggcccc

SEQ ID NO: 54572 - DNA, 821 bp, Populus trichocarpa
  Intron number 4 from transcript POPTR_0006s11070.1 (locus POPTR_0006s11070) derived from phytozome v7.0 (chr-ID scaf fold_6; pos 8392080 to 8392900 reverse strand)
gagtcctgctcttaccatctctaaggtttgatttcattctattgattaatgctgataacatgttaatatgctatagttctcgtttttacttaccagtagcatgccctagtaaagtttgtagactgtcatcggttttaggatgaatggagaacggaagagtttgatcgcatattttatgtagcaatagtttaagaatacagtggcattcaaatcgctcttttccaaatttagcactactgattatgtttattgctaagagccttttgtcttccattgattttttatccttttgcattgcctgtttttgcctacaaaagttttccatcaagagttagaatgttactctgagatgactaagtgtcctaaaattagcttgccagtctatgcttgcatgtagcaatggggtgtgttttggcctcctgtttatcaacatgaatgtcctcctgtagtttatgtttcttaggatacaaaacatgaattggctgtatgttccatagataaagaacatgagggaagctctctgttgctgatgttcaaacagggttctagttccttgaacttgcttttttattttttatttttaagaagttttatcaatgttgtcaaagcagagtggttcagtgggttgggtgagcacgaggctttcaatttcattctgaaaccaacacaaaagtctatactttttttcatgctaccatagtctaaaaaagatttattactactaatcattggatgcataatcatatacttattggaagcataatcatatacttggatgcacatcaggtactgctctccatttgctcattgctgactgatcc

SEQ ID NO: 54573 - DNA, 1012 bp, Populus trichocarpa
  Intron number 2 from transcript POPTR_0013s01800.1 (locus POPTR_0013s01800) derived from phytozome v7.0 (chr-ID scaf fold_13; pos 1029939 to 1030950 reverse strand)
ttcctattgaagttctcaaatttgttgatcgtaaggtgagttttgaggtttctttatttgattgaacatgataagccatagcccacgttatgcttaatgatatgcatattgcctgacacgaatttgtgattctaatcatgttatatgatatgggatttttttatttatttttacatttctgtactgccatgttgattgcatgtgattttgataaaagatacgataatatgttaggttattgtgatatggtgagtattgttggtgaggctgatgttgatagaaggacctgagccttgttggtttcgaaatattgcttagatgtgaagatcttgaattctgatattgaacccgaatttgttagaaattgatgtaaaagggttagagaacctagaatccatcatgcagcccttgaatccacaagggatcctctttgaatccgcagacaaattgggttctttaatcttgggatccacgagaacaaaaaaccatcggagtttccaatttatgccttctgattaggcaattctctgcatatcgctttcttcatttgagtgcagtgtgcacttttttttttttaatgttttgatgctctctgtgttctccagattcttcatttgagtttagttgcatctgtggacattgtttatgctttgtccgaaggtgagtgttcataaatttgtgtagagggcatactgatggaaattgtgacctaatgtatggtgtggttcataatcttgctcatccatataatcgtctctctccttttgttcagtcatcagatagttaagattgcgcaactgcaaaccagattggttgctcttaaagaccttgctttttgaagatttcaaagaatgctatgcctctgtgaagatgatctgattagtctatgatctgattttctgtatatttttataccttatgatgctagaattgactttaggcttatgcaattaatcacgcaagattttcaagaattgctgtgtgaattgaaactttctattgttgcaggtgg

SEQ ID NO: 54574 - DNA, 615 bp, Populus trichocarpa
  Intron number 2 from transcript POPTR_0006s07940.1 (locus POPTR_0006s07940) derived from phytozome v7.0 (chr-ID scaf fold_6; pos 5803048 to 5803662 reverse strand)
gctggtattcatcttttcatactttctcagaatatttatcttttctaagttatggtgttactaattatcaactctggtttcttatttaccgtttcctccataaatggctggtagttgatggactcaactttcttttaatttggattaggaatattttagtaggcttatttgggagacatagttatgtatcttttgatttgtgtcagtaggataataactcgtatggatgtatttgagaatcgagagtgaaatgaaaagagactgaaatcttatttcatatttcactgtgctcaagaaatgaatttacctaattggatgcgagaaatcttctattagttagaatggagatggggatatcaaagaacaatatgtatatatctatctcttgagaacgctcattattgtttgagggaaggaaattggatagtcattacaatttggtattttggttacgtacaacatggttaaaccatagttgtttgccattgggcgaaaagtaaacttgtttttcttgtgtaaaccattctgtcaaagatggcatctagttgcttgtattcattgtatcctgtttgctttgcaggcagaagtcaactatttaggtcaactcagtcacca

SEQ ID NO: 54575 - DNA, 562 bp, Populus trichocarpa
  Intron number 2 from transcript POPTR_0003s11140.1 (locus POPTR_0003s11140) derived from phytozome v7.0 (chr-ID scaf fold_3; pos 12003798 to 12004359)
acaactatcgcactcctgagcccttccggaatcgagtatgtgtgaagtttctagttctctatcctttatctgatcataactgtagagaatcactatttcaatattactgcgacttttgataggttttcttatactttcaattaattgttgtcaagctaacgctcggttacttaaacatcctcctctttcctctctttccagtgggctgtgctcactttattggttaaaacccatcgtttgatttcggatttgaaaccaatcttcttttaaaagacatctttgatcaatccatatatttgtaacgcttctttgattgtgaagtttgagagcatatcgagcttgcaaaggttatgcaagattaaacaagcaagagtttacttgtatttacttcctttccaccttttaaagcaatttttcgttgttttatggcggtttctacgtgtctctatgcattgtcgctattacttggagtccctgattttatttgttgttttattcaactggactctgttgttaaataattttcctccattggcaggttgtggttttgataggcagttcc

SEQ ID NO: 54576 - DNA, 998 bp, Populus trichocarpa
  Intron number 1 from transcript POPTR_0013s05200.1 (locus POPTR_0013s05200) derived from phytozome v7.0 (chr-ID scaf fold_13; pos 3682351 to 3683348)
tttcttatcaagctgcaattctaaggtgatgatgatttaactttatagtttttaatgggttctgttcatttcgctccaattcttgtcagcttttctttgttttgagtttttgatttctcggtttttttttttggagatgggaaatcataatgggtcattggtttttgacttgttttatattaaagattgaaactttgctaggtgggttttgatttttatgattggtaatgattaatactgcatgtttgaatggatctaagtgctcgatgtagtggttttgattgttaacatctatgatgtgttatcaaggttttttttttgttgttgattggagtctaaataatagtgatttggtcttgtaattgtttatttttcctgttactgtacattttcagcctggttgttggtaagagaagaatcttgtcttagaaatgtagtcattcttgcacaatgtgcggtcttattccataagattcagtttcagaatgagtttagttaatcggttttttcgatattttggatttgtaaaatgtgatcaatcatttctgtgcctttttttgggattaatatttgatttttgtatttctttttttatattacttgagtaatctcgttagtgttcatgctcatagtttttattagacgataaaagtggaggtttttcttttccttgtttgtaaacttttttgcagtgatggatcttcattatgacagttggcatcgcattaaaatcttataatgaattgcctcatttagcagttttgtcttccttttctaactatggattgtgcccagagggtccaccctcgtctttttcttccaataaaagtgaaaaaattgccccctcactttttcagattctctttcattatcttttgcttaatgtacaaatctttgtgtcctatcctgtccaattcacttcagtagttaattatttaccataggatgcatattttactgacagagaaactcggtaatgcagtgtcctattgagcttg

SEQ ID NO: 54577 - DNA, 318 bp, Populus trichocarpa
  Intron number 4 from transcript POPTR_0006s19610.1 (locus POPTR_0006s19610) derived from phytozome v7.0 (chr-ID scaf fold_6; pos 18655328 to 18655645)
aataaataattcaaatataaaaatacgcttttcaggtaattgggcttatattgatctttttttttacctcaaattagtggcgttttgattcaaatgtgcttaattgagttaagtcatgtttattgctttccttgttgtttatccttatgatattttcttcttttatttgttgcttaatttacttagatattcggaaatttataaaaagagaaaaattcaagtactttagagcaatgtgggtgcacatttagaccttttcttgttacattaataatggatgttttatttattataaaatggcagatatatacagcaaaa

SEQ ID NO: 54578 - DNA, 914 bp, Populus trichocarpa
  Intron number 3 from transcript POPTR_0014s06210.1 (locus POPTR_0014s06210) derived from phytozome v7.0 (chr-ID scaf fold_14; pos 4729053 to 4729966 reverse strand)
tgaggagatccctaaaccaccagtggttaatagacgtgagattcttcacacttacctcatttctttgacatatcaatggccttttcactggtctatatatgagcagcagcactccaacaaattttgagtcattattaagtgacttcaccagtcccctttaactttctttaaagtttgtcaagcaccattgcatttttgcatttcttacacatagtagctatagtcttaagtaatcatgaaaaggtatgtaaaaaacaacagtgccctagatatcttggttttgcttgatgtaccaagcatcttttggacaatcttatcatgtctagccttcttgatgctattcaacatttatttagtgctaccataagggatactgtagatttgcacctagtaggtcaattgcatttctttgaggctttcgtagctatcccatctgtgtcggtacctctccctttaattttcttctctagaagaatttaacttttttttttttataatatagaagaatttaactaacaggcccaaattttaccatcatcaaacagatgttacctttgctcaaatgggccattgaatttctttcagtttctttcaatgcatgtactatctcattatgaacccagaaatgtataatgtagcttacctttatataatttctactacatatgaataggagagagagttttcagttttctcccccggaaatatagatacagaatccatggatattagactgattagatcctagatgatgatgaagtaatgatgatgagagagagagagataataaaagcagaaatcttacataaagtcagcgaagtgatttcaaagatttgtctgtttctttgtcgttgttatgtctctgttttacatgttcagctccagaaaagagacaaagagtcccatctgcctac

SEQ ID NO: 54579 - DNA, 638 bp, Populus trichocarpa
  Intron number 3 from transcript POPTR_0014s02990.1 (locus POPTR_0014s02990) derived from phytozome v7.0 (chr-ID scaf fold_14; pos 2454502 to 2455139 reverse strand)
cgttagaggttggttctgatgagttggttattaaagtattgcttgttaacatggaagaaaaaaaaatatcaaaagggaaagttaaggaggcttttagccatgtaatgctgcaaagactacgttcttcattcagaatgaaagcattggcagcatatctttgtttctacaaatgagtaaatcatttcatatgaactttcagtttttgatgtcgtttatagtgtaacattgttgaagttgcacgttcaagtgattttctgagtttgtcactgtttggtaaatcttgtgagttctgacgggccttggatgataatgcttgtctagagaagtgtattcagcatacgacttccatttatattgcttaggtccttttatgttcttgatttaaggattttggaagtcaaagggaagcagaagtggtgcttgttgttcagtaataagaaagtatggatggggtttacttttcatgtgggttcagggcttctaggaaggggaagctttaatgagtagggtagcaatttgaaatttcaatcacattgttttaacatgaaaggctgcatgttgacatgactgtacaagctgaactgcattaaactaatactcaataatagtctttcatgtttatcagctcaaatctgctg

SEQ ID NO: 54580 - DNA, 898 bp, Populus trichocarpa
  Intron number 1 from transcript POPTR_0006s26000.1 (locus POPTR_0006s26000) derived from phytozome v7.0 (chr-ID scaf fold_6; pos 24291997 to 24292894 reverse strand)
atagcgctaagccttcacttgttgttagagatacagtaagtatactcatcttaatcaagcatcgtccccccccccccccccctctctctacaaccttatagcaaaaattaaaccgttaaaaggttgatttttaagcctttgctcagtactccaattaattccgcatgtttttgatgaggaaaaaggactggtttttccttcgaggagccttcggagaatttctattctaaagtcctgatggggagaaaagctagttttgattattcaacaataagatacactgtttttcttttcttttctttttggaaaattcaattcgaacattcaaatccctggttttggaaatgtttgcaaaatgtttttttttttaatttataaaataaaacccattcaaaacttttgctatcatggcatgtatttgaggctcataggagttttaggacaatttccaattggctgggtgtgcatagtgacttcaagttccaacagctttcttcttgtttttttttttttgtaacatgatcaaagaagaaaaaaatagggatatgtagatttaaatacaaaaaaaattgatctttcactttcttgggattcccaagcatgcgcaacattggtcagagtcgtaggatcttacatatattgtcataatcatacatctcccttttttatgctcctatgattaattttatttttctctgtaaagacctctaggcatgcatgttcagttatggcctggcatgaattagcccatatttacacaccactagggcaactagagggggctcaccaagatcaactcaagctcttttttagtcattctttaagccttttgagttgtggtagtaataacttctcttttaattttttgagggatggtttttgttttgaatgaaggtgc

SEQ ID NO: 54581 - DNA, 626 bp, Populus trichocarpa
  Intron number 2 from transcript POPTR_0018s08760.1 (locus POPTR_0018s08760) derived from phytozome v7.0 (chr-ID scaf fold_18; pos 9691409 to 9692034 reverse strand)
gatttggtttctacaattcacattgcggataaagagtatgtactaccttgtttgaatttggtttcttcctttcctctgttgttttgttgcagtttaaaattgattagagatggtgtatatctgatcttaatggtttcatatcttttaattacttggtgctgctggttatagttatgttatcacaatttgtctttaagtactctctacttgattagatattctgattttctagctttctggttagctttctttctttattgaacttttacctgtttatattttttccttatatatatcttgcctgacaaccaattctggcttgcaactataccccgaaaatgaatcaagacttgatctttgaaaatccttaagcagctacttgtaattgtgactaaaaggaatcatctttgtttttgctgttgggattcctccaattctttatcaactcattctaggagctccttggaaggccaaggattaagttttggcttgagataactataaaattactgttgacgatgctacaagtacaactaactagctgtaataagttgtttttctattcacccatttgcctgaattctttggcagatactttgagaccatccagaaggaacttgaaccat

SEQ ID NO: 54582 - DNA, 716 bp, Populus trichocarpa
  Intron number 1 from transcript POPTR_0013s08460.1 (locus POPTR_0013s08460) derived from phytozome v7.0 (chr-ID scaf fold_13; pos 7627866 to 7628581 reverse strand)
gaggaggtatgtttttccttttcttaaatctgttttcttctcctattaaatgtctaaattgaagatgcattttctttcattgctgttaaataaataatatctcctgtcaaacaaaagagagtttaagattcttgtagctctcatttctggtttgggatgtctctgtggatgagtaattgatgataggatggttagcatgtttaatctgtggggttatattccttccccccgtccctctctctttaatgctttggtaaactgtctttatcataatatcactatgatccgctggtttagccaagttgctattacattcctgatcataaccagtcttctgatccaacttttttcacttcttttcttcacctgtttttttttttttgtaaaagttaatattgccctgtttttgccctgttttatttctttctaaaagttctctatgccatggggtcatgaactgtccgcattctttcttaataaatgatctgtttgtgtaatttatgtagttttattaatttgattatttgaggcttctagcatggtggtactttattgtgatttcttttcaaaagaaattctttagatattttttgaagcttaaaatttgattcccttctctctgcattggcctttcctgagatggtattacctatatcttgaagctgtgcattttgtgttcaggtagaagaaaaacttgagtctggtcaagggaaaac

SEQ ID NO: 54583 - DNA, 972 bp, Populus trichocarpa
  Intron number 2 from transcript POPTR_0019s14850.1 (locus POPTR_0019s14850) derived from phytozome v7.0 (chr-ID scaf fold_19; pos 15506374 to 15507345 reverse strand)
agttttattgagttattcttgcctgtgatatgtggtcttttacctccctacatattacccatttctaatatttcatctttggtttgagaatatgcaacatggagtaagaaactctggtgctttttaaaagaagtcaatagctaatgttaacttttaatttgtggatgtcattaaaaactgggcatgtaattggtggattcagcttttctaaagaggattctttcatcattttaattgaatcttttcaggagtcagtagggattagtgagattaccatgttcgctagttacatgtgttagtccatccatcctatctattagtctgtctttttgttgaacagtaggtcagagagaagtttaaaacataaggccagggcaacacaggactgctctcgctgtcaaaaaatttaaacaatgtgagcttctttcatcttgtttaagcaggacatggccttgcttcccaaggctcttacataatttaagatacttgagatttatgtccatggtactagttgttcagtttctctggcatggataaagattcattgttttcttgcatggtggatatatttgataatacctttcttcttttcctctttgtgtggaaaaaagggtacgtggaggagtttgtcttgcatgaacatcagaacatcaccccctataccaccctcgtgtctgtcttgtgttcttcatttcctaagctgaaattatttggggatgccctttacttagtaactgaactgctgcccattaaatgtcttgggctcatgtcatacatgccacaatattgttttttaatcttacttgtttgagttttggaagtcttctttctagggcagttttcatttatcagtcactttatttcatccatctttttttacagtgaatttttcctcttgttttttatgagtaatgattcattcttacatgcttttcagaaagtaccaaagagaggaaaaaagaattggagaaa

SEQ ID NO: 54584 - DNA, 648 bp, Populus trichocarpa
  Intron number 1 from transcript POPTR_0003s15730.3 (locus POPTR_0003s15730) derived from phytozome v7.0 (chr-ID scaf fold_3; pos 15455433 to 15456080 reverse strand)
taaaagacccacctcttcttctcgggaggcgataggtgcgtcaccatcttctattctctcctccatttctttaatattaaaataaaatatttcaacaattattattataatagtagtatcagatactatcttctgaattttagcatatttttttcatttgatctccatgatgcactctgtgattcgtgtcataatcctggatattctcttagcgaatttcatgattttactttgtttattatttttgaaattgaatttcgctgtgtggattctgtttctctctcgttgactactttgattagcagtgctaggcaaactggaattactttattgtttatatttttaatttatgattttgtatttagtgacggttgtttggggtttagttctgttttttcccctctcattttagtttaaaaaggttatatcatattcctgtttaattaagtgatttaggaatcctaaaagtgtcatttggattctaattctaaatagtttcccacaagaacttagacttttagacattatattgctggtacttgctgtttccttttgatatctccagaccgtgcgtttgtcttggtggttaattatgaagttcttatgctatctttgcaggtaaatttgtctgttcttaaacacgccaca

SEQ ID NO: 54585 - DNA, 894 bp, Populus trichocarpa
  Intron number 1 from transcript POPTR_0006s09140.1 (locus POPTR_0006s09140) derived from phytozome v7.0 (chr-ID scaf fold_6; pos 6757485 to 6758378 reverse strand)
tctgccattggcttctcttcctacacttctttctggtacctattttttcaacctttcctttttatgttttatttccttatgcttcttcttcttcttcttcttttctttttatttgttatttattcgacagtgattagattgcttatttttatgatgtttcattatgtatgtaaggaattagaatgccccttttttgcccttttcgaacattattgtatttgtaatttgttgagttttagtaatttacatggtgtaaggaattagaatgccccttttttgcccttttcgaacattattgttatttgtaatttgttgagttttagtaatttacatgggatttagactcttagtgcagattgggaagcttgcgtcttgaaagctttatgtggaacttggaacatttgtagtttgtttttctctgtagatgcatgaatacctcttcgaagcagctactgtcaatctgtcattgagattttgagttaataattgtagatgatgtgtcgaccaattggcatgaataagctttaaatactgatactggataagtgtttgtgtgtaatgtctcttgcaatgttgaaaatgagcttctgttgtttgatcgttatttttgcttctttatttgtaagtcaatgtccaatttccttttcctttttcctttttcctttttcctttttccttcctgtagatttagcagtccttgtaatgttattaggttagtggggctaattgaagtaagagcatgttgactgctagcccgctgctcatgtacatgtatctatgatatgttcacatgcacttttattttttttcactattgaattcatctctcaagcatttgtcattcatctcttttgatggtcatgtgttctctggctcagctatttgattgcatca

SEQ ID NO: 54586 - DNA, 530 bp, Populus trichocarpa
  Intron number 1 from transcript POPTR_0013s00800.1 (locus POPTR_0013s00800) derived from phytozome v7.0 (chr-ID scaf fold_13; pos 409399 to 409928)
ccttgcaattgcaggtaacattccaggctgcttttgtatgcttgtttgatctatcctttcattgttccgcatgataatttcttagttatatcattcttctagtttgagcagtattaagatgcctgatttatgcgtgacaagttattaatgaggatctgtttacaagtcatgaaatacacctattttccttgttgaccattatggtttacaaaatttagtatgaatgtcaacttgcaaaacttggtaaactttttaatgatgatcagagcattcaaatgccatctaatactaaatttgctgtttctcaagatttgatttgttatccttgttatcggttataatttgttatgtcttcttttcatctttcagactgacctttctttaaggtttctgcgtattgttcatattagctaaccatatcattgcatgtatagaaagtttttaaatttgatgttctgaaaatcacacaaaaaaattgtttttgttttatcatagagttgggagaaaacagtggactgctatagtccagg

SEQ ID NO: 54587 - DNA, 575 bp, Populus trichocarpa
  Intron number 1 from transcript POPTR_0006s03730.1 (locus POPTR_0006s03730) derived from phytozome v7.0 (chr-ID scaf fold_6; pos 2498455 to 2499029)
attttgtttgcttccttcctcactgggaaagaagggtacgtttgtaatcttcgttcccactttttggttactagagaagtgtttttttttttttcaagtagagaatagggttgaagtatcgtcacattaattgataaatcagtataagattgagccctggatgttagaatgatttattacatgaattattgaatcaaacataataaaatgctgagtgtgtatcgatgtgtattgattgaacatggagtatcagagaggagacatccttaaatcagtagcagatgcacactggcatccagagtgttttcgggaatgacaaactttagcaaaacttctctcataaacaatgtttcctttgtgaagagatacttttagtttaattttaccacattagttgccataatagcgttgttaatatcttggtgagtttttgacgtcttgaaggaataatgaacaaacatggctcctttgacatgttgaacttcatatttggtgattattgtcgctctttttgtttttgcatgtcatgcatttggtgttttagagagaacgtcaccgtcaggaccgtcaagctg

SEQ ID NO: 54588 - DNA, 408 bp, Populus trichocarpa
  Intron number 1 from transcript POPTR_0013s14100.1 (locus POPTR_0013s14100) derived from phytozome v7.0 (chr-ID scaf fold_13; pos 14439847 to 14440254)
aagaagaggtcaatcctttcgcggtatgtggaagttatacgtttcgtatttattagatctgtgtatgatttgcgcatgtacattgttcgcgtttttcgtttctgatttttagattcttttgtgatgttgattgtgttgtttggttgctgagaaaacgcggaggatttttgagagagaaattttacatgtttggatcttatttagactagaaagtttttgtttcttaataaatatttgcttaatcaagtagagtttgattatttgcacttagtatagcaatattaattatatagattactattaattttgagtttagatgaagaaatgaagcttatattttctctttgtttgtttatttgtttggtgatggaaggatcaaggaggaaaggggaaaggatcagggcaatc

SEQ ID NO: 54589 - DNA, 745 bp, Populus trichocarpa
  Intron number 2 from transcript POPTR_0013s14100.1 (locus POPTR_0013s14100) derived from phytozome v7.0 (chr-ID scaf fold_13; pos 14440283 to 14441027)
cctgtaagtttttgttttctcctaatttttcagctttacagaatgtagtgtttgttttgtgaaagaagaaaaaacttatttcttttgatttaggagtttgtaattggttaacataaaccttgtcctttatatgagtttggtgctaccttgaaggtttgatagcgaagtcaagtccaatgtaggtgtaatttgaccgtagattataattttcagttggtcaaaggatagtttctagcgttgttgaagtaaaacaagtttcccttttttgaaatttgtgatttttttttagtattttgtttgtaaattggatttgagtttaagttcattattgcacctcaaacatgaatctaagttagggacctggaatttaatcacaatgatatgctcaataggaatggaatccgagagtgaagttaaaacctataagtgacatacaagcacaaggtgaacaggatcacaagctaatgtgcttaatgtttctcttaaagcaatttttgtttgccagtttcttgtgtagccactgtgctttatggatcttctacttattgctgagtgccagtcccatggttggttttagttgttcttgcatatatatggatttcatgagctggtggtgcgattctgttttggtgtcaatttttctgtattggtgctgttgctaacttcttctcttgtgtttttcttttgttgtattcttgcgaaatttatagaatcctggaagtgtcccccctgcaacttcaaggct

SEQ ID NO: 54590 - DNA, 716 bp, Populus trichocarpa
  Intron number 2 from transcript POPTR_0006s03690.1 (locus POPTR_0006s03690) derived from phytozome v7.0 (chr-ID scaf fold_6; pos 2451563 to 2452278 reverse strand)
gtcaatattgtctaaagaaattggtgccacagaaagtaagaacaaggccttgaaatcttagaaagtgatgagttttttaatttctcttatcaagaaatcatagaaacatttcttccttcccatgaaacttcatacacttaaagattcgatcttgttaatagatttgtttttcttttggaattgattctgtcaatagatgtaatatttttcaaattggaaaaaaaaaaaaaaacctgatttggctatcaaatcagccaagctggtattgcatttataagattgtcaagtttttttttttaattattattattacacatgagaggttgggatttgaaatctactcagatccctcaatttatgaacttactcattagacctgttacagctattttttcctgctcaaaatggcatcgttgcattttttttaataaaaaaacaacaaatttattatattgaataaagaatagataaatcattatttttcatactatattaagagatatcataacttgtttttttttcctgaaaaaaacatggttgccccattaattctcagacaaaaaaaattagcgaaaatccttaattaaaccaatgagataaacatatttgttgaaatttatgcaaattaaataattatgtgagaaaccaggctaacaacgctttaaaaatgaatgaatgcagggagtgaggaaaacaaggaaagggaaataggccac

SEQ ID NO: 54591 - DNA, 914 bp, Populus trichocarpa
  Intron number 2 from transcript POPTR_0003s11280.1 (locus POPTR_0003s11280) derived from phytozome v7.0 (chr-ID scaf fold_3; pos 12142028 to 12142941 reverse strand)
ccggtgtgcctaaggtaattactccacatgtactcctattttcttattaaattataatataaattgatttttttattgttttaatgttttggtttcaaaaatacaaagaaatattattatttttatgggtttttaattgaaaagtatttttacagcaaaaacactcatgtctgccatgttgaaggttttggttggcatattccatcccaagttcgtcattgattgttgcatcttgccattattggcttctatcactacgtgtcatctttattttagttgcagacaaccttggtccgtccaaggtgcgttcttagtaagatctatatttcaaccttattggtctatcctagatattcaaaactaccgacaggattttattaatatttattaaaaatgaaaaggacggccattttcatattgattaatagcatattaaactatgaattagtaaagtggacttgtcctcaaaatatctcttcttctgcacatagttgcaaattgcattaatgtttattttaactgctgctattctatccgatagagcatccgatcattcttttttttttttctcagttggcaacaagttaattatgaaatattaacaggtaatatgtgcagcaatagatcactaaacaacacggttttctgaaggaacagaaaaatgtaatcaaaggattacggataacctgtcaagtgatttaagtcattttttgcgcaccacatcatattttattggtcacttgattggatttggactaaaggtttatggccgaatttgagatgattatttattgtactaatttaattataagccataatttggcttttaatggtgaaagtttcacggaagctgatgaaatacatggtttatcgtggtaggattacaccggcgtacaggtcaccactgagaatct

SEQ ID NO: 54592 - DNA, 554 bp, Populus trichocarpa
  Intron number 1 from transcript POPTR_0013s07450.1 (locus POPTR_0013s07450) derived from phytozome v7.0 (chr-ID scaf fold_13; pos 6245430 to 6245983 reverse strand)
caggaggcgcttcgtttcgctggcatttcaggtttgaactttgatcacagtctctctctctctctctctatatatatatatatatatatatatatatagtagacgactaaaagtagtggtaatgaatctaattttgtgattatactggtagccttttcttatctatataaggacggaccgtgtcggtaacacccaagacataattcactatattttagagtgagtcatatattttagaaaattactaaataaagaaatatatagtgcgtgtttgacagtgtggttgtgggtgttttttaaataacttttcgtgttaaaatacatgtcaatgatatttttttattttttaaaaaatatttttaacattaacatatcaaaacgatttaaaatgtataaattatattaaattttaataaaaaaataaattttaaattttttaaaaacataaattaaaccacgttattaaacactgccttcaaatagtagcctgaatcatgactcggtcagaaaagagtctgagttcacgcatgtccgtgcaacctcagaggtctcat

SEQ ID NO: 54593 - DNA, 1006 bp, Populus trichocarpa
  Intron number 1 from transcript POPTR_0018s02610.1 (locus POPTR_0018s02610) derived from phytozome v7.0 (chr-ID scaf fold_18; pos 2372224 to 2373229)
acctccctggcgtcgctcctcaggatttctttaacgtcagcgctctctctatctctctttcactcttactgcatgatctacaagtttttgtttcagatctcattttgcgctttatttgttggatttgtgcaaggagaatgtgtgatttgttaggtttcgcgttgttctttgcgtagttaagtatggcatttgattttagattcagatagttacttatacgacttgcttagagatttggtcgagttttgattaggttttgtttagttaagtgttgtgtttggattcagttactgaaaatgtttgatttttttaaggttaattaaggtggtttagggattgattaagctgcaatttacgttactctttttggacgttgcggttaggaggagaaatggacgtttggttttacttgtttggccatttggttttgactgagtggataaacaaatgagaagatgagtttgaggttaggtattgattgcgttaatcttgatcaacattataatttttgctagcatatgggagcgtgagatttgttgttgctttatgttatgttatagacattgtgtttctttcttcgtttatgtttttcgtttctggttatattaaagagttgaagatgctatagcgaatggtttgtgtaagttgaattggagtgttactttgtggcgatggcttcatatagagaagttaatgttgagtttgccagttttttagtgtgagagccgcctatttctgacttctgtttctgggcttgggtttatgtaattagggagctttagtattactttttttccctcaattgttttgcttatgaattttgttgctcttgttggttgtgattgtatgagacagtacagggattacattctgacatcttgctgaactaagtaagaatcagtaagaaatggcggagactttaatttttattttttcagtttatttatttgttgtttttcctctggttgcagggtgctgagttgacggtgaaagtgaacaaattaac

SEQ ID NO: 54594 - DNA, 971 bp, Populus trichocarpa
  Intron number 1 from transcript POPTR_0018s14200.1 (locus POPTR_0018s14200) derived from phytozome v7.0 (chr-ID scaf fold_18; pos 14481235 to 14482205 reverse strand)
taactaaagaaaatactgaacgaagggaagcagaggttacacttctatcgtttatgatatttttctgcaacttgttgatatcaaatctgcgcacatacactagtggaatgattttacccgtttatatattgcttcattttctgttaattttccttgaccatggccttgcaatttttttattttaatttatggatagatctacaagagagcgaaaattgcatatggagctttgtcaaccacattaggggatcacacatttctttttgaaaggtgtttcttttttatatcatggttaatatatatattttccattttttacctgaaatcatctaagatattttggtttttatgttttgaattcaaattttaagtttgaggtcttgactatgcattgattatacacccaacttcatttttctgtttgtgcaggccatctagtttggacgcatatttccttgggcatgtccttttcactcttcaagcatttcctgtgagtcactttaccaattgtcttgatctgtgacctgtgagagctgaatgctggcatttgtatggcgagaacaattatttacagctgaaaatgtggtaatacatgacctgggatgatggtgcaaaaacaattacattattaccattcactttctgtagttgaatgccctgatgacaagcatcgctatggttattacatgtggccttgctgtaaatatctaacaatcaagttcttctaatttctttcaagaacactacatcaatctatgctgttataaaacacattaccatcaattttattttttccatttaaaaactctcttgaaaccattttctgttaacatggtttctacttatttgattttcacgtgatgtgctattgttattctgtcttggcacaaagtatttgagtttgttgcttcacctgtcaaatattttcaactctaatccttttatgtgttccatgccattaggaatcatcg

SEQ ID NO: 54595 - DNA, 703 bp, Populus trichocarpa
  Intron number 1 from transcript POPTR_0019s07170.1 (locus POPTR_0019s07170) derived from phytozome v7.0 (chr-ID scaf fold_19; pos 7907339 to 7908041)
gatcgtgtcactcgggtaggtttttttttgtcatttgatttaatatttttttaattttatctttcaacattaagttaattaaaaatttacctttataatggattgctaatttaacaggttaacctaaatcgatctaatgtattattgttttagtatttaaaaacaaataacattcaatatatctccttattattattttgaaaaaacatcatctaatatatatcatttgagtttataaattgacaactcttaaatatttttttatattaaaaaaataattctatcggcagctgagggcgttactattaaattgagtatgatgaacactagtcaagggcctatataattaatatttgatattatagggattaattactttattttgataaactacaggaactaagttataagtaactcatgaaaatggaaaatagtttttgtgggaccaagacatgcagctgctccttaaaccctaatcacctctctttgcttttaccattacaaaacctgccctcccattctccttcaccaaaaaatttctcttccaatctttctttcttctatttaacattaaaccatcaatctaattctgcttgctttgaacttaacaactccccatgtcctccttacagataaagaaaaactacaggtgagtcccttcgctgcagcagttctacagcgggggcccttttgctgtctcatc

SEQ ID NO: 54596 - DNA, 883 bp, Populus trichocarpa
  Intron number 2 from transcript POPTR_0003s18540.2 (locus POPTR_0003s18540) derived from phytozome v7.0 (chr-ID scaf fold_3; pos 17587659 to 17588541 reverse strand)
cttagcaaggtaatactttgctacttcttttgttttgtttttgtttagtcattaattcattagttctatgttgtggtttttaagtttaattaattattttggtagtgcttttaatgttttcctatatttatgtttgtgttgctgattttgatgaggcgaatttattcggggaatgtattacacgtttcgggatttttcgtgtgaaatttgagtattttttctgtgttgtagtgtgtgagataatgtctttgattgctagtgtattgtgattgttttcatgaactataaatttgggtgaagactcttatatgaagctgagaaattttgtgatttctttttgaataaatatggtggaaaattaataactaccattaatggatctcttgatatatcccaattatcggttttggtagcttttggtttcaactgttttactaattaggcaacttgaagttcaagcttttttatccaatcatgttacaaaagaaaaattatatctttggatgtttgcctgtaattgatggataggtaatgatggttagatgaaaacttgaaatcgaatttgtctaattattacaacatttaactagtattaactactactactactaaccactttaagagtgccctaagggcacctaatagcattttccaattaatctatcattagaagctgcatgaagcgtttgcaagcacattagcttgtgtttatcagtatttgtcgtcagcatcttttttaatatttgttttattcacgaactgcatgcgctattgtggaatttatgatttaatgcttcatttggttgcttgaaccttaacatgttcttccatctatatgctatatacagagtaaaacaggcacagctggtacttcatccaccca

SEQ ID NO: 54597 - DNA, 296 bp, Populus trichocarpa
  Intron number 2 from transcript POPTR_0019s04710.2 (locus POPTR_0019s04710) derived from phytozome v7.0 (chr-ID scaf fold_19; pos 4923563 to 4923858)
aattctcatactatagcctccccaaggttgcaagggtatgcacccacatgcacaaaattccaattttttctttcttatacatttttctcttggttgtcattaaagaaagcttaagttattacttattgtcacatcttttaaatgtttttcatttctttgcttttgatttggtggagagtttctttcatgtttttttttttttttttgctttatctatccttttgcttttgcttttgtgcgaaagaagaatctggactgagcatgactctttttttggctatgtttttacaggacga

SEQ ID NO: 54598 - DNA, 674 bp, Populus trichocarpa
  Intron number 1 from transcript POPTR_0019s10450.1 (locus POPTR_0019s10450) derived from phytozome v7.0 (chr-ID scaf fold_19; pos 12026548 to 12027221 reverse strand)
cctctttcaccagtgttaccggcttcagtctgcttgtaactacttcttttcctttcttaattggaaactgcacctgagtactagtctcaaatcttttgcaaattttttcgatcagtaaagaactttttccgtgcagaagggttgattttaactcaactgatttactatttgagctttggtctgcctgaacttagatggatcaagtttaatatagcaattgtaatattcttctattgttaaaaataaatttaagatctcacatgtttttattaatatatatcatcttcactatatattataatatattaatattggattttttgattcatggttatacatggaataaaatgagatgagcttccgaaggtgtaaagagttctacttgcatgcctgcaccaggcataattctgcatcaaggctttcctcatttgggcaatgacaactatacagttcaaacaaactgaaaacaaccggatttgacaaggttttcttgtagttttatatgttttgaatcagttgagaagtcaaagctgaacaaaatgtgatgtaattcagttcaaattataatataggtttcagtgagttagtacattaaggataaacttttcaagctacacttaacatggtgctatgactgtcaaacagttcggattagctggtgcattggaaactct

SEQ ID NO: 54599 - DNA, 707 bp, Populus trichocarpa
  Intron number 1 from transcript POPTR_0013s01760.1 (locus POPTR_0013s01760) derived from phytozome v7.0 (chr-ID scaf fold_13; pos 1004187 to 1004893 reverse strand)
cttcgttagatatctacagaggcctcactgttgctgtatgtatacacgtctctctcaaaatactcaaactatttactctgttttcaagtttgttgttcttagctctagatatggttgttttatgttaatcatttagttttagtgcctcagttttctggtgggtccttcatggaaatgggttctcttttaatgatggtctgcccatgatagttttattttatataaatactaagttaccagatagcacaaacgggtccatagctcagtggtagagcatttgactgcagatcaagaggtcaccggttcgaacccggttgggcccttttaacattttatttttaacgtgaaaattgcctccttaatatctttttacttcccactttagtcctcatactttttatcctttcatttaattccaattaagaacatcaattcccccataattttcttatttcctacttcttttaggggcctttttgaatttccccgatattgtacttttcatcctttcatttaattccaattaaaaatgtattaatttccccatggtttccttattcttacctatgctacgatttggcccctttatcaaatattttttgcttctgcactgtatataggcatccttgttaaaaagtttatgaacccaccataatcatttatttatgatactaaatttgtgtgctttaatgggatttatgtagtta

SEQ ID NO: 54600 - DNA, 265 bp, Populus trichocarpa
  Intron number 2 from transcript POPTR_0018s02250.1 (locus POPTR_0018s02250) derived from phytozome v7.0 (chr-ID scaf fold_18; pos 2010526 to 2010790 reverse strand)
cttctgcttcactttctgtgcaagaaactctcaaggtagctatatttcccactttaatcgccactttctactgtttttctcttctgggacatcagttttctaagttttctgtttggttatagggaaaatgtggcaaatcaaataaaatagactatgaaagtagacgttaaaattcaaaagtttgtattttgttattttcttggcagccaaacggatttttatggtgtggatcaggaattttaattgtggttttggacagggaaag

SEQ ID NO: 54601 - DNA, 341 bp, Populus trichocarpa
  Intron number 1 from transcript POPTR_0018s07520.1 (locus POPTR_0018s07520) derived from phytozome v7.0 (chr-ID scaf fold_18; pos 7850171 to 7850511 reverse strand)
gttcacgtctccttttataggaactgtgagttgcctctcaatccttttttttttttaaccttttcactataatttcaacatattttgtattctaatcaatccctggactctttttttgttgggttttagctcattttctatcttcttttctttgtaaactataaagtaagtgaaacatggaaaatttgatgcgcattattttatttagaatccaatttagcatctgagatttgcattttaatcttgatttgatgatttgaatgtacttggtgtaccactagagtttggcgtctggattttgaataatagaagtgagatatttgtttttcgttttcatatag

SEQ ID NO: 54602 - DNA, 633 bp, Populus trichocarpa
  Intron number 2 from transcript POPTR_0006s29030.1 (locus POPTR_0006s29030) derived from phytozome v7.0 (chr-ID scaf fold_6; pos 26519565 to 26520197 reverse strand)
agcgtctcctccaggggtagttctggtcatcgcaggtcaataaagctaccttctttcttacatcttttttttttttttttttttttaatgttcgattcaactctggagttcaagttttctcattatgattatttgcattattttttttggtggacattgggcagagaatcgttgcacatttgctaccatacagggactgatatacaaatctgtaggcaacaactaagtggaaattctggttacctttgattttgcaggatgtgcattcaaatgaacatctgacagtcaccaagtaaaataaattgagagcacaataaatgcacttttcaaccatttctgatacattaatcaaccttatttaatataataggactggtttctgctgtccttggtagttttcttgctgggtgcaaaacttcaccatgtgcactagaagcattttaacaaggtcataatgggtttgaggtgtatctgtggtacaagccatgcatgtaaagctagtttatttcaattgaccacttcatttgtcagaataaaattctagcaattgctcactctttaacactttcttcctataattttatacttactgttctatatctcacagttctcgaagacgccgctctcgcttct

SEQ ID NO: 54603 - DNA, 984 bp, Populus trichocarpa
  Intron number 1 from transcript POPTR_0006s29030.1 (locus POPTR_0006s29030) derived from phytozome v7.0 (chr-ID scaf fold_6; pos 26521062 to 26522045 reverse strand)
tttcatttcagtcccaaagtagctgtctatttaaggttagaacacttcaaatttttctgtttttattttgatcacgtatattggttttaagttgtacttgatcagctggtttttatatatagttttttttattggaaagaaaatccttgattttgggttgtttttttgttttactacgatgattttgatgaatgttagtttaatatatattttttaattatttgctgttgatccttgatttcgaattggttaatttgtttctctgtttgttaattttgagaaaaatatgtgcgaatctgataggcttattgggtttttaatgttattgaatagtacggatttgttgattgattgatcaattttgatgaccatttgatgtggatgctaatgcatgctctcgctactaagcatggctagtttgatcaaagggaattatccaggaagtcttgattttgaaacatttaatttaagtctcagggtgagtgtgaattcgttaattttttatggacgttgttatgatgataatacagtggttcttgagtttaagtttcgcatctgaaggttatactaaaaaaaggaattaagttgatttggttcaattcaaagttataaaatatttagaaattattaggttcaagtggggatttcttactgaaagtggaaaggtaagtggtgaagatgacaagttactgatttgctactttgatacaatgataatgttgacaaagcaacttggtactggcatgttttccttggcgtgtctccacacaactcctgtcaactgttttttcttttcttttttgttctatgtgaagctttctgcatttcatgttatacaagattgtggtttttcatatctgtgttttgcataggagcttagctaaccatattcagtagttgctacattcctcttttcagttagtttgctgtctgtttctgagttttcttaatgtccttgtagattgtcatttggaggggttgatc

SEQ ID NO: 54604 - DNA, 800 bp, Populus trichocarpa
  Intron number 2 from transcript POPTR_0018s02010.1 (locus POPTR_0018s02010) derived from phytozome v7.0 (chr-ID scaf fold_18; pos 1806675 to 1807474)
tggttacgcaatcaacggtagagtgaagatcccaggtaattattttgtgcaatttacgtgtttcttccatgttaagtttttcttgttatgttccttaaactcaatactccagtcaataattttatttttaagatggtgtctttttcttggtctgtttggtaaaaaaatttcgggtttgttgagaccttttgtgggccatttttaggatgcccaaattagttctaaatcctattgctcttgttttgagaaatgtgtaaaatctacggtagaaaggagttgtttgttgttttatgagggtattaatggatgatggattttgatgttgggatcttggtcggggattcgtgtgaatttaattgttctagtccatccttggtgaattgttgttaatcttagttcgattgtgaaaaagagttcttttttgtggggaaaggtgagagtaaaccgatgcatagcataaggtcatgataatgatttctttagaagcagaagtccatcctctgtctgcgaagtagaatttgcaaaataaactatatcactatgattttgtcactaatgttggtaatgtatataatgtgaaactatggcacggattagttagcctgcgcaaggtcaaatattattctgcctcggcgaagatagtatcaatagattgttgatttgtggcttatttttgtctagaacagcattaacgagtatattttgttttgtgtacttcttacatctatgtttcttatttgtatccttctttcttttttagttcatcttagatttttcctgaatttgttaagcaggtattg

SEQ ID NO: 54605 - DNA, 745 bp, Populus trichocarpa
  Intron number 2 from transcript POPTR_0014s11930.1 (locus POPTR_0014s11930) derived from phytozome v7.0 (chr-ID scaf fold_14; pos 8833455 to 8834199)
cagtaagctttagtctttaccatcaattcttcgtttaaggtgctatcattttgacattcagccatgacagctcggacaacactaactgtttttttttaattcctgtcattataataaatggaccaatacacatagactcgtgaagcatcaaacatcatatcaaagcttttttgtacgtgcactttacgctactgtacttcctagagctattgtaattattgatctgcactaagcttcgactgctgcagctgatgatggtcttgaaatttacatcatagcagaaagagaacttagttttttctttcaatttcagaacatttaattacctatctatttgagtacatggtgtggattgtcaaacatgttttaatcagttttttcttctttttttactggtcttgactcagaagagtttgaattcattctgcagtttgccttgcccctacctgcttgcaccatagctttaatactctctgctgcatttatttcttatcctgttactgtttgagtgaattttcaatcatacttaaacataaccatgctgctcaaaataaagcattgccacagacacagaagtaggctcatttggttgtgcgtaaaattaaatataaattctgagccttttgtgacagtacaattaagcaagaacaaacaacttcatatgggaatgcttaacatgcaaaataacgcaagttaattggctccattttgctcgcagacgagaatcctatcttgatcctgacac

SEQ ID NO: 54606 - DNA, 683 bp, Populus trichocarpa
  Intron number 1 from transcript POPTR_0095s00220.1 (locus POPTR_0095s00220) derived from phytozome v7.0 (chr-ID scaf fold_95; pos 47820 to 48502)
ggtgcaaggtaatgtggtagtgctttctggaaccagccaaaaccgtgctttttttgacaatcataaaatctttgtgcttcaatagccttattgttctttcatagctcagaaactggaaattcttctaattctggacactaaaagataaaaaagaaaagtattgtttttggtcttaatttttgctgataagaatttacttattttacacatgcatccatgcatgtatgaaaggaatttttaaactgatagggtacaaggagggaaatggaaatcctcatgagttactgtctttctgatgaaaaatatccatattgttgtgaaatacaatatcccagtttctagcatcttcccaatttattttcagatctgcctaagctgcttcatctgagctgtgtgaagacataaattaatgagtttgtttttctcaccatggtttctattttggaataaagcctaatgagtgtgtgaagacataaattaatgagcttgtttctcaccatggtctctattttggaataaagcctaatgatatggggtattatatgttctgccagtctgtttgaagcaaatgcttcttttctttttcttggataagtaaaatcaaatgttttaatgttttatttttttattattgaaaatttctcacagttgttgtgttttgttgaaggctttacttacaactc

SEQ ID NO: 54607 - DNA, 894 bp, Populus trichocarpa
  Intron number 2 from transcript POPTR_0095s00220.1 (locus POPTR_0095s00220) derived from phytozome v7.0 (chr-ID scaf fold_95; pos 48719 to 49612)
tcaggcaaccagtaatcttactgtagaagcattgtatcgcctttccttttcttttgaaagtatttgatttcaatccacctattcctatcagatttcaacacttttccattgatattacctcaatgtatgaccaggttatatggatcgcctcccttgttggtactgttagtgtactgtgtatcacctagggtacatggaacatgggctatatgtttgagagtaaattttgacaaccacaaacttcctctaaagatgttctatcccaaggttatttttttagtgggttagcaactatgaaaaatcagattatctctggtgaaagatgaccaggatggctaattaaacccctttgggttggaagatttcattatttttcctttttgagaaacatcttagtttctttattaaatccttcacttaacactctgcatggaactccagttttttttttccctcccatttatattgttttatttagggtagttgatcatactatgatgagcagtgccatctttaactataaactttaggattagcctgtaattttacctcctggcatttcatctcaatgtatattggaagtaaaatcaagtttgatcttgtatcaaatgggctccacatttgttatcttgtgtgaagtagtctgcattggaatatcatgagcattcttttatctccagagtacccgagatcatatgggagtagatttgggagggatattcttagtctagcatatcgagggaatgacgtagttcataatgccatcatattgcacgtgggaacattctgaatacttttatcattactttataatgatgcaacttaccttgttaaaattcttccattattctttgaataggtaggctgcataacacgattggtgccacagaaagg

SEQ ID NO: 54608 - DNA, 525 bp, Populus trichocarpa
  Intron number 3 from transcript POPTR_0014s03640.1 (locus POPTR_0014s03640) derived from phytozome v7.0 (chr-ID scaf fold_14; pos 2899055 to 2899579 reverse strand)
atagctttgatccgtatcaggttctttacatagctttatttttaacatttttgaagttgagatggagtaatttatattttttttgtattagctgagttttgatgtatatataagaaggccggacggtgttagagtggaaataaaatgcttctatgtcgacccttgcattttatatggttaggtatgacaacccttctgtaaacgaacttattgatgaacaaataagaagctttttgttgtattactatattctttcgcggctgttgatcaagtttggtgtatgaaaaatcaaatgatgtagaatttgatgtttttttctctagttttttgtttgaaattcgtcattttgttgaatttgactcgtgaggtgtctaacgtgtaaatgaaccttcctttcgtgctagttccacttactatcaaatgttcttctctgttctgataacgtgtgcattctgatatgtgaatcacttgtcaccaaccccacctatatgcaggaactactgaaagcactgattggatttatag

SEQ ID NO: 54609 - DNA, 603 bp, Populus trichocarpa
  Intron number 1 from transcript POPTR_0003s13830.1 (locus POPTR_0003s13830) derived from phytozome v7.0 (chr-ID scaf fold_3; pos 14093737 to 14094339)
tttctacttcttgcttgcctttgttggggctaccagtgagtttctttggccatatttgtgcttgcagttttcttgtttgttattttgatgcttgaaattattgaattgaggaatgaggtggattttgaagttttaggaatttttagttaatttgttggattaatgtagaaattagtaaaaaattgaactgtctggagatacccttttcctctctttactaaaacacgtcctttcgtgttctcatatggccgaggactagaagtgtttgtgaatgggggattaagggcaacagccaaacaggttccattaaaaagaagagatcttttcatgcaacgcacattgtatttgtgccattaatgatatataatatcgtattgtaggatcagaacttggggattaacctaatatgttgatgaataatattggtggatttttaaacattgttccttttgcatgaaattttccctgactaggtttataattcttgttctgccatttttcgaatgtcttctgttgtcagacagcttgttttatctatactgactttcttcctaatggttctttggttgctccacatctgttgagcagtcccagcaggaattt

SEQ ID NO: 54610 - DNA, 820 bp, Populus trichocarpa
  Intron number 4 from transcript POPTR_0003s05500.1 (locus POPTR_0003s05500) derived from phytozome v7.0 (chr-ID scaf fold_3; pos 6795287 to 6796106)
cagggactgtgtgtatttggaactaccagtcacaggtatgggaatgtaattgtactagctttgcttcatgattatggtttattcacatttgcaatgacaaagaaactgttcaaagtagggtgattcttgttgatggtcatgatagctttttaaaaaatatgtttatgtttgaacagtgaagcatcatgatcagtaactttagttaactttgagtgggtatgggcttccaaaatcgatgtttttaatgtgaatgctgataattctcaatcatcttctgtaattattttagaggaaaaaatataaaaatattttcccatgcaagttgctggctgttatgagttgggccttgaaaggtgacctgtttatgaaaaactgaacaagttacatgtaattgggatcaaaacttgtcatgctttctgtcaacctgtgaagctggttaccatttgaatttgtttttatcagatgggaacagtgatgaagtagtagactattaggggtaggaaaagctgcaatgtcatgagttgtttgcccccttagcaaattggattatggacatagaacacgtccaccatatcaatagggagtgttacaatttatttttccatttctgtagacaaaagtaagtttgaaaaataaacttgctgctggctatcttgtgagacgcttgtcatcaaatgtatttttattttgctacacacgaatcagtggcaaagtttccttttgttgtttttgatctgtaaattttcttaaaattgattatttacttggaggtttttattttttcccttctaacataaatatccttgatctcctccagacc

SEQ ID NO: 54611 - DNA, 797 bp, Populus trichocarpa
  Intron number 1 from transcript POPTR_0003s08240.1 (locus POPTR_0003s08240) derived from phytozome v7.0 (chr-ID scaf fold_3; pos 9648155 to 9648951 reverse strand)
ttgttgctgttaaatacattgaaagaggaaagaaggtaagctttctttaaaaatgtcataatcatgcatcgtaatctctgctttctccttgcagtagtgataaaaagtacttctggtaatttttctcttttccatttctcatgcttgccttcttggacagcttgatattgagaatcgattttatttacaaaggagctttttgaattatggattggcctgtcgtccaaaaaacacacacaaaaaagggaaaaaaggtggattgggcttagtttaatttccgttttttttatggttaattattgccactgccttttcaggcaacatttcttggaaagtcgaagttgttaatttgttgtgttaaatcctagaaggaaagaattgtaaattgaatgttaaggaagattttcagataatttgatgggggagtttgaagagtcatgttgctcttttttgtcatttctaggggagacaccttttagatggcacattcccagaagcagaggggtaaatttaccgaggatatttaatattatcgtaaccatttctttaccatcttaagagcagttctatgctcagagcagatatatttgctcaatgactgctagtcaagcaccataaatttccattttatttctccagaacatttctattcactgttcttattgtttttggtagcatggtttttgttgtgactggatgtgatggtactaaagctctttgacaagttatgagttagctatagatatgcgccttagccaatgattatgttacaccaacctgtatctggtttcagattg

SEQ ID NO: 54612 - DNA, 875 bp, Populus trichocarpa
  Intron number 1 from transcript POPTR_0014s08250.1 (locus POPTR_0014s08250) derived from phytozome v7.0 (chr-ID scaf fold_14; pos 6131558 to 6132432 reverse strand)
attcaacttcaagtgcagaggggtttgttaagcaggtacctatcacttactgatgtttcctgctattattggtaaaggtgattgatagcatactgtctttcatagatggttctgtgtatctactctatttattcattggttgaaaaaccttttcaggctacatgtctgtatgtttaaatatggatttatgattgtatatagatcacacacagactttgtttatcaaagtatcatttttcttctgttacttttgctcatttcttcatagtgcactgtaatcattttcatgacttctgagcatagttattgaattttttggccccgagctgctgttatacccaattgacactatgcgcggaatgaatttacaagtgcttcatctggttctatatagggccttttgcaataatttttattaactggtatgtatttctagtgtattgcattcaactagggccaaacagttttacaggtgattaaatgttctcaccatatgctacttgtacccatttgacaagggaactcctaatttgattagtattttggcccttgcatcttttgaatttatcacctgatgggctctgctaaaaaacaagatcactggttgttcatgctgtgtctatgttaaaattgattttaggtcacagatgcatgtttttgattgatggaaattgccctgctatggattggccactgattgtgatgtcctcgtcaattttaataccttaatttgctatttatataatgcttatgttgatccctgcaaatgttcttatgtaactcagtttatgttaataccataacaatccaattatctccaatttattacataatgtaagtcacaatatattaccactttgtagaaatatcagaag

SEQ ID NO: 54613 - DNA, 680 bp, Populus trichocarpa
  Intron number 1 from transcript POPTR_0019s15250.1 (locus POPTR_0019s15250) derived from phytozome v7.0 (chr-ID scaf fold_19; pos 15806328 to 15807007)
ggtagaagtaagccaattcccaatctgaatttttatgatgtttgtattttttttccttgtttaattagtaatcaatgtaaatcttgtaaaattttggtttctgctatcataaatatgaatggatttttgtatggatagaagattattgagttttctttgcttttggttgatttagagtcgtctttatctattctgggaatatccaatgatatcagcttttttttaatcattttttatggactgtaaatgattgttagattatgtctaagagatggatgcctttgatgaagaaaattaatataggatgagaatacttctatttttattcttgggcttttggagtaaatctagatcttaattttgaaacgattttgattgtttgtgtacctgaagtgatgttcttttttttattgctgtggttggaacaattagtttattaaattctatgcggttttgaattacaggggctttgttcgttgaaaactttcttttctctggtgcatatttatgcaatatgctccattgattatgtccctgtcttactttttagggcttgatttttgttatgtgacgggatttttaaaagaagtgttttctgctgctaagctgatctagtttttttttcttcttttttccattttgcaggacctgcaaggtgttaccgccagatcaagaataaa

SEQ ID NO: 54614 - DNA, 825 bp, Populus trichocarpa
  Intron number 1 from transcript POPTR_0003s14630.1 (locus POPTR_0003s14630) derived from phytozome v7.0 (chr-ID scaf fold_3; pos 14652237 to 14653061 reverse strand)
atcgccttggccgccaccgtcgtctattctcgtaggtaaaataacaaagtcaacaataaaaaccccccccaagtgttcgaataattgacactctaattcaaaacttagattaaccgtcgccaaagaaaccctagatagatatatttagatgttgatgcaacaaaaaccgttaatgagagccttaaggcgaagccatactcctttttccacaacttcttcgacgtcaaactcctcctcctcaccgtcatcgtcatcatcatcgtcgtggatatatttgagatcagttttattagtagttgcctcctcttcgttgtcctcatcatcttcctcctcaccagcttctactaatcggtgagttcttcaattcctttctgtaaacttttcgtttttttttcccaaatccaatctcttagtcgtctaaaaatgaccccctttgcgctctatgttattctatcaagctagtttcttattcttcctgctccttttacttgccttttgctgtcttgttattagaatttcggaacagttctcgaatcttcgatgtgcaattaaagaataaattcgaaagtgtttaggcctcgtggaagaatactgtccctcatagaattagttgttcaatgtagactcccatctaagaagtagtggaagcaaatcgttaatagtatctttggatgccatatgggaaaaaaagaattttgagttgtaatcggtggtttgggaattttgtttttgtagatgattatcattgaataactgatcttttgtttcttcgtctttttttttggttcaggggtagtcttaaatcgccttggtcgcgtaggagaa

SEQ ID NO: 54615 - DNA, 859 bp, Populus trichocarpa
  Intron number 4 from transcript POPTR_0013s01520.1 (locus POPTR_0013s01520) derived from phytozome v7.0 (chr-ID scaf fold_13; pos 860968 to 861826 reverse strand)
agcttgcattgagagctccattgggacagaacacagtatgtactccttttagtttgttgggttttttttgtgttgcagaacttcagcttattcattatgtttgttgatggattgatcttagtttagctgattctatggttctgattttcttgaatgctatctgaaatttattactgtttttgggttcataccaagtatgcttttaatgttataataataccttcagtatgggtttctttgcttgtatgatattaatgggattctattaaatgtttgtgatgagcctacaggcctgtagtgatttgcgcaaatgatggcaaatttccaagaacatctaggggaccgagctttgtaataggactcatatttgtcttgatgcatgaatcttggtaaattagtattaaaatcgttgtcattctctgttgattgattatttattgatgtacttgattttatacagtaatacaatcatgatatatgaaaaagaagaggtctagagaacacacacaagttgttggttatgttatcgttttctctgctttgattttgttaatcaccatagatgtattactctactagatctagggactctagaatccttaggcataggtgttattcccacattttatccatctcatttaggtgcatgtcttatttctttttatttggttcggagttttatctttctcttaacacgatttgcatagttccactagctgtatcttctctaacttcttggtatcgaaaatggcagccgttttcagaattcatgcaacttgtatgaattaccgaatattattcttgttttggatgtttgcttattcttttttttttcaggttctcctcagaggcccaaaga

SEQ ID NO: 54616 - DNA, 356 bp, Populus trichocarpa
  Intron number 1 from transcript POPTR_0003s13000.1 (locus POPTR_0003s13000) derived from phytozome v7.0 (chr-ID scaf fold_3; pos 13423616 to 13423971 reverse strand)
ttgtttttcagtgaaagtcgttctcggacacgaaagtacaccccctcttcctccctgccaaaaaagaaaaaagaaaaccatttccgtaatcccgttggcttgcctcaagacaagccaccgtaattccaattcataaacttctctttttcaatccagtgattcaggtaaactgtttgagctcaaagagctacagattgtgtgaatcaaatactttctgattcggtgattttgattttgtttagggttttggagaatattattgtttagttgtttgttactattataattgcgatgtctgtgtttgttgattgtggaaaacagtgttggtgattggaggataaagagagaagaatcat

SEQ ID NO: 54617 - DNA, 471 bp, Populus trichocarpa
  Intron number 1 from transcript POPTR_0013s04790.1 (locus POPTR_0013s04790) derived from phytozome v7.0 (chr-ID scaf fold_13; pos 3303271 to 3303741)
tttaaagagaactattgtaagtttaattgccatggcaatgtatctcatgattgtatgaattatgatcttagtgaaatgtaatggaatggtattaaagtcatagttaattgagggtttactttaacatgcaaagaaatctgaaataatagtaccctgtaagcatttttttaacctagacctagttatttttgttagctatgagtcttgataagtaatttactgtggtaagtttttacatgaaagaaatcccaagatccaatgccacgatcagatatttatcatggacagttcattaatttacagtgaaatgtaaaggttgttttcttcttctttggaaagcagcttaatctgcagaaacttcaatcaaagccaaccacaatatataacacatgcattactgaatattaaggcataaaccagtggatttgaatatataacccctaacagtattttgtggcaaggtattaatcc

SEQ ID NO: 54618 - DNA, 756 bp, Populus trichocarpa
  Intron number 1 from transcript POPTR_0013s01350.1 (locus POPTR_0013s01350) derived from phytozome v7.0 (chr-ID scaf fold_13; pos 752455 to 753210 reverse strand)
attgttgttgaattcattaaaaacgaagattacaagtaagtgaaattattttttttaaaaaaatttaactgttaattaccatttggattttgttctaaattgattttaattgtgattatcagtctctatttagtgttagttacctttgttgcttgtattttaagtgtgattatcagagtattaagcgttatttacccttttcctctgataataactcagtttggggaagtttatggtaatagtaactggggtctcataaattttggtgtggggttgttttttttttgttgtatgtaggattgagctaattgctctccatttgtgtggataatcgaattcgaaatcaagaagaaattttgggttaatttatgcaagaaaatgaaatggagacttggaacttttggaattgaaaaaagaaagaaagaagatttaaattgaatttatgttttctttagcttctatggtttttgttttgtttgctattaaaaaggtatggaatttaaatgaatggaaataaggtaatagaggaaaagattagaaacttgtttgtttttagtattgttgtgttggaggttacaagatttgatgtctgtttgtttgttgagatactggtgatgagaggagagatgagaaactttttgttcttagtatttgtagttggtttgcgtactctttaattttttcttatttttttttttacagttctcaaattttctacttggttctaactggacgtttctttgccttggtgtagat

SEQ ID NO: 54619 - DNA, 718 bp, Populus trichocarpa
  Intron number 1 from transcript POPTR_0018s09290.1 (locus POPTR_0018s09290) derived from phytozome v7.0 (chr-ID scaf fold_18; pos 10170597 to 10171314)
ctaggcgagctattttgaggattgctgctggtcaggtatgtttggttactcggaaaattgagaggaatgggaatttgatttctttcttttttcttttttctaaaaataaagatagataacttgttatgaatttttaatagagtaattagtgagagtttgaccttggttggtgattctaaatgaaattcaacatttttttataaaaaaaattgaaattgtttgatttaagctttgtttgatggaatcttttatcttctcttgggagaatctaaaacaattgttttttttatgtaccatgttataagctgacaaatggagtcttttgtgattaattatggttttttttttttgtggtgatttcatctgcaggagggagatgattagtaaattaaatacttttatgaatttctggatgcattttagctctgtctgcttgcttaaataacagaaaaaatggaaaatcaataagtagtttcatttttgttctttattgccaaaggttgcagaaatcatcagttaagagtagacagtttaattgaaaataaaagaaaggttccacttggataatgccataatttaattcgtgtgaatgctggtgaaatttctggtttttaagctgtggttttctgctcggttagattttctagttcagtgtgaagcaattattaaaccttctgtttcttgtgcactgtatcagcttggaaggcgtgtagagtcg

SEQ ID NO: 54620 - DNA, 680 bp, Populus trichocarpa
  Intron number 2 from transcript POPTR_0006s10490.1 (locus POPTR_0006s10490) derived from phytozome v7.0 (chr-ID scaf fold_6; pos 7830563 to 7831242 reverse strand)
gttggtaaacaaactcaaaggtttgttgacttgttcatttgctttatttttcctgttttgccacatggtgttttgtagttagtttgttttgtttcttatatttctttcccacattcctgatgattctgcagttctgtaatgcatttgtgctcaaacaaatgcactatagctccaagtttctctcaagattcccgtgtcaaaaatgttcccatagatttaaatccaatttccttttgggaagttctgaagttttctaactatttgggaccttgaagttggaggccaattaatgcaatgagaaaaactcatatttaatagcttgactagaagttagaagctcatcaaaatgacacatctataacttgaatgtaagtaaatttgcgactgttctgtttaatatgaattatttgctactgattgaaggctaagttaaaattctgctgtgatgttgctttaatctgctggaattcggaatgagtcagttgattaaattgagtagatgtccaggaagtttccaatctagagcccatcatcatgcagagccattgttatctaaattatgatattctgaagatcccttttgttgaaacttcttgttttgcagtaatctcctacttagaactcttaaatgcatctttatctgctactttgatcattatgccactatttatataggaaaa

SEQ ID NO: 54621 - DNA, 857 bp, Populus trichocarpa
  Intron number 1 from transcript POPTR_0006s10490.1 (locus POPTR_0006s10490) derived from phytozome v7.0 (chr-ID scaf fold_6; pos 7831246 to 7832102 reverse strand)
gcaaggagttcaattctgtaggcgacgacatcaacgtatacgtttttccctcttgttttcttaaattcattttgatgattaacaagttcgaccaagttgcttcctttgttgattaggttatgatttgaagattaattataatttccaggtgtgaaaatggaattaagataatgattgttgcaattaactatcagaaacataaaaaaagaatttagggtttgtttggaaatatattaatagaagaaataaagggttttggttttttactagagcagattaagaatggtagcttttgatggaaattgaagatggctgagttggtttagttcctgtttttataatgcttgagattactgataattgctcttaatgtttggattagcagctaaaggaatgatcgagcatgtgggattctcaatgatgttgctgaattaaagatcgaagaactagtctaggcaaatatgtctaatcttatcacatttttacttagcaattgacagcatgacttgtatcattgcgattctcaaagagttcatgagtagaagttggactttatgaagtgttaaatgatcttgtatgtttataatattttgcacaatgaaatggaatatgggtttttatcaggttttagttagatatactggaaatgatttttctttttactcctaggtgggaccgtaatctaattaagtttatccttcataacaatcattgattcatatgagcttattgctttttgtgcgttctgctttcctctgaactctgctgtcattacctcagttactaacacattttgcgtgctgatatctttctcttcttaaccagtcattgtcaacgagcattgaaggtggaaccaa

SEQ ID NO: 54622 - DNA, 418 bp, Populus trichocarpa
  Intron number 1 from transcript POPTR_0003s20080.1 (locus POPTR_0003s20080) derived from phytozome v7.0 (chr-ID scaf fold_3; pos 18678687 to 18679104 reverse strand)
ctgtcggctcaagtaagctctgtttccttgacttcctttgttggctcaatcttttctacatgttcttgaatttttttcatcgcaattttgctttcttttctgcagctatgtatatattaaagaacccataataaggattttcgtgttctgggtttggggtatttcaatttatttttttggttctttaggatatttgattttttggaagtatgaattatgtgaattgatgttacatggccttaatctttttattttgatgagttatttaacgaaatatcatgaagttgaataattttaatgaaaataaagattgagttgattgatgtcttgattcgaatgcctgctgcataatcttgtgtacttgttctttctggttcatttggctttgctgactatttattatttgtgaagaggggaa

SEQ ID NO: 54623 - DNA, 646 bp, Populus trichocarpa
  Intron number 1 from transcript POPTR_0006s26450.1 (locus POPTR_0006s26450) derived from phytozome v7.0 (chr-ID scaf fold_6; pos 24681540 to 24682185)
gctgtaaaaagactctggttcgtcaccagtcccttgtaagtttctaatttttagacctttttggcatctgggttttcgtttttttagtaaaaacattttgggttttggttattgtttatgttttagtggcttaatgggttttgtatgtaaattggcagtgtgtttttttgttgtttgagtaattaaagtttggtttttgattggattgaattggtttgtttgctttgattcttttttttttaaaaaaaatattttgttcttctagtggctttaagtaacatattcgtaacaatcacgggaagaatttttcggttagtgatttcgggaataatgtttctgtaaaattagcattatccgcgtatagattataatatgtggacggaattgggaagttagagactatattagtaagaattgaaatgagctgagagagttatgttttagcctgtagcatattcttgctctgttgttatcaaaatctttttgttggattagattttctattatgaactgttttctttgacttttgttggagtataaaagtttgtaagtaccggtgaatggtgatgtacagttctttttgtcaaggttttgaccagatttttgtgcaggtgaagacaaagaagttggatatctctgttaaacc

SEQ ID NO: 54624 - DNA, 864 bp, Populus trichocarpa
  Intron number 2 from transcript POPTR_0006s26450.1 (locus POPTR_0006s26450) derived from phytozome v7.0 (chr-ID scaf fold_6; pos 24682356 to 24683219)
gggtactattttctttctcttagttctactcatgtttgctcatgtgggatattcgagaatgctactggctgttctttggtgcaaatgatgtgcgggatatgcatgattttattagagcattgtcacttcacatttatttataaattttctcttatcaaatttcttaaaatcttgcatttcgcaatataacaccatttcaatcaagtgtattgcaggttgttatacaaaagttgaggctcaaaaatagaaccttttgttttcgcttgtgttgaagaaacacaatatttttatcttttcttcaatttctgctgtctcaaagcatagttgtagcatgtttttgtgattattgtggccatggtaaaacattatgtttttgtgtggttggttgtgagtgcaatactgatggcatcaatgtcagttatggtggtgatgagcattggttcaagtcggttgtgtttttgatgaaatggtgaatgtattcatggcagcagctgtggttgggtaggatttaatggtggtggattgttaaatgctggtgccactgatttcagtctttaatgatggctgtgttagaggaatggtgttataaaagatgtttatgatgttattgaatattgctagtggtgattgtaatgtgttggcaatggaggtaatggtggtttttgtaaggaggcagtgttgtgcttacataatgtggtaacctattactgatgttgcaagtcatggttttgatgttattgttggtttttcatttctcacggggcacagatctgtgttgattgtagttttatatctagcattagtttggtgattgtaatgtttagcaatttaacatagagttttatattgatggttaggtgtttg

SEQ ID NO: 54625 - DNA, 287 bp, Populus trichocarpa
  Intron number 1 from transcript POPTR_0018s04830.1 (locus POPTR_0018s04830) derived from phytozome v7.0 (chr-ID scaf fold_18; pos 4203575 to 4203861)
tggcgattgctgcggaggcccagccccaagagaaggtaatttcttgtaaagagtttaccttgatttcaaaatctagggtttttgttctcttatcgcgtaaagggagagaagggaatttcttgtaaagagtttaccttgacttcaaaatctagggtatttgttttcttatcgcgtaaagggatcggtgctcttcttggtttgtttctttgattctttttatggatcaaagatataattaggatttttaattgtgggtttttcttaaactttggtacaggcgagaacag

SEQ ID NO: 54626 - DNA, 536 bp, Populus trichocarpa
  Intron number 2 from transcript POPTR_0013s13100.1 (locus POPTR_0013s13100) derived from phytozome v7.0 (chr-ID scaf fold_13; pos 13686078 to 13686613)
agaagacaattcaatatttaattgggtcaggagtgagatccttgtcgtaaattttcttatattcagatgcatgctcacagaagaaacataattgttcctttgaccacatgttcatagatttttcattggtccgattagcaattgtgatgcacttctgggtgctcaccacacataaaagtttctgctgttgcggattcagccattagcatagtaaattgatttctactggttggtggtggtttaattttccacccagtcaatatgcctgcatttctaattgcagtttaatctcgatctaattcactgcaaattgaagaattgggtctgctaataggtttattttctgaaaaaaataatctcctgttatgattacgtttgaagcaaaatctagatacctttataagagttaataatatggatccatggagtcgatcaccagacaatttagtctcgaaggtgcctttttctaatttgattttcttttcttgtatcttttcataggatccacggacagaaaatagtccctacctggggtt

SEQ ID NO: 54627 - DNA, 291 bp, Populus trichocarpa
  Intron number 1 from transcript POPTR_0006s02130.1 (locus POPTR_0006s02130) derived from phytozome v7.0 (chr-ID scaf fold_6; pos 1379662 to 1379952 reverse strand)
gtagaaacggtatgatatatatttgtgtgtgttaatttatcttttaatgcatcgatcctcttaatttggcttttcttctttttacgtggaggtcctatatatgttacgtacaagttcttgataatctctacagcggattcttccatgtcagaacatatttttgagttcttccaatctttctgtctataaatttatcatgacgtttttttatgttttctattgggattaatcatggtgaggtcctatatgaaatgcatgcactaactactactgttacagaaagtcacagag

SEQ ID NO: 54628 - DNA, 620 bp, Populus trichocarpa
  Intron number 1 from transcript POPTR_0018s14420.1 (locus POPTR_0018s14420) derived from phytozome v7.0 (chr-ID scaf fold_18; pos 14624632 to 14625251)
tttgtaagttgttgttctgggttttggcttgttttttttttgttgctgctagtttaccttgtgtttgttttctttgtttccattttcttcttttatgtgttgataggtctgaatcactaaggaaacgtacctcatttctttagcagagttgttttcacagaatggatgtgaatttgatcatgttaagatgggctgtgatcattttcagtttaactgggttctatgctttcgtttaactgagttcttttggatatctgaaagttggtattttgttgttcagtgggaattttagtgtgttttgggactcggtgtatggcgagtattcggaataaatgaggctaacatattgtcttaaagaaggccatggtcataaataatagggaaggagttagtaattagcattcaagattggatctgcatgaccaggactgtttttgatggatattggttttttgattgacaagaaatggcagctggtttttaatgtgtgtgcatgctttgctcatgttgtcatatatgttcgttttctcaaatatataatgcaaatatcaaaattgtcttcaaaacacttatctgactttctgttgtagatcaaattccatatattgaatcaggcattt

SEQ ID NO: 54629 - DNA, 740 bp, Populus trichocarpa
  Intron number 3 from transcript POPTR_0006s08340.1 (locus POPTR_0006s08340) derived from phytozome v7.0 (chr-ID scaf fold_6; pos 6068197 to 6068936 reverse strand)
ttgtggtgagtttatttattaatcaaaatgagatcacaagtttcaaagataatatagggcatgaatgtttgcatactttaactaaatggctttctatagcaattaaggttatggattttaattttttgtggggtagtttggacccatactaggtaagaaattttgttttccttccatatgctacctaccaaccatttccttttacctcctattctactatgtgctatgtgcatgagtggcgagtaaaaaacatgtgctttcttactcaatttttatttgtgttcataagtaacgcttttactttcaatggttgacaaagattccatgagtacattgatatgagctatcgtgcacttaataagcatgaagttgtctatgatagcatgccaagccaacattccaacatgcagaatatgtatttattcctaaaattgatttcactttatggcttgcaggaagactcaactcagcggcataatttggttttattctttaatgatgtttagtctatcacattatggatacctatgggtcctttcttccccttagttgatcgtttgaaaatcttgaaggatgaagtggattagttatctttgcttctttatttcctaaaattagctagccatgctcgcatcagcattgtaagttagttaaacgaaaaaatgttagcttgatcattgcactgatcttcaactcttttatacgcaggctccattaacagaggaattggtgttcagagc

SEQ ID NO: 54630 - DNA, 423 bp, Populus trichocarpa
  Intron number 1 from transcript POPTR_0003s04470.1 (locus POPTR_0003s04470) derived from phytozome v7.0 (chr-ID scaf fold_3; pos 5196067 to 5196489)
ctaagtaagtggctaactatctgatccaaagtctaaatatttgagaaaaatcagttttaacgtcttttatttttggtctctttctctttgtaagtttttcccttgttttttctttcttcttttttgttttttgtgttttttttttttttttctcttttggatcaactttcagaaccctttctttctttctttctttctttatttgtttgttacatttatgtatgagaaccaaagatctatggtcccatgatatgcaagcttatgatttctaaagcagctagctggcttatcgaagtaagagaagaaagatgatgaaaagtttgatgtttcatcagcaacagcaacaaatactacaagaggaaaatatgtctaatttgacttctgcttctggtgatcaagcaagtgtttcttcaggcaacagaa

SEQ ID NO: 54631 - DNA, 738 bp, Populus trichocarpa
  Intron number 3 from transcript POPTR_0014s10800.1 (locus POPTR_0014s10800) derived from phytozome v7.0 (chr-ID scaf fold_14; pos 8081614 to 8082351 reverse strand)
aggaaaaggatcacattgagggctttgctccagaggtcagtgtttctctctcttttctctgcatcatccgggatttgaactttgtttgttgacttggcaggtgggttactatgctttcgaatttagaagccattcattttgtcactttaaaaatcgccttgttttgtatgtaaaattgcactctgccataaaccattataaattaaaataaaattttattgtaaatttgtagtgttactagtcatgaaatataaggtttaataggtacaaacacatctgctcagttcattgttccttttgaaatgattctgagtttaaatccagtccagagtacaagtaaagtttatggtcttataattgaggttaagttgtactgtttttgtttcggaatcaggaacatatctcatgttcttagattggtgttgtttggtttgggaccatacctcaccataagagtgcaggttcattgctagagaacatgcttaattgaaattttttgtaggatagctttgtttccaaattctcgtcatggacccatattgttgcgatcataactgggtaatgggatcttaaaattttggtgttactcaaccaacaacaattttttatctgctgtagcatttcattttcctgtgcaagaaagcaactttttatatacagaaaagaaaagaggtccttactttatcaacttggtcttttccaggttgcttgggtgacaaagtcaggaaaatctgactt

SEQ ID NO: 54632 - DNA, 968 bp, Populus trichocarpa
  Intron number 2 from transcript POPTR_0019s05420.1 (locus POPTR_0019s05420) derived from phytozome v7.0 (chr-ID scaf fold_19; pos 5751868 to 5752835 reverse strand)
agagttttggaggtgagagcgaatttagttattgattttttttccttacaaaatcattaccgtttcttagtgctggagtggagtcagttggatgtgcttgatactcatggttgcattccaaaacggcaaccatttgttatggaaacaataggtttccctctctaaattgacaggcatgaaaacaggttctatacacagcatctagaattttttttgctaaatcagttgtctctacggcgtcaaaagattaaccaacctccttttaaaaaaataaaaattgttcgtattcagcttatgagaaaaatgaaaggaactaaatactaaccataaccacatggctgagctgccatatataacagagtttatgaaaattcttgattgttgaagatgggttagatcgcgaatcttgctttccagccatacttgtggtgaatggactcttccccatgccaaatctcaacaaatggaactagaggaagtccttttaagatgctactaagctttctctgataacttctattgtgtctatttcccttgtgtctcattcaatactttttttgggaatatagaatggaggaaaacataggaatttctacttcaattgttctatcagtcttttctttgtttattattgttattgtagtttctctgtactcagttgtgcctcgcttggctgttgagaatctgctgcctgtaatcaaaatcattgttttgtaattgggtaatttaattcatttggtaacttataggtttgaattttatagtatagaaggggaaaggagggacttttatatttaacgcactgttggttgccaagttattgcagcaaatgagaaactgaattctgattgaagaaggtagtagcatcaactaaccatggaaacttgatattgaatcaccttattttgtgctttcatgacaagtcagtatttgacatatgcatctgaattttctcctggcttacaggt

SEQ ID NO: 54633 - DNA, 464 bp, Populus trichocarpa
  Intron number 1 from transcript POPTR_0019s03660.1 (locus POPTR_0019s03660) derived from phytozome v7.0 (chr-ID scaf fold_19; pos 3738305 to 3738768)
cggttattcttgtgttgtggtttcgggattttctggtaattatattgtttggttgtgaagagatggtagttttactgtttggctgctgagaaaatgaaggaaaagtcaaaaagactttttttttgggttttggaattttattaattttttatagtattactgttgaaaagtgaaaagaaaattgagttagataaaaacagttatatatttgattgggtttgttaggcttttagtttttaagtaagcaaaagaaaaaaaaaagtaaaaaaggaaggatatttttttggtaagtagttggtagccaaacacataggatagtgatcttttatgtttagtaaaatttttagtttttttagctggtaacctagaaattttttttttctgggaattaattatggggtctaattgttttgttctaatttatttcagatttgagctctgtgaaagcttgattacagtataat

SEQ ID NO: 54634 - DNA, 332 bp, Populus trichocarpa
  Intron number 1 from transcript POPTR_0019s10150.1 (locus POPTR_0019s10150) derived from phytozome v7.0 (chr-ID scaf fold_19; pos 11728710 to 11729041 reverse strand)
agggtatgtctgcttcttcttgggtttttctttatgtaattattacttttagtttcgtaagttttgggcattgtagtattgcttagctaagaatgagaacgggtagtgaagtttgaattcttttcacttacaagaagagggtatgtgttctctttatgtaatatcccagttttgtgtcgttttcagttttgaaagttgtcgttttgcttgacaaataatgtcaatggattctaaagtttgaatctttttgtacttggataaagagggtaaatgttttgtgtttgataaagaaaagaatgctaatggatactaaagtttggatttgtgtgcag

SEQ ID NO: 54635 - DNA, 924 bp, Populus trichocarpa
  Intron number 2 from transcript POPTR_0006s10790.2 (locus POPTR_0006s10790) derived from phytozome v7.0 (chr-ID scaf fold_6; pos 8157048 to 8157971)
atatatcaggtaatctcttaaccctttttgtatactaattaacagaatcttttgcaattgtataccatcaggtgatggacctatggtttcgtggtgtaatttgaaactctgttagccgcacattgtgactatagtgccataacaatgacatgtttaatttatgttggcacgcactgcttctgttattgcttggccagggaaattgattagaaatggttctgttctgtttagtcagatgttaaattatagctcagtgttatctgaacttatatctagcagttttattgattaatcccactagcagtttcattttaaatactctgcagagtacaccaacagagcatattcaatttggtgatgttttacagcttaagatgtgtttttcttcttctttttctttgggggggtaggaaaaaacctgctgcctttcattttacactgcatcagaaagatattataatgttactgtctctaaagtggaattttggcaatggatgctggcagtgacaatagccattcttcttgatataacaggtccatcacttgtatgtgatcgctttttgggttattctcactcatattagaagcaaaaagtgtgggatccttgaaatttgatatttgccaaagtcatgtcattgtatgatcatggataggtagatcttaaacaactctcccatttaaagatgcttcaaatctatcctttctggttggaaaataatttgctttttgtaggattgctgatgtgaactccttgactcccttatatgatcatggatgagtagatctaaaacaactctcccatttaaagatgcttcatttctggttggaaaataatttgccttttctagggttgttgatgtgaaacttcttaattctgaaaatattcccattactgatcctgtgcttcctttttcagctataaaa

SEQ ID NO: 54636 - DNA, 734 bp, Populus trichocarpa
  Intron number 1 from transcript POPTR_0018s08960.2 (locus POPTR_0018s08960) derived from phytozome v7.0 (chr-ID scaf fold_18; pos 9868636 to 9869369 reverse strand)
cagacgcagcagcagcagcagccagccagggctgtgtaagttacaatttgtaatttttgaaaagaaaaaattgctttctgagatggtatgtgtagcttttgctgtgtaggttactaaatttgcaattttcttggaataattgattatggaattttaccaatctgtgggcttaattgaaatttttgtttgaaagttttgattttggacttgcaaagttttcatatttgctaattttggagggttcttatcactgctctttctctcatcaattcaattttggatttttcattttttttttcatttgttggtaatgaattagaaaccataaaaattttccatttttgtggaggttttcaaaaatttttccaaggagacaatttgcttgcttagttttcttaaaagaaaggaactcttttttccctttgaataatgaaaaaaagagacagtcttgtaaatgtgattcctcactagggtagttgttttccctttcctattgatgaagatattttggtgtgtttattttcaaactgagatgcatttggtgaataattgccctaaacatgaagtttagagaagttttggtagagacagacacgaaattagttactttgcaactgttttcattgtttgaaactctgcattgatcaagacacacaattagtttgccattatgacattcttccaaatattcatccatttatttctttcctaagagtctaagactgctccccccc

SEQ ID NO: 54637 - DNA, 413 bp, Populus trichocarpa
  Intron number 3 from transcript POPTR_0019s11490.2 (locus POPTR_0019s11490) derived from phytozome v7.0 (chr-ID scaf fold_19; pos 12754890 to 12755302)
aatcttcgcaatcaagagcagtaagacaaatttctcttctgtttttggtaaatattcttttcatctagctgtatagagagcacacgatgaatttggtatatttgaaatttgtgcttagggttcagctttggacaagcgaatgcacctttttgctattttttttagtttacagttaacttgattttttctcgaagcatgaagagaatatatgggaataataagactgcaattaggtagtgagatgagccattttggttttattgttaatttgacaaagttaattataataatatttgggttttgtacaaacttttaaaagtttgattcttgtttttgaaactttgtttacaaggatcatgaactctaatagatttgctttaattaaccttttttgtttttgatttcagagatat

SEQ ID NO: 54638 - DNA, 637 bp, Populus trichocarpa
  Intron number 2 from transcript POPTR_0003s16740.1 (locus POPTR_0003s16740) derived from phytozome v7.0 (chr-ID scaf fold_3; pos 16265450 to 16266086)
acaattcatatccaattgcgccaagaagacaaaaggtacgtacaaagtttggagccatgaaaacaaggattatttgattaaggttccagactgctttttttgtgtgtattttataaaggtatctgccttttggggtttaaatgaatgctacacaacttaattagctcaatggatattttgtttgaattccctttaccttatggaaaaccaattcacaagctggaaagaaagagggatttgagtatttgcttaatcagatggaagtatctgaaggcaatataaaaagcctatacgaaaaaagccatagcagtctttttttagaagaagtcgatatatagagcatagagccatagcagttccctcaacgaaagagggttgaggtatagagcatagagcatgcctgctaattttcctttattcaattacaaagcaaattatgatgcctaatttaacagattaaagtttaaattcttggtttactatcttactcggatcgatgtactttggtacttgccttagttcataaagaaacgatattattgaaatacctgctgctccccttagtttattaatccaatttctttctgtagtaatatgttcccgacatttttcatgttattttggtgcttcaggagac

SEQ ID NO: 54639 - DNA, 793 bp, Populus trichocarpa
  Intron number 2 from transcript POPTR_0006s28980.1 (locus POPTR_0006s28980) derived from phytozome v7.0 (chr-ID scaf fold_6; pos 26482584 to 26483376 reverse strand)
tagaagtatgttctctctatctctaatttgtttttgttgttacggtgactgttgagatttattgatcttatatttgatattttttattagtcaatgtttctagtatttactacatctttttgttgaatttttgcgtatagaaaataatggagaaaacattagggtagcatttggtatcttatcggaataaaagagacagagactttacatgtttccatgcacttttgttttgaacacatcaattttatgttcgtgtcttcatctcttcaaccaagcacgttcttgtctcttctttttctgtccattctgttttgtaacaactaaacgcaaacaggtgttatttcttcatcggttacataaaggtgggacctaccattttactgttatgggtcccacttttatgcgagtggagcagtagtgccaccggagaactaaaaagtggtaatgcgggtgttttgatgaatcttgtttgaacccattttagctgtctaaacctcaactctaggaactttagtgggaatttgatataagcagaggtgcgtgagttaatttaaggcgattcagctttgtatttaccttaacatatagatgccattcctgtgaatttagctaacatggacattgttaggcacaaagttgttctcttttgctttgattgtatcccaaatttatttctttcttcttgctgtcttacatgtatttgccattatattcttctttttaccctgtgactaacatatcttccatgcattgcttagggacgcccggttccaattgtccatcgagtaattga

SEQ ID NO: 54640 - DNA, 731 bp, Populus trichocarpa
  Intron number 1 from transcript POPTR_0006s20720.1 (locus POPTR_0006s20720) derived from phytozome v7.0 (chr-ID scaf fold_6; pos 19706905 to 19707635)
cttcttcttcttcatcagttgctgttcagtcatctgtgagtttcttttatttgagttcttgttctgtattgttgacatcctgatactcttattgaatttgtagataaattagataattagttatgaatattgggctgttggggtttatgattgtcattttcttgattgtgtggtagaaatttctcttatttattcagtccatttttttggtcatcttcgtgctttaattgaagttttatcttagttttatgcctccattgttgtggaatttgatcatgttttacttgttttcatttattgtaaatgttgagttgcttatttgatcgacttggaagctacttaatcttggttgacacacaagctaggtcgaagatacttgaatgaaacaaataagagaaccttataactaatctcatatcacatagtattcttttttgaacatcactgatatatattttttttcttattcaagttttgtcagtgcttgtatccacagctaggtttagaaagagacggtgtgaattagattaattggttcaggatatcattgattgttgatgccagtggttttttacttttcttccctttttgtctcattcgagacacttgcattcacataatcctgtatggtgctcattgcttttcttttccaatgcccccaacgttgttctttgctgatgataatctgtttttcagggaagtgtacgcaagatcaatttctgtcagtggtg

SEQ ID NO: 54641 - DNA, 871 bp, Populus trichocarpa
  Intron number 1 from transcript POPTR_0013s10180.1 (locus POPTR_0013s10180) derived from phytozome v7.0 (chr-ID scaf fold_13; pos 10179346 to 10180216)
ggaaagttcaatctttctcataggtacgtgtgtatagtataccacactctcttagtttttttttttaatttccacaatttttatgttcttgaatttttgtcatttatgatttatatgatacacctttcttttagcatctacctttcctaaatcacttgtttagtttttatgtgataaaaactatcgaaggctatacaaagagtagtatcaaattattttatatgatgtattttgaatgaataatctcttatggtttgtttaggttgagcctggctctcttttatccattctttagtctcctttcctttgttgttgtgatttgaattttcacattttcttcgcttccttcctcctcctcctcctcctcctccctggtatgattcctttttaactattccattccaaacaggaaagttcacatctttttttccatttttgttcactttgtttgacatggtatgatgtgatgttgccatgttgttggtggggttcaaatcttggttctaattgttggctttttgaatttttattggaaaaactttgcattttcttttcctttctagcttgaatggacaaaaaaattagaaggaacaggtgtttgtagaaaaccccagttggcatttttcttttccagtttgaacacttcttttgagcaataaatcgtcagattcaagaaatgtctattttcaacgttgttgcttttctttttttcaatttaaaatgtgttattgagaaataaaaattaagttttgatatgttttcaatgtgtaaatagatgaatgaatttaccagtgaagcttggtaaaattaatttatgatctgctgtccatttgcagaatagtactggcaccattgactagacagagatcat

SEQ ID NO: 54642 - DNA, 805 bp, Populus trichocarpa
  Intron number 1 from transcript POPTR_0003s14280.1 (locus POPTR_0003s14280) derived from phytozome v7.0 (chr-ID scaf fold_3; pos 14386200 to 14387004)
ccagttccagattaattaacaacaaggaagaccaggttacctcgctgtctcattctcttatgttttctgtaatccctcctgtcctcttttctgttattttccaataatgtttttgaaaaaaacccgatgtttgaagctgtttttttttcctttctgatagagaacataaagaacttgaacttacctctgagattatacctgctaagtactagtgttgttaggaacagtaggattcagtgaatgtctccttttttaaagatgacagggatcgatatctaactggcaatatcaatatggagagttttggattctctgacacggcttcagttctttgtcatgtgttttatctcaagttttctgattttagaatctctttagtccactttctgttctctgataattagtttgcaagctcaaacaggaaagaggtggtagaaaacaaagttttgaagctttcagtcggattgctttagtttcagaatcataatcctcaactcaactaagctatgttcatcagttgatgaagaattttgtttgcacagattccaggacatcatttaatctcagattctgaattgttggtttctccatttgagtgccagataatcattagctggaaatatgttttttgcgacttaatttctatctttgtaactatatgtgtactacactcttgtttaagagtcgagggcaggtagtactatggtggtggtattttcgtgaaataattagaggcaggtatgtcttaaatattgatgtggtttttgattaatttggcagctaaaaagagccaggtttcattgtc

SEQ ID NO: 54643 - DNA, 532 bp, Populus trichocarpa
  Intron number 1 from transcript POPTR_0006s24280.1 (locus POPTR_0006s24280) derived from phytozome v7.0 (chr-ID scaf fold_6; pos 22919500 to 22920031)
tcgcaccacttgaaagaactaaaatactcttacaggtgcagcacctctcctttttatatgaatttgtggatttcatgtgactgattatttctgctacatgtagttagattttgttgggattagccattattaggctttgctgaaattgaactctaggtagaaactgtttctaatatgcaagtttccctgtacttttgcaaaaaactagcttttttaactattagttaaagaacagaattttgaatttgaaccagcaggttccgggaagaacttaagattcttgatctcgagtttattaaaatgggtttttgtctaaaacttgtgttcctagagtaagcctgaaagaggattctgctatgcaaatttggtgctgcatggggattttgcattattgttgcatcctgcgctgatcagttgtttctttttccttattgacttgctttcaaatgttccaatcaatttgcatttttttttaactttcttgcttatttttgtagacaagaactgaagggttccaatctcttggagtgtt

SEQ ID NO: 54644 - DNA, 568 bp, Populus trichocarpa
  Intron number 1 from transcript POPTR_0006s03920.1 (locus POPTR_0006s03920) derived from phytozome v7.0 (chr-ID scaf fold_6; pos 2639754 to 2640321 reverse strand)
gctcaggtactaacgtgtgtgtgtgtgtctaaattgtgattttgcgtgttttgatttccgggcttagggtgttttggttgtgtggattgtgttatgaggtttccaagtggtgatgtttgtgttaaattttgttttttgctagtgattttgttaatatgctgggctctgaattttgtagttgattagttaagtcattctcaacatttctcaggaagattttgggtggtgtttcgagagcttgtgttatcagtgaaatcagcttctagcttaaatcaaaagctcccatcttatattagagctgaaagatctgtgtgtagattaggggagtctgagtttgtttcattcatggattctgcatgtaactcttccctgtataaatacgtacggtgaataatttatgcctttcgctttgtataggttgtttacatgtctggatagattattccgggtggtatttaacattttctttttttggttctcttgtatatttgtaaactaattttgatatgaatggagtgataaattgttgttttgttgttgtagatatatagacagattggggagaagt

SEQ ID NO: 54645 - DNA, 642 bp, Populus trichocarpa
  Intron number 4 from transcript POPTR_0003s11830.1 (locus POPTR_0003s11830) derived from phytozome v7.0 (chr-ID scaf fold_3; pos 12582147 to 12582788 reverse strand)
ctagactaattggccaaggaatccctgaaggttggctagctcaactagtagtactttcatatttagcttgatatccctttctggttttttttttttttttgcaactttaatagttacatatcatccgaatttgtctgtttttcagaagtgcctaaactgtaccgagtatatatggcacctcacatttacttttcctaacctgattttcaaacgaggtttcattgcgccatgttgagcatgagttcaacttcttttaaatttttgatggtcattttccaagtccatttttcaacaggttcttgtttttaggttttagatgcttgtttactgagaaactttttgcttgtgtcaagctagttcaatggaatttttttctgtttctttagaagatgaagttacatgtttgattgtgggccattacctcattaagacactcggcaattatagctgattttctgagttcagcaatgctttgctcattcattttatgtgtggaatctataagccctgcccatcactactataatcaggaaacatgatgcactaggttgtctgtgtcatatcaaaatgtagttacagtttcttaacctcatgctctgcacttcagactttttggtgtctgctgctgttgccgaattcaaa

SEQ ID NO: 54646 - DNA, 731 bp, Populus trichocarpa
  Intron number 1 from transcript POPTR_0019s09060.3 (locus POPTR_0019s09060) derived from phytozome v7.0 (chr-ID scaf fold_19; pos 10644329 to 10645059 reverse strand)
gcagaagcgcctctacttggtttgccttttctctttgaagttatcgtacttcgtttgatgaaattgttggattagtttcgaattaaaacttttacgagtttgaggtttaaatccgaaggttctttgcatgtaaaatttaagggtattcttgagatgtgaaattagaaggttctttcaatttacttttaaattgattttgatttgttggttttggtgatacgaagtgaatttaattcgttaaaatggatggattttctcctccacttgctaaagaacccgtgtgcttgtgtcttctaattcaagcgatcatttgttaaacgggtacgaagggtatatgggtgatatccgtttataatatatatatatttcttttcttttatatatttcttttcttttagccttgccatgatacctacgggccaggttagggcagagttggggatgtgtatctataaatcaggttcggcttttggaaagggtagatgtagggtggttactctacctgttgccatccctagttatgtgctttgttggtgatggctacaaatataattttttgattgttagatattttgtttctgattatgcttttcgaatgttgaattagcgagcaaagttgagcttttacatcttagtttgcaatgatttttgagaattttgatgcttactttgtttacacatgtttttcaataatagatattgaggaggaggttcgctcattgcagcttgac

SEQ ID NO: 54647 - DNA, 989 bp, Populus trichocarpa
  Intron number 3 from transcript POPTR_0014s05220.1 (locus POPTR_0014s05220) derived from phytozome v7.0 (chr-ID scaf fold_14; pos 3968748 to 3969736)
ccattgaaggtttgctcctctatcactttactcgcatcctggttgtttaatgttacgtttgtttttgtggagacatttaaatgctcttttttgtgtgttttatgagcctctgttatattttgatccgatttcttttttggtttgaaaatgtcaaagttgtcttgtttttgcgagattgtgctgtattttgtttagtatctggaagaggttttgctgttaagctcaagaaaaacttgatttgcagttacttttgttagtttagaaccctgccaatgttgtctgctctatagggctgcttagacccgcagtgtgtcactggatttctactgcttagtttatttgattaagctgcctatgtttgcggtgctgctgagcaatttgttggcagaatctctattcgttcctaattttagtaggaatacagtagcacaaagcatctcttttggaatcttgttttaattcacctataaatcagttcgctggtatttgtttttctctttgattcattattgttccgagtgcttgtcgtaattgtttttaaaaattcatcaacatatatatatttgctttttagctggaatctgattgttgaatagccgatggagtgtggtagctgcaatattttttcattgcggactggcatatgttaaatacacacacacacacacttgtaaatggtttaatgatagggtgatttgctttgcatcttttgatgtggtttgaagtgtcctggccgtggacagctcaaggttatttatcctctcatttacttttctatctcgaagtttttatttagttgctagttagctgtctgcctgatgtgtgcttcaattgattgatcatgttgatattgtatatttgaaattgctagtggcttgtatgctaagcaggagaatgtgctgatcttgcactttcttgctgttgtacacgcataacgcagtttaatgattgaggttgtttatcatttcaggaacttacattgataagaa

SEQ ID NO: 54648 - DNA, 759 bp, Populus trichocarpa
  Intron number 1 from transcript POPTR_0006s26150.1 (locus POPTR_0006s26150) derived from phytozome v7.0 (chr-ID scaf fold_6; pos 24431853 to 24432611 reverse strand)
cgaatccgaatctctgctctcttctctcgtttacggttcgtctctctctctggctcgagttcatttctctccgttattgttttttaaatttcgtagttcatatcttcaattttgtatattatgcaatcattacgcttcgaataatctcaatttaggttagtttttgttttggtgtggctgttattattattaaatgattttgttattataatcaaatcttaaactatcattttcaagcgttttatttattaattgaattttgctaaagcattcagttatctgttctaattagatttagatatcacatgattttacgctgttgattttctgtttttctttttaattcagatcgtacaaattttgttagtgtctactacaatttctgttgttgatttaggttaagctaaatagtttgaggaaaaaaaataatttcataataattagataaggctgtttgttaatgataatgttttacatattgatctctgtttggttgcgattactatgcatattttgcttttttggttaaaaaagggtcttctcgtgactcttgaaacgcggaattttgaataattgtggaaaattttaactaatattagcgacatttaatccttattagattatctgttatgattcttgctcaagaaactgaaatgaagctcttgattttattaacgatggtaacaaaaacgatgttttatgttgattttagtcattttattcttctttttgtgtacagatacgtcacagcagtttcag

SEQ ID NO: 54649 - DNA, 766 bp, Populus trichocarpa
  Intron number 4 from transcript POPTR_0006s15870.1 (locus POPTR_0006s15870) derived from phytozome v7.0 (chr-ID scaf fold_6; pos 13537749 to 13538514 reverse strand)
gtgatatttgcaggttcattttttcattttaacttatttttgctgctcatcggctgataaaatagtctaattgattcttgtctatgtttattcaactatgattcctattgctgatctctttccttgcacatataatgtactctcttggaagggaatttgatgagaatgatgctctagtttttttattcagattaacctcttcttctttttttcccaagaaggtttctcttttggtaattgctattctgaatccctttctagctcgtgaaaatatcctttgatctaaaacctacatgatgacagtcacttcttaattcacacatcgtatttcagatatgtagttagaaaaccatgtccttgtgttgttccagtagttgtttggtcaaacatgtagtttctgtgcacttggatgtgtttcctttggcaaaccaacagaaattatgacaagaataaatcaaacttcttatgattggttgttggagaagcttgatcagtgttacagcctaagaagttgaacaagtcatcattgattatgctgtcttaaaaagcctaattatttttaaaattgatggttaatttccctccacgtgtttccgatgtatttatgctcctttgtacttttccataatatgagtaacatgtcttatacctggcgtgaattcttaaaaatttatataatctgccatttaaagtgccaaaatctgctacctgagatatattattttgctaattttaacccttaaacagattggatagctatttcagc

SEQ ID NO: 54650 - DNA, 373 bp, Populus trichocarpa
  Intron number 1 from transcript POPTR_0006s05190.1 (locus POPTR_0006s05190) derived from phytozome v7.0 (chr-ID scaf fold_6; pos 3637900 to 3638272)
accgagccggtgtcttggtaacgcaaggttacgaggtacatctcttcctgttcctgtctttgatttcatttcataaaaatatgttttttttttgttctaaatttttatgggccagcagtagttctctttttgtgatgattttgagaattgtagaaagaaaatatgtcgtggaaattactaaaagcgattaacccatctttgttttgattgattctgctcatggttgaggttttttctgtgtgtgacccaaaaagattgaatcttttggttttttttcttgatatatttatatattgttgtctagttcttgaccagtatctgaagcaatttggtttcttttgcagctaattaggattttttaaaaagttaaaat

SEQ ID NO: 54651 - DNA, 308 bp, Populus trichocarpa
  Intron number 1 from transcript POPTR_0013s12380.1 (locus POPTR_0013s12380) derived from phytozome v7.0 (chr-ID scaf fold_13; pos 13015152 to 13015459 reverse strand)
cagtaacactgctgctctcacttctttgaatccaagtaattggatactttatatctttgagttaaatataattttgggttcgtttcttttcttggtttctggatctgtaaggtttgaagtttggcttgttgtggttggtgtttcctgcatttttgttattgcattgctaattcttgattgaacctcggtttatttgtgttttttagtttgcaaaccttggatcttttctgttgattctgtgcttaatttgttaaccgtttgattattagttacttacatgctaatttttctgtttcaggttttgataa

SEQ ID NO: 54652 - DNA, 502 bp, Populus trichocarpa
  Intron number 2 from transcript POPTR_0006s04620.1 (locus POPTR_0006s04620) derived from phytozome v7.0 (chr-ID scaf fold_6; pos 3165053 to 3165554)
accgttatcaggtttgttttgtttgcaaatcttcatttagagagtgtaatgggttggtattctttctatcttttattgctttaagttatttgtcttgtaggaattaactaggaactaagagagatctaaattgatattaggaatttcgaggtcttgtctttattcatgttgcaacattgaagagggtattttgttgaacttaatagttaataaacaatagtgatcgttattgtgaaaactagtgattttaatcaaagagccaaacccattttctgttcagattctgatgtccacctgttttacttccagaccatcagtgcagacattgattcaattaaaattgctccccatttgctatttgtagacctctttaatatttctgtaaactaaagttccatgttttggatggaggggttttcttatttgtccatctagactcattgaatgatagtgctatttctaaacagattggtccggagcagattgaagcattatatcagta

SEQ ID NO: 54653 - DNA, 1006 bp, Populus trichocarpa
  Intron number 4 from transcript POPTR_0018s12770.1 (locus POPTR_0018s12770) derived from phytozome v7.0 (chr-ID scaf fold_18; pos 13280483 to 13281488)
tgggtggcagtacataatagttgttttgtcatcaggtatatatgttttttttttgtttctcttaatgaaggctgtaattttcagtgatagaggatgtagagtttttaactgtccgaaggtgcttttaacaaattgataaaaatcaatggataattctacactagtcttgaacttacaactcggtgtgttgagttgtaaaggccaacaaatcgaatgtttacatgcaaggataaaaaattatgttatcaaggtggttataaaaagttttcaaccaactactactttctttcattttattgtcacaaatgaaaccaagttttcctacaaatgaggttttttgtttcagtgttatcacgtgattggtgagcttttcaactcaaccatgctgtgttggaaaaccaggaatagtgtagaataactaatatgaataaaggttttgaatacttttagtctgataaatggtcaatggttcaggtgatggaatttaagatgtttgtagtatgtgttactatgtctgatatttgttagagcacaaacatcatatttctcatggatttgtcactttttacggtctgcacttacatggaactatcaaaattgcacagtgtgatgattgaagtgagattctgaagaaatcggtactttgtagtggcaatttgagtattgtatgttatctactttttccttttggatatttgttttgaggagatgggctctattttatatactttttacctcatcagggtatgattagttctatatctctttatgaacatctactttatttatctttggttaattttattgcgaggtgattgtttctacttttatgcactaattttttttgggtgtatctatgccctatgttgaaggttatgagttttgggggtgtgttgcaggactatttctcttaaaattgaatctatcaatccttcgatctatttcgcttgatttttaaaatggaggtgtgttgcaggactcgcatttccttcactttacttctaca

SEQ ID NO: 54654 - DNA, 390 bp, Populus trichocarpa
  Intron number 2 from transcript POPTR_0018s01420.1 (locus POPTR_0018s01420) derived from phytozome v7.0 (chr-ID scaf fold_18; pos 1360331 to 1360720)
gtggtacaggtataaatttatcttcgtcaaagctctgtgcggttaaatctttctcgggtttttttatttggtttttgtgttttgtgttgatttgtagtgattttctttggcattttgatttttccttcaaaaggaaagttggctttttcattaaaagattgaatttttcagttgtttgcaatttggggttttgattttctcgatataaaacatgggttttagtttttagcttctgggtatttgataacatgaagagaatgtttgtttgtgaaaattgttattttggggttttgatttttaatgttcatttgttttgggttctgacttgtggcatctgggtggttttgaattgtaggaaagaccacattcgttaagaggcatcttaccgga

SEQ ID NO: 54655 - DNA, 539 bp, Populus trichocarpa
  Intron number 1 from transcript POPTR_0013s00910.1 (locus POPTR_0013s00910) derived from phytozome v7.0 (chr-ID scaf fold_13; pos 458873 to 459411)
tagattcttctccaaatcgtcctctcgttacatcggtaacatttcctttaactggttcttctctttccagtgtaatccttagctaagttcatgttcttgagctgattttttttaatgatgtttagtttcttggattggaattgggaatatattagtagtttttgctttaattttcttgtctctcctttgttgctcctgaagtttcgatttttttatgatgcgcgcgtgtaaactggaggaaacttgattttcatgtaaacaggatctggctaattagcttgcaggtggaaattgggaaaaaagattagtttttttttcttttcaagttttagtaagagattaaaatggaattgagttttgaaagattcaatcttcggtggatgtgttgttggaacaatgacgtttttgtatattttctgttgtatgcatctttttctttgatttctttctttgcaattaataagagtctgagcttggagattgttgttgctgttatgttgttttcattgcagtgaaagttggaattccagagtttctaa

SEQ ID NO: 54656 - DNA, 606 bp, Populus trichocarpa
  Intron number 1 from transcript POPTR_0003s09900.1 (locus POPTR_0003s09900) derived from phytozome v7.0 (chr-ID scaf fold_3; pos 11069466 to 11070071 reverse strand)
gactctgctgtttttttgaggatttacactctcgggtacttttttcataaactatcaattttctttagcttctttcacgagccttgtcagtctgccatggctttgttttggtcaatttgtagaatgctctcaatttgtctgactatgaaaactagtaggtagaggaaattgaaagttttgaaagtttatgagtgacaatgtaagttgttcaaatgaattggtggcaatctgcgaatttggtttcttggagctttattggatgtctatgcagtgcatatggtaatcttggtatatgttcatcttgctgttcatttaccgtggattgagtgaagagatgcatgcctttctttataagtttatttagcatatcattgacactgactgatgctcttcaatttcttttcttttcttttcgtttccttgtttttttttttttgaaatgggttcggaagaaccacggtcaagtttcattttgctgtattttcttcataacatcagctaaggctttgagagtccaagtttcaatgatggcggatgtttaacaactgatattttccgattcatttggcagcttaaagatttttgttccaattacaatccttgcgc

SEQ ID NO: 54657 - DNA, 829 bp, Populus trichocarpa
  Intron number 1 from transcript POPTR_0003s17790.1 (locus POPTR_0003s17790) derived from phytozome v7.0 (chr-ID scaf fold_3; pos 17072474 to 17073302)
gaagatcaatctccaagtatgttaacaatgctcattttcttttcttgaagtttgtgtttttatcctcatcttggttcctgaacactcattgcctttatatgtatgtctctgtactttaagttgttaatgggctagaggggattgctttgcttcacattaagcattcaaaattcaaacccttagtgcaataacgtgatcctgttatagatttgttctacgttgttaatttgtgtatacgtgttctttggtctcttgtgaaatatagggggggaaacccagaaatcggatatgaaccttgaaatgaaattaatactaaagcaccaaactcgttcttattttgagaaaaagaagcacatagaaaaatttgatgtaacatatgtgatttttctctcgattctctcgttcaaatgtgatttttcttttcataattgatttgcatttttctctccagaacttgttatatcagctcctcctgtttcgtttaatgtattcttcttttctctgatcggtgtgttttagcttttctcgatttttgttttatggatagcaattatagcaattatatccgactaaggcttttctctatactgtagtcagtctgcttgggaagggtgaaaatcgtgttccttaaatttaattttttttttaatattttaatatatttttaaataaaaaacactttcaaccagaagccttcccatactatttatcaagggatgcctctggttcctgtggttgaagaagtgcaccaccaagatttgaacaagagaaccctaatagcactaactgttgcttccactcaccttgttggaatagtgttgtttctctc

SEQ ID NO: 54658 - DNA, 725 bp, Populus trichocarpa
  Intron number 1 from transcript POPTR_0003s09910.1 (locus POPTR_0003s09910) derived from phytozome v7.0 (chr-ID scaf fold_3; pos 11072798 to 11073522)
tgtcctcttcgcgtctgtctcaactcccccactcggtaaggcttttgggcttcttttgttttgttttttgcatggttattcgcttgttgattcttttttgtatgcatgaatactgaggaagtgccgcaaagaaatgtgtatctttaatcctgatttagttacctgtagttcaatctttgcattaactgttgtttcaggtcttactaaatgtacctcattctatatgtgattcaataattttgcagcaaatgccaatcattttctttaatcttgagaatttgcaaaataattgacataaaactattgcttttagaattatagtctaaaatgataaagtcgttattggcaaggagttgagttctgaagaagaattagaagaacccatgtcaaatttgttccaacacttgactagccatgctgtgcatcctagcctattagctaatacattggaaatgctagtttttcatttaccttctcagcaaccgcttataaaatggatagagaagttgaaattttttgatacgtaagcgtaattatattatcttgagttcggctttctattttatataggagtgtatgtagagttctgatcccgtccttttccatcctaacaatcaacacgagtccaggaattttccatttgatgttaaatccaaatcactttgaatttctttttaatgcaattgtagatttctttgtggtgttccagttggtgcaagtgcgtc

SEQ ID NO: 54659 - DNA, 340 bp, Populus trichocarpa
  Intron number 2 from transcript POPTR_0022s00280.1 (locus POPTR_0022s00280) derived from phytozome v7.0 (chr-ID scaf fold_22; pos 48286 to 48625 reverse strand)
aacaaggagaaccttcaaattatccggtggacaaggtatgcttatatataatgtaaacggggttttctctctgcttggttggaagggttgaattgtgtttgttagacttcagcaggtttttagttgagttcttcagtatttggacaatttttcctctgcgttctgtaacagctgttctttgagtttattgtcatccttttgcccaatgtctggcggtttttttttttggaacttttaatgttgtcatctggaagagtatagttgtttgataattaaacctttcaatgctagtcttgtatctaagttctttctttccctttgaatgtctggattaaggttg

SEQ ID NO: 54660 - DNA, 921 bp, Populus trichocarpa
  Intron number 1 from transcript POPTR_0014s08030.1 (locus POPTR_0014s08030) derived from phytozome v7.0 (chr-ID scaf fold_14; pos 5966684 to 5967604 reverse strand)
atatcgttgttcttcttggcttaatcgaacctgaggtaattgttctatgtagtccatttctttgtcttgccaaaatttatatacacattataccagatgtgaacttcgctatatatttttaatatcacttttgatgatcataaagattaaaataaagaaagtttaatactctggactaaagttttgcttctctctgagtgacaatcatgccttttaagattactgctaggattctatgccaaaggtacctgatgaacatgttttgagggttagctgaatttctgtttcagaatgtttgtagcatgtatggccttatgtttgccgataaaatgtgtctttatctttatctcgttttatttgctccttggttacttgtttattttttagctatgtattcttgtctgaaaatgagaatgtagttcaacgctgaagaggctggaacgagaagctatttcgtagtctccccaatgttttatcgaaacttttgttactaggtgtttcaggcttattgaagtcatctttccgggcatggttttctaggttttcacaagcttcgaggaatagtgttttaaaactttccgcctcttttctactggttcacctgtcaaaaatgtttttttgccttcacctattttctgatgatgtcattatagaaaccatcgctgctgcaatctatcactaaccggtggatttagagagcaatcatcatcacatgtgcagtattatagatgcataatgttataccatacttactaccacttcgatccttgatatgagcaatcatcatcatatgagcttttgaattgaaaacaagtctggttaatactcttcaactggtgtttctttttttttttttttttctcatccacttcctcaaataaatcagataccatagcactgcctgcgagaaaatctggatca

SEQ ID NO: 54661 - DNA, 617 bp, Populus trichocarpa
  Intron number 3 from transcript POPTR_0013s08140.1 (locus POPTR_0013s08140) derived from phytozome v7.0 (chr-ID scaf fold_13; pos 7128059 to 7128675 reverse strand)
gcattcagtttacactcggagacagtctaccgaaggtaaaaggaagagtaaagggagggcaagtttcactcctgcaccgaagaccgaattcgcctcgtaaagtttcattcactatctttgttttgtctttcttttttcttttacccacttaatacgaattcattaacatgaagatgaatacacgtatagatattgttataactgtgattcgaaacagcgagctactttacatcgttcttgtgatgaatgaatcatcgatttacataggtttgtattcagaagagctggcagtgtctaacattttattgacaatgtctaactggatttttattgtttgaaaaggcatctactccctctgtaaatgaataagtgattgaattgtggaattttgaatgttgatggtagtggctttgtggtatttagtgccaattgtgaattcacatgttaaaacaggatagctacttatgttctagaggtctgtggtcttttagcaattcaatttctaataatttgaaactctgtgcaaagtggagggataaaatggtctaaaaggatgtaaatgtattttttttccttattggaactcatgttatttattttggtttcatctctcatag

SEQ ID NO: 54662 - DNA, 736 bp, Populus trichocarpa
  Intron number 3 from transcript POPTR_0006s14830.1 (locus POPTR_0006s14830) derived from phytozome v7.0 (chr-ID scaf fold_6; pos 12255092 to 12255827 reverse strand)
caggccatctgctcgatactatacagcatcaaagggtactgttcttattcggacttgatttatgttccatgagttctttttctttttttacaatataacatcttatcatgtaaattgcatagacaatgttttgctggttactgtcacgcttcctactttatgcattgatgatcaagtctctgtcctcccatctatagacgtgactgagctagaatgataaaattttctccttttatgctaacactcatggctgtatgttgatattaatcagaggattagcagccctttgtttttcttttcttttccttttcttttctctggagatgcaagtccgtgggctatgaatctgaagaactctgatatttttgggatttacttcttctgcattaggtgctagtctcgctttttctaaacatcaattgtttttaggagccatcgtctcttcaaactatatcagggttattgaatcctgctgcattttcattttctaccttcttgttgatttagtctcttttaaatagtcttcaattttcttcttgtttttttcttatagcactcttgcgtgtttgattcgtatactgtatttaattatgtatctcatcatgttactttatgtggtggattatcttccagttgtatttatattttctgtcaaacaattgatgtttgcactattaattgcttatccaaactcctgagagacgttctgatctgctgatggtagggcaagcaacag

SEQ ID NO: 54663 - DNA, 469 bp, Populus trichocarpa
  Intron number 2 from transcript POPTR_0006s14830.1 (locus POPTR_0006s14830) derived from phytozome v7.0 (chr-ID scaf fold_6; pos 12255910 to 12256378 reverse strand)
gatccaagtactgggcaccctttctttattgcttgtttttcttaattttccagcttgtaatctactagaacgaggggagaggggcataaaatgcaaacagtccatctgggattactagtttgtttttttattaaccagtataccacaattgggttgcttatttaagccagcatgagatgaagaaatttagtttacagtgatccgattgtcatgatggatgatgacattgcatcatcccttatcaatatagcacaaagtttaggtatagaagggtgtttttcatttttttttctcatttgcgttaatgtgctaagaaacaaaaagttggtaggaacattatgcttagaatttattttgattctgtaaattttctacttggaggattttggttattgaatgccaacacccaattaaagtagaattaactcaggcacttcttgacataagtgcaaacttgttggtgctgcag

SEQ ID NO: 54664 - DNA, 579 bp, Populus trichocarpa
  Intron number 3 from transcript POPTR_0006s03810.1 (locus POPTR_0006s03810) derived from phytozome v7.0 (chr-ID scaf fold_6; pos 2553432 to 2554010)
gccagtgcaggggagctaatcatactgtgcagaaggtgaggtaatgataaggcaattgtttggtcagtagcagattattactatcacctcttgttcacactaatttattcgaaaatcaaatttttagttttaaacaaaactatgagagtttgattttataaaaacataaaaggtttatcttgtcttctcagtcaatatcgaatgtgccatctcatgtgcctatcctaatccctaacctggtcttttctgtatggctgtatctagttagcatatacaacttaaaggaatgatgatgatctttgatggctttacacagagtttatagtttcaaaataatgtgttttatgctaaattgttgtacttaacatgctctagaaatagtactcaaaatttcaacctccaagttgatgaggattctagaatctagtctacctcctgttcaaactggagaggaatatgggtaggggaaggaaggactgcctcacattttgtaatccagccttctgacacaaaaaatgttctccaaaataccatggtgatttgttctctttttcttcctgaaatcaggtgattgattca

SEQ ID NO: 54665 - DNA, 616 bp, Populus trichocarpa
  Intron number 3 from transcript POPTR_0006s28090.1 (locus POPTR_0006s28090) derived from phytozome v7.0 (chr-ID scaf fold_6; pos 25910876 to 25911491 reverse strand)
gaggtaagaactgcaagtttcaggtacatgtgaatatggtacgtgatcattgcttaactaaaatgtgcttttcctgaatcttcaccaagtccgatttcattgttttttgggttgatttctggttatgcccttaaatgaacaaaatcaaagttgtattagcaatgttcaattccagtgaacagaatattagtctctgaccattttaaaatcttaatattattttgcttattcttttttcagacttaagtttttgtttattactcattttaagtttgcaatctgctaatgatgattgtgggaaaagaatccatgtatccaaactcaacttgttcagacatgagacttagtggagtctggttatttgtgatggaaatatgcatccagtagacaatggctgtgggggttatgcaataaaattatctgccaaaaaattccctttttattgtcaacgatgcttatctcatatgggtggtttttcaattctaaatgcgtccttgtatgctctgcttgtacctaggtcagtgtgttagtataattgacgtttaggtcattgtcactcatattaatccagtaacttacaggtaaagtagttgcgaaattctgtgccaagtttctc

SEQ ID NO: 54666 - DNA, 764 bp, Populus trichocarpa
  Intron number 2 from transcript POPTR_0006s28090.1 (locus POPTR_0006s28090) derived from phytozome v7.0 (chr-ID scaf fold_6; pos 25911552 to 25912315 reverse strand)
cggtgagtccagcatttgatctatgtgaatatgctaggtttttaaatcttgttaccaacaaccttgatgctttaattgcccattgattaatacaacatatgaatatactgatgacattatgtgggggtgtcttaaagattttgtaacaggatagtactaatgataaatttggttaggcaggaattcatcctactggaatgcaaatacaatatgtgatgtattttttcaaagtttgaggaagtaactaattacagctcttaaaaaaagtgttgtgttataggttctttggtgccaaattatctagaatccatttaaattttcctaccttttttcctgtagaagtggggggaaaatatgatcataaaaaaatggaatttctttaatgttcttggaaatgtatctagagaaagttttgtgaaacagtacttgctcctcacttccaaaggcatcttctgcaaaacaaactcctctcttctctagtcatagactatattctcctcctcttaccttttctatttttcttggcactgattccacagacatttgatcattgccacaaaaaactcgtttagtatcggcatatcatctcatttttaaggtgtcattattgtctgtttgtattccaaaatattgtcatagtgctcttctcttgcatgctagccaacttcatagcatatattattacatgtgctgtatagttgagtttattttttacatcatggatatgatgtcagttacgtggttattattatttgtgttttagc

SEQ ID NO: 54667 - DNA, 895 bp, Populus trichocarpa
  Intron number 1 from transcript POPTR_0006s28090.1 (locus POPTR_0006s28090) derived from phytozome v7.0 (chr-ID scaf fold_6; pos 25912431 to 25913325 reverse strand)
tttctttgcttctgatctctttctctcacaaccaggtacatagcagtttaaagttttgatctttcttgatttcccatgtaaatttttttgctgccatgttgtgatatctgaaattggtatccgggcctttctgctatgttgtgttgttgatatcttttaatgtgattgaccccaagaaaagaggagtctggttgtttgctattttttaaattaggcttctttttatggaaagttcatgttttttaactgctgtggtccaaattactatccgggtatgctgtatctttctttattttagcatatctctaatgttgctattttcaatgtatattttattttgttctgttctgttatattcattgatctgaatctttttttattcagttactgcatttcaaatttgctgttggatttttgtacttggcttacttgagctcatctaggatctttactagcagttgtttttacatggacattaattatggctttaattctttttaaagattggacattttttgagtgaaacctaatttcttttcatgctgcttgtttgttaatggtttgaatttgttttgatcagttaatgacttcatctttgatctggtgcactgtgatgaattaggaatagaaacaagtttgacaattatcttcatctgaaagatttttttgaaaaatggcttgatcttttcggagggttttgctagttttaagcgtcacaatctaaattttcagattcttggtaactgaagaaagcattaaggctagaataaagtgcatataggagcttgtagttgacgttgtagtttgctttttttgttggctggagttgttgtgtccaattttttcttgtgtttttacttactcgtaaatacttgctctttgattttggatagtg

SEQ ID NO: 54668 - DNA, 701 bp, Populus trichocarpa
  Intron number 5 from transcript POPTR_0003s16350.1 (locus POPTR_0003s16350) derived from phytozome v7.0 (chr-ID scaf fold_3; pos 15928264 to 15928964 reverse strand)
tcactgcagaggtttttggagaaaagaaaagagaggtaatattctcctttctccctctttttttttcccgacttcatactgaacaataaggtggttttttattttttttgcacatagcttagattgattttaattttatttttagatagatgaatgaatgcttcggatggcacatatttcgtatctatcaattcattttgttttggtaagtagaatctagctttaatttgtttagattttaggctgattttaatctcttattttcttctgtaaaagacttggttatctgggatttttaatgtattttaaaaaaattagcaatcttatgcttaatcaaattgtgattagttaggtgttattaacaatataaatatgtattttgtagtgtattaaccattttaacagatattgtaattcgaaacatgttatcatagctagatcgcccaattacttcgattcatgaatcgttatattatttaaacattcaaaaatattcctattaaaaatcataattacacgggaaggtgccaccaattgattgaatttcctttattaaataataataataataataaataaaaagatgccgacattgttttagacatcggtaagatctccgtgtttgtgtttttctccggaaagctttttaataaacagaacgcgtttttgatggttttgcaggttgacttcggctaccccgt

SEQ ID NO: 54669 - DNA, 598 bp, Populus trichocarpa
  Intron number 1 from transcript POPTR_0003s02300.1 (locus POPTR_0003s02300) derived from phytozome v7.0 (chr-ID scaf fold_3; pos 2376538 to 2377135 reverse strand)
atccagggaccaatctgtaattttccaaagtttggggactaaactgtaattttccaaaattgagggaccaaaccgaaattttgtcatcttcaacctccaacccagaattttaacagaaacctactgtcctctccaaatttctaacacaatttcaccattcaaacaaaaatcataactcaaaatcatcatctttcaattcaatctctcaaaatcaaccaaataatcaaatacccacaacaattaacccataacattcaacttaattcatcaattaacccaaaacacaaattttcaaaaccctaacattcatcaaaactgaaattaaagcttaattaacacatatttatacataatcttacctttaaacttatttccttcaactcctttctatttcccttctaatttccctcttttctcttcttcttcttctttctccctttctctcctgccggttctctctcaaaattcagatccctctttccttttttttttttttacttcctatttataattatcatctctttattcaactactactatacctctcatttaatttattcctacatctaagcattcaagggttttatagccttttcct

SEQ ID NO: 54670 - DNA, 966 bp, Populus trichocarpa
  Intron number 1 from transcript POPTR_0018s08270.2 (locus POPTR_0018s08270) derived from phytozome v7.0 (chr-ID scaf fold_18; pos 9166875 to 9167840)
aggaagtccctgtttgatcaggttctgtcgacttcttcgtaatacaaactgttgtcattcttacatggagtattttgtttgtatttttttttttctctctaaactatgtatagcttgatgtggaaatctcgtcttcccttaacttttgtttcaaggtaggtttgctttgaaaaaacaaattttctatagaaaatagttttataaaaaataaattattcttcattaatgataataaaatatataaaatacaatatttgtaataaaaatagtggtgatgatgatagctctgatgataatatttttagtaataataaaaatcttacgataatagttattatggtagtgatgattttgatgataacaataacgagtagtgttgatgttatgatagtagtaagatgttaatgacgatgcatgttaattaaagtagttatttgatgatgttggtgaaaattgtaaattaatagtgtttagaaaaatatttttctcttcggttaacatatttttctctaatttattaaaaaatatatttgttcttgaaatataattttttggcaaaataaataaaactctagctacaaatatcattctagggaaactataaacgccttataaagatcaaaatatacgaaaaatgcacaaactgacttttaaatagatttaccgatcatgaatcacgaatgcttacttcgtgctttgctatcttttaaatacatctctctttcctctatgaactattataatcaatttttgggcttgttcttgttcgagctatgcttggtccaaacctagattgggcccccagtttgcaactacatcaataagtagaggatttatagtttaaacttctgaattaggactagaaaagaaagataaagagagaaaagccatgttgtttaagtagtagaacagacaggtctgtggcgtaaggtgattttaataatcgatgattgcagggataccttg

SEQ ID NO: 54671 - DNA, 450 bp, Populus trichocarpa
  Intron number 1 from transcript POPTR_0003s17850.1 (locus POPTR_0003s17850) derived from phytozome v7.0 (chr-ID scaf fold_3; pos 17109693 to 17110142)
gcgtctccttctctcctcccggttgccggtaactctctaatccctcatgaaaatctctcttgctttgaatctatcgctctcagtatccggtactctgttttgatcatctgtgctgctctttgagagtaacgaagtagctaaatattgggaaaagatgaactcgttttgcttgtttaaggtgttaattggtgttttgcgggtgataaaagtgaaaagtagagtattgggtttcattttatccattttatttcaatttgaatctactgggatttgtttgacattgcatataacctgttcgatcatatgcctccatgggttttgtacttttttctttttaatctaagaacgtgttttattatttagcttccctattttgtggaaattgactaatatctggcaccttcttcaataatgaaaatgtgttttgtattattttatcagggagttcaa

SEQ ID NO: 54672 - DNA, 631 bp, Populus trichocarpa
  Intron number 1 from transcript POPTR_0013s12190.1 (locus POPTR_0013s12190) derived from phytozome v7.0 (chr-ID scaf fold_13; pos 12836476 to 12837106)
acacacttaggagcctagtacctggtactagtaaggtatttgctgtttttgttttggtaatgttaaagtttgagttgaattgaataatagttcttagagcctcttttttttttaatgaattctgtttcttaaagcttgagaacaaaacttagcgaacgtttaggtaatgcacttgaaagtgattattatttactgtaataacacgagttgcttaattttattttttgtaaggtctgtgctgataacttttgaatttgtgaatttcttcaagaatcttctattacaattcaagttcaatgtctgggagatttgttgtgctgcttttgttggtgaatgtacttgagttgtttatataagaatgattagttatcaattagttcttggcagttctatcacccaaaacacatatattacctgctatgattttctggtaacttttctcattacttcttcttgattgaaattgatcatagatcaatgttatccatggagtacttgataaataaatcttgatattttgatggacttatttggtcatgtaagagctggattgttatgatcttgttaagattccagcttatgggcttgttgagatgggttgctgaattactaatcaatttgaatcactcag

SEQ ID NO: 54673 - DNA, 604 bp, Populus trichocarpa
  Intron number 2 from transcript POPTR_0003s17460.1 (locus POPTR_0003s17460) derived from phytozome v7.0 (chr-ID scaf fold_3; pos 16809870 to 16810473)
tgagaattggtaaataaaaaaaaaaaattccctttatagttcttcaaattgttgagtttcaatgttttaaattttaattgggatttagtgaaggtgggatagaatgaattatagaatactcgtttgtgtcataagttcattgcggataggaatggcttgccgccttgccctgtaataaattgatgcatgtgtgcagtgacatggtttcttcgggaaacatcaatatggtaagtaatttttgtggccatgcatgttagataagattatgtctaatctctaaccattttagcgatttctttgatccattaatgtgtgagctgttggttaataatgatgaacatggtgatcagaagtcagcaaattatcaacaaaatgacttagaatatagccactggcagtccaagtatgcctagtttctttacgcatcatccatgaacatcaatgcagactaggtctctttgaatctggcattgtttttcagtgatattctcgcacctatatgaccacacgaaagagttttatcataatttgttggagtttttctttttctttttcttttttccttgcaggtcttgaacctgagacaaagtacttttacaagtgt

SEQ ID NO: 54674 - DNA, 571 bp, Populus trichocarpa
  Intron number 1 from transcript POPTR_0019s03230.1 (locus POPTR_0019s03230) derived from phytozome v7.0 (chr-ID scaf fold_19; pos 3236384 to 3236954)
gcagatttagttacgccaaaaactcctttttgcaggtgatttagaaaatatcggatatattagaagtaatttattcaatacacttagcattcaggtttcaggtttagtcactatagtccataatagaactatagattatagagtatttaatgcttctctgaattgttgactgatcaatttttatggggaaaaacattaataacaaatatatatatttattaatatctacttatataaaggattagtgaatgatttctcatttaaaaatctcattacgaaggatggatatatttatgctcgagttcattatcaagtttctaaaattatttttgaaatctcttcccatatacgaagttttttgaatgaagcagttaaaagtttaaacttcacagctaatagtgatgggtttctgaaagtttaaagttcaatttttttatatttaacaagatatattagagaataatataaaaaaaagttattataatataagtttttatttaacgagatggttatttctcaactataacatgtaatcttattttgctttgaaatttgcagggacatagtgtaa

SEQ ID NO: 54675 - DNA, 507 bp, Populus trichocarpa
  Intron number 1 from transcript POPTR_0013s05380.4 (locus POPTR_0013s05380) derived from phytozome v7.0 (chr-ID scaf fold_13; pos 3845292 to 3845798)
acaaggtttggattttctttctttttttatttgacactctattttatttctcaatcagtcatatatctctgagcatatgccaattgagcatggatcatacggttgatttcttaatcttgttttccatgaagtactaaatatttagatcacagaacttgaaaataagtaatcaaatgtagcatgatcaatcatttgtatttcaaacacattttgatttacgctcatccttgctagttgatatgacattttttctccctctctctttgtgctggcatagttttttaaaaagggatttgaatttaaagtactataatcaaggggaaaatgtgattagttatcagggtatgcttttggccaagatatgacgatcactttcacagagcaaaaacagagtatacatttatgaggagtgacatgtatgaaaatacccctaattaccccattttatttctcatgtcttttttatactaagatttttcttcattttggggattcttaatctatagt

SEQ ID NO: 54676 - DNA, 777 bp, Populus trichocarpa
  Intron number 1 from transcript POPTR_0006s15460.1 (locus POPTR_0006s15460) derived from phytozome v7.0 (chr-ID scaf fold_6; pos 12847685 to 12848461)
taaattgctggttgtcatccctgctcactctgagagtaatgctctttctttcttcctccctccccacataatcattagaaaaattctaatattgatggtttagcaataaatgccttttcctttgtttgctgggcttcatttcatgtgatacttagactaatatctttgtgaataaaggattcttcttgtatgaatttggtggacatgccacagaattatgttgctaataaattctgcatcactaatatatagcctttgtccatcttgcgataatttatttcttaacacgagaaatagcagaacacagatgatcttcagatttagatggctcgaagaaaagtttgtttgagcttaggaacttcatcttgtcttttaaatccttcaattccaaaattttagtaaagggaacacacgcataacttaggatgtcaaattatcttgatttactaactgtaatgtcatatccaatattggttctttacttcattttccggtctcaaggtgttaacagaccttctagtaaacctacaaaagacagcatagttatatcggaccagctacttgccaatattgaacttgaattctcagtaataagcttgactatacattgaatctaatcaaacatgttgcaatgttgagttgaggacctgtggtgtttattttctcactttcatctgtgtccatttatactgacttcaaggttgacattggtgaccgatgtggatgaaatattattttccaggtaaaaagttgtggggattctcaagattaaccagt

SEQ ID NO: 54677 - DNA, 648 bp, Populus trichocarpa
  Intron number 1 from transcript POPTR_0013s06410.1 (locus POPTR_0013s06410) derived from phytozome v7.0 (chr-ID scaf fold_13; pos 4981743 to 4982390 reverse strand)
cggttctcggcttttttcgtgctaggtacatttcatacttcgactgttcgtgtatatttttttttacggggctgtgaagttaattatgttacattttttgaattatcttgtgagtttattgtattgaatcttcatttgtgtattcttgctgattgttgatttcagtgacgtgggtttattttgggtttttagttgggcaactgggctgaaaattttgtctatgatttagctcctaaagtgtgttttgttagtttgatgtggtggtttttgaaatgtttgtagatttcattttgtagtttgatatttgttatccatgattgaaggtttgattcaatggtttatgtattttcgctttgattcaatggtttatgtattttcttgttgctttttcaagttcatgattgcatgttagcacagttaccagttcggtcatgtcatagatgtgacttgattttgtgtttgtgatggtgttggttttagtgttatttcatggatggatagatcctctttctcaacaatttagcatattccaatgcctttagactcaattatgatttgtgtgagttattattgggacttttgattgttaatgacatgccattttaggtgttcttcttagctttgtgttcttgctgcttctcaggtaca

SEQ ID NO: 54678 - DNA, 577 bp, Populus trichocarpa
  Intron number 1 from transcript POPTR_0013s11810.1 (locus POPTR_0013s11810) derived from phytozome v7.0 (chr-ID scaf fold_13; pos 12455253 to 12455829 reverse strand)
tataggcatattcttttccacttgagggaggaaaggtagcttatcgtatatattacaaagctaaaaaaatcccaccagaagggctcaattttattctactttccagctcaaggtgatgaggcagtgatggagaacgggaaaaaaatattataaaatcttaggcaaatatatagaaatctgtttttaatataattcctttttcctttttttagctaatgtagatgccgtttatatgtaaaatttcttctgctctttccttcaagtgaaaaaggtctctatgttatttgatcagtgaataaagtagattttaatgtaagaatcaattcctacttggccttgtattaagtcagcttccttttgaaaagcacagttctgaactgttatatccttctctccacttgttgttttgatgcttccgtctctgaatcttcctctggaagtgaacaaggcttgtataaagaccaccttgaaacggttctgtttcacaaacttttgccttgcatgatgaaaagggtactgtatcttacatgtttttctcctttttttctcagagaaaaaccatcttctatccacattg

SEQ ID NO: 54679 - DNA, 710 bp, Populus trichocarpa
  Intron number 3 from transcript POPTR_0777s00210.1 (locus POPTR_0777s00210) derived from phytozome v7.0 (chr-ID scaf fold_777; pos 8654 to 9363 reverse strand)
gatttccgtgaagtgactttggaagtaagttatgctctctttaatctggcacatttcttgtaagaagtcattatgctctccaattttgatacagtttcttgatgcatcatgggttttagaaatgcaccatattcaagaaagttaagaggtgaaagtttataatgaagaagtttttataaactaagtaaaaaacgaaagcaataaagataaatgaaagctgtaaaggaaagatgtaaatggcgataagtaaaagaatgcgataaattgtaaaaaggttgtaaaaaaatgtatatatagggttgactctttttttaacttatagataaccgatttataatgttatagagaccaagtttcacataaactataaatcttagccctatacaaattgtctatggtagataagaattttgcaacctaaatcctagtacaattcacacatcttattcatatgccttctcctagcagttgtatgttagaactctaatcatactgcaacattcgccaacgttaactgctaaagagtccaaaaacaaaacaaaacgaagaaaaagaataaagaaaaaaaacatgctgttattaactttctatgtcttgtttaacttagatgggtaccttaaggcttaatcacatatacttggtaattctgtgcacatactttaacacctggttcttgcttctaatgtgatatctctcattaatgtaggtgg

SEQ ID NO: 54680 - DNA, 631 bp, Populus trichocarpa
  Intron number 1 from transcript POPTR_0022s00920.1 (locus POPTR_0022s00920) derived from phytozome v7.0 (chr-ID scaf fold_22; pos 603845 to 604475 reverse strand)
ataaaattcaactgttatttgtttggaaagttatctactgatattaaggaagtaatttctttgtcttagcctataattgattacgccatgccattgtcggtaaaaaatggattcattctgatattaaattattagttttagctcttcttagatttgttaagcaatcctaaaaaataaagattgaataaactacaattatttaatatcacgcacttcgttaaaacatgctattgcatcactaaaccgaaacgatcccccaaatgtgagagaggtgtgatgaaaacaagaaatttgactcttgtaggcaattattaattagctcatgtagtttacttttatgcaagtcaaggtgtagaatctagaaatacttagggtgcatattaaagtcaaagtttcaatactagacattacgtacgacaccattcttggtagcttgcatgggttccaaggacaaatagtttgatgtggtccaggtcagatagaatcttcaactataccagttttcttagcaatttcagattctatctggtcttccccttctacagataaatctttgctgaatatgagtgtgtatatatccattcagtataaggattctacgactttcaaaatcaaaacttcgtataacaga

SEQ ID NO: 54681 - DNA, 1008 bp, Populus trichocarpa
  Intron number 1 from transcript POPTR_0003s12950.1 (locus POPTR_0003s12950) derived from phytozome v7.0 (chr-ID scaf fold_3; pos 13369711 to 13370718 reverse strand)
gttcaggtagttgtaattaattttgtttttaataatcttacaatgcttgagattaggagttttaaaataagatcaagtggtgattcctgtgatcttgatttcatttatttaagtttttcgaagcaaaatcaaagcaaattttggttggataaggtatgttgctttacatgttgtgttttctttgtctagctttgtttagcaaaaactttttgtttatctggttcaactttgtttttgctaagagaatatatgaaagtgcctttttttagttgaaattaatctctcttcttcttataaatgtatcatagacttgggattatctatagattaagagcagagatttcgtgcaactgaaaggatttgcggtttcaaggtccaaataagaggggagctgtttgataaagttatttcgatactcaaccaatgtgatttgaatcaaactagatgttgcttattacttttactttaagccatttcctgcacttgatgacagtttttctcattttttctctttctcctaacctgctgcttcaaagaggaattcttggttagtaatttctttattatcgttcttggatgcttgatgatttttattatttgtatctatatcattatttatcaactccttttttttttcttgtgatgggtagtgatcaataaaatttgaagtgtttaggcataatgagctctgtttattacagttgcagcagcagcggagtaatatataaatataagctattttttctctatagtgatttattgttcgtcaatctgtcaaaagtaaacataacatgtcttgttttgattcgtaatcgatggagttgctcagtgtgttaaaacatgcaattctattcattggtttccttcatggttagtgcatgagagtttctctgaatctcttatcatgagaaatataaaaataaccctgaattgctggagaggatatttggtctgatttcatgttctaaatcagttttctgatgctagttttgtgtaacagaagcaaag

SEQ ID NO: 54682 - DNA, 387 bp, Populus trichocarpa
  Intron number 3 from transcript POPTR_0003s04510.1 (locus POPTR_0003s04510) derived from phytozome v7.0 (chr-ID scaf fold_3; pos 5226719 to 5227105)
ctaaagccgtaattatctattctaaaccattaatctttcttctttttttgggtttattttctctagagttttgatggttttatactgttgtatctgattgtttatgtcgcgtttgatcgtctttagaatgtggaacaaatgcaatgatttagagttgagatgatagaagaaatatagaaaccttagtgcatggctcgcattatcattggcctgattcatgatgtatatatattaccaaattaccatgaaattgcaatgcaaaaccagtcattttaggatgttcatattaagcctaatggttcgtcaaagttccaatgttttgattttgtaatcttttttatattttgtgcagacagttgagggacaaaagcgaaagctggaggaaag

SEQ ID NO: 54683 - DNA, 976 bp, Populus trichocarpa
  Intron number 1 from transcript POPTR_0006s05780.1 (locus POPTR_0006s05780) derived from phytozome v7.0 (chr-ID scaf fold_6; pos 4086276 to 4087251 reverse strand)
tttttcgaggtatgctaggagcaatcctttttttcgcattttagtttcttacaatttttttattttatttttctctggtttatgttgttagcctgcttttcaaagttgtgacgttactgtttttttttttttaaaaaaatttttccgtgaccttctttgcttattcagtacttttattttctgtgaaaatgagataaaaaagtgaaggacagcctgaaaaatcttaactctatgcaagctgtgttagaacccatcttcttcttgtaactttctgagaaaccaaacaagagtttttgagtgtgctttttattaagttgatgaaaagtgattttttttaaaaaaatcagtgatagtaaacggtttattttcttggatatttctacattttctgagcaaccaagcggaaaaagaaagtttacggtgcagtttgtgagcatttgttttttttttttttaaattttaaatttgaatcaatatatcatttgatgttttgacttataattttgctgtgtctgtttttttatttttttttacagtgttcggtttcagatctgaagatttaaggatttttttgtaagtaacagtcatttaaaggatccgatgaaatattaaagatcatttcgtgtagtttttctttatacttatgtaatatgtcgttttgagttccgtgtttcaattttcttttggtattctgtttcatatttatctgttaaggttattgttggttctttgaatgtttggatttttggtttctttcctattatgaagtctccttgactatttaaattactcttagtttggtaattagtaacggctggttgggattttttattcctatattccagggttttcgaattgaaggactttgaattcaaagcctgttttgattttggttccttagaagacaagctcttcaacttcaacttgaaaaggactattggggttgttttttcgggtgtctctcgtttgagccaac

SEQ ID NO: 54684 - DNA, 480 bp, Populus trichocarpa
  Intron number 2 from transcript POPTR_0021s00940.1 (locus POPTR_0021s00940) derived from phytozome v7.0 (chr-ID scaf fold_21; pos 562026 to 562505 reverse strand)
tatattggagatcagagtgaaggttcaggaaaaaggtaaaaggtagactttggttttttaatggaaaaacatatgagatgccaccatttttcaatcattaagcgtgcattcaatgatgttctttcgaacccagagaacttgaagcccaaaccaaagggctcttaataagcatgtgagtatgacaagagacatgctaacaagactgcaaatcaaacgcatacagaggttttctatgcacgatttgaacaaagaaatttacaagtttccccatttcactgaccccggatactgacctcttacagctacgacaacaactggcctacatcatttcattatcgaatctccgccagctataaaattgtctccattgttttctggttatgaagatgtaagatctgtcaaattatccttataaaatctctggtaacattaccgaaaataacagctttcaggaaaatcacagcattctctaacatcctt

SEQ ID NO: 54685 - DNA, 586 bp, Populus trichocarpa
  Intron number 3 from transcript POPTR_0003s14610.1 (locus POPTR_0003s14610) derived from phytozome v7.0 (chr-ID scaf fold_3; pos 14636408 to 14636993)
atttattctcttgtttacttggccccttatttgaggtttttttccccttttgttttatagtaccatgcttacattatctctctttattctgattttttaatatggcatccattttttttttatgctttgctaagttttataagagatgttgatttgtagtgtaggttgtctttcttggttaggaagtgattatggagtgtgaacatttgggacttgttgtccacatatgttgtgtcttgctaatttggttatgactgttaatgcaaaatgtgaactttgagttggagtttacagggtattcattcaagattttcacaaatttgttaatgttgattagaagctatatattttagttcgattgatatattgatgatggacttataatgtgaatcagtttgttctttattaaagagttaagtgtgtggtcaaacaatttccgggcttaatatattacactgtctgatgctatcaaggataatctacagtgcctgcttaattacagttaatttgaacatgttagttgattatggattggatgcatggatttgattatgtaatttttcttatctggctcaatagatcaaat

SEQ ID NO: 54686 - DNA, 542 bp, Populus trichocarpa
  Intron number 2 from transcript POPTR_0019s12330.1 (locus POPTR_0019s12330) derived from phytozome v7.0 (chr-ID scaf fold_19; pos 13383901 to 13384442 reverse strand)
acttgcaggtttgtgatccctctaagataaatcgcagtgctccatattttgttgctttgatttaattacatctctttgtttatttgtaattttagacaataaattttactaataataccatatattgataaagatttgacagtaaaatgtttcacttatttttttcccgtcttttatttctcttatggaaccaaatgagagagatatttgtaaaatgaaatatttcactttctttcacttaattccttttctttttcatttatacaaaaatcaatattttaaaattcaaacaattttcactagaaattacaagcagattgatctaccgtgtactcgtctgttgagagacttgtgtcttctgatgaatctcaaaatcccaccacaatgagatgtgagaagtaaacttattttgtacagaaggaaaacaatttagagcatgcatgacgagcttttatcaattttctatcatagtggaacaagactctcagccggttataatccctgtaggaaaacagaagccattcgaacgtgctgttttgtat

SEQ ID NO: 54687 - DNA, 804 bp, Populus trichocarpa
  Intron number 1 from transcript POPTR_0003s11890.1 (locus POPTR_0003s11890) derived from phytozome v7.0 (chr-ID scaf fold_3; pos 12624516 to 12625319)
ggccagttaagagagactgttcacttggtttcaaggtttattatcttgtttctctatcttttttgctttaaactcatctgttgattgaattcataatttagcttgaagttggtttataattgatagagctatggtgaagttcttatccaaaaccattttgaaattaattaataatacgaaacgagatctaaatctccttaaaagcctcagccaaaagactgctaagcctgataaaaaagtaaagtgtaacttcaatcagaattctaaagttaattataccaacatgaggtagtaaagtgatattttgaaatattcttattccaggaactcatgaagatggaatcatgatttttgtacgtagttgatattatttggaactatttgttagagaaagatagctttaatttttgctattgagatatgaggtacgtagctagctaatagattgattgagtctgatattggggtggaaagggaagctagcaatgcacacacctatgggtgcagtgcaaaaaagtcaaagaagctgctcccctgccacgcttatgcctatgtagtggaatagtaaggagattttaacttttgatgcaggtttttaagtgcttataatacttgttacgcaggaaatgacattaattatatattattcggcatttaaagcatcgctgcctttgttgatttgtgtatatatgtatatatagacgggcagcattgcttcattttctttgctgtatgactactggatttgatagagcacattattattggtaaattgtttcttaagaaacataaatgtaattgcag

SEQ ID NO: 54688 - DNA, 871 bp, Populus trichocarpa
  Intron number 2 from transcript POPTR_0013s02160.1 (locus POPTR_0013s02160) derived from phytozome v7.0 (chr-ID scaf fold_13; pos 1298012 to 1298882)
agagccatagtacgtgacaaagggaaatgtaatcttatattttgaagttgagatcatctctgtttggaatcactaagtgattttttgcagtgtagtttttttatagtgccatccttaaggtctagttaagtgtaatcaagaaaccgaaaaccttaatttgttccacggaacacttgggtagggtttatctgtccaaacccaggtctaagaagagttaagagagagtatgaaacattattgcattgctggaactaggtacttcatgttagagaataatataaattatatcccgggacctcacctaaaagctcaagttattgggttgagatgattttttacatggtatcagagccttaataatcaagtggtctcgagttcgaatctcaccatccccatttatttgataaaaattaaacacgaggtaatatgagcatgtgcaagtttcaagcccaaaaggctttcacttgagggggtgtgttagagaataatataaatcatatcctgggacctcacctaaaagcttaagctattgggttgagatggttctttgacacttcagtcttaaacctttttgcaaatcctgaactgcctcctgttactgagcttcacatcaatcaaatcgagaaatttagcttttaatctgtccaggttgagcaagtataggacatggctccgttcactttgcctgcaagtttaaagggaagatatcagattcttgaacttttgttatggtggtgaatttttttgcattaattgcaattgaatcacttaattttctccattttaattgctttttttacctttcaagttttttctaaccctctaactctttccaggtcgagctcttaatccctcagcttcagtttctaga

SEQ ID NO: 54689 - DNA, 495 bp, Populus trichocarpa
  Intron number 3 from transcript POPTR_0006s13330.1 (locus POPTR_0006s13330) derived from phytozome v7.0 (chr-ID scaf fold_6; pos 10546030 to 10546524)
caaaagagtttgaaagcttgcaggtctgtcccccttgtgtttattcttaatattatctgttcaaatgtccccactcaattggacaccgacttattttctgtttagtcatcatggatttgttcaacatttttgccatggatatgaaactcttaaaggctcttggggacttcatgaacctttttcccttgtttaatagggctgatactcataaaaacatgtgatatgaaaagaactagtgatatggtgggttgagaattattcctttaaatggtagcacatgaatgccaaatagtaaaagcagtattcatactaaaattatgttttccaaatgactacgtaactggacttttagcagggcatgcaatgttttcatttaggttcctaattcagtatcctgccacatatttcttatctgatgaactaacataatatctctggtggttcagtccctgtactaagtatgagcattttgatgttgtaacagattggagagga

SEQ ID NO: 54690 - DNA, 639 bp, Populus trichocarpa
  Intron number 1 from transcript POPTR_0014s12720.1 (locus POPTR_0014s12720) derived from phytozome v7.0 (chr-ID scaf fold_14; pos 9360867 to 9361505)
agaagaaaagaaatctaccaggacctccagacaaagtcaaccttatatattggtattgctcgtagatgcaaattgagtacatatttaattctgatatatcggcattataataaattcgatgaatgagtcttgggttgtttggcacagttggttgattactgtctatcattgaatttgtcatgttcaatgcaagcatgcaaatcaaggaggttttttttttttttttctatcaactttataaaaaaaaacagaaaattaaattggattttaaattttcgctttaactttctcaccttgaaccaaggcttcttttttcctttcatttttttatttttatttttatgttttgaaaagagatgttagatgaattgaaaggttcgattattgctttaagattacaataactggtgagaactgtactaccgacttcaatctttgtttccaactgtacttcaaagaatagagccatggattttaccatgcatagaaattaataacatcacgtacgatcaccctcgcctggataataagttaagctttttcttccttcgtagttcgtatggtataacaatcaaattctttttcagagaaataaatctgaatgaaaacagtgattactaattaactagtctagctttt

SEQ ID NO: 54691 - DNA, 620 bp, Populus trichocarpa
  Intron number 3 from transcript POPTR_0018s02680.1 (locus POPTR_0018s02680) derived from phytozome v7.0 (chr-ID scaf fold_18; pos 2410342 to 2410961 reverse strand)
gaggtaaggcttgcaagtttcatgtatatttgaatatgctacgtatcaatgcttaactaaaatgttatttcctgaatgtgcaccatgtctgattttgttgttttttgattgacttctggctatgcccttagatgaactaagtcaaagtaatctcaccatgttcaattccaatttcatgtgaatatatgattagtctgaccattttaaaagcttagtattatcttgcctatactttttttgggattaattttcttctgttactcactttaagtttgtgatctgctaatgattgcgggaaagaatccatgtggccaaattcaacatgttcaaaactgagacttagtggagttgggtatttgtgatggaagaaatatatatccagtaaacaatgtttggggggggggggggttatggaataaaattttcagccattgaattcctgttttggtttccattgatgcttgtcggttatgcagttctgaacacgtcccttgttatacctcttgtacggctgtacctaggtcagtatgttagtataattggcatttaggtcattattactcactttagtccggtaacttgcaggtaaagtagttgcaaaattctgtgccaagtatctc

SEQ ID NO: 54692 - DNA, 463 bp, Populus trichocarpa
  Intron number 2 from transcript POPTR_0018s02680.1 (locus POPTR_0018s02680) derived from phytozome v7.0 (chr-ID scaf fold_18; pos 2411022 to 2411484 reverse strand)
cagtgagtagttaacccagcatttgatctatgcgaatattccaagtttttcagtcttgttaccaacaaccttgatgcccattaattagtcgggaatatgaatgtgttaatgaatttaagtggagatgtcttgaaagattttgttatgacagtactaatgataaatttggttaagcagaaactttcccaactgggactcctccattaactttttttttcttggcatggtttccacaaacagttgatcactgctcaaaacttgttaagcatgaacatatcacttaatttataatttgtttgtctgtcttgtccgtttctattctgaaatattgttgttgaggtcttcattcacatgttagcaaatttcagaacatgtgttattgcatttgttttatactttattttattttttacataaacgacgtgctgtttgtgacatggttattgttatttgtgttcctagc

SEQ ID NO: 54693 - DNA, 877 bp, Populus trichocarpa
  Intron number 1 from transcript POPTR_0018s02680.1 (locus POPTR_0018s02680) derived from phytozome v7.0 (chr-ID scaf fold_18; pos 2411600 to 2412476 reverse strand)
tgttcctttgtctctgatctttccctcccaataaggtacatgctagtttaaagttttgaactttcttgatatatgaagtatttttttttctgttgtgttatagtatctgaaattgttttctgggtcttgaagttatgtagtgttattgatatcctttgatgggagtttggctgtttgttattattatttttttaatttaaagtaggttttgctttgtggaaagttctttttttttttttttattactgtggtccagattactatctggttaatgttgtatctttctttattttaacatatattggagttgcaacttgggatgcgtatctagttttgtttttttctgctggtttctttgatctgaaacttctgttatccagttactgccttttaaattggcttttgggtttttgtacttacctgatttgagttgatcttggatcttgacatgcagttttttgtacaaggatattaactatggctttaaatcctgttaaagattgtacattttttatttgaaaccctgcttgtttgttgttggtttggatttgatttaatcagttaatggcgtaattcctgacttggtgcactgtgatgaatcaggaatagaaacaagtttggcgataatcttaatttaaaaagtatttaaaatgaaatggcttgattttgtctgaaggtttggccagtgttaagcatcaaaagctgaatttttcagaattttggtaactgaagaatatattaggactaggactgaagtgtgcgcatgagattttagttatgttgtagtttgcgtttctgttggatggagttgtttgatccaaatttttcttattttggtgtttactcatagttacttgctctttgatttcagatagtg

SEQ ID NO: 54694 - DNA, 660 bp, Populus trichocarpa
  Intron number 1 from transcript POPTR_0013s09570.1 (locus POPTR_0013s09570) derived from phytozome v7.0 (chr-ID scaf fold_13; pos 9329687 to 9330346 reverse strand)
ataagtttgttattggacaagacagagcaaaaaaggtttgctttttttaactacatttcgttcgtatttgggtttttgatctcgctagttggtattcggttgcaatcagtttctgagtttcgatgcttataagttttttgaattattaacagatgtttgttgattatggtttatcattgtgtgtcaaagatttcacactggtatttgggtacttatgaaggctgtcctgttagagtttttgttgcattgtatttagaaacccttttcaaattgtcttgtcaagtcaatcatcacacttttattctttcttttcatcttggattgtttttgatgaatgtgtcatagttgtttgttttctgggacattgtcgacatgactttgttaagatgcttgttgtatcagttgtttgaaccaacataagcgaagtgctctggtaaattgaatatagcatgttgaagatatcaaatgtttctggtttggggaactgagtgataaaacatcatttatttaacagacacactgtcagtttcctgaaagcttgtttttggattcatgcttgacatagccttgagcagcttgtagtcttttgagagtactcaacaagtgattcatgtttatgttgtaggtgctttctgtggctgtctacaaccattataagag

SEQ ID NO: 54695 - DNA, 779 bp, Populus trichocarpa
  Intron number 1 from transcript POPTR_1239s00210.1 (locus POPTR_1239s00210) derived from phytozome v7.0 (chr-ID scaf fold_1239; pos 3807 to 4585 reverse strand)
cttacgtgttcctttcttggcgcggggtgagggtttctttgttggtgcagctcggttgtgggtgtgttggtggctctgtgtgcggcttcaacatctttgtgcactgatggttcttctcatgaggaacagtgtctgcgtaagccgagctgatgagtttagatgggttttggcttgggttcttggttaggctttgatttttttaagattattgagtgttgcaggatttggggcctctaattttttaatattgttgggtattgcaggatctggcgtgggtgttgcaggggtttaggacctctgtttattttcaaattgttgagtgttgcaaggtctagcatggttgttgcagggccccaaaactccatccattagacctattgaattttttgtttggttcatgagaaatcttgaaaaaaaatagtttgttaattttgattttcttattctgggtctctttgaattaatataaagtttctacatgttgtttcttggttttttttttgcaattaaataatcttattaatgggtttgttttgatttttttttcaggttgaagaagtaattaatatcttttattgtatgtaaaaacccttccttttcaatttcttgcatgttagaaattaaaaactttttgattttaatgtttaattgggtcatcggtcttgattatatgttttttctttatggttgtttttttttttttgcagtgaaatgatcttaatgggtttagtttgattgttggtttttttggtaggttgaagaaggaattaatatctctt

SEQ ID NO: 54696 - DNA, 776 bp, Populus trichocarpa
  Intron number 2 from transcript POPTR_0019s14830.1 (locus POPTR_0019s14830) derived from phytozome v7.0 (chr-ID scaf fold_19; pos 15495239 to 15496014 reverse strand)
ttgctgctttgcaggttatttctttttgttctttttaactgtttatttactcttggctttagattcttatagcatgttgaagcagttttatcgtttatttgtgtcgatacaagagtctacaaaagagtagattatcttcagccaaacttaaaaacatggcctttgacggtttctttactagtctataactgaaattaagattggtcttaggtatcaagctttggattttggcagtttgcatttgcctgcttctttttcagaggttccttatgatatcggcttcctgtttttattttattcttttcaccttgtaagggattataaacaatatctagcagcatgtcttatacattttgtgcagagtcgactagttggttgcctcctggtgggggttgcattgataatgtatgcccaaaagaattaaagaactagctcatttgtgattgctttcttcgaccaagttgtacttggtgggcatttggaatcatagcaaaggtttttttctaggagaaattattttgattatacattttcaaaactgcgcttttgaaatgacaccatgaaaaataaaaaataaaaaactgtctttggagctgttgtataatcttgagcttacagtttttatagcctgtcaaaactagtcttcactttacctgtaagacaagagttttaagatcttgggcagggtttagtgcttaccactttgtcattagttgcaatacatattctagtgctaacatatgaaatgtgtaattggatgcaaacctgcagtttga

SEQ ID NO: 54697 - DNA, 705 bp, Populus trichocarpa
  Intron number 1 from transcript POPTR_0006s08050.2 (locus POPTR_0006s08050) derived from phytozome v7.0 (chr-ID scaf fold_6; pos 5862515 to 5863219 reverse strand)
tatttacgaatctggttcctagttatcgctgatatgtaagttgctactctctctgtctcccagcttctttgctcaaaatctttccttcttaccttctttgtttagcttaatcttgtcttatttacgaatctgattcctagttaccactaatgcaagttgttactctttctgtctaccagcttctttgttcaaaatctttcttactttagcttaatctccctctcttcactcaagctttctctctttcaaatttagtttgtttgatgatttcaacttaagttgacaactccttttcttttctttcttttgcgattcatggaagacatgctcttgctaattccgatatttctgttttcagatgttaaagttttactttaaagcttgttgctttattgttatacttactactactactgctacttataattaagaccacctatatacctatccttttcttcaaaactagatttgattggcctcctactcttctagctacttttgcatctggggtttctatagttggtttgcctctgaaagattaattcccttttttagtgcttgcttgtaagatttgtctcttaactagagactaatccctaagcatatcttgtattgttcatcactatctactccagttctgtattgttattgttatcgtcgtcactttcagaaagaagcttagctcatttgtttgaagaaaaggaa

SEQ ID NO: 54698 - DNA, 744 bp, Populus trichocarpa
  Intron number 4 from transcript POPTR_0003s12210.1 (locus POPTR_0003s12210) derived from phytozome v7.0 (chr-ID scaf fold_3; pos 12873709 to 12874452 reverse strand)
gacagcgtaaaagggctccaactcctgaggtatattagagacattatttatttatttatttattttcacatatgcataaagaaaaatgggaggaagaagaagtcctctccagctgaaatatacttaagagtatgtgtgttagacatcgaatttggaattgtgtgtattacgaaaactattgttcagtcttgagcacttcgtcacctcttggcaactcagtgaatgctattataaaaagtttggatgatgtattcatcatgcctcatcccttggtgttatcctatgttgcttggaatcaaatcctactctcatttggggtagtattatttttgtgcagtaacaaaggtgtttcagattttaaagatgttttctatacaataaatttgctcttctttgattgatttttaatgtggattgtttgaatggttgttaaataaatccaaggcatcttctttccttaggtaacttgatgaaaaacaaacagtactccatcagaggctgaattgacttcatcattcctttcttggtctcttcggacaagttaacattgacacgtaaaatgcaccattagtgtgttgtgcctttttgaatatctattttgtggatggacaattgagtttgaaaagacacacaggagaaataagtgtttattttactacttctttatcattttagtgagctacaatgttggagttgcgtcattcttctttaaatatacttgattttcttcaggaactgattgag

SEQ ID NO: 54699 - DNA, 803 bp, Populus trichocarpa
  Intron number 1 from transcript POPTR_0014s05160.2 (locus POPTR_0014s05160) derived from phytozome v7.0 (chr-ID scaf fold_14; pos 3940159 to 3940961)
gcacacctggcgaaactcagtgagcacgttgacggtgccagtagaagaagatttgtgatcatgcagagggccaaagtaccctgaattgattgctggcattgcatattggcgcactggtatgttctgatgattcattccaagctaactagattaactagttaagaacctcgcacgaacaacttttatgtggaagtgaatagttggtttcaaaatatgatgatgctagtatatgtcatggtagttttaattgaagaggcaggccttttctgtgtgcaggcaaattgcgtggaagagtattgtcttttgctttttgcatggcttctgtagcagactacttgtatagaaacttgtgaattaccaaggaaataaagcagatcgggaagaggataaatggatttaaatcagttctcactttatttgactcacaatatctagtgagttttttttttgggcgcgcgcgcgtgtggataatccagatagatgattttattaacaccaagttagtgttttgtctcctacacatcaatgcctaaaccttctgcaagtgaggagaagtcttcaaggagcacggggcagattttagcccctatccatcttgcgagtcattggaattttgcaacatggtaaactcatctttttggagtaaagagctccgataatttcttgatatcagcttgtaatttacgaggccacacccatttcttcaatccaaatatcacaccccatgagtggatagaaaccatcactgtgaactcaaaacttctttagctgcaagcatcatctttagacgaaccaaatttaac

SEQ ID NO: 54700 - DNA, 528 bp, Populus trichocarpa
  Intron number 1 from transcript POPTR_0003s14480.1 (locus POPTR_0003s14480) derived from phytozome v7.0 (chr-ID scaf fold_3; pos 14563395 to 14563922)
ggggttttttggtgctttgatcagagaaattccatgtaagtttctttctttttccttggtttgcaccttttttttttccttaaagaaaaatgtttgcatgatttttctttgtggtgtttttctacaaagttttgattttttctttaagttgtttttttaggttttaagtttcatgcgcaggaattgttgattctccatacctgaatttaacataattatttttcaagagatatgaatcttttttttcttctctcttcttttttctggttaaatttgtatacttgaagcagcagaggggggaaaaactcactttatcggtgcagcgtttttgcataatatgctgttttataataaggaaatcctctcgagatggactagatttagtaaagttttcacctttactatcttgcctgtttttggaagtagttgatggtttgaatcttggcatagattttagctttttatggtaatgatattttgcttactgtaagaaatctgttgttttgagatgtgaccaggttgttgacc

SEQ ID NO: 54701 - DNA, 373 bp, Populus trichocarpa
  Intron number 1 from transcript POPTR_0013s00980.1 (locus POPTR_0013s00980) derived from phytozome v7.0 (chr-ID scaf fold_13; pos 513987 to 514359)
gacgtgatcaagctctggtacatttctttccttttttgattttttaagttctgtttggttactaagaaaactgtaataacaagaaaatgaaagctcaagctttataatcatttcccttttcaaaacttcatgatcactgtatttttctcctaaacttcttcttttatgctctctattaataatctttgaaaatcaagtctttgtgtgtgtgtttttttaaaatgaaagctggtgtggaataggattcttgtcaataaggttttatttatttttatgtatttttggtgaaaacccatttttgtttccaggatttccaggggtttttgaatgatttgcaggattgggaacttcttaaggacactgataaaaagat

SEQ ID NO: 54702 - DNA, 830 bp, Populus trichocarpa
  Intron number 1 from transcript POPTR_0019s14690.1 (locus POPTR_0019s14690) derived from phytozome v7.0 (chr-ID scaf fold_19; pos 15384990 to 15385819 reverse strand)
gtgtgagttcatttctatggatattgagatttatgttttgttgagtaaagtttctaactttgacaacaaatcgatgcttgtaaattagcaatgtttgattattgtaattatctaagccaaccaagttgattattatagcattgaattgcatgatttttacatgttagagaatgctgtggtagtgtgtgttcaagctcttgttgagtcttcaaaagacggaaaaacaacaacccacttgctgggctcccacgcggcttatgttatcttgagttcatggctattacaaactttgaagaaatgatgatttagctgaaaaaaattgatgtgaggattaattcaaattttttttctgattttacttgtggattttcaagtttatgaggacatgttcccttgtattttttattttgaaagcactgaaattcactccaacatttttttttttaatgttcatccctgtaaccaaatacatttttgtttcttctatatctgtcccttctgttctagaacactaatcaaacgcaagtctctatcttattatgacagtttcttctatatgtgatttgaacttgtatgcccatttttgttaacaccgggacatcatgagcatcattgtaatggttttgcatctcttatttaagaaccaaatctttccaatggacttttctttctttgataaaggatgatgcctaattagttaattaggttattgcttcatttcattggttgcagattctgtgtgattatccttccgtgtgactgagagaagctacttgatttatttcttggttgcagaaaggttcttggcaagggtttaagggtggtgataa

SEQ ID NO: 54703 - DNA, 621 bp, Populus trichocarpa
  Intron number 3 from transcript POPTR_0013s09330.2 (locus POPTR_0013s09330) derived from phytozome v7.0 (chr-ID scaf fold_13; pos 9005050 to 9005670)
aacagtaaagtacttacatattctgcacaggataggtaactactccatcatatggttatattcaattgaaattattattattaccctagtagcttctcaatttgacttttcatttctcctttatcttcccttccttcatcagtatatacaaggtgtttgacctaaaaaattacacaatgttatactcgatagcaaacaaaaatgttcaagagattaagatcaggtatgttcctttacattcttgcagcttttcatttgctcagcaccatgttctcaagcgcacgataatgtgcagttacacaagcgcaaactcatacatttttctttgagattaattgattaaactgttcaatgaaaatgttcaaaaagagtggttgggattgctgcatgaatgagcttacagtttctttgagattaatagattatacacatgcattgtaactcaaggactgctatgcacttcatgattctgaatgtctagtgttgtttctttgagattagtcgtcaggtttaataatgcatgtgcacaagtttaatttctatgaactgttcaccttgtttcccacgagcttagagtttctctggtttgctttttgtttttttctctgcagtccagggatc

SEQ ID NO: 54704 - DNA, 1035 bp, Populus trichocarpa
  Intron number 1 from transcript POPTR_0003s13340.1 (locus POPTR_0003s13340) derived from phytozome v7.0 (chr-ID scaf fold_3; pos 13738749 to 13739783)
aaagcccgtccacaaggttttaggtggtggaaaacgtatgttttcttttttcataactttcaataggtttctagtttatgtggttcttgtgtgcgaaatgtttggtccgaggatagggaaactttttcagtgcatttttttaaatttttaatgaatactctcttgatgctcagtgtcttgttagtgtgatttatcgtatggtgtgtttggttgtgaagatagcaaatcttgattgtgatcaaacagaaaacttctgccacgtctgtgtctgtcagtaaccaaacacgtacctaaaatttgtgctccccgtggcatttttttcctgaagtttttaagtttgatttactgatttttaactttattgatgattttttttgcggctcactgtttttctcaagtgtgattttgttgcaaggttaacaaattttgattttgataacagagttaaaagtgggtattcttctgctgcatggtatgaagttgtggtttccttttatgatagttatttgttttgaagatctagatctagttctatgtgtgtagcaatgtatctggctttgtcttttgactatttggtgcacgctagaggatgataagatagagaatctattattgtggtggttaaagaatgttgatgtgattggttctatcgaagttgtttgagttctagaaagttaactttatggcttgatgcgcaagcccaccacaaataagctaaataaattgtattagaagctcaaattaattttctttcctttgtgggcttaaataagttgttgttaaagtaacatttcaaatatataagcgcttcctactggctcaattcattagcttctagccctgtaagttttcttattacacagtgaatcaagctttgtagttgaattgtgatttgttgtcctgctgcaatgatactaacagttgatttctctcgaatgaattagatttcctttgggatgaaacctgacaagtctttcttctgtgtgtctaacgtgtgcaaattggtatttgtataatagctgctgacattttcct

SEQ ID NO: 54705 - DNA, 594 bp, Populus trichocarpa
  Intron number 2 from transcript POPTR_0019s05380.2 (locus POPTR_0019s05380) derived from phytozome v7.0 (chr-ID scaf fold_19; pos 5731027 to 5731620 reverse strand)
acgagagttttgaaggtgagagcaaatttagtattgattttttccttacaaaatcattaccgtttcttagtgaagtcactaaactaggacaagatcaaagccctctctttttttgccactgtcaccatcaacgccaccctcttttcctctcctttcccctcttcttcctctaagaaagctcaaaacaacactgctaagctcgcctataaccacttctccctcctctctcctcctctcgcccttcctcctcctccccccgttatggtaattgaatcccttttgtttctttgtaatgcttcatttcttcccttttttatatttccttgtgctgtatcagatattttaaagacttttttaggttaattattttaatgaaatgaaattactttgtaaattaatgtttgattaagaatgaatgcttgcataataacatttgattgttagtagaatgtattgattggtgcccgtaatcatgaatctgtttatgataaatcattctagtggtgcctatgcttatttaactgcatcaataaatgaagaaactgatgttatgctgagtttctgcaggctgttcgagtggaagcgctgggggga

SEQ ID NO: 54706 - DNA, 953 bp, Populus trichocarpa
  Intron number 1 from transcript POPTR_0019s05380.2 (locus POPTR_0019s05380) derived from phytozome v7.0 (chr-ID scaf fold_19; pos 5731717 to 5732669 reverse strand)
agagttttgaaggtgagagcaaatttagtattgattttttccttacaaaatcattaccgtttcttagtgctggattggagtcagttggatgtgcttgatactcatggttgcattccaaaacggcaagcaattgttatggaaataattggtttactaagcttactagtggaactagaggaagtccttttaagatgctactaagcttgctctgataacttctcttgtgtctatttcccttgtgtctcattcaatactttttttgggaaaatagaatggaggaaaacataagaatttctacttcaattgttctatcagtcttttctttgtttattattgttattgtattttctctgtactcagttgtgcctcgcttggctgctgagaatctgctgcctgtaatcaaaatcattgttttgtaattgggtaatttaattcatttggtagcttataggtttgtattgtatagtataaaaggggaaaggagggacttttatatttaagttggcaagttattgcagcaaatgagaaactgaattctgattgaagaaggtagtagcatcaactgaccatggaaacctgatattgaatcaccttattttgtgtcttcaataacgcccctgtttattttgtgctttcttgacaagtcattatttgacacatgcatctgatttttctcctggcttacaggtatgctgcacttgtttaagaatgaatgcttgcataataacatatgattattataatatatttatatttagattaattaattatcattttcatgttctttttgttaatagaatgtattgaatgattgattgatgcctgtaatcatgaagctttttatgataaatcattctagtgttgcctatgcttatttacactgcatcaagaaataagaaactgatgttatgctgaagtttctgcaggctgttcgagtggaagcgctgggggga

SEQ ID NO: 54707 - DNA, 930 bp, Populus trichocarpa
  Intron number 1 from transcript POPTR_0018s13640.1 (locus POPTR_0018s13640) derived from phytozome v7.0 (chr-ID scaf fold_18; pos 13902530 to 13903459 reverse strand)
tttgcaagcttaatctctccaacaacgatcttcaggtatatatattttctcatcctacttgagtgaatatggatatatcccaacaagttttttgttgaagagcaaaaggaaacctttcttaaggtcaaatcaaacaaatttttgattgatattaacacaacatttttgtattattctttgtttttgataaaaacacagcttttttgttgttgatttgattttcttttttatggaaaaaacgtagcttttgtttttttttttaatagcaatcatttcatttcgagctggtgaatcagcacgataccatcttgagtttaaaacaagtgattaaaaatactattaattttcgaaaaagaaaaggagaattttctggggaaaaaaaagaaaagggaaaaagaatcttattatcaattataatcattctattttttttttaattccaataaaaacaaaagggagagaaagcttatattattttttatgtccccccactttgttaaatttggaagatatttcttggaccatatatcactctctctattcagtcgtacgtagctcttaagatttctactaaatattggtctttatatatatatatatatataagaaaaagtatttattcaaatatttctttaggttttaatttctcacctattactctctcttggatctcaaacaattagtgagtttttaattaattaatactatggttaagcattcaacgcctagcacaagcaaatagaggaatatgcagtagcatattactatatgtttatttcataattattagttttaatcaactaggaacatgatgatcatacattaaatatttctttgacttttataacgtgtacacttgaatacctccactggccagcttacaacggaaccaagctaacaaatcgagaaatttatttatatattcgacag

SEQ ID NO: 54708 - DNA, 755 bp, Populus trichocarpa
  Intron number 1 from transcript POPTR_0006s22430.1 (locus POPTR_0006s22430) derived from phytozome v7.0 (chr-ID scaf fold_6; pos 21441539 to 21442293 reverse strand)
atttgtctgatccttctcacagtcctgtttctgaggtgggtttttgtttgattttatgttcctgtttagttttttttttttcatgttttgttgataggatgttagtgtaaacttttaatcttggtttcttgtcatatgttggttttaaacgatgtgaaagaagggaaaattgaaaattggattggttgagttttttttaaggttctgttcaagtggaatttgattgttggtaagggaattgggggaatttgaaaaagtttgaactttggaatctgcaaccatgtgttagtttggtttttataaggtgagtggtgtttatattagatgagtattgtgggtctctctaattaatgtaaagccttatgtttggtcttagctgattgaacattttcttaatatagcaatgattgaaacttcttagtttggaaaaagttagttgggttgtggatgattatatggattttagaatggggatagtgtttttcagtagatgacttgatttttcaatcttgcttttgtcaaatttaaatattgcatgactttttttattgtgaatttataatttcaaatgtttttctataccatctacatgttgaggaaacaaccggaattgatactgggatttgagggccctaaggttgcttcctctaaatcaaagttaatattgccatgttagtttgcttaactgtggtgctgttgtttgaaatcatctttttgtagagaattgatcgatctggaactggcagttgccatag

SEQ ID NO: 54709 - DNA, 977 bp, Populus trichocarpa
  Intron number 1 from transcript POPTR_0014s02180.1 (locus POPTR_0014s02180) derived from phytozome v7.0 (chr-ID scaf fold_14; pos 1868319 to 1869295)
atatcatcaagggtctcgtagtggtaagcagtttttgcaggcagatttagattgattgtctttccatctgtttctgaattttggtttgcagttgacaaaattatttgctgtttatcgttggccattaagaatagcatggagaaatttattttgattatttcgtttctcccttattttttcaactgccaactgactaatgtcgcagaaaaattaccttgacagatgcttcatgcttgtgatattacttgcctgtaagagagctgacgagctgttcttgctggcttgctgtattctctttctgcacttttcttttcccccggctccaacaatttgtctgtcttcgtttggctttattatgtgctctttgtagttaatctagacgggccatgtgacaggttaaatctagttaattcgatcaagttacattcaatcgaaacctagtcgggttaattaaaaagaaacaatgattttttaactaaataattaatctgggttaactcaatgattcgtgtattgacctgataacctattaatccatgctctttttttagctagttctttacctttgagaaaaaccgaactactgattatattataatagaaatgttattatcaatatcttaaaaaaatcctaatgaaaaatggatggcgcatgctaattgcagtataacaattctgccgttcaccttctcaattcatgcatctccccttgtctaattctggctcgttttcttttttgcccccacgtaacacgaacgtggctatatatgtgtttcccagctgatcacagtacatctatcatgttcttaaaatatggacaaggacgatgaattgatagattagttcacattttttattcaattattatggagtatgctgcagtgtaaatggatgtgtatgttactaatgcttctgttcaaaagtatatattagcatttttcgttggctgacttgaatttcttcttgttctacaggca

SEQ ID NO: 54710 - DNA, 701 bp, Populus trichocarpa
  Intron number 1 from transcript POPTR_0006s02840.1 (locus POPTR_0006s02840) derived from phytozome v7.0 (chr-ID scaf fold_6; pos 1788969 to 1789669 reverse strand)
ttcattcaaaacagcaaaaccgaagaactcaggtaatgatattattctcttagatcctctttttaccatctaagattctttatttcctgtcttatagtttctgatctgctaataaagaatttccttttctatttattttttgtcttaaaaggactaaaacctgctttgtctagtgattcattttcaaagtctttaaggcaaagatttgaacttgatctgttcttggttaatttctggaaaatggaaaactgcgtcattttcagttttatgtttctgtggtgttttgagactagttatgtgtgaatctgtttgtgttcgcagttttttgaataccaagtagtgctcttttttgttttagggtttttagtgaagtggtaattgttttggttgtctttgatttgatgcatgtgcttgcatgtagaaggagtataaaaatttatcaacttctgaaacatttctgtgaagatcttgcagttttgtggtttggaagtttgtgtcttagaaacgttttcagtttcattctgcaataaagtgctgttctctttgtatcttaagtaatttcatcagattttagaacaatttcttgttattatcgaggaagtgtatgaaatggaacaagagaagtcaaatgtgagagactggtgatagaaggaggttttgttagctaaaactgtgattttgtttattcagaagtaataata

SEQ ID NO: 54711 - DNA, 924 bp, Populus trichocarpa
  Intron number 1 from transcript POPTR_0006s15940.1 (locus POPTR_0006s15940) derived from phytozome v7.0 (chr-ID scaf fold_6; pos 13681151 to 13682074)
tctctctttttaccatcactggaagaaaatctacggtacttcaacatcttaagatgactacataatttgtctctttcgtgtacttgatcatgaaccaggagtttttgtgcagtttttaccacttgttgtgattgtgcttggtgatcaataaggcacagttgttttggaaccaatgacttatgtaacaaatgtggtttttgaaacatctctgtcaaagcacatgttcataagagtttgtcttgaaaatatcactaaagctgtgggtggtgggtgcttctgttatgatgtgttttttcagcttggcttgtgatccatcctccagaatttgggacttttttacacaaaaaaaataaaaattctatcttctttcttgttttctgagttcaggtacttcttttaacaacttttcagcctttttctgtgcctggatgcttgatgttgaagttccgagttttggactgttgcacttcttgttttctttttatctttctctctttctagagctctaagccagattatcattttttattaaaattatttttttatgacttttcttttcttgtgcatatgtattcttctccaaaagattaattcttaatttgttctggaaccatcatttgcgactcggtgtccacttcttttgttttattgggagcttgtttcctgttcattgtaatgaagctgtaggtgctagcaagcagattagtttctgctgtcttcttcttgcttcatttcttttgtatttgctctctgaactaatgattatcaagtttccttcccattcctcttttaacatctttgatacttgctacttacttgattggtgcaaacgccatctctcttcccttaattactccttctattttactacttgactggtttattttaggtccaaatattaacctctctggcttgacacccttg

SEQ ID NO: 54712 - DNA, 471 bp, Populus trichocarpa
  Intron number 1 from transcript POPTR_0003s14060.3 (locus POPTR_0003s14060) derived from phytozome v7.0 (chr-ID scaf fold_3; pos 14245492 to 14245962)
gtcgacgatcccttttaatttcttgccgcaaatcggtaaccacagcaacctttacgccttgattttatacagcattgatcctttgacctttctgtacactttagctatgccatgcgtttctcttgtttggtcgatttgttatgcctggctgtgttttggtcaacgaatgttgaaatgctacgcggttgttgattttgtgatgattatgtgcgaagagctctcggtttccttgatttagggttttagaataactagaaacagagccttttttaagcttaaaagattgagtttgctgcctggttctttcccttgttggggacatttgggctgttttttctaccttttctaacttatgtttttgaatttacagacttgtccatgctttgtggtgttatacatttatttgtcagcctttcaaaatctctaaatagttgtattctataaatgactttttttgtatccgtgttgcag

SEQ ID NO: 54713 - DNA, 323 bp, Populus trichocarpa
  Intron number 1 from transcript POPTR_0003s09920.1 (locus POPTR_0003s09920) derived from phytozome v7.0 (chr-ID scaf fold_3; pos 11078986 to 11079308)
tcaaggtcaccaagaaatcaaaacggccgattggacgtacagtttgccttagttcaggtgtcgtttctcttctgcacgctctttagtctgttatttttttttcttttgttatggattgcgtacttgtgtttacttcaatgttaacaatgggttcttgattttctgcagagtgaaaaatgctcgcgcttcatagtaaagtaataattttatcacacagtaaatttatttggtcgactttttactgtttctttttttttttaattttaattttatagctggtagttagtaattagctcatgaatgcttgtgttttagcgaagaga

SEQ ID NO: 54714 - DNA, 677 bp, Populus trichocarpa
  Intron number 3 from transcript POPTR_0018s10590.1 (locus POPTR_0018s10590) derived from phytozome v7.0 (chr-ID scaf fold_18; pos 11486517 to 11487193 reverse strand)
cctattggagttgttcagtcttgcttctcaaccaggtaatcttcctcggtgatccaaattagagattgtttattcattcttcatgtggtacagcaaccaagtgaagtaagggtacaagaaagctacaaattgacactctcagataatttttaggaggaatagaagtatataagtagacaagagattcgtttcattgattacttaagcaatcggaactgccattgctgttctccatggaaagcagaaacttttctgaatactgcatcccttcaacgctctcccagactcaaataacaggaaatttttcttactgcattgtaacgaaacactttcattttggtttttgatatctgaatggttcctgttaagaaagaatcgattttgtttttgcgtatctgaccgtctcccttttagatctcctaagttcaccaagtccatcatttgaagtccaaattcatgattgatttctgtcattatgaatcctgtatactgagcacattgttctgttctccaatcctatgcttaatgctgacacaagttgaattcctgttttgaaattttgtacattttatgcacgcaagctcaggcaaaaaacttggaaagtctgtgcatttatctatgcttttgcaaatggttgttcatgaatagaagccaactcactcattattggtgcagaa

SEQ ID NO: 54715 - DNA, 568 bp, Populus trichocarpa
  Intron number 2 from transcript POPTR_0003s12980.1 (locus POPTR_0003s12980) derived from phytozome v7.0 (chr-ID scaf fold_3; pos 13401487 to 13402054 reverse strand)
gacctaaagaaagtaagtaatcaaaaatcttcagtaccccccctttttttttcctttttactgttttctttctttgattctgctcttcttctttctttaatgtttttcttagcgggttcttttctgtttttcagatgattttttatttattcttgttggcccatttagatactttgggtcatggaattgatcttcaagattgctgtcaataagaagttatattttcttttttatgaattgaaccttttatttttcttttgccggagctatttttctttgaagttgaattttaagcagattttttttactactgatgcatgcgaagaaacttgttgttttgcttttactgtgaagtagaatgaaaatttaatgaattgcattgctgtttttagttcttatattagttgcaggtttgttgtttgttgattttcctcagtgaagataaagcttaagtttctttggggtttttttaattatggatacagtcagattattatctcttcttttcttttttctttgtgggaacatggtaggtctttatcaaggaggtgtgtggaagataagagtt

SEQ ID NO: 54716 - DNA, 851 bp, Populus trichocarpa
  Intron number 1 from transcript POPTR_0018s02540.1 (locus POPTR_0018s02540) derived from phytozome v7.0 (chr-ID scaf fold_18; pos 2317014 to 2317864)
ctttgatcaagaaaagagggtttttagggtttaatgtaagtttttttcctctctctatttttaatgccttctgtttcctattttgggcttgttttgttaaaactggttaaagcttgtagcttcttggggccttgtcgtgtctctgatcagtaaaggtgtttacttttcttttttttacacattttagtggaaatatagtggtttttatgacagtcccgttgtgttagggaaaaacccagatggttaagattgttttgtagtagtttttgtgtttctgctgttgttggaaggaaaaaattactgtgagagagaaaaaacgggggccttttcttgcatgtatatgatgacatggttatcttgttgaatattttttttgggtttttgttaaaagttttgttttttttttttttgtaataaaagtttgcgcttcttttttttcacatttcttttttgtcgttgattacagttctaatgaacgatatgtgttaaggtgttttgaaggaagtctggatgatcgaatagtttatcatttggaatccagagtgaaccccaaatgcttagcatttgttgtagaggaagatatgtatttgtggaggaaatgttgatgctgctcgggcacttgggcataatggcttgttgggttttagtacttgtgatgttctgaggacattcttaataaaagcaggaaatggttctcatatctgttgtttaatgagccttgaaaacttaagttgttttcactgatatgttccatgctgcttccacttccatttgggttaaattatcacagttgtgatcacaccttcggcactgatgttctgtcttttgtttattctcagattttgaattag

SEQ ID NO: 54717 - DNA, 773 bp, Populus trichocarpa
  Intron number 2 from transcript POPTR_0018s02540.1 (locus POPTR_0018s02540) derived from phytozome v7.0 (chr-ID scaf fold_18; pos 2318325 to 2319097)
ttcaggtacataattctatctaacagttctgttttttattggtgatagcagtttgatgttataccatctgtatcgtgtttgatagggtaattcttgatactgtaatgtcaaactctttagttgaaaggttatgattttccctgaagtagcaaattttagagttgatctctggttttctttcatgatatatcttaattgctatattactatgtcatattgataatttcatgactcttagaattcttaatcacatttcaaaaacttgtgctgttgggcaagtgccttgatgttcccaggactgttttaagcttgatttagttctaataactctatagttgactcgaacttgccaatgatgctgatgatcagaatttctcttaggcagtgatggtagtccatttttaacacataggcaccaatggcttgaagactcaattttcaagtgtcttctgcttttaattaattcctttttttgtaatcattttttgtttgtttgtttgtggatacaccaattgactgttaaataagtggactcttatttacttgagaagaaaaaagaactgcactgtcatctatgcatatgcaccaatttttgcaatcatagcgttttcattctgtctcaattctcttaggcaagattgtttcagctaaaactatgaagatgccataaattgtcggatactttctctgcctttttaagttttttaatctcctatattttttctgcaattatgtcaggtatacacacaaactgttggtagaagtgacaagtt

SEQ ID NO: 54718 - DNA, 554 bp, Populus trichocarpa
  Intron number 1 from transcript POPTR_0018s13570.1 (locus POPTR_0018s13570) derived from phytozome v7.0 (chr-ID scaf fold_18; pos 13854290 to 13854843 reverse strand)
tcagtgcaggtaccaccacaatcattttcaacatctctttacattaattctactattcattggatgtttcaaattggttttgttttggttttgctcttacacttctgtcattcgacttggttggatattttttactacatgtcctctgctcattacatgtttgtggctgtgattgagtcgtttttgttggtgcccctctacccttttattgatgtcaatgctttttggcgttgctaattgtctctccaatccttgaagcaatgataagatggcatccttttgcctttagcaacgtttacaaggttgctcattgtgttttcgactcttcaatgcgttgctaactgtaatcgcacgatatattcactgaatctaatggaattaacaatatttctaatgggataaaatactagttattaaaaaaaaatccattagttgggcgcagatttttttattttttggaaaatattggttccaatttctgtttgtgacttcattttctgattatttgagttttgcatgcttatgcaatggtcgtacatgttttgtaggtagcg

SEQ ID NO: 54719 - DNA, 857 bp, Populus trichocarpa
  Intron number 1 from transcript POPTR_0014s02060.1 (locus POPTR_0014s02060) derived from phytozome v7.0 (chr-ID scaf fold_14; pos 1809135 to 1809991 reverse strand)
ctggtaagatctgtaatcatgttgtttgatttactaattatcttgaaccaagttcaatcattttgaataagcatgcatgttagacctacttcacctaaaacttagcatgctgaagtctaattgacttgagctgactcacaagtctaatgcatagttacaaactttatgtattagaatagtgaagtcatagacagaaccaaggtgtattgaattgacaagggagtgggaggtcaccttggtgactttctttgcatcgtctttttttgtttatattaagtaatactctaaaaggcggcccacgcctgtacttatatattataattatacttataataatataataataataatatatactaaaatatagctgtcttttcttttcttatattatatattataattttttatatattttttatatataaaaaataaaaccgctacatcgagcaggtaatgtacatagttcacaacggtagcgcgtctggttattgtcacaagagacaacacagtgtagataagaaggataggagatggtgaagaaaagatacagaattgacggttgactgttttagtacggtatttagaaaaattgtaacaagatttaataaattatttttattttaatttacattgaatattaaaattaataataatataataattcgagttataaaatctagaatggtttgttttgatggattgatttaggatttggtcattctagagtctaactagtttatttctacaagcagtaggatatctccactgttagaataagatatctccactgcttgcattgtctatggaattaattaccataagttggtttggtgtgtgggtgctcttgttggcgggaa

SEQ ID NO: 54720 - DNA, 928 bp, Populus trichocarpa
  Intron number 1 from transcript POPTR_0003s06690.1 (locus POPTR_0003s06690) derived from phytozome v7.0 (chr-ID scaf fold_3; pos 8214638 to 8215565)
gctcaaagaacgaatcatctacgagaaagggcgaggtaattttggcaacttgattactcttctcgatcgaggagcaaaacatcgagtgagaattaaaataaaaagttcaaaattgattgtctattttggatgatgttagatttcataacgaattgccattcaaatctcaatttagcttagttaaataaaagaaactggttacttttcaggagggtaatttttcagattctaaaatcttaatttcttttgttctatggcattctcattgcaactgatttgaagattaattatatgctttgttttggttatcattgtttggattttttccgtttgtagggaaggtggataattatttgcttatcagatcttttcagtatgatgttatatgaagtaaagcattgacccttgattctgtcctctgtcttttatcgagcttcttacatgcctagcactctgagaaacttttcaacaatatatgtattgtaatctaatgaattgaagtggttgttgatgtgataaacctcaatttctggtaattcccgatgggcttaaaagaaagttatgttgctaaatgatatgtagtgcatgccaccattcttttttttttttcctcttcaatttaacatgtgatttggttccaaacagacagtaagagatggtaatggaaagttaaaacaatttgttttctgtgaatatcagtgttattagattagatgggttggtcgttttttgcttcctcaattattatccttctcacttttcaatttatagcaatggtgaagctctcttgttgattgaaagcccttcaattattgggtgtgaattaaggggtggtatggatgttatattttatcccttgctctgtattttctataccataatctatggtattctgtgaagtaggctgacatctttgagggtgctgagg

SEQ ID NO: 54721 - DNA, 760 bp, Populus trichocarpa
  Intron number 1 from transcript POPTR_0003s08600.2 (locus POPTR_0003s08600) derived from phytozome v7.0 (chr-ID scaf fold_3; pos 10007660 to 10008419)
gataaaatcgaaactggaagcactggactatatcggttagagattttgtgattccccacctttctttctcaaccatttgcctactaattatctttctcaagtagaaattttgtttgcgttgtttaatttatttcaacctattttaactaaaacagaagctaattagttataaaacttgaaagtggttgtgactgagatctataaatggaaaacaatttcttgcaatgctcaaacgtagtactgacaaaaggatttttttttactaaagcaacaagtcatctttactacatgaagggagtttccagatcgtaaacaaaagttgtaaaatttagttgtttttggtcagtgttattatcggtgtttcagaactctgtatgttcgagcagtggaaatacaagaatgtctattatttttcaatattttgtagttttttgttttttttcaaaatttggttagtttgtgtttgccatttcaacatcattctaccagagatttaatttggctcttttatcatctcttaattccaatcagaaccctaggatactgttcaaaccacattatatgatattaaagctacatcttttagatcccaaacaaaatatatagttgctttctttgagatattgataaacttgctcgtttcttggtcttctttaatatttatcacttttatatcctgtaatgtaatagtgatgcattctctcctgtttgagcctctgcttaacctcaccatgcccattttcagtttatacattctgca

SEQ ID NO: 54722 - DNA, 657 bp, Populus trichocarpa
  Intron number 2 from transcript POPTR_0014s01420.4 (locus POPTR_0014s01420) derived from phytozome v7.0 (chr-ID scaf fold_14; pos 1378795 to 1379451 reverse strand)
aggaaagcaaactggcctctaaagaagaagataaggtataactaaatagtcttaacagttatgacatggtcgaactagttttcctacagccaaactaacagactgcaataattaaatcgtatacaagtaaattactttggttttgttttctcttctttctttgaagaaagaaaaaatcccttttaaaaatgaaaaatgctattcaaatccaagttgccacttactcatgtatttttctaccttgttttaccgagagctttttcgtggtgaataaaatttttatcttatcaaacaataaaatattgtttattgattctctcttaataggacacttcgattgagaccaaagcaaacaattgggaccaatcagattgtccagcggctgtggtgaaatctaactacagtaaatcgtgttattacgtgttgcgacgagtacatatatagtcatgccatagtcagaaccctcatatcttcccctatcgattgtttttcgagcatcctcgctcgatttcgtggagacattgtttatctctctcactctgtctcatacactacttcatcaagtacgaaattttctctctctggattgttgtgcttttagtttggagttttcagtactttcaattgctttgttttctgcagataccagccaattca

SEQ ID NO: 54723 - DNA, 968 bp, Populus trichocarpa
  Intron number 1 from transcript POPTR_0006s16980.1 (locus POPTR_0006s16980) derived from phytozome v7.0 (chr-ID scaf fold_6; pos 15033231 to 15034198)
caaaggaaaccaaatataagaggtgagtagttacttcctagttgttcctcctttgccctttttatactttattacataaggaaaaatctcaatgaattcaaccaattttgcatgtttcctattcaacttctcttgtccttgcagagggttcaacgactcatgatctgaatggactacaaacttctttggccacaagtaatgttgccatgtctcaagtgctctttccttcttattggtaggataattcaaagtcacttcacttaacttcttattaaaataagtaaagggtcttcgatcctgcattaacacagctcttgttcctatttcagaagcatcacattcaatttcaaatgctatcataaaatcaggtaaagctaaaataggtgcggaacataattattctttcaaatgggcaaaagttgattcctattcctcccctcatttaaactcaattggccatcatttactttaggttctagattcggacttaactcgtcgtaaacgagtatgttttgcgtcaacttttaaaattcgctttctttctgctgctttcatttcttgcagcttattttcatcatgtccaacatacttggttgttgtttcatcgttttgcatatttttatttatgtttttattcgagtcttcattttcgttcatatttcagatagactcgcttgctacttgcgagactatcatcacagttttgttttgcttgttttctagtttttattgcctcttgagtcatatatatatatatatatatttgaattgcgctgccaagttggttttatttggtgttggtttcaatcgcgcaagaaggtgagacgagaggtgccacgcgtgtgaggatattaagagtgtttgagcgaaacacaagcgatgtgaggatttgtttttaccactatccaatttttgcatgtactatcatgtcagatcaaaacaacacaccaccccctcacgaggtagaa

SEQ ID NO: 54724 - DNA, 799 bp, Populus trichocarpa
  Intron number 1 from transcript POPTR_0003s07980.1 (locus POPTR_0003s07980) derived from phytozome v7.0 (chr-ID scaf fold_3; pos 9463012 to 9463810)
cgccatcgttctctggttcttctccacccccttaggttctcaaatcctctcttctcctgtttattttttgttccttcgtttctctgaaccgatacggttaatgatcgattgctttatttgcagttttattcttcaatcaatctaaatattttcatccaatcccatgtactgtgatggtatcttgttaactgaccaattggtttaaagtttactgttagactgagaatggtatctctaactataaaatgaagagttcatttgtaagaattttttcttcttagatatggaaacttcctgtacaatcttaagaatttgtgggcagaatttgttgtttgagttcatatgatcaactcttattcatgcctcatcttttcttgcttgatgagattgtatggtattgaacaatattttgttacaaaagaatttcttaatgcttgcatcacagatttttgttggcggcctttttttccccttttgttttgttagcgaaccctgtatctcctaatctcgtatcgcactgaataattacgtaattgcaactctttcagaatcctatgtactgagcagtatagagttttctcttatccgaggatgtgcagggactgtaaatttttccactgatttgcgttccacaaaatgatcttagttagagatagatagtaaatttttaaagggctgcatacaaatcacatagcgataaaagtatgcatgtatcatgcaattcctttttaatcaaatcattttctgatcatgctgctaattgtgttttggcagagtcaaggatttgagaatcaatcac

SEQ ID NO: 54725 - DNA, 770 bp, Populus trichocarpa
  Intron number 1 from transcript POPTR_0003s21330.1 (locus POPTR_0003s21330) derived from phytozome v7.0 (chr-ID scaf fold_3; pos 19538841 to 19539610)
cctctctctcgctctcctttccgtttccttctcaggttcgctctctctctaaaaaaaccagtagaattttcgttaggtttttgaattagagttgttgcatttcaattttgactgttggtgaaccagatcaggtttttcatttcaggtttctgtctcttcagggacaattttgtcaatttttctctacttttgtttttgtttccattgtttttgtggaatataatgactgagaatgtttttttatggaattctttcatgttttgcggttattttactttttttgtttgcattttttgtgggatatattggttgagatgctttttttgtcagttgtaatttttgtgggttttggatgagattttgtgtttgatttttaggtttttgtgattctgattgttttttcttactaaatgatatgataattagagaaatgattttgttttgttgttggtgttgttgggttaaatgcgataatgattgtattctttgaagattgaggattcaatggaattgcaattgttacattgatgttgtgtgaaaataaaagagtttgttggaggaaagatttgattttggagaaagttagagacgtatttgtttcgttgtgtttagaaattggaatttcaaattggggtattttggttgtgattgatgttgttttgttattgtactaaatataatgattttatattttggaaagattgtgaatttgataaatttgtggtctggtttcagggttttgttgaaattgtgatatcaagaaaagagaa

SEQ ID NO: 54726 - DNA, 490 bp, Populus trichocarpa
  Intron number 1 from transcript POPTR_0006s24100.1 (locus POPTR_0006s24100) derived from phytozome v7.0 (chr-ID scaf fold_6; pos 22780671 to 22781160 reverse strand)
gtaaggtgagcaagcactactctccatatcttgtttcttgatctctttttatggttcttggttctgaagagaagttgtgaaaagcgaaagcctcatttacagttgacacaattacgtagtgcagtgtctttgtttttctcttccttgtaccttcactttccttcttgctttcaagattaatttttgcaattattagagagagaaagagtgctaatttacaagaggctgagatgggttgccttagatccagggatgtgagaaagggtaatatcttttttagggttttcttgtgattattgggactttaagttttcttgggttctttctcatgacctttttttatttctctttcttgtgtttaaagacaaggggttggcttccaatttagttgctcgctctatttttctttttttttttgagattttgttcctttttttttgtgtgtggatttaaagttactttcgtggttgtttctctctcattgtagttg

SEQ ID NO: 54727 - DNA, 817 bp, Populus trichocarpa
  Intron number 2 from transcript POPTR_0003s21530.1 (locus POPTR_0003s21530) derived from phytozome v7.0 (chr-ID scaf fold_3; pos 19652129 to 19652945)
ctcctttccctgataaggtatgcttgttttgtttttgtttttgtttttttaatcattttctggcaaatttgatgccttgtcatctgggtttactttattttgttgtgattttgctaaatatggattttgggtcaaattttggtcatttcggtttaaaatgggatgtttttgtgtgaaaatgtggtttatggagggtttctgttgttgctgttgtaagttgttgaagtaatggtgatgtagtggtatgtcagctgaatgaatggttttttttttttttttttttgcggggattttgattttgtgttggttggatgctatctcaatttggttggtggtttttgctgaaatatggtttcaaatgttggttttgattaattgttgttggtgatttatgcttgtagctacaaaaagatggtttcatgggggcttaatatgcattttatttagtgtttctgaaatcttgagtgaagtaagattttcaatcttacactgtttttggaaatgttttgagttttttttttttttttgttgaggacagttgctgattgttcagtacatgcatttattagttcaagattttaagtatagaagcctgtgctgaaatttgatgctttgttttcatggctttgttttgttgttgcatgcatggcattataaatcatgaaaaaaacactttgtttactttgaagttgactttaattgattctccaacatgttcaacttctaatattgccttttatttttgtggtaattatagagtgtttattattttcttatccaaggttcaagtgggagggtcacctttatataggataga

SEQ ID NO: 54728 - DNA, 461 bp, Populus trichocarpa
  Intron number 1 from transcript POPTR_0019s14140.1 (locus POPTR_0019s14140) derived from phytozome v7.0 (chr-ID scaf fold_19; pos 14897309 to 14897769 reverse strand)
caggtatgtgaatgaattaatcatcatatagtggaaatgtcttcttcttcttcttcttcttgtttttttttccttttgctttgttcccattatgtcaatcaattaaactcaaattgttcaacattttctgattcattgaggacttacttgataagaatgagagctcaaaaactgtaaaaaaaacgatagagaaaaagaaaaaccctttataaaaaagtttaatctgattaatctatttgtcacctgaaattcaggatctatatgcaattcaatttgtgctccatttttctttgaattttttcaaatattgtggagcagttcattattatttggagcaaagtctagctagagccaggatactttttcgtagacgcattcgacttggcttgacaactaatccattgatcacatttgctttcatttcaggtctacaaaggtgtggcaaaagttgcagattgaga

SEQ ID NO: 54729 - DNA, 509 bp, Populus trichocarpa
  Intron number 1 from transcript POPTR_0014s05880.1 (locus POPTR_0014s05880) derived from phytozome v7.0 (chr-ID scaf fold_14; pos 4393879 to 4394387 reverse strand)
ccgaaagaagccagacatcgttcgatcatcaccgggtgctcatatatattacttcctccgactcttatttttctgacttcatagcatccctcgacccagtgaaaatactagaagtctcctccctgctgaacgcctcacttggccctctaactctcccaaacccatcttgtttactctccaaatgatgctttttctaaaaagaaaaaaccgtctttgagttgttatgtaaaattttagaatataatttatatgattttttaatatatttttttaaataaaaattttttaggttagaaatttgtatagatttatattatattatatttaatttttattaaatagaatgagaatgataaaattcaaattgaattagttaataaaattttgataccagactactaaccatctcaacttaaaatttttaagtaaaataattcttcatactttcacccacacttgccgagtctaacgcaggttttggtcgctttgcagacagtggaatcagtgaa

SEQ ID NO: 54730 - DNA, 716 bp, Populus trichocarpa
  Intron number 1 from transcript POPTR_0006s05110.1 (locus POPTR_0006s05110) derived from phytozome v7.0 (chr-ID scaf fold_6; pos 3551105 to 3551820 reverse strand)
ctactggggttagtaacattttgataactttgcttgttattattgggattgatagatagagagtagacactcaattgattggattgttatatgaagggtgtggaatttgtacaaatgcattgctgcatgctttctggtgaattgttttatgtgttttttttattggggggttggaagctttgttctctattccatcatgtttggatccttgaaagaaaatgacaggaaaagtggaaatgggattttgttcctgttcttgtttactttaatatatgattgtacatgaaaccatttcattgcattttatattccttctgcttagcgttttcagatccgaaggggatttaatgtctgacttgtttatgagatagttttggttaagtgtagatcatgatgctttattctagatgccaacagctgaactttcgctggtgtgataatccaaatctgtatgtttgattgtcagcagttctttgtttctctcttttgttcgtcggagaatctgtttgtttgctgagtttagaatcaaggaagataatctctctcctttgaatctaatacatttgaactgctcggaaattgtgctatcttagagatttgcgatagtgattatgaaatctgttcctgggtcttcttatctatgaatttactttggctttgggtgttttgcttgttgttcagccaaaaaaaatccaagtgtgccagatctgcagtga

SEQ ID NO: 54731 - DNA, 736 bp, Populus trichocarpa
  Intron number 1 from transcript POPTR_0018s11960.1 (locus POPTR_0018s11960) derived from phytozome v7.0 (chr-ID scaf fold_18; pos 12593188 to 12593923 reverse strand)
ccagtacgaaggtatgttcacaacctttttgttttttcttctcttttgttcttcttttgtgaatcttggaacttggtttttcaattttttttgtagtctctttagtttagttttcttttcttttttctaattctatatgaatgtgcttgtctgagtgtggtattatctatgaactatagtgttgtattattatttttgtttctctcttttctttttttgactgttgttgttctgttttatttatttgctttgtactttgatcgggtaaagggtttgtataaatttgtagtaactactatagcattcaagttttgtattttgttatattctaagggtatgtttttggattttaggggaattatgttttaattgtctttgtatgcatagtttcaatttgtaattcaatacttttgtccattcaagtttcagtttgtgccctttcgaaagtttgtactatttctcattgcttgcccatttactctattagaagtaatatatgttttattttctgtttaattttatggttatatagatttttagggttgttgctggtaatctgattctcatactcaattctacttctgaatcttgggttgcatgtaatttgaatataatttatagcatgctgggccttgaaattttactgcaaacttcattcaaattcagtttctcttaatacaagttatctatggtgtttgcagttacaactaccaatcaagcagtcactgctctggaa

SEQ ID NO: 54732 - DNA, 872 bp, Populus trichocarpa
  Intron number 1 from transcript POPTR_1479s00200.1 (locus POPTR_1479s00200) derived from phytozome v7.0 (chr-ID scaf fold_1479; pos 1438 to 2309)
ccattctgctggtttgtccgtggaaggctttcaaggtgaatagagagaaacattggcgttgaatacagtctactctctttcatgtttgtcaatatcatgctaattatgttttcatgttggaaaatgattcattaccagcatgatgttatattgttgatgaacagagagagaaattggtgtaaaacgttcacattgagctagtagatccctactgttcttttatagttcttctataactgtatttcgtaatctcgatctattgctgagcacagtttcatgtttgttaattatgttttcatgttaatatatttgatggctgagcatcataagatttctccgtagatttcatagattggttggtgaactctgaactatgaagtgtgggtttgggcaatatgatagttcctgcgattgcaaagtgactataggtatttttccttaacaaaggttataagagacagtttttagtgggatttatgtaacactatctggtgcattgataacataaatattttcaaaatggcaaaatacaatttcaaccccatctcactaatgggttggtgtcgatttttggtgtttcttaggtagcaatcaattatttttctaagataaaaggataggaaacagtgaaaatataaacgtgtttagtcgaacaaaaaatataaaaacacatcaatttttaaaataaatttatgtattttcaaaatatgagatacataaatgatatattttcaaaaacaatattttttattttttattcttaaaatatccttgtaaaaaattctaaattcaaaaatcatctaagatatataaaaacaaaaatgattattattatagttttaaaacccaactcaaattcaatttagagcaaa

SEQ ID NO: 54733 - DNA, 644 bp, Populus trichocarpa
  Intron number 5 from transcript POPTR_0006s08120.2 (locus POPTR_0006s08120) derived from phytozome v7.0 (chr-ID scaf fold_6; pos 5908048 to 5908691)
gtgttaaagttgaacttcttggccaaattggttagtcaagttttttcattgcatttcttgccatttgcaactgctgtgcgttgagttgcttctttcatttcttgaaacaaaatggtttctctttgtaacccagcctcccagcaaacttaccctttgctattattcattcatccatgactggcagtcgagtgcaaacttcaaatatttccttttgttaattttcatataaaaatattgttaaatattctggtcctcttctcaggattgtttttgttaatggttcaggcatgatacaaaaccagacaagtaattttaaacctgttgttggattggctctctctctatattcttcgttaattaaaaaaatataaaaagcttctaatgctagctgtaccaataataataataataataatttataactacttctgtgtttctttttaaattaaacattaatgaattttatgagctttgctagctatcctacagtgattttgaactgctctgttttctacttggttgaaattggattgttttgtactatttgcattttaatttttgtcaactctcctgcatgcatgcattattttgtccttgaattgttttccaaagatttaaggaactttttgttctacttcgcagag

SEQ ID NO: 54734 - DNA, 705 bp, Populus trichocarpa
  Intron number 1 from transcript POPTR_0014s16390.1 (locus POPTR_0014s16390) derived from phytozome v7.0 (chr-ID scaf fold_14; pos 12494323 to 12495027)
ctagtatttccgtgtaagacacaggtgcagattgttgctgcatcaatggctcttcataactaaataagaaggaagtctgtacaagatgttgcttttaatgaatttgaatgtcatcctgatttatgtcttaggatttttttacgtgatgttcttccatgatcataaatatatggaggtaataaaacttcgtatatagcttatgttcgagatggaatttcttcaagtttgatgggagaactataggatttttaactttacaaatagttaatcataaatatgtattaattattcaatgtcatgcattgaaaaaattaatgttctctttgattatttcatatttaattataattttaatcaaacactgattacatgtttttgataaagaagcaatttaaagtataattttaaccataatttaaataaaggaatcacattaaaaaaaaataatttttcaaaaatcagtgttttttttttaaaaaacaaatcgattttccttctcctatctcgctcactcactatctttttccctccttcaccgagaccgactggctgagactgccctctatcccttcttccttccttgacaaaccaaagtccttgaaagcatgacaacttgtttacatctccgtcgattttcaactttcaatcggaacaatccaatcccacacagaacaatccctgaacccaaaggacaagaccttgatt

SEQ ID NO: 54735 - DNA, 539 bp, Populus trichocarpa
  Intron number 2 from transcript POPTR_0014s15820.1 (locus POPTR_0014s15820) derived from phytozome v7.0 (chr-ID scaf fold_14; pos 11903542 to 11904080)
cccaccagtctcttgctcaggttttcttcctatattactaagtagttggacccgcttagaaagaattcgttgttagaaaacctattgttctgctttgagagtgatgtgtgtgtagtttctacaaacattatttatagtggttttgggatctaagaagaatttttgctatgaaaagctcattgagtttttctagttgtctatcatatgcctttctgttgaagggcagatgaaattttgcattttatttactttagaggagaaattatttttttgttttctttgaggtaattttcactacatttactctctagataaatatcttttctttcctggaaaagctttaaattgaaatatatatttataagctcaattttcccatttggcctgctgtgagttgtcatttttcttgtaatacgaaccacctaaatcttgtagagagatgaatcctagctaagtgatccaaatttcctgtttttgtgtttttcatatgccaactttatgtttgtggaaccaaaactgtttgattgctatgcaggaat

SEQ ID NO: 54736 - DNA, 887 bp, Populus trichocarpa
  Intron number 1 from transcript POPTR_0013s13400.1 (locus POPTR_0013s13400) derived from phytozome v7.0 (chr-ID scaf fold_13; pos 13889904 to 13890790)
agcgggtcttaagggtatggcatttgctttattcattctagttgtagtttaattttgctctgatgaattgcctgaataaattgctggaaaattatggaaatggttgctgtataacctttaccttaccacccaggcaattttgtctggtagtcattctgagttttcatgcctctatctactgctgtttaaaagtttagctttatttaatactgtaatgaaacaaatgaattagttgtaatcaagtaattgtatgtgaaacaacaacaaccccttgatcctaaactagtcgggtcggttttatggatccacagatacaccattaacactgatgcatgcgcgcaattaattaggcctgtctgttactgtgttttaattgaggaaacgtgagaagaaaaaactttaaagtttccttgaactgtaaatgagaagaacacaagggccatagagaataaaaacaaaggaaacaggtatatcatttcaatgccctatacttttagtgcctccaattttgtcctcttcttaaatttatcagaaagaaaaaactttaaagtttgtgctttaaatgattttgattctataatttcttattcattttcttgtcaattgttgttccatccctcagtttgaaaatatatttatgacagaaagtctgccttctccacacataaactttcaatgaagaaataatttaggctaaaaaaggttaagtctttaaagaattttctctcttcatgtttatattgaaatgcgttggagtttttcatggcattaactcattgaaaatgtccaaagctgagaaggcattttactgatttcattgttatcaagatcaataatgataataccagcattattttaatgactgagattttggcaggctttggatt

SEQ ID NO: 54737 - DNA, 965 bp, Populus trichocarpa
  Intron number 2 from transcript POPTR_0013s14560.1 (locus POPTR_0013s14560) derived from phytozome v7.0 (chr-ID scaf fold_13; pos 14714976 to 14715940 reverse strand)
gggaacaggtacctaattcattactatcttgttccttaaaagaaattaataaatcatttcattgattttgactaagaaaagatgaaaagaaaaggaaaggaaaagatacgtaccctatcaagctttctaatcaaataatagatgatgcttcatctcattcattcagttcttactggattattttttcttaatacatgatgtgagagttaattaacatgaatgttacatgtaattagcataaggaatgcaataaaaatcccctaaattttagactaataataatgtattattcttaattttctccccaaaaaagtttaaattaatgccatgcttcttataatattaaaaccgactaatatcgttttctctccctacataattacattatattagcatgacactaactccattatatttattatcttcaatgtttttttccccttcacatagtgatgagagcaggtgatttaaattgggatgtttgagaatgtagttgcagttgatttttcccttcacatagttacagttgtttttcaaaatattttttctttgaaaatgcatcaaaataatatattttttttatttttaaaaaattatttttaacattagcgtattaaaatgatcttaaaacaccaaaaaatattaatttgaagtaaaaaaaaattaaaaatgctttcaaaacacaaaaacaaacaagatcaaattatcttcattctagtcgtgggatttattggaaactgtcatctctattttcttttgttattaaaattaacataatatgtttttcttaaaatatattattgtattggaggatggatgttatagaccgttcatctaatgtcctagtgaaagcataattttcactatctgattaattagatgttaaaaactagtatcatttttctccattaatgttacatgacattacattatttaattacattacgttgcatgttcatatgtag

SEQ ID NO: 54738 - DNA, 593 bp, Populus trichocarpa
  Intron number 2 from transcript POPTR_0019s00980.1 (locus POPTR_0019s00980) derived from phytozome v7.0 (chr-ID scaf fold_19; pos 742744 to 743336 reverse strand)
cccattttaaggagctatcccagctcaaaactcaggtacccttctgaatcttttttcaacatggcgtgtacacctttgtccaatatcatagccatggttgttttcatgattttttgaccttctggtggccatttggcagtgttcatgatttcatttaccatagaatttcttaaaatacgagagagaaaaggtcaaactttcataagttcattggatttctcatcatttcaaataagacaaagttacagtaaactttactagcgtttttctaataacttgataaagaatagttctttcaatgttttcaacgtcggcatcttgatataaatatagataagtgttagaatcttaaaaaaataatgataagaaatgcttagtttgttgactaacttgtcaaaattatcaagcatagagactgtttagtattcgagtatcaatgccatgggccgaaataaaattttgaaccaagacaaaataggctaaaagatgaaaataagataaaggatccaacattgtaattattgtattatgaaaatatgttcatgtgttctcttttagatccaagattcaaagactggagaattactgagcac

SEQ ID NO: 54739 - DNA, 1007 bp, Populus trichocarpa
  Intron number 1 from transcript POPTR_0013s01010.1 (locus POPTR_0013s01010) derived from phytozome v7.0 (chr-ID scaf fold_13; pos 550120 to 551126 reverse strand)
ctttatagttggaatcatagctcttagtatcacaggtatattctttatactttttttgtgttattctttgtgggcttttcgttttgactctgttttaggtgcaaagtttgagtccttttagggtcaagaagattggtttttggttgtgattgagtttttggattgtgcgctggtgaatctttaatgggcttttgtattttttttgtgtgtgtgaaatttgtgatcttttatgttttaggggttcatttctaatctgggtttgttgggaacaagctaagatatctaatctttgatgagtactgtgtgctgataaactcatgagttagtaactcgattgttgaatacattagagctcttatgtgtgcaaatgtattgaaattttgatattggttgaaatttgattgggattagtgtaaataagtatgtcagatttcctgacttgatgtgaaagtgttgaggtttcttaggatttaaatttttttccagttattttgctaaatttgtaagattcggttcactcacattaaaaattgatagcaaattctgagttttggaggcaatgtagcttatgtgaaaaatctaactcgtatagttttaatgatctctcttattttcatctagcgaatactgttttgttgaagtggctcatacgtcttaggacagaatcaggatcatcgttttgtgaataatatgtatactcaatagatatataaaatgtttgtatgggtttctttcgcattgtctgcatgtgtttgtgtgtgcctgccaacgagtttatctttgctgtacacattatcacaatattctcatgtcaagattttaactaaatccttctgtgcttgattgttggatcttcggaagtagagaacaagttggtttcttaaattatcatctgaatttaacaaaactgaatgtattggcttgagatttttttcacaacatggtatgcttatgtgcggcaacattttatagctgaaaagtgtcggcaactggttggggacgataat

SEQ ID NO: 54740 - DNA, 852 bp, Populus trichocarpa
  Intron number 2 from transcript POPTR_0013s10010.1 (locus POPTR_0013s10010) derived from phytozome v7.0 (chr-ID scaf fold_13; pos 9982108 to 9982959 reverse strand)
taaggttgttaaaatcactcatcaggataaatctggtaagcttatatctatatccacttcatgaataccatttttatgtttcatttttagctatcatacagaagatacctgttagttttttattgaaaatcaaagaggaactctgaacaacatgcacaagaaagtttattgaatagatagagccttgacagcattgaactgttcaatgaaattgttcacctagctaaatgtcgaaaactaatgatgaaagaagatataccttttgtatttccagtttctacatgaggacactttcacatactctctcagaaaggaaaaaacgaaatgctgggaagatatagtcttaacatttatttttatttgtaatgatgataagtattggcattacagattcaaaaaaagtggtggtgattatatttcaaaagcgctgatgttgtctggcgatgcacatttgttgagttgctgcagatgtagatactacccacaaccaatgccctgatatacaaagttcccagtagtcagtcaagactactggactggaactatgaaacagtctgcatggttcatgcaattgtgatctctatttccatgtgtatctcagaagacactgttagtattctaaagtattctgaatgttttttcttaagttagcttgcgagggattgtgtgtgtgtgtgtgtgtgtgtgtgtgtttttaacgtttgataagttgcagtgagttgtattaccatttgaataacttgatatgtaatgtccaccttagattcctttgattaaaactgattgctcacttttcaggtaatctagaattgccatttgcatcccctggaacaggctttagccctttatagc

SEQ ID NO: 54741 - DNA, 607 bp, Populus trichocarpa
  Intron number 1 from transcript POPTR_0006s20900.1 (locus POPTR_0006s20900) derived from phytozome v7.0 (chr-ID scaf fold_6; pos 19938935 to 19939541)
ttagcttcaatcagctccagaaggtactgggctgttttatttcccctcttaattttgattgatggattagtgtgtctgtttttgtatctgggattgaattagatcactgttttacttaattttgatttttaattgtgttcttgattggatcttgatgtacaaattattcagtgagcttgttttattagtttttgatgtgggatttttgtttttctcttttttattatctgggttttcagttttttattgactagatccgtttttagctccttgtatataattcacttctggagttctgtgtttttattttcaaaagagagatcgaagttttatgtcagttacaattgtttatactagtgagaattgattagagtctaggcaatggaaatggtgtttctaaaataaagattggcattttgttacatgtaatcagcaatttttttttaatatataattttaagtttgtgtttggagcatacaaggttttgtttatttattgtctttcagtttttagccaactattgttgcaagttgtgattagtcattgaagaatttttatgtacttgtgacagttctggagtgagctgccaccacaagctcgacagaa

SEQ ID NO: 54742 - DNA, 684 bp, Populus trichocarpa
  Intron number 2 from transcript POPTR_0019s01920.1 (locus POPTR_0019s01920) derived from phytozome v7.0 (chr-ID scaf fold_19; pos 1700413 to 1701096)
tgctcatttggggttgtgtgccacattgtttccatgtacgtttcaacttcttttaatagtccgtgcttgttttgtttatgtttgagttaatgttttccctttttaattgattaaatttttagcatttttgtttgaaaatgaggaacaagagggtatctttatatatcaatagcgttgttaatagctgaatttttaatgctagctagcaatgtctgttttcttggaatttttccaaagttatgatggtattgagctacaaggtcaaaacccttgagagttaccgtgtaaaagtatctgaaattattggtttagttcatgggtgaaacaagattgatataattttgggaaattcagatgaaattgtgcagtggaattttttctaagtataaatgaataatgatcattgcaaggatgtagtgaattgcaaaggaaagatctttatctaggataagaatttcacttttgagaagtttatgctttagtattgctagatttcaaaagatttttcaggtctatggtctattattttgtattttctctctttatgaaagctgcttttttatatttgaagtttatgcttcatatttgaagtttggattttttactttttaatgaggaattgatgggtccaagtgttcttgtgaaacagatttctcaaagggcaggatcttgctggcagtctcc

SEQ ID NO: 54743 - DNA, 764 bp, Populus trichocarpa
  Intron number 1 from transcript POPTR_0006s13260.1 (locus POPTR_0006s13260) derived from phytozome v7.0 (chr-ID scaf fold_6; pos 10505668 to 10506431 reverse strand)
gttttctggaagaagagaaggttgggtttcgcataattaattgttgattactagcacttcattaactattttaattaccacttttgtttattttttattggcaactgaactgaatagtagactagcagtatagtttccaaagtataatcatgatattttttattcgggtggtttttattataattcatacatctggggttgtacgagagaatctctactagctctttggtaatataaaaaggtagacaacgaagaaaaatatgtagctgcttgcttcgccctatatattctctgccattgattatggtcagatgataaagaaaagaacctcctgctgccttttatgtttcttttattattatatatttcgtggagctgttttctttgtttttttatgcttttgattttatggggatttgtttctcttaatttctccaactgatgatccgtgtatccaataaagtaaagatttaaaccagtcaaagcgctcttggatactctgaccagcttttcgatttgatgcttagtttattgcatcttcatgagattgatcaccttttcttttagcagtaaacttgcacaactttttcttgcgtttaaatcatattatttaaatggtgaataaacttcacaagctaatccttccaaatatctgtgagaactgtgaagggaaccgttattatgttcgttaatgtgaaagctactgagccatcattcatttcttaccaggtaagaaacgtaggggctgagatttctggttagac

SEQ ID NO: 54744 - DNA, 631 bp, Populus trichocarpa
  Intron number 1 from transcript POPTR_0013s12610.1 (locus POPTR_0013s12610) derived from phytozome v7.0 (chr-ID scaf fold_13; pos 13319757 to 13320387)
aggaaagttctcttttacttgaggtaatcttttggcaggttctgggtcacctttttttcttttctgctcgctggagaggagatagttggccatgatgtgtttagtttttttagtctatgatattacatgatataaagacatgctccccaagctttctttccttttattcgtgttgtcttttttaaaattatttttttttcaattatatcctgcaacgttgaattaattaagaattagactttataatttatctgatttattttttaagtcatgggtttgataagttaactcgggttttttttttaaatgtgaacacttggcaaatattaaactagaggaattctatttaaacataaaatcatactaacagattgcatgaaatctatccgtgggcaatattagatttgatttgaaaccaagatatctgcatctaccatttatgttggagtttccttatcttgttaaactatatatcatcttgtgttgaatttgttgccattgaaactccttcatcctccaatgtctctcctctagaacaacatttagggattaagtcacgagcagttagcaagacaaagggctgttataaatcccaggaaattaataaaacagatttatttgcacaagatag

SEQ ID NO: 54745 - DNA, 968 bp, Populus trichocarpa
  Intron number 2 from transcript POPTR_0013s06780.2 (locus POPTR_0013s06780) derived from phytozome v7.0 (chr-ID scaf fold_13; pos 5485942 to 5486909)
agatctgggcccacatcaagctccacaatctccaggtctccctcttgatcatttcttaaatctttgttaagagcctagcattgcagtatataattttttttttctggttaggtttttactcacgttccttttaaatcctttttcttttgtatttttgttaaaccctgagcttttattactcgctataaaggtcttgctgattagggtttttaatgtctgtttttgtgttatttgtgtttcttaaaccctaattagattagctttgatttttgttcttttgttttttatgtagtatcgtgtaaaccctagggtcacttttttttttaatctttaaaaccctagtggtaccttgcttcgtttgtttattctttgttttagggtttataatcgtttttgttttaaagagaacactcatgcttgttacctgcctgtgaaattcgtcgtggatggtgtgacggtttaaggaaaattagattaataatttctttttgtgatgtctagcatgttttgaaaaatcaggggcatttgtagacaagaccttttcactcttattgtttttaattgttggtgttgttggcattgcaatttggatctaaattcagttgtggctccgtgaacttgctagattcttgtggttcctggcatttttttttaaaggggattatcaccaagcttctccttcctaccgtctccttttctccttgtgttttgtgattgtatatgtgtctgtaatagaactcatgaattcaacatcaggacttgtaccattgtgtgtaaattgttggaagatgtttttcaggatttgttttatgaactttttattcatgtagtgttcaaatcaaaatagatatgacaaatggctttatctagtacatgcatgtaattggatgctttgatcggtaaatattgaaatatgtgaatgtgctttttcctgcagaaccccactaacaagaaggagataatttgtg

SEQ ID NO: 54746 - DNA, 471 bp, Populus trichocarpa
  Intron number 3 from transcript POPTR_0003s05910.1 (locus POPTR_0003s05910) derived from phytozome v7.0 (chr-ID scaf fold_3; pos 7278418 to 7278888 reverse strand)
tcaagcataccaccaactctccagtaaatgtaatatctaatttttcaagttacccatcttgtttcttagcctcaatgaggagtatatttgaggtgaaaatgatctacaggaagaaggaaattggacgataccatcctcttccaggcacagaaaagggtgcagctgcaagaagtcaaagtgttctaaaaaatattgtgaatgttttcaggtttgtgccaacatttctagcaatatattttcaaaagagcttcctaaagtactgttctttctcattacttatctggattaaattgattttatatagcattgtcaacgttgatgttgtgattgtttttgcttttaagtcaaaagcaaaagcaaccagccttgttcaattaggatggcagattaagatggaaattatataacatattctatctttgagctgttcttattttgtaaacgttctttgtatgttaaggctggagtagg

SEQ ID NO: 54747 - DNA, 972 bp, Populus trichocarpa
  Intron number 2 from transcript POPTR_0341s00200.1 (locus POPTR_0341s00200) derived from phytozome v7.0 (chr-ID scaf fold_341; pos 2815 to 3786)
gcagaaaggtaatatcttattcaatttcttctgctgaacagctcttacttgttgctcttcttgatgcatagtgaagggtaaatgggtttattgagaattcactgtttccagggaaaaataaaggattcttatttaacggaatctgtagatgaaattttagtgcataaatgggaagttgaagtgagattatttcgtttgggaaattgaagagcttaaatgtgattaatagtgcgactttgtttttccaatgcagcatgttttttatgattggaataatgttgaactgcttttgtctttgttatttaacgttaaataatgtcaactaatggatgatagcagctattcaagcatgcgtggtgctgtagatcgcttgaggtgtgtggggtttcggtcttgagatggacatggctgtctgcttttggatacttgtgtaatgcggatcgcttttcttttcttttttttgtttacgctgtttggtgttcaaatccactactttaagtagtgttgttgagtcttgagaaagatgtggtgctgtaatatggatagcaacgcagagcttcttttttatactctttgatgttcatagttgctgcctaatggtctcaggggtaaatgaacaaaaagtattttctagggatataaatctcagcagctaactggttgcttgcaaagtagtttttggcctaagttattctgttatcaaatattttattttggattatacagcattgtgcagccttttcttcccctcatacgttgattcgtggagtatggtgaaaggatctctgccttgagtagttagttgattagttatggtcaaaatagtttattagctgatgttctcattctgtttagttttcagagttccagacattatcttttatctattgcttggagatttgaaaaatgctataattaattctcaaccttttctttccgtcattgtctttacaggaaaggatttacactggt

SEQ ID NO: 54748 - DNA, 612 bp, Populus trichocarpa
  Intron number 1 from transcript POPTR_0003s08430.1 (locus POPTR_0003s08430) derived from phytozome v7.0 (chr-ID scaf fold_3; pos 9844871 to 9845482 reverse strand)
catcagagctcacctccaaggaggtttgtttcttccttttattttcttatgtagggttttgcctctcttttttgtgtgtattaatccacatgggttttctttggatttggagattatagcatttgatttgagtactttgtttatcatttttatttgggattttcttttatcgagctgaaatttgtttccgttgttgtttcccttggggattatttgattggatttttttttaattatgcgatcgatctcagatatttgagcagtataaatattgtagcttaactaagaccggatttttttgttaagtaaattagtttaaagtttggcgtaccggatggtattcgtttgcgggcgggtattttggcttcaatttcttctttttttgatgcacacattggcttgcatgttagaagagttatagcgtgaaatccatgtcttgctttctttggttagatgttgtaagtttagaggtttgagtgggggggggggggggttctgtgtaccatcttgtatcttggtcgctatattcctttctgacttttattctgttttttttttcatttatgtgccttgcagcaccttcaattttcactttaatgatctaaaaggctt

SEQ ID NO: 54749 - DNA, 796 bp, Populus trichocarpa
  Intron number 1 from transcript POPTR_0014s00850.1 (locus POPTR_0014s00850) derived from phytozome v7.0 (chr-ID scaf fold_14; pos 787516 to 788311 reverse strand)
ttcaagggtttgaaggtttttttttcccttcttcttaaaccaaaaaaatgaacaaatattttgccatctcatagctctaaacacatacaagttataatttcaatctttaaatggtgcattgcttcctagtcatagcaattcggtggctgtgttgcccatcagatcaataaagcaaccgcagtgtaggctattcatgtaaggcggtgtttggcaatgcgcctgggtcccctttgaaaatgtttctcaaagttcttttggatagttttgatatactgatgttagaaccgtcaaaaagctggtgaaaaagcattaaatttgatgccttttcggtccaaatgctttttttttttgcaaaaatacatttatcgcattattaaacaagctcttaatgttgtttatgtagtcgaatcactcgtgattaggttgattcaattggtctagtaattaccaatccatgaaatgtgacacttaaaggagtatcatcatcatcatcatttttttttacaatttagttaaaaattaaagttgaaatgaataataaattacctgttccttaatcttacagggtttttttttttccttcaacttttcctagtttgaagtgcataagcaacgcaaaaaactacatgccaataacccattgaagtgattgcattactctatttgcgtgagatatgcttctcccacactctgcttggaagcaataagtaaaagtcaaggatatgtttggatctgattgtgagcacggctgattttaatcgtcttttcttttgtatattctttttcagattttgac

SEQ ID NO: 54750 - DNA, 758 bp, Populus trichocarpa
  Intron number 1 from transcript POPTR_0014s07290.2 (locus POPTR_0014s07290) derived from phytozome v7.0 (chr-ID scaf fold_14; pos 5502747 to 5503504 reverse strand)
cacagtaagttttgaaatcaatataaaatggtctatctttgtagagtttttactttattttccataacagggaaacaatctttttctcctgttattgatcaaggagcttttagttctttgttagcctcgtaagtgaatatgccttccattaaattgttttttccttttctttattttcttcgatgaatgtgagctttcattaatcaaaatcaactaagcaaagaatttctacaaagtccattacattgtagaagttcaatatttggtaaaacatggtgttcgaatccgcgtgcaagtcgttcgctctcggttttcatatttaagatgataatcaacagaattgaggctctccactccctttttctttcctattagattgagattcaactatattcagcttttggactggagtacaaataaaatgttgtggtcgttgttatcgaatttagttctgctagcctatattgattgaaaattttagattattatcgaagctggttttgtgctttgaaactgtccaccaatagagcattaaagataaaaaaaatcatttatgtcattgaatactatgtgttctcccctgccctctttgccttcagattgaacttcaatggttatgtggtcattgtttttgtttctgctaatagttttgtttgcttctactgagctcagtcgaacataaaatgaaagtgaagtcctgatgctcttgacttcagtgtaccaactgatattattgcttctttcaacaggtgttcgat

SEQ ID NO: 54751 - DNA, 891 bp, Populus trichocarpa
  Intron number 1 from transcript POPTR_0014s12740.1 (locus POPTR_0014s12740) derived from phytozome v7.0 (chr-ID scaf fold_14; pos 9389014 to 9389904 reverse strand)
gaccctgatattgctctgtcttacatagtaagtttttctcttccatatatatatgtgagaataattcaagtttgatttatttattttttttttaattttgtgaaggtttggttttgttagtgatatatatcatctgttgactttattttgttgctgttctccgatgcttcagatccaaaacttgatgttaagtcttaattctggctgtttacagtgttaagtatggtaatttttatctgattaatatgtcctttctggtctttgaaaaaacagttgctctgggttttgattgtgtttagttagagaactatagatgaaattagtaggttttcatttagtgctaaggttttgttggctttagatgtatagacatggtgttttggcttattttgatctaccaagtgaatggagaaatttttgtgttttggcctcttcatttttatggagacatgaaacatatgttgagcttgttcagttattgtaatgcagtactcagttatgattctgcgacgtgggattgtatggaccctgcaaatacatgcaagtgtaaaaaatgaagcttttggaaactttagcctgacatttgagtggcatgaaaccgatcatctaaattttgaatgcttgaattttaggtttccatatctggattagaaccacaagtcaacattcttaattcacttgtgttaggttcctgttacataattgcctcacaaaattagttgaaattcgtggcacctaggtatacaatgcgagatgtatggactgttttttattccaaaggttgcacatctttcaattgttggcatttccattagtacaaaacctgtttatatctgtactttccttcttccctgatctgcaactgctttcttctatttatctctttcaagg

SEQ ID NO: 54752 - DNA, 951 bp, Populus trichocarpa
  Intron number 1 from transcript POPTR_0006s06120.1 (locus POPTR_0006s06120) derived from phytozome v7.0 (chr-ID scaf fold_6; pos 4350786 to 4351736)
gaagtgaagggacagtttcgaaaaagtaagttctgcactggtcacaccgcctcactcttggggtgtttccagaagatttaagaaggataaatctgtgtccagaaaatccaaatgatttcaggttaactctatattcttgtttgagatcttaccaaatgcgaatgctgactgatagtttgtcatcctgtgtagcgggctcataaaaatcaaagattctgagcattcaagagaggatgtgatacaagctgatgagatttgatctaatagactatattgatagtctaacatatatttttattgaccggtgtgatagttttaaactcaagcgtaaatctggtcgtgcaagactaaggtagcaccttaaaatgaagatacaagagatcttagcattagatttttccaagtgattctagtgataattttcttataggatcgtcaagttagaagttattgtttgggttaattttattatttttctatgttttttatttatttattgtattcatttaaatttattgttttaatttggatcttgttttaatttttttatgctttgagattactatttgtttcttggcctattcaaagattttgtaaatctcatgagaaagaagccaccatacacttattttttaaagaatataattgagaatttagagtttatatttacaatattttttacttgttaaaattttatatgttttttatattatcattgtcctattagcttccgcctgcataacatcccttttagactaagtagttgtagaaactagctttaccaatccattatgatcttatactgatgagcttctacattacttccttgcagagagatcttccacgaatacgcagtgagattaaagtttgtgatggatgttctctcttaattccatggaaaggtcactgaatttagaatagaaagcttttcagaccagtttggtgacagag

SEQ ID NO: 54753 - DNA, 632 bp, Populus trichocarpa
  Intron number 2 from transcript POPTR_0003s04720.1 (locus POPTR_0003s04720) derived from phytozome v7.0 (chr-ID scaf fold_3; pos 5709919 to 5710550)
ttgagaaactttcttcctccctatcatccgcgaaggtcagttctgtttaacttaagctagattttagcaattgatgattatgcagataggcttactcgtatgctagctgaacatgattttggaatgttaaggtccactgcttagtcaaaatacgtgattttccatctccatcttctgtttttccttttcaatgcaaaactagaaaatgttttcattttgttaaaatagaaaactttttcaaattgtaaaatattaaacagcaggcacaaagttgattcataatgtggagggtcctttggaaaaaaaggaaaaaaaatataaacgaaagccttgttgatatttctttgttttccatgtggtaaacacgagcaaataaggttggtttttatgagggaaatgttgaaaacaactttgatagtgctctcgtaaacccaatataaacttggaaaactgcaaatcaagatttggagttttgtgttttaaaataatatttgaataataaactccaattcttacttctccataactttccaaaaaggtacttgtttttgaaatctgtagaatgcataaatatgtattctgtttatgtgtttccaggttgattctttaaagtaccttagctattgcacatc

SEQ ID NO: 54754 - DNA, 438 bp, Populus trichocarpa
  Intron number 1 from transcript POPTR_0019s11310.1 (locus POPTR_0019s11310) derived from phytozome v7.0 (chr-ID scaf fold_19; pos 12638416 to 12638853)
caactaagcgtgaggagatttttgctgttgttgtgagtattgaatgggagttgaaattcttgttttggcattttaaatttttgtttttgattgatattgatgtttttggattgattttgtgtgcccagatgggttttttgttttgtttttgttcgtgtaattttatggttagctagatggttttctggtttgaacttataatcttgctgccatttgtgccttagaagactaacattttactcatcaacgactgatgtgtgttttttatccaacgatgaatgcaatgtttttgaggtttgcaagaagatttattgctgttctattatggtttccctgctagtcaccttttgcataatttggccagcttaatgatccggggatagggtttcaattctttttacaggtaggatctcgccagtatattgttataccagggcg

SEQ ID NO: 54755 - DNA, 713 bp, Populus trichocarpa
  Intron number 1 from transcript POPTR_0006s10930.1 (locus POPTR_0006s10930) derived from phytozome v7.0 (chr-ID scaf fold_6; pos 8296450 to 8297162 reverse strand)
agggttacctacttttgtccttgttgatcgtggaggttagcttcttgaatttcacttctttgattgctttttaggcttccaatttagttgtgtgtgttttttgtgtaattgttatggtaagtattaatttttggtggagtgtttatactgatgacaaattaattgtgggattcttttttagatttgatttgagtggtaattatactatatatggcatgttaaattaactggaatattcgtaactgatttttagtactttatgtttattatgctgcaaatttgttggctgctgctggatttaaattgcccttgtcggactttatatagctcttaatgagggttctgattttccatacttcctttctacttgttgatagtacaattggaaagacagcagcataatttattttagaaatgtatttgcttttcaagaaattttgaaccatgcttgttctctacttcagtgaaaatcttaccttgattctggaaccaaaggtaattttgtgactggtggtgattagtgatgttttggattatatgctatcgtgtgtggctgatattcctatggaagtaactatggcgttcttctctcccttttggatgagcgcatccgtagcagtaattatgttcttcttgcctgcctataaatgtagctaatatatatatatatatatatatatataaaatgcagattgttacttcaccctgaaggc

SEQ ID NO: 54756 - DNA, 845 bp, Populus trichocarpa
  Intron number 2 from transcript POPTR_0018s13190.1 (locus POPTR_0018s13190) derived from phytozome v7.0 (chr-ID scaf fold_18; pos 13608576 to 13609420 reverse strand)
ctctttcagcttcctgctctttttggttagattgattttttctttctttttcttaaagtttcattttgacccattggtttatcaatcaaaacctgcataaatatgcttgtcaatgtttaattcttgcctttccaagctcggctagtgttatgaattatcattatagttagtaaatttcttgtaattggtagggtgattgagttaatagcccagtgtagatcagcacagagggtggcatgtattttggtatagagtgctctttcttgaaatccagtcccaaaatagcacagtgctcaccgtagattgtagctcatgaagtttttggccttgtcgattatggaatccttagagagtactctacagatcaggtagcatgccatcaatattgattggcaggcaagacactggttgttgtcatctgaaattttaaatagctacaagtttcttagctgcgttattggatacttctctgtaatattatgatggcaggatgcctgattgttgtaatattataattaatccttatgcataccagctaagtatttcactgtcacgcattcaaccaccatcacgtgccttcgcctaatgtgttccaagtcccgacacaatttctggactaagattcgtgatggaaatcacattgattattcatttgggattgcgatgcagcagcttcccccttgaaattccagttgtagctgcggcagcagacggcagtaatagcactttatcttctgttgacttcacggatatatgcctggtacctttaagaaatgctatgtgatttatagttaactgaccattgacttcaatctattcaggcacggttgcagataacatacgat

SEQ ID NO: 54757 - DNA, 541 bp, Populus trichocarpa
  Intron number 1 from transcript POPTR_0018s03150.1 (locus POPTR_0018s03150) derived from phytozome v7.0 (chr-ID scaf fold_18; pos 2797773 to 2798313)
ttgatccaatcaagaacttccctctccaaattattgtacgtttcgtttcgtttcatttcttgggttttttgtttctcctgctatgtcaagaattatttatattgataagcatgtaaaatttatttttgtggtttattttctatttagggaaaaaatgggttctttctttaatattgcgtgacattgatttcgtgtaagattacattgtgttatttacttgtctcttgaagggaattttaagagttagtgatttccttaaagacatggggtgcttttgatttgagaattgtatgattgtgagtgtttagaagcttctctttttattggaaaatgccaaaaatgaaaaaaaaatgatgttttgggaattggcaatgatccttgggggcttttcttcttttatttgcatgcagatattttgcgaatggaataattgatggcaactgaatgtatgattttgtggtgttaccaaatgtgaaggtgttgcattttctgattagtttattatattttttttgaataagtacaattgctgcatcaagaa

SEQ ID NO: 54758 - DNA, 652 bp, Populus trichocarpa
  Intron number 4 from transcript POPTR_0003s13950.1 (locus POPTR_0003s13950) derived from phytozome v7.0 (chr-ID scaf fold_3; pos 14183658 to 14184309 reverse strand)
gaggtagtttcttcttttctgtttgattccctgaaaaaaaaaaacacatcacaacctgtttaattcataaaggacaaagcttggagaaggaataatgagttttgccattgtgtttagagtatacatattctttgcttatggtagttttcgtggtcaaatagtggtttttataggatataggatatcctcttctccagtttccaccctctaccaatcatatgccattttgatttttgttcgatgtttctgcaccatttaatttataggcggttttttttttttcctgtctatgggatttggattagttataatgttggattacttctcaaaaatattcattatgaaaaaagtggttcgagagactcctttttaattgccgagttagggaactagtcattagttttcaatacttgatgcaaaaatagactaaaagccttctaatcgtgatctagttatttttaagttcttttgattatcaatctatttgtttgtttatttaatggtttttggataaaaagttttgtttgataagcccggtgggcttcctcatcccttgctggtttttttctgatttattgtttctgtattatcatggtttgccttcttcctgtagttcctgattagtgcctgctaaaactgatgcaggcctgca

SEQ ID NO: 54759 - DNA, 856 bp, Populus trichocarpa
  Intron number 1 from transcript POPTR_0003s21240.1 (locus POPTR_0003s21240) derived from phytozome v7.0 (chr-ID scaf fold_3; pos 19483232 to 19484087)
tctcctccgcggaaccctaatcttccgattaacaggtctctcttcccctcccttgcgttctctgttacgattcagtttagattcttattgtcgttttgactgttgctttttttttttaacgtgtttatggcttgaatattaatgcaagtagttaatgttgattttgttgaattaattgatatttttagggtttaatgctctatttaggttaatgggtctttgttaaaaaaagaagataaataacgggttcttcttgattttgttgaattaattgatatttttagggtttaatgctctatttaggttaatgggtctttgttaaaaaagaagataaataacgggttcttctaaatatgtgtaaattaatgaaggagaggaatgaattttgggtctgatgctagaaaaaagatgaagtatttaatgggtttaatgagttattaggaaggagataatgggttaggttttttattacattacatgcttaggttattggtatgattaatgggtttgttccatattttaaggatgatgagttagttatgtgcaatattttgtgtaaacgctgtccaaacttggaggagaggagctaatttatggctttactgcaaaaaaaagtgatgggttctacatattattagtacgttaatgggttattttctcaggcagtgaactcttcatttgttgcatcagggaagctatctggttaaagtagataactttatcatatgaagccagtaattggattttgttgctgcacatgatttaatagtttcttactctggctggggtttttcttcatcgtggtactatttccttcataggtaattttaaattggacagagagcaaacaattttg

SEQ ID NO: 54760 - DNA, 889 bp, Populus trichocarpa
  Intron number 3 from transcript POPTR_0003s21240.1 (locus POPTR_0003s21240) derived from phytozome v7.0 (chr-ID scaf fold_3; pos 19484810 to 19485698)
aaggacatctacttgcctagagactattatactgggtgagcatgtcttttagctgttgatagacaaagtttgctgatatgattttttttaagtatttctttaaaaaaactcaagtggggttttgcattttctaactatcttcttgtcttgacattcattgggattcatgctgtcaatggtcttgtttggtatcaatttcaaaattaatcccctttcgaaactgttgggactgatattatgaggttatttccccagcattatgttatttgttctctctcctatcatctgatttccttcctacactgcatcagaaacttattagcttgacccatagtttcttaaactttttaatgttatctttcttataatttttgggaaattcaaattatgtttagcagtttgtttggtttcatcgagcaggccctttaagccccctgttcctccaaatttcttttgggtcatctcttcatgatataatactcaattgtaatcagaggctgggttcattaattgaagttcttgagatttaacagtgaaattaaagttttgaagacaccaatcaagtaattagagtccttttgaagatgatgttaatgatagtgaagatttgaaggaagttgggtttgaatacattgtggagaggttccaagtcttgaagagtttcaagtcatctttaaactgacacttgcaaggtcagcagtgtgcttgctttttcatatcatgaccttcatataatggggattgtgttggtaaatttcattggcaaaaaggtttatggttctcgtgcccgattccttcttttgtagctgatatggtggtactaatcttcaatctgtttcattatcatcttcttttggcagggaaccccgtggttttggttttgtccaat

SEQ ID NO: 54761 - DNA, 869 bp, Populus trichocarpa
  Intron number 3 from transcript POPTR_0018s11010.1 (locus POPTR_0018s11010) derived from phytozome v7.0 (chr-ID scaf fold_18; pos 11822948 to 11823816)
tcatatctggaaagttttggtacacatacttggtggtaagatcccatttacttgattgctcataaaattgcttctatatgtgcatgttaaagcaccatgagtgaaacttttggaattttcttgagaaagaactcgtagcatggataaatttcaaacgaatactggtctcctgttcttgtctttgaagggaagatagaccaacattcacttgggtattttaaatattcaacttaagtttcttaaccatgtctgaaatatatatatatatatatatatatttctcaaatatgttttggatttgttattgtcattgttgatctgtgatgagtagttttagctaatcctatggtgacaaagtttgagtatcgatatattttgatgaagttattgtatagttatactagtctgcaagcataggatctgaacagttcaatttaaaattgatgtgaagatatggtatattttgctagtttattggcacatcttgtgattttgtctttcctgcaacactagcttgttgcttgctatgagaaaatgggtaactctaaagaaagggaaattgctttttttaatggctcatttagaagagtaaactccttggtaaaccctgccctcgcttttccaattgggaacacttgtttccttctttgtagagggaaggataagggtggtgcattggggattgaggtgagttcttaacaagaatgatgtgaaactaggacctgaagaaggagatgtctattttcgttttagagatgttattgaagatacacatggagagaattttttatgattattcacattgtgagatgttggttctatgtttctttccagataccagcattcggagcttacaaatcttttggatt

SEQ ID NO: 54762 - DNA, 722 bp, Populus trichocarpa
  Intron number 1 from transcript POPTR_0014s09100.1 (locus POPTR_0014s09100) derived from phytozome v7.0 (chr-ID scaf fold_14; pos 6715666 to 6716387 reverse strand)
ttcttgtattggaagatatttacgtttcatatcaggtaagtccacctctccacagttctccagtgttggcatttttttaagactgaaatcttttgcctctttcgttggtaattcggatttatttatttatttattgcttgctggaatttggttgctttaaggttaacagttttaattttgatgttgcagagaaaaattctggaatgtttctttcttcttcttcttatttttttaaattttttgaaatccaaaacttcttattagagtattttattctgcttatgcagaattggaagtgttcgtggtgtaagctaatgtgtctaagcatgatgttacttaattgtgaagattataggttttttattctaagttctagtttggtgttcttgagtagtactttttttttttgcttctgtttgtgaattgaattgcagggcactactctttttgtgtgcacaattgatgacctaatttcacttttaaagtctgcatgtgaccaagtgatgaatttggagtttaggattgagctgtgatcacttcatgtttgatttgtttgaatgattcgattgttttttgagattcctatcacactgctatttttccatgaaaaacaaaatcaagtacgcgtccatcatctttgtgtgattttgtagtcttaacatacggtgtctatgcagcgaaattgtacatgctttgtttaatgaaacttgttttttcacagt

SEQ ID NO: 54763 - DNA, 415 bp, Populus trichocarpa
  Intron number 3 from transcript POPTR_0006s05940.1 (locus POPTR_0006s05940) derived from phytozome v7.0 (chr-ID scaf fold_6; pos 4191904 to 4192318)
actgaagtcaaaccagttcgtactgagctattccggtatacatgtattactgatactgatgttgttgtatcattcttggcactatgctgatgcatccatgaataagcgtatgaagttcatgcactcccatttataaccccacgagtctttaacccttgaaataatgcatatcttattccagtgtctctattagcagtatgcatcttagtttctgttaatgagagaggtagccggttatattctatcccaatttccaagatcctttctttggttttgagttatgatgaaaaaaaaggaaagtgggtgttttttgaatatgacattttgtgatgggattgaattgttttggggaaattgtcatgtctcatgttagttcctttcacctttttcaggagtccacttgtttcattcttgt

SEQ ID NO: 54764 - DNA, 909 bp, Populus trichocarpa
  Intron number 1 from transcript POPTR_0006s26140.1 (locus POPTR_0006s26140) derived from phytozome v7.0 (chr-ID scaf fold_6; pos 24425054 to 24425962)
atagaagataccggtgagttcttctcttttccggcacaatttaaacactcttccatccataacagttatttaggttcttgttcatgaatataatgcttccatattttttttttcagcagaaaaatcatatatttacgaattgatattgctatgaagggatactttcatgttcagccacgtgtatgttttaactgttgtgcatgactactaattttaatttgaaacagaaataaatgaatgaaaacagcattagaaataattagaaagaattataattttactttgaatattgaagttcatatgcatgctgtaaaaaaataatttcttgtaaatatattaatttgattgatttgttcgaaacttgattggaaataaattaagtctccacgcataaaaatatgctaaaatatactctcatttttttaaaaaaaagaaagaaagaaacaaccttgggtttataaagatatcatttatatttatagatgagtgtataagaaattctaaaagtgataattcatttttgtgccatattttaatattaaagttaattaatgcatcaataaatatatatactatattgatttaaatgggttttttttattaacattgtgtggcttattatattcattgtattaaataaatccccaaaagacttgatatacgagacacgagtcatagtacattgagatgtgtccataaaaaaaattaagccaaaattaaggtaataaaacgaataaaagaaaattaatttaatgatttgtgacatgtaaaaatgctacaaatatatttatcttgattattttaccgagttattatataaatgattcgtgacaagaattaatttaatgttaatgttaatgttaatgagatgaaggtggtggcaaacgttccttgtggtgttggtggtgt

SEQ ID NO: 54765 - DNA, 596 bp, Populus trichocarpa
  Intron number 3 from transcript POPTR_0014s12590.1 (locus POPTR_0014s12590) derived from phytozome v7.0 (chr-ID scaf fold_14; pos 9273883 to 9274478 reverse strand)
aaggtaaattgaaatatttttattggagggaatatggttgtaattattttttaaaatattttttattttaaaatatattaaaataatatttttttattttttaaaaattatttttaatatcaatatattaaaataatataaaaatacaaaaaaatattaatttaaaacaaagaaaaaaaattaattttttttaaaaacatttttaaaatataaaaacaatcagtatagtaaaacttccctagcattgttgtaaaacctagcttaaacttatttgattttttttctaaaaaaaaatagaacaatatcgtttcagttttttttaaaaaaatcttataataaaatcatttagattgatacggtcttaaatggatgaagcagattttataactatgaataaaatatgaataaaagtactgtttcatgaaaaaactggtgaaatctaattactttcctttgattattttaacatgataagattgttttatgaagaagcccaacaagaattgcataataattgatttaaactaacgagcttctgttggtttttcttgcaacaagcaggcagagtgaaaaatcctgaatttctcagcaaggtt

SEQ ID NO: 54766 - DNA, 604 bp, Populus trichocarpa
  Intron number 2 from transcript POPTR_0014s12590.1 (locus POPTR_0014s12590) derived from phytozome v7.0 (chr-ID scaf fold_14; pos 9274515 to 9275118 reverse strand)
ctcatcgcctccggtcaccgttatttggacgtgaggtaggtgttcttggccttgaaatcaaattatgatcgcttggttcttgccttcttggggaaagagcaacttctcactccaatttttgaaaaatgaaacgtatttgattatacattaaaaaaaaagagataaattataacaaccctgactgcctgaggtatcacaaatgcccttaatcaatgtttagaagaagaagaaaaaaatagttcaatcaagaaattttaaaaattagaagaaaaaaattaaaaagaaaactcaaaacaaaattaactgaaattaatattattcatttactaaaaaaaatgcatgtcccatttttttttatatcctttctctatttttttttagttcttaatttaactacctttcttaaataataattaacggcattatttatttaaaaggatgtttttgtaatattaattaaacgtggaggagttctttattatatatatatatatatatatatatatatatatatatatagtgttttagaaccgagagagaaatgtttgacaatcatttcattgttgtagaaccgccgaggagttcaacaagagccacgtagaca

SEQ ID NO: 54767 - DNA, 868 bp, Populus trichocarpa
  Intron number 1 from transcript POPTR_0006s27500.1 (locus POPTR_0006s27500) derived from phytozome v7.0 (chr-ID scaf fold_6; pos 25384492 to 25385359)
gatcaggtttttgttcttcttttgaaatttgggtttgtattcgtttcttgattcatgtggttgacttttagagctcgctaaaggcagttaactttgagaattagttaaagttttgaacttggttaaccgaatttgagattgttaagtttttgagaaattacagtctattgatgatttgaaacccttaggtaaggttaagactgcttatgtacttgcttggttgctgaagaaacctaggcaaagaaggtatgttagagttttaaacatcggattttttcatgatctaggactaaaatttggcttttgcgttgacttattttgggatttttttgaattcatatgagtaattttgagtcaactttcttctgagatttgttggtgtgtgcttgtatctaccttgtttggagagacgtgatgggtaatatagagagataaccttgatgcgaaaaagtctggtgcatctcttcattttgaagttcaaattagagggtggagcttcataaggccatagtgactcgctggcattctgttgtttagatataaattgattgatagtgtaaggagttagtgcattattgatgtaaattggttgacagtgttatagtagatgttgctgattctgaagagactctggcttgaagcagatggctacctgctctcttcgttttggaaatgaaaaattagttcagccaaaaaaagaaatcagaacgacgttccctctcatgcttcaatagggaaaattgggagaaatggatcatattaatttccttgttttcagtgtttttattggttgaatttccattatttgctcatctcaaatcttacaatctcagggctatatagttctcaacagaccttgggcatttgt

SEQ ID NO: 54768 - DNA, 595 bp, Populus trichocarpa
  Intron number 1 from transcript POPTR_0018s13370.1 (locus POPTR_0018s13370) derived from phytozome v7.0 (chr-ID scaf fold_18; pos 13708323 to 13708917)
gcaggtaattagattatttggcatatatagaaattatatttatgattctgcaattgtaaaagacattgacaatcttagtacatttgttatcccaagtgataaaggggaaatatttcggacattcactcgtaagaatgatatggcaatcctgccaatccatagatgtaaaccatgtcaagatcatagttatcaacctgacccaattgtgttggtcgggtcaacctgtgagtcaccgatctattttaaaactatctttcaatttttttttaagaaatgtaaaaaagttttttaaaaaactgaaacacattgttttggataaaaattataaaaaaaaaagaaacttttgagttcaccatagatcacccaagtttgatgaggtaagctcccaacttagtccaaaaacaaaaccaactcggccaggctccaggttgacaccaggtttggtaattatggtcatgattgattgactagattgtttcacgttcgtacgagggactgcccgaagtattctccaggtaccagactcttgtttcttattcggtcttcttttctttctgaaggcagaggttggtttcttagcaaggctttctcatcc

SEQ ID NO: 54769 - DNA, 811 bp, Populus trichocarpa
  Intron number 2 from transcript POPTR_0006s26070.1 (locus POPTR_0006s26070) derived from phytozome v7.0 (chr-ID scaf fold_6; pos 24369452 to 24370262 reverse strand)
ggagggcctcctttgtattctcaaaggaaaggtatgttttttcaagtatacaagatttttggtttttgtggcttcaatttttttatgataaattgctgttttttttttttatttgaagaatttctgcttgtgatgtatggttttaaaagggttaatttttggtaattattagcaattaaatgataatggtggaggaatcctcaggattttttctttaatatagattcaagtttaggattcagtatgatgttaaagattaatccactggactaatcaatttctttacgtgatgatagaaatgagcttgttctctgtatgttttagttgattgctctctagttcaataattaatgaaataatgcgttcagtgaaactgttgtggagtaaaacctggtggagtgggtatgttgtgttgctaagcgcaagttatgagcataagttggcctccttgttaattcaaagaggctagaattatcagcgtgggctattctgtgccaggtttgctaaggaagttcatatagatcagtttcaaagttattccgtctggtttgaggtcttcgggggaagcgtttgcatttataaaccgttggagaggattgtttctatgaggatactgagagtttatggttgtcagtttgcttttccttcaaggcttagcaagaagaaaacattatgttaagttgctttggtgtggatgatttgatactacttttgttcatgcagaataacatgtaacaaccttgtctgataaccatcttttcctttgactttggcaggtcatcctgctctaattggacgccatcgaccgttt

SEQ ID NO: 54770 - DNA, 350 bp, Populus trichocarpa
  Intron number 1 from transcript POPTR_0013s08060.1 (locus POPTR_0013s08060) derived from phytozome v7.0 (chr-ID scaf fold_13; pos 6975624 to 6975973 reverse strand)
aactagagtcaatatttttgggtctagctccttgggtctgtcatcacatcaaaataatacaaaaacataaaaaatattaatttgaagtaaaaataaaaaaaaaattctttttaaaagcatttttgaaacgcaaaaacaaacatgttttaaaagaaaattcaacccaacctcaaatgacaaaaaattatcatcacctaacttttatacaatttaaaaaaagtcatatcaatttattttctctttacaatataaaaaaagttcaataagagaaaagaaaaaaaattggaaatatcttaaaagaaaaaaaattaaaggaaaagaaattagttgccggtgtatttagcacttct

SEQ ID NO: 54771 - DNA, 417 bp, Populus trichocarpa
  Intron number 3 from transcript POPTR_0018s10950.2 (locus POPTR_0018s10950) derived from phytozome v7.0 (chr-ID scaf fold_18; pos 11782964 to 11783380 reverse strand)
cttggagcgatcaagaattttgcaggaaactaaaggtttggaaccctgaaactattttttgccctggttcttgggtcccttctcttttgattgttctatatgctattttatctttcaagttggtgctcgattttaaaaaaagtataagattcgaaaaggaaatttttatttttttctaattttaaaaatgtcatgacatgattaaaagtactgttagtgcgtttatgttgattgttttcttctgtgttcatcatctattgctttgaaaactacttctgaaaggtctcatgaccaaattctcagtgttcttactttcagaagcaagaagatatatactggaattttgcttctatgaagggaaatgcctagattagaatttgcttatgttaaaaagttttaccttgtcgtttgacagtt

SEQ ID NO: 54772 - DNA, 555 bp, Populus trichocarpa
  Intron number 2 from transcript POPTR_0013s15740.1 (locus POPTR_0013s15740) derived from phytozome v7.0 (chr-ID scaf fold_13; pos 15639406 to 15639960)
cttgagccagaaggagaaggagagtagcagagcaggtaaatctgtttctcctttccatgctactatgtaaatggttgaattcaatttgattattatgtgattaaccatccacaaactgttcgtactccatatattctgctgtgctaatttcatgcttttattttatgatgaaagagtattgcttctactcttttttcactaataataacaatcaggcttttattcaataataatatgattctttaccataaataattacatgaagaattactttaagcaaaaataataaatgtatggtgaatgaatgaagaatgttattgatttatagataaataaataaaaagaaccctaatgttgaaagtcagacttagtaattgcagattggttgtgccttttcaattgctcctttccttctaattcaaatgctaaccgatttctgctcataatcatccaccaccaccaccattattattattattattccccttttcttttcacaatgctaacactgttataaattatttttttcttcaaaattatggcaatggcaaggca

SEQ ID NO: 54773 - DNA, 1053 bp, Populus trichocarpa
  Intron number 1 from transcript POPTR_0019s01350.1 (locus POPTR_0019s01350) derived from phytozome v7.0 (chr-ID scaf fold_19; pos 1187283 to 1188335)
cttcagggatcgccggcttgactactgccttttgggtcagtccttcttcttcttcttcttcttcttcttctttgcctctgaacaagtctttgtgagcttgacgctttgaaatgcaacttgctgcataactttgactactaatcatcatgaaattaatttctgctacccaggaagatattgcagaaaccttgtcttggtacagaaacattataatttgtagtgaatatggatcttcagtcctttgaattaattaattaattgttttagtgtttaatttaagcaaattttacttactaacctgttttaattcttaatgtttatttaggggttacatttcaaaattttgagacaatatatagatgctagttttccccttgaatataaaaaaagccttttctcttcattttcagtattgaaacatgagaaaatatctctaatagtagtatagtactgcccttccatgattttcttttcttttctttttttcttaaattatattgcatataaagaaaaaactagattttagtggaattttcaacctttctaaaaaatataaataacaaattaatttttatttagctaattcatatagctcaagaaagagctagctctcataaattatttcttaccgatattaatttagtattaagatagtagttatttttaaagtataaataacatttgtttttattttttaaaatttattttttacatcaacacattaaaatatttataaacataaaaaatattaatttaaaattaaaaaaaaaacaatttttttagaatcacctttaaaatacaataacaaaccaactcttaattagtttttacccatgacaagaaatgaatcactagtataacaaataattttagaattgatatttttgtcagattattggagctgactaagaacaagaacgtaatagttttgttttgttcttaagatttcttccatgacgtgaggagagaatctttcaaaagattggtggtgagaaatttctcaagttaactgatgcaggtaggtccaagatcatcaaaggatagagagagatt

SEQ ID NO: 54774 - DNA, 928 bp, Populus trichocarpa
  Intron number 2 from transcript POPTR_0018s00450.1 (locus POPTR_0018s00450) derived from phytozome v7.0 (chr-ID scaf fold_18; pos 370161 to 371088)
tattgcgagccttctggtaacattatttctttccaactttgcatcatctctcttgtctttctatttttctcccttctgtttgtcacaaagacaatcatgtgtccggccaacggatctatggctcagtggcgattctctcacaaacaaaagtagtgattccacttaattaagtccattgctaatctcaaaggggaaaaaaaggacaattaatctttttttattaagttttataaacacatatatttttttaatcatgattttgttaggttagtaggtaccaattgactcccaccttgtagtagagatttactgggaaaacgtacatataataatatgttttagatttaatataaaattattcttacacacgagcgcgcatatatatatatatatatatatatatatatatatatatatatatatatatatatatatatatatatattattactggatgattaattccttttaatatagctgatgaaaacaacaatatattttatttttatatttctgaatattttataagtaatgagatatctgcatatggatggacccatagcttgtttcggaagccaatctcacaagaattaataaacaagtaacaagctatatatcgtggataaaacttgggaaaatatatagttatccatccttacacacacacgcacgcacatatatatatatatatcaacatgtttaattatatctattttattcttaaatccttttataaaaatcttcaacaagacctgttgtcatgtgtgttgtccaaattgacaaatcttcatcacacacacacacacactaaagttgtttgcacttctctaattaatacgaggttgaagtttagaagaaggaaaaaaaactatctcaaaactttggatcatgtcaaaatattaaccggaatcaaataaatgtgcaggga

SEQ ID NO: 54775 - DNA, 1017 bp, Populus trichocarpa
  Intron number 1 from transcript POPTR_0003s06120.1 (locus POPTR_0003s06120) derived from phytozome v7.0 (chr-ID scaf fold_3; pos 7539440 to 7540456 reverse strand)
gattcggcagctactcacccaggccgtcagtttaggtcatttgttaaagtttgaattttgaattaattttatgctttttttattattgttctttggatagttgaattgttatttggtgggtgaagcagctaggcaggcagtgatgatactgagaagggtttggactttaattgggaattgctgttttgccaaggtttaagaattggggctttaaactgaactttagtgtgcttagtgtagtcactggactcatactgcacagtaaagtgagctttatttttatttttatttttttagagagatgaatatgccatagaatacaaagatgcaaaatggccagaaaattttcatttttggacaccgtcttgtctttatatgttctcaatgaatagttggttttaagcgttcgaggttgactatgattttgtactacttggttgcttgccatttaatcatttattgaaaacaaactgtgaaatgattgcaatctgtttatgtaaatgcttagcccttgcatggttcaaagcaattttcagttacaattgagccgagtttcaatctagtataatttgttcatttgagtttgggacgggttgcggttgacattatcaagtgtccaaaattccccccttttgtttggttcccaattgaactacttcatgcaaatctttagatcctttcataaaacaaataacatggcacaaaaactagcaggtaataactaggccctctaatgtttgatctactgtagttccttaattactacgctacataattcagtttaggacacattaagcactcctgttatatttgtaattcgttggcacatggttaagttacctctccttcactttgacattttggatagttcgcattattgaatttcaaatattcaagcacattcagtttgccattagagaagaaactgcagttctagagaactcttacttggtgtctggttgtattctatctgctaggatatctgttgttttgagacatctgcatttggttccagga

SEQ ID NO: 54776 - DNA, 1007 bp, Populus trichocarpa
  Intron number 1 from transcript POPTR_0003s01250.1 (locus POPTR_0003s01250) derived from phytozome v7.0 (chr-ID scaf fold_3; pos 1101110 to 1102116 reverse strand)
aagctaaacttcgacacgctcatctccgtcgacaggttctttattattattataactcaactctttccgtttcttttcaaagagaacgaagattaattatcaatttttttaattgaaattccaaaactaattttttgcttaaaatcgtattgataattattattttttcctcttttgattgattgccgtaatttttactgttttttatttgtttttaatttcggaattaattttttcggttctttctggttatttttcaagtcacgaagaagcacttggttatcgtttttctttttaattttcaatttagattttttactactgaattagagaaggaatattaacaatcggtgttgaatgtatattcttttttgggtgccagaattctgaactaaagaaaattttttaataaaataaaataaaaaaagcaatcatctttgactgttgattggtgtcaaggaattatttttattttattctgcaatgaaatgaaataatttctttcttagtaaccaagaattgttatgcttttcttgttttaggcaccatgttttattttatttcttttttctggttttttttttgttgatttgtgaaaagttcatcacttttctattacaatttatagtttccttttcttttattgggattaatatcttttatttcatcaaaatttgaagaggtttttatattgatttattttttgccggtgttaggtagatggtggtggggattgctttgttttcctgttggatttttgtttttaagcatatgggattttctttcacttgctttatctaacatgtgtgttaattattttggataataatcacatcacgcgttttttcttttcttggaaaagtttttccttttctttttggttaattaattcatttttagaatatttttagaataattttatattttagaaatttgatcacacagctcatttcatgggaatttatttttaacattattttggctaatcctttgagtacagcaattct

SEQ ID NO: 54777 - DNA, 909 bp, Populus trichocarpa
  Intron number 1 from transcript POPTR_0003s14220.1 (locus POPTR_0003s14220) derived from phytozome v7.0 (chr-ID scaf fold_3; pos 14347623 to 14348531)
atcatccttgcacctctgagtctgagaagattaaggtaagatactgtaacattgatgatgttctcttgatatatatacttgagattttttttatatcaaaattaaggaacttttagaaaagatgaataaaatagccaagccagtaacttaactagcatttagacctccaaccactaattctagaccttggcttcgtaaattcgggttgaggcacctttctgattatggaggcatgcttacaaaacgattgcttgcaagtttttttttcatgttttaaaaatattttttaaaaaattaatttttttgttttaaattaatttttttaattttaaaatattttgatatactaatatcaaaaataaatttttaaaaataaaaataattattttaatgtatttttaagtaaaaaacacttttaaaaaaattgattttttttgtttcaaattaatttttcttttggtgtttttaaaacgtttcaatatgttgatattaaaaaaaaatttaaaaaatattattttaatatatttttaaataaaaattattttaaaaataattattattataatatcaaatattctctaagtatttatttgtggatagctagctagccagccatcctgaaatacatgtaaaaagattaaaaaaaaaaaaacaacagaagaataatcaactgtaacaaaaaaaaaaataataagggataaagaagagttgctggattgaccacttattgtattgattctgaaagagggagtatgaaatagacattttcttccgagaccatgtgctccacttctgcatatttataaaatcctttattaattcgaatgctgtaattagagaagagattatctcattaattatacaagtagcgggtatcaataaagatattgtttcttgattatgtgatag

SEQ ID NO: 54778 - DNA, 844 bp, Populus trichocarpa
  Intron number 1 from transcript POPTR_0003s04980.1 (locus POPTR_0003s04980) derived from phytozome v7.0 (chr-ID scaf fold_3; pos 6082659 to 6083502 reverse strand)
agaacagcagtgctcctgctgcaaagtaagctcgctttaattgcctttctgctcttcaagttattttctttattgtgttgtcttttggtttcatactttgtgtgtttgctgctgtgaccaatctttaatttctgtgcgaattgtgaagaagaggaggaaaaccagaccattagttccaagaaaatgcagctgtgagcaaatcaaactgtattaaaatgagttttggcttggcttgggaaacataaatggaattacgaacctcatctttagccatattgctgcatatagctcagttgagtgtatttaacttagtttctgagaaccttggaatgaaaggattgatgttaagtttaatttcttttcccttcctaattgtgtgcttcttggatttattttcttgtcagtttggtcttttccttgaattatgttcatcaactgatttctggttagaatttttttcgctttcaagtggttgatgtctgtatattggatcatgcctaacctcttgtttatggtgtcactgtgatgtgatatttatcatggttataaatttgtatgtagattgtaataatttttctcgtatgtggtcttcaaagtgatttactccgaagaatttgggaggtacttacataaactgatgaaaataagtagtgggtatttcttctatctttgtggatcttttgcatgcaatttatgaaatcttcaagcttgattttttttccccaatcaaaacagcgttagcctttaccttattttttcttggtcaatcaacatatgtacatgttatggtaactttggtgaattgctgatcaaaaagtttttgtaaaagggcacaggtggtagg

SEQ ID NO: 54779 - DNA, 1040 bp, Populus trichocarpa
  Intron number 2 from transcript POPTR_0003s19740.1 (locus POPTR_0003s19740) derived from phytozome v7.0 (chr-ID scaf fold_3; pos 18399131 to 18400170)
aagctattaggaacagggtaatctctccttctcgctgtagtattttctttcaagggtttctttgattttctttgttttgcttctatattcaaagcagacatcttgagtatttgatagcttttgttacagaaaaaggtcattactttgttgtcattgcgtcaaggttaggctatttaggaagagaatttggtattccatttttgtcattgcaaatcctagactttttaccgacacaattagcaagagatgtggaatttacttgaggaggtcatgtagatgtatagttgtacaattgtaagacagaacatcgaggatgtttagtggaaatggcttgtatggtatacatatgttgtttgggacaatctattaatctagtagctttgtatcttccaagaggaacgaatgtttccagcagtttaatttgtcaagtcatacctccttgtcctttcattcaagtgttgctagtagatacaagccttgagaagttctcaatagctcatgtaatgcaatatttgtgtgctttgttttttctgctgttaattcttggtgcctttgcaatccagtggggctctcaagcatgggaggcttagctttttgttagtgcagagtcttgcttgtcaggagagaattttccttgcaacaaatagacaaccttgagtccactaggttatttagaacccattcgctatatccttgaaatacacaagggggtgcttcttgaattcaaaagaaaccagggctcttagaaattgtcatgaaaagaaaaatttcagcactcaagctgcagagtctactaggctctcaaaactaagtcagctctctgtcgttgtcctatctatccctctattgattctatatcacctttatcgttcatcattggttgaagtcctctgtgcaggttaaggatttaaggatagacacataatatctttttcactgtgctgtgctgctagttgggtgactggtatccctgatgattctaagttttgctttttgaacatacaggttcctggacttttgaaagtaaggtatattgggca

SEQ ID NO: 54780 - DNA, 624 bp, Populus trichocarpa
  Intron number 1 from transcript POPTR_0019s13950.1 (locus POPTR_0019s13950) derived from phytozome v7.0 (chr-ID scaf fold_19; pos 14777875 to 14778498 reverse strand)
gcgaaacagtcagaggagtctctaagaaaagtcatgtatttgagttgctggggtccaaactgatactctcaagaaaaaagaaactctgaggaaatgagttcataggattagagtaaatttttgcaagttgatttaaactgtaaatgcttgtgctgattgccaatcaaatatatctcattttattggcaaaattttgggaaaatggccttaacgtaacattaacaaggatatggctcctgttaaaaaaaaaaaaatcagcaactcaattggaggaggggttgcatcacaaaagctaaatatcttgataagttgacaaattagtgcaaatcttgaactggaattctcaatttcaatttggcccagcccagaagaaaattagtttaggagagtatatttgttcactcacaagtgttcacggcagggtgatgatcactgtatgtgaatgaaacaagcctttaaattacaacaggattgtataaataattaaccgaagaatttgtgaataattaactgatgaatttgtgaaaaagattcacacagaaattgggtttttatagacaacgattatagatgaagatatgtggaggtctaaatatgggattagccttacaaaataaggtcagc

SEQ ID NO: 54781 - DNA, 846 bp, Populus trichocarpa
  Intron number 1 from transcript POPTR_0006s00290.2 (locus POPTR_0006s00290) derived from phytozome v7.0 (chr-ID scaf fold_6; pos 64291 to 65136 reverse strand)
tgggattaacaagagtccgacgatagatctggggagtacgtattatttttcttcttctttttttcactcctaattttgctttcaattttctttttttgatttgatttgatttaatttgtgatttgttaataaagctgccttcccttgcatcttactgttctcccaacttattctccactcctctttcttgtcttttgtttgcttctcctctaaccttataattaagctccaattttggtgaaccttaggaaatcttggtggaaataaccttgaattcattgcagcagccagagatagtgttgaggatcaattggggtcccaatcacttcccttttctattcagcttagttttcaacaaccccttttgcggaaccaaagatcaactctttctttgcgttattcaacatctttaaggtcagggtgtggaatattggtaattattatttaacgctgtgtgttgttacatccaagttcttatggtcacttctttttctgaattccccattgattcaaagttgcttcaggtggtacagttttacccaattccagggtttagagatttagtgacagaaaaatatccttaagccttaggttatggtcccttgtagaaaaattggtgtgctggatatttataataatcatgtgtgtttttgccaagaaaatcagagtcttgttcattcacgactttggttaataataaggatgcactatccatgtgtagatggatattctattttgttcagtgtgtttttccaaatgcaagctatactcaaatggaactgttacacttcgttcctctttcctttctcattcttctgtctgacctgctgggttttgtggttatag

SEQ ID NO: 54782 - DNA, 971 bp, Populus trichocarpa
  Intron number 3 from transcript POPTR_0003s05230.1 (locus POPTR_0003s05230) derived from phytozome v7.0 (chr-ID scaf fold_3; pos 6477805 to 6478775)
ttcacattacaggtcccaaacacatttttttttttttttaatttgatatctgtatatataataattttttgttctttatttatttattttctgttagatcattagttttaatgaatcaaatttatagtagatccaaaattgtgttattaagttgaagttaattgtggttgactcgtagctattgttaattgtttccagctaatttgttaaggatatataattttaaaatactagagatagaaaaagcgaacagaaggagttagctactaggaatggaagcataagatttgaagggcattgcctctaggtggatgtgctttgcatgcaagtatttcggtttcatgggtaattgcaatttcaattacttatagtgggtcaaagcctgtattcagaaaggaggaggagaagactccaagaagaggatgtttgatgtattaggagactgagaataatttattacgttgcatcctgtatttagatgcttgatggacgatgtataaataagctatcctatagtatgttggctataattgtgcttttggatatcccagaccagattttctgttgatgtgtgcttaaatgaattcatgattccaagttctggtccaaactcttagttgtgtggttgccctactgatggtaggaggtaggaaacaaatataagaaagttaatttgaaagggaattttacaaagaaccataaggttcttttgacctcagatgataattaatattgccttatcttaattctggaaaatgaacaaaaattagctttaagacgtgggatcatgatatgtaacttcaagccctcccataagtcagtcatggcatgactttatgtagtttttaaaccacaaatacagaagtgtgaaggcttatcagttgagtttatatattattttccatacatgagcggaaatgcctggttgtgtaaactttattctctgccttgatatatctatatgtgcagat

SEQ ID NO: 54783 - DNA, 814 bp, Populus trichocarpa
  Intron number 1 from transcript POPTR_0006s11080.1 (locus POPTR_0006s11080) derived from phytozome v7.0 (chr-ID scaf fold_6; pos 8395641 to 8396454)
gagcagcaccgcattctgtaagagctcaattctttttttcctttttttttaaattttaaaaccaatttgtgcgcgcgcgcgcgcataagtaatgattgagttttgttttatgtgggttcgattggttcttgttaattaattaataaataaatggagcattagcctcttaattttgtaataaaaaatggaaatgaaaacgaaagagaaaaataatctgccagatgatatgactggattattgatgtgttaggggtgagctttttgtgtcttttgttgataaattaagttacgttttgattaataatgataacccaagaagcgctttgtcttctgccacgctctccttaagttgtctgcggcaagatttgacaatggagtttacacgttgcattttttgaattccttaacgaaaacttctgagattatggtttatagtgtattttatcacgtctttttgtctacattttcctcatgttaagggaagataggatagtacttgtgaccattttttaattgctaaatgttttcagattcttctttttgctacttctacttagattttctttaggattgactgctggtgatgatcccacctttttaaaattctgttttgcagccctggctgaaaagagaggtgaggcattcgatcagttatcttttcacccttgtttcttccctctttcttctccctatcatttatgttacacattctcatatatttgtttttaacattagttttgaagacgaaatatattctttgtttcatttcttttgtacaggctgctttacaagagacaatcaaacatttacaaaa

SEQ ID NO: 54784 - DNA, 317 bp, Populus trichocarpa
  Intron number 3 from transcript POPTR_0014s06410.1 (locus POPTR_0014s06410) derived from phytozome v7.0 (chr-ID scaf fold_14; pos 4869100 to 4869416 reverse strand)
cttcaaaggatcaggtcttacattgtaagagcacatcacattgacatataggtagcatatttctatttttgattaatagttctgtttcttaaggcatatttcatgctttctctacacacccaatgagtttcattaattacagtgtttattttcttttttattctctctctctctctctctctctctgattttctgtcttgcacattgaagattaagaagatacatatctttgatgaaaatgatttattatttttttttccaatttttgtgctgtccatgtagacttttctggaaacaaggcttgaggaacttgctca

SEQ ID NO: 54785 - DNA, 719 bp, Populus trichocarpa
  Intron number 1 from transcript POPTR_0014s11180.2 (locus POPTR_0014s11180) derived from phytozome v7.0 (chr-ID scaf fold_14; pos 8313927 to 8314645)
ctcctcattttaatttccctgtactctctgccgaggtagatctctctctctctcactcccccctcttggctccttgtcaggcaagtgctatcctcttctatgatccctcagtctggaaccctagattctgatcatttgctcaattcatgccatatttttctcaatcgaattgttaaatttctgtgattcggattttatgttgttgattttgtctgatataagatttagagcgcgatttggtttcgtaatggcttgatcttaattttgatgtgatgctgcctcgtggatcttgctttatattatgcttttgtttttgtatgacctgaaatcgtgcgatgataccttagatctggagatcactggatgcaacacatcctgtttggtacctgatctgtaggaaatcagatctaaatccatgtctaagttgtcttcagtttaatgttttatgtattgaatatctgaattctctaggtttgtggcgatttttttgactcaatgtctagataatctctgggttcatatctagtgtgttgatatgattcttttttgttaggattccgattcatgattcttttttctttaaaaatgtgcaatgttttaaatcaaggtgattgagatctattttctgataatgatgtggaattgcatttgatttagctatgggaatttacaattagtgagttgatttttggattgttgtaatcggcagacgtgagaaa

SEQ ID NO: 54786 - DNA, 751 bp, Populus trichocarpa
  Intron number 3 from transcript POPTR_0014s11180.2 (locus POPTR_0014s11180) derived from phytozome v7.0 (chr-ID scaf fold_14; pos 8314953 to 8315703)
tcgggggtcaggacaaggtatgtgtgtcttaatgagtgtgcatttggcctttttttacttttgcatgaaggtcattatcattttggggtgtagtagatatagaaaccttttatctttcactaaatggtgctgaatgggttgggtttaataacaaggaaagccatgaaatatgtttgcattctagaacttaagccttcatggttcgaaatttcttctttagctattgaatttatgtacttgaaaatgagtgcttatggacggtctagtgctgttttgattttcttccatcagcacttaacatattcataagctaaatatgttatgccattttgtatgctctgctgtttcctttgattatcaagggaaatgctttatttggtggcttacattttgagacactcaccagtgctagagttttccagctgttccacctcttcacttgacaacatcagcagctgtatcacattctttcatgctatacattgtttttataaatcttatgcttgattattaggatagtcaaatgcatgaccgtggcctctgccaaattctcctagtgatgcttgctttcgcatccctgtgccatttcttttcttgttatgtccaaatcataaaagcatagactgattcagatgcattacaatcagtcaaaagatttaaatattctatcccttaatttatttatcagttgatgacctattattttacttttccagatccgccccttgtggagacattacttccagaacac

SEQ ID NO: 54787 - DNA, 502 bp, Populus trichocarpa
  Intron number 4 from transcript POPTR_0019s09330.1 (locus POPTR_0019s09330) derived from phytozome v7.0 (chr-ID scaf fold_19; pos 10915886 to 10916387 reverse strand)
tcccctctgcaaagttttgcagagttaagcacaaggtggtattgtagctttattttgtagtcttaatgtagatggatatataaacaatgattttgatttcatgttgccacggtttagctactttggtaaatgacactggtgtagtgtattttgtgttccactacacttttttatttttttggaatttattcgtaaaagcaattcttttcttcttcaattgttgccttccaatatctgacgtgagataatagtgctattggtagactgaatattgtcatcgttgtagttgttacattctagggtgttgtgtttatcatacatttgttgtgtggtccatcatcttagacgtcttattgtctctcagaggacaccttgctcccctttattagctctcagtagtaccatgaacatgtctgcctctctgccctttttgtcactttcgaatatatttgttgctattctctaactgtagatgaaaatttactttgattcacttgcagat

SEQ ID NO: 54788 - DNA, 422 bp, Populus trichocarpa
  Intron number 2 from transcript POPTR_0003s21410.1 (locus POPTR_0003s21410) derived from phytozome v7.0 (chr-ID scaf fold_3; pos 19581315 to 19581736)
ttagaagggggagagccttggcttaccaggtaaaattgggaattcattgcatgcaatctgccatttcatttttttttcaatttttttttctgtaggagcataaccctctcatgtgtgcttttaatttccaaatttaattagttgccaggttttcttttttatcaagatttagttttttgaatttaaaatgggttggaggcatctatagcctcagtttgtgggaggaatatgttgctcagttggaggcaacagaaaatttcccctttcccactgggtgctaaaatgtcttctctgtgtgaatggatgacatggaagcttcccattccaggtgccactaagtgatatagaaattttgggcagactcgagtggatcaaattgtgcaacagctgaaatcagaaatttcagaacctgggggagatag

SEQ ID NO: 54789 - DNA, 412 bp, Populus trichocarpa
  Intron number 2 from transcript POPTR_0874s00200.1 (locus POPTR_0874s00200) derived from phytozome v7.0 (chr-ID scaf fold_874; pos 1199 to 1610)
accaattgtccaagaaaaacgaggtagctttctcatattttgcttgtgtggagtctgctgaaatttggattaggcagcaatattttgttcctattcagtgaaatgccttgtaacgtgcaaaagaagatacttgtctttctagaagggtgttatttatttattttgcatgtgttctttttggtagatttttagaggaggttcagatgctcggtttattcttgctctgctccatgtagtgtcaagttaaagaagtttaagcaaaatgttcagacaatatgcacatttaaaagtaggaatttacaatatctgcactccttttttttttttctcctagagtgccttgttgcgtcaattatttagatcaaattatgagatatatgaatttattcgcgtgtaggagaaatcaaatacc

SEQ ID NO: 54790 - DNA, 984 bp, Populus trichocarpa; identical to SEQ ID NO: 54053
  Intron number 2 from transcript POPTR_0003s01440.1 (locus POPTR_0003s01440) derived from phytozome v7.0 (chr-ID scaf fold_3; pos 1332487 to 1333470 reverse strand)

SEQ ID NO: 54791 - DNA, 523 bp, Populus trichocarpa
  Intron number 2 from transcript POPTR_0006s04470.1 (locus POPTR_0006s04470) derived from phytozome v7.0 (chr-ID scaf fold_6; pos 3049404 to 3049926)
ttttcgccagaaagctgtggagtatcgtgcacaaggtcttgtctttggattttgttgtctgtgtgcttttggtttggcttattgggtttatgttttcttgtgttgggttttgattttgatgtgtatgaaatatgattgtttgagaatgatgacgatagattgatttctcttcttttgtaggggctattagtttcatgttgaatatagccttcctttcccgtgaacatttttaatttcttgtctttggaagccattgtttgacataggatgttttttcccttcaataatttgattacatgagttcttctagtttcagattttagtaatacacatgttttatgattcttataaaaggtgatggttcatctttatacaaatgatttaatcccactactgtttctttttctgagaaaaagattttcccgggtgaaattttatctggaattgtacatttacttttctttgatgcaatattttgttgatttcgtggctgtagctgcaaggattagagagatactcgaga

SEQ ID NO: 54792 - DNA, 987 bp, Populus trichocarpa
  Intron number 3 from transcript POPTR_0003s16110.1 (locus POPTR_0003s16110) derived from phytozome v7.0 (chr-ID scaf fold_3; pos 15727973 to 15728959 reverse strand)
gcctgatcaacgcggtcagtatattcgagatacgcgtaggttttacggttttgattcatcagatagactgccattacatggatcttttttttttgttacctttagatctttttgattgagaacttgcaattgtttgtatggcagctaagcagtatgttggtgaattcctaggacataacacaagtgttttcttatagtcagccactttttaactctttatctttcttcccaaactgggatctgatcgtttctagattctcacctttttgttgactcatgattttgttgtgtggtttagaaggttggatatatctttcaattctgtatcccagatccctaataagccacgtgtacattaaataatttattaagcatcttgaattggcaaatgaagaattagctccatgggatgatgtaagctgctattgatgacgtgtatagggtgatgtaaactgctattgatgacatctataggatgacgtattctgttgttattgagaatataatggtttaattttgtgaatatggtttattgacctgccatagtttctaccatgttaaagatattattagttaatgaatatctaatctgatccgtcaatcaatcatgtgcctctaataatcttgtagaaagaaggaaccagaaggaaacataaatcggatacttaatcggctcctttcacttggattttctgctgtcctcgaaagtgttttaatagaagcacaatgtagtctgtgtgctcagtttcgattggtataggcggggctggttccatattgaaatttaatcagaattttagaatgtactctaccatggaattaattattgttgtctctaaattctgtagcaaactagtctttttagtgcatgatcagtttgtgaaattatgtcattgctaggtgagtatagctcttctattatggtaagcgagttttcttatggaatagaaactgatattatttgttgaagagcagttgggaaatcat

SEQ ID NO: 54793 - DNA, 720 bp, Populus trichocarpa
  Intron number 1 from transcript POPTR_0003s16110.1 (locus POPTR_0003s16110) derived from phytozome v7.0 (chr-ID scaf fold_3; pos 15729337 to 15730056 reverse strand)
gataccttcttccttcaattccctttcctttagccgtaatttattcgatctctctcgtttgaattctctctgtttaaattcttctcttttcttcatttctccgctatgtattttttccctcctcctctcctctctctctctctctctctctctccgtgaattggagtctgtttctgttctttaataattgaggtccgtttgctggttacatttgtttcgctccaaggtgggcttttgtaattttgattatctgatcggttatttttctggagtccaaaaatgtttaaggtaactggattttgttaaatttaagctgttttggatctttttgaaaattgcacctgcaaaatttgcattgaattaacaattccgtgtttaatttttattaatgttttaacttaatttaatttatttttctatgtttggttggtgtgaatcatgagaggttattattattattattattattattatcaaatgaaggaataattaattttgtttttgttgttttgacttgctataattgcttactttccaattaagagcttaagctgaaacaacttgcagattttggtataaatgaaattaattatttgtaatcctatcatctatactgtgcttttatcaagttgcctagttttgccttactttgctatctataactgtccaaatttttgccttgcagagtttccgtagaagcatctgagatattttttacac

SEQ ID NO: 54794 - DNA, 546 bp, Populus trichocarpa
  Intron number 1 from transcript POPTR_0018s01990.5 (locus POPTR_0018s01990) derived from phytozome v7.0 (chr-ID scaf fold_18; pos 1792296 to 1792841 reverse strand)
cttccgttccgttctgttcttcgtcattgattcaggtacccctcctgtctttcaaagctttctgactcatctctgcttcgatatagtaaggaggactcgtgtttatttctgcaaccttttgattttattttcttaaagattgcttgcaaaaaactttatagattgtggatttttttttctatggctttctcatcgttacgagttaagaatgaaagcttgtaattgattttatattgaagtaacaattgcagagttttcttgatttgattcatgaatcaaaatttgtaaaccatagaggttaatgcagtgcaatatagttatgatgggtagatctgaaatgcaaggaagttgcttcctagagaaaaagagaagaaagaagcctaactaattaagggtcaaacagttcaatttttttttaatgatgatttgcacttcctaatttgggttagtttagtcttactattagtctatatgttttctttgctgtagttgtacttactggatttattaggttgtgtttcccagggattgctcttgcaaagaata

SEQ ID NO: 54795 - DNA, 552 bp, Populus trichocarpa
  Intron number 1 from transcript POPTR_0018s13070.1 (locus POPTR_0018s13070) derived from phytozome v7.0 (chr-ID scaf fold_18; pos 13523877 to 13524428 reverse strand)
cctgctcttgttaactacagcggtaagttctcttttttcccattctttggtgtttttggcttttgcttgtgttttttaaggtttagaactgaattatgtttgttgggttggtggtgtttgatttgaggtatattataatcttttctgttaggattggattcttggtatgaaaatagtatgtaaagaaaccaagttggaatactttcttgattggttgtatctgtctgcaaactacttagcttcgtttgactttggacaagtaatttgaggtttttagatggaaattttggaaaagaggaaactttaggagacatgttggattgctggtggtttactagtgaattcttgaatgagaggattagatccttgaagaatttttctttctgttggaaaatcttgtaagaggcttcgatttatttgaaataaaaatcgaagcttgaattttgttgtgtctgcttgcttccagtattgtcatcttgaatcttttgcgaactacatagaatcttttagatagctttagcttattggatctgttgatggatctttcaggag

SEQ ID NO: 54796 - DNA, 408 bp, Populus trichocarpa
  Intron number 3 from transcript POPTR_0019s02550.1 (locus POPTR_0019s02550) derived from phytozome v7.0 (chr-ID scaf fold_19; pos 2322291 to 2322698)
atgtaagtaataaataaccttcactataaattttcaattttttttttaatattaatacttcatttgatttatatatatggtccatgtattattaattaatcactgtttcatacacaacaaaaacaaaacaacacaacttgtttagaagaattttgattaattaattaattataagagaagaaaaaacatatgcttttaatctaataatcaacttttacatgtatttgtgagattaactctatgttttgtcgaaaaacatgtttggtagttaaaacccaaagttcaaaagaaaatggatttaatttcatcttaccaattcctcgtattaaaattctaaataaaatagccttatcccatgaaattttttctctatgtagtttgcaggaattgttacaacaccaccagcca

SEQ ID NO: 54797 - DNA, 853 bp, Populus trichocarpa
  Intron number 2 from transcript POPTR_0006s23960.1 (locus POPTR_0006s23960) derived from phytozome v7.0 (chr-ID scaf fold_6; pos 22684647 to 22685499)
ggtatcatctgtcatgctattcttgagaaccgggatcatgtcaaggcaattcatcctcaatattatatgtttgagtaagttttattagtctagtttagttgtttttcgtttcatctgatttagagaagtgtgtgattgatgagatgcaatgcaattaaaactgtgggataaaagaaaactagcacttgatagtgttttgattatgagtcactttctgaaattgtaaacgccgtgcacgtggtttcatacattttgcagtttctgcaagaaaagcttggagaatgtgaaggaatttctgcagaagtattgcgatgacagaaggcaggcaggcttcattatggtccaagatccacactcattcttctatgaagccctttgtgttggatacgagtggacggacgatttgcattttgatgaatttcacgatccatccccaccaaattcaggttagtatttctctgcatgaactagactccacataataatacgtttatttactgttgcaattgcaaactccttagatttttcttaacattacgaggagaattgaatttttttcttttttgtacatgtcaatatcacgagacttgcaagctggaactttaacaggggaacgacaagcaacgaatcatggagagggagagattgagacagagagaacgactcgaagcaatcttgcactacaggttctagttactatcttcatccacaataaaggaatcttgcattcgcattgcaataaaaggatagatgaaaacaattaagtccttatattgtttattagtactaattgagtaatttttatggggttgtgggttcatgcagagggaaagagcaggaaggttgacactgg

SEQ ID NO: 54798 - DNA, 728 bp, Populus trichocarpa
  Intron number 2 from transcript POPTR_0014s12540.1 (locus POPTR_0014s12540) derived from phytozome v7.0 (chr-ID scaf fold_14; pos 9238335 to 9239062)
ttcgacaaaggtctttctctgtttaattttatatatatagagaggttgcttttgagattttacatgataaaaatctgttcattcattttactattgggtcttaaactggttttgattgacacaaaaacgaaatcttttttgacgggatctatgctaatggtggattcatggctgaatgagatcagcaaggccaagtcaggtgtggatagagttgttctaaaatgaacgaacccggaattatttatttgtgttggagaatcttgatgcttgttttgaagttttctgggaaagaatacgttttcgtgcgcaattatctgcctcttaaaacgtttgagggactgttgagacccaactcaaagttctacattggattaggtttgtcacggtgtccaaacatgttaggcaatttagaattcttaaaagtttctaaaacttatatttttatttccaaacaacctttgtgctttctgattgacatctactgagcatatcatcgttactcttcctccagcaaggcagttcatgaaggctgctgtctgagcagacaagagtgaacactatagagttttagatgatttggaatattagttagacatatcatactttagagacatgaattatgtgtggtggttcttgacaccatggttctcaaatcactgcctgtcatcttcagtaattctgactagtagctttcaaccaggtacaagccggacataatcaaaggagac

SEQ ID NO: 54799 - DNA, 396 bp, Populus trichocarpa
  Intron number 1 from transcript POPTR_0013s11960.1 (locus POPTR_0013s11960) derived from phytozome v7.0 (chr-ID scaf fold_13; pos 12619048 to 12619443 reverse strand)
atatcgtctatcacagatctctacctatcaaactggtaagtttgtcttcctgttttgttttgaattagatgcaaatttaatgcatttgtttaggtctgtgtatttctccagtaaagattgatgctttctcttgactgtagttttgggttgtttttgttttcatcagcacataagctaatttgattctgttgtcattttttttagtgttcttgaatttgtactaatcctgttttaaaagttttgaactgggttgttttgttctttttaattttgatagtacaagtccttttgatttgatgttgatcatgttgtttcttttcttttcctgatttataagtaggaacttattggcgagttgttttcttggtttacagttttggtggggtggtggtgtta

SEQ ID NO: 54800 - DNA, 846 bp, Populus trichocarpa
  Intron number 2 from transcript POPTR_0018s12340.1 (locus POPTR_0018s12340) derived from phytozome v7.0 (chr-ID scaf fold_18; pos 12834011 to 12834856 reverse strand)
attctcaaacctatactttgagagtggataaacaggtaattttttgctcccactgaaccatggctcatgtcattgcagtgtgtatgttttgtaaacttgctataatactttagatgatcaatgagttcaaatacatcccaaagccagttattacggggatatatatatatatataaggatagtttttttttttttctgtttttatgtctttttttgcctcctttttcaagagctctaaattgcacttcgatcatatttctgtcattgtggtgagagacagacagttactagaatctgaatcttagaaagagtagaaagaagaggaaattgagtggtcttaacaattactagtaaaacctcttcaccagcatggtcagaaaatttctagtccttataagtgatccaatgtgcctttttgatctagctagttacatacagatgacacaaaggctacactctctagcatccaactcattttccttctcaagaacatctcttcaacaagctcttatgtaaaaatctgtggagcattatccattgtcccacattttactgaatatttgtgcaaataatactgagaagcagatctcatgagaaactggacagaaagcaattacagaagatccactatttccctgtgtcttttattcatataaaactgttgaaacattctttgttgccactgaattcttaattgtaagagtacaccctgcattatgatcttaaaagggtctttatgcttatattgtgagtggggatttgctagttgataacttgtgcatgattttttgtttgtggaagccattaatttcatcatgctttcccctttcttgaatatccatgcag

SEQ ID NO: 54801 - DNA, 420 bp, Populus trichocarpa
  Intron number 1 from transcript POPTR_0014s10190.1 (locus POPTR_0014s10190) derived from phytozome v7.0 (chr-ID scaf fold_14; pos 7639218 to 7639637)
gagaggctccaaggacccatcaactcttgtgtatgttactgctattcattttagtacttccctctctttccttgagtaccttaactagaatcaaagaaatggacttgcatttacttctccgaaggcttgcattcaatgcattgcattatttttctagaaatgctaacgtttcctgtaccgtttcttccactttaacattctattttcgttcttcttttgtttcactttctctattgaaactgaaacacctatcaaatccatgacagttaatttttctctataattcctcagaaggttaggtgtaaaaccccaaccaagaacctccctcgttacctttcttttgtttaagattcttttttaatgagtcttagttttccttttgcagttcttagaggagcatagcttggatttggggtgctt

SEQ ID NO: 54802 - DNA, 784 bp, Populus trichocarpa
  Intron number 1 from transcript POPTR_0013s05130.1 (locus POPTR_0013s05130) derived from phytozome v7.0 (chr-ID scaf fold_13; pos 3639098 to 3639881)
aagttagataagcagaaaatagttattctcatctctcttcgtgagataagcagactaaaaactgaaaatgcatcaataattctcacagcagcgtgattgctaagaaattgggttcatgaacaaatttcttctgctaagagcaagaatgttgagagtggcagtggatagacctagtaaagtgctgctacaatccattggagctagtttgtctcccaagttgtaaatggaaccgaaatcatacattgagcgatcaaatcaagagagacactgcatttcagtctcggagaatatttaaagtctttatttcaatcaacactaatacaccaagatttacaataatttaatgcaatcgataaaattaatgctaaccaaaaaaaaataaaaatggtttacctacgttttaaaatgataactatatatctttttaaaatgatatttcccataaaaatttcatcttgagcccgcattcttgcttgaagttttcgatccctaaacggctaaaccaaagaaaataaaaaatgctgcagcactaatgagagatgactacatgtatgcatgcaagttgtggaaagccaaggcaccttgcaagtatgcttaggttgacaaggccatgctttgtttacttcacaaacaaaacaatagcaagaacagcaaaagcatccctttgttttctaacctcacaaaggttatttacaacaatcaaacaagaagaacaaaaactaagccacttgctcactctgttactccagaacccaacaaaaacccaccaaccaaccctacaagt

SEQ ID NO: 54803 - DNA, 834 bp, Populus trichocarpa
  Intron number 1 from transcript POPTR_0006s00350.1 (locus POPTR_0006s00350) derived from phytozome v7.0 (chr-ID scaf fold_6; pos 141729 to 142562 reverse strand)
ctgctttgagatcattgcttcgcggtcataaccaggttatttctctcttcttgtgaaggtcttacgattatcttgtgttttgtgtacctaaccttgattgaaaatcgacattcatgacattatgtaatacagtaattggcattgtctaactgatagtgaatctcaccttgtgataattgctgaatcagatttcaattaaaaaagaatgtatttgaagtctttttgatgagccattacatatgaacatactgctagaatgtttgttctcaacttatcttggcaagttgcaatagttggatagtgattttcaatagctgcactctccaaatcaagtgcaggtaatattcaagtgaccaagttatggaggaaaacccttattcctaaataattaaactttcctattccgctgatgtcaaattaataaatcacattacggatataaacatgagagtttacccattcttctttattgcttctggataccatttcggtttcagttccatcaatttgcttactgtactttgagaagagaggcaaaaattcctaatgcttatgataaaatcctgattttgtttggtactgaaggttcttgatataataatcatggcagattttggacagacttgcagagtaagcctcattaatttcattactttagttggctgctgtcctttcatgtttagaagcaacctccactgcccaaatgttgtagctttcttctagttatgcaacatcttttgtgtacctttgatatcaattttcgttatttttttaattactagtataaaaactatctaaatcattgcatgattttctatgcagaaagtaacagac

SEQ ID NO: 54804 - DNA, 864 bp, Populus trichocarpa
  Intron number 3 from transcript POPTR_0014s08900.1 (locus POPTR_0014s08900) derived from phytozome v7.0 (chr-ID scaf fold_14; pos 6572641 to 6573504)
aagccaattggtggtcctaaggtacagaacatttcaactctcttacatcaaacagcattacttgcatattacacagcgttttgttacacacgaggtatataaacagcggaacaaacaacatcaactcaaagatgttgaaatcatagttgatagacacctcttaacctggtcaatctggctggaaatcaattgaattcactctaaactgggttgataagctagttacacctcatacaacgttgaagtaaaaaaaacccgtcacccttcaacctggtaaaaaatccaataaatccagttagaaaatggatggtccatgcatcgtctgattggtcatgcaccatcctctaatttgcgtgcgtgatgtatgtactcttctatcgcatttcattttgttgtttcctccacagacgcaaaaaacagctttcatgtccgcggatttagaaaatgtgtttttctctgtttcttatatgtgtgtacatgtcaagaccaaacaaaaaatcctttctccggtaacaatcacaaaacatgtcactgtttacaaaacaatttcttatgttttcatttgcagtttcttgtccattgaattagaatacttaaagctaaaataatgctattgctgggtggcctaagacgtccgatttcacttgaagttatgatgggcactataggttgcacttttattacacatgattattgccttggtgaagaaacaaagttagtggaaagagccaaaacctgataaaaaaatttcccacagatcttcccttgtgttttggaactaacatttttgagttgctacattgcactaatcatgactttttgtgagcaggtttacttttctgtctattccagagtgattccatc

SEQ ID NO: 54805 - DNA, 303 bp, Populus trichocarpa
  Intron number 1 from transcript POPTR_0003s10360.1 (locus POPTR_0003s10360) derived from phytozome v7.0 (chr-ID scaf fold_3; pos 11371678 to 11371980 reverse strand)
agtgcaagtggaaaaacctcgtcagtctttacaaggtattgttttcacttgtctttgaatgtagtgagaaatgggttctaaaaaagctgtgtccttagaatattatcgagcaccctctactgtatcttcgaaatagttccattattgtagtctcttttggtcttttgagcttttcacccagtatgtgattgatatattaaattggtattcgtccatcctgtgcaccatgtttttttcttaatcaacactgttgatggcaattaatcagggaaaggagacatctgatcctgagactggccggca

SEQ ID NO: 54806 - DNA, 525 bp, Populus trichocarpa
  Intron number 1 from transcript POPTR_0013s12910.1 (locus POPTR_0013s12910) derived from phytozome v7.0 (chr-ID scaf fold_13; pos 13528443 to 13528967 reverse strand)
cggctaaaaccctctgcctgggcttaaacctcaaggtaatgtcatctttgttttctctccttatttcttcagttctgcaactataatttgaacttgttcttttcattttaagccaaattctagctatttcattctatagaagacacggggtcttaaagtagttaatgggatctattattagtgctcatggatttactttagtgcttgaattgacacccgtctgtcgtttttaccatgttcacttcattgtaagatggcaggcaacgcagtgattctcattttttcacaaccagcacacttctgcattatgtttttatccacttttttgtttgtctgtttgagatcagttttactatggaaaactataatctttacttgagtaatttacattttaatactgttttagcttctttgtaatgagtcatgacccttaaatcttaatctgaattgacatgatttagtggaataattttggttttttctttggttattatttgcagttaataagtcacaagcatacagtga

SEQ ID NO: 54807 - DNA, 820 bp, Populus trichocarpa
  Intron number 1 from transcript POPTR_0018s02060.1 (locus POPTR_0018s02060) derived from phytozome v7.0 (chr-ID scaf fold_18; pos 1834753 to 1835572)
ggagggcaagagcatatctcatccgacctctcaccgttcgtcatattctctcgactacttgtactccttttgactaatccacgatgagaatattggagtcttgactcttgaaagcttggctcgtttagtaactttaaatctatttagaggttgcgaaaaagaattcctttatgaatagattaaacaaggcatggatgatttatataaaattagatcataaacttaatttcggtgagaaaattcatatgaattacataaaatttatggggaaaaaatacagaaaagataaaaacatgtttagttcaaaaaacaaaaataaatgtatatttggaataattttaaagtaaatctttatatttttaaaataaaattccttactatcttcatcttttcaatcccaaaataataattaaattctagcaagaaatattaagtatcgttttattttgagattgcactataatccaatgatgcttttcactcttgtaacttactatatgcaaaatattttttatttagaaatacattataaacttgcaatgcttgcttaattttcttcgtacaaggctaattaaccagtgatcatggaagcaatttgggtgtgtattttgttaaattacgttgacaatgatttgtctagttgttgcaggggtttgaacattaaccttgatcccaaattcatcgaggttttaagaggttatgataaaaaatgtcttccaagaatcatgtgatgataatcttagcctcgtatatttcctctttttgacttttgttcagatgagaaggctcaaatccaagtcctataatcgaccacgaaatt

SEQ ID NO: 54808 - DNA, 568 bp, Populus trichocarpa
  Intron number 1 from transcript POPTR_0003s01330.1 (locus POPTR_0003s01330) derived from phytozome v7.0 (chr-ID scaf fold_3; pos 1171084 to 1171651 reverse strand)
ctattacatatagtacggtatgtaaaatttaaaaacaccatttgtcatttaagtttgcaactacagccaaataaatgaagatagaattccttgttatggtggacactatcactctaattatataagtatgggtctcaaaacattcctcctgttttagagctagagttagacacataatcttcatatctttaagaaaaacattatttaatggtttatctggtaccacataacaaacccatgcataataatgtgcctgtatgtgtacatgggaatgtgatcagttatatgcaactttatatgcggaggtatgatttagactaaaactgtcaaaatttcgttttcattttttttaagttggttgagccatgacccaatcccactgcagaaagagataacatgctgactgataattgatatggttaaatatttactctatataggctcagctagatggcagcttttaatctattgggcaatttaagattttcttgcattctaatttttctgatatctttctttcaccaccaccactttttttttttttgaatcttagctgctagcagggtgc

SEQ ID NO: 54809 - DNA, 987 bp, Populus trichocarpa
  Intron number 1 from transcript POPTR_0003s08460.1 (locus POPTR_0003s08460) derived from phytozome v7.0 (chr-ID scaf fold_3; pos 9887346 to 9888332 reverse strand)
ggaatacatctggttcgcatattgttaatcatctggtgagtattgtttgcgcgttgcctttgtttgatttttgtgtggggttttttattgttattcatgggactgaaattggagtggctactgactacactgtagcttatagaaattgaattgtttggagactcgttgatctgaattcaagggattttaaaaatgaaaacgtgagatcttaggtaaatgaaacttaaaatttggctccatttagcttatgcctgctctttttttttttaattagggtaatttgttttggacgtttgtttgtttttgaaggggaggggggggattggtcaagtagggaagtgttaagtctcattgggttttgctttttttggatttaattgaaattgaagtgatttgtttgtaatactacatgattttgagctcttaaagagttcgttatatgtaaatatctaagaatggaaatgcaagatgttacgagtgaagggtttcaggttgctttgggttttacttacgagggatatggtaattaggtaatcccacttgctatttagacttgaaaatgtgtgaattgttgatggtatagcacaaaaatgttattgcattaggcatctgcagctgaatgttcattacctggaatcatgcatagagatttagacttaactgaaattaatttagaagaagtcttgaggaaactagtaatatgacgttgattttagtttgtagttcataatgacctttgcaaatgtcctaaatcatttcagtgctgtacttcggaatgtatttgtcacctgatgcccctcatgctttgcattttcatagtctgcaaaacttaatgaaagcagctgattttgacattctctattttacctgtcggcttcttggttaattttgtgtacaaaaatttttcatattgcttttgaattgagttttattctgttgaatctccttttaggttcgagcaaagcataaagaagtctgtctccataa

SEQ ID NO: 54810 - DNA, 606 bp, Populus trichocarpa
  Intron number 1 from transcript POPTR_0253s00200.1 (locus POPTR_0253s00200) derived from phytozome v7.0 (chr-ID scaf fold_253; pos 17662 to 18267)
atccaattctcttgggtccagtgtcaggacccaaggtttttgggttttaggtttctaaatatacttatttgtattataaatattattatttttattataattaaaagtattgatatcaaaaatattattatttgtcttataaatattattatttttgttataattaatattaataatactattatttgtattataaatataattatttttattatagttaaaatcattaatataatacttattaaattttaaaaaaatatattattaatattgaaaataaaaatagatttcatttgaagggtaaaattaaaaattattattattattattatcattaataaatttggaaaaatattattgttattgaagaaaaaccttaaatttgatttgaataaattacaaactataagaacttgagtcagacgagtttaatattatttttaatattataaatattattatatttattaatattattaaatttaaaataaatattactactgtataaaaaaacatagaattgatttgaagggcacaatcaattattattattattattaacctgggtcagggatccctttccagacccaagaaacttggggctag

SEQ ID NO: 54811 - DNA, 407 bp, Populus trichocarpa
  Intron number 1 from transcript POPTR_0019s01710.1 (locus POPTR_0019s01710) derived from phytozome v7.0 (chr-ID scaf fold_19; pos 1496485 to 1496891)
taccagcttctgactgtgaatttacgctgaattcggtacgttattatagtgtgttttgatttgaaggtagtgtttgtcatgtgataagtgttttttgtttgaaaatgtatggaaatatatatttttttatttttaaaaatttatttttgatgtgttaaaacgatttatatataaaaaaaaaaaattaatttgaagcaattttttttttcttcatattttttgaaaagcacggccagcggtcccgtattaggttgtttgttgttttaggaaaataaaattgggaatttatttcttgtttattgaggaaaattgtgatcttttgttgtttctgtttggtttagatttgagatgtagattgtgtgttgttgattgaggaattttttgttgttgtcgtctttagctcttgg

SEQ ID NO: 54812 - DNA, 513 bp, Populus trichocarpa
  Intron number 1 from transcript POPTR_0018s14560.1 (locus POPTR_0018s14560) derived from phytozome v7.0 (chr-ID scaf fold_18; pos 14711683 to 14712195)
tctctgctctcttctcccgtgcttttccgaaaaaggtcatctttttctccttctcacttgacttttaacgagaaccaaaccggaagagacatttatattagagtgaaagaaataagtgttttataattttttaataaatttgatgttatttttttttttacatggttatatttaattgatttatttttttaattaccctattttattggttttagttctttaaagagatatataggaatagcttttatgggaaagaaaaaccattttagcattttatttgactttctcttgaagtgtacaaaataaataaagaaaaatcaaaatattaatttttaatttttagctatccatttagcttttacattgagatgctctaacactcccgtgtctcacttaacttcctatctctctacaaaaccatatcgcagttatcttcctctactgatttctgaaaacagaacgctaacaactgcttgtttctcttctgaaagataaattagagacagataggaa

SEQ ID NO: 54813 - DNA, 434 bp, Populus trichocarpa
  Intron number 2 from transcript POPTR_0019s05140.1 (locus POPTR_0019s05140) derived from phytozome v7.0 (chr-ID scaf fold_19; pos 5373301 to 5373734 reverse strand)
gctgcaattccactggtatactctctctttatacatgtgtgtgttgtcgcttcagagggtaaaatgtactgtttcttgcaattcttttttacgggttggctgcggtattcatatgcatgactatttgttactatcttgttgaatttgaactgggattttaaaattagagcagtaggtgctgattttaggctcgtgatgcttatcttctgtcgactgcaagattatgttcttgttgttactgttggcacttcttttcaaatttgattttgaaatttaactctgcaactttgttgtgatatttaggctcacgaagttcttatcttttatgtatgtggcttttactttggattgcagcagttttcattcatggttataaatttactaatgatcttacttaatgttaggacctcatttcaatccattaaagaaggacc

SEQ ID NO: 54814 - DNA, 289 bp, Populus trichocarpa
  Intron number 1 from transcript POPTR_0006s01940.1 (locus POPTR_0006s01940) derived from phytozome v7.0 (chr-ID scaf fold_6; pos 1158408 to 1158696 reverse strand)
gtggaaacggtatgatatatatatatatatatttgtatgtgttgatttatcttttaatgcatcgtctttggcctttttcttctttttacgtggatgtcctatatatgtacaagttcttgataatctctacagcggattcttccatgtcagaacatgttttgagttcttccaatctttctgcctataaatttatcctgagattttctttgtttttctattgggattaatcatggtgaggtcctatatgaaatgcatgcactaactagtactgttacagaaagtcacaacg

SEQ ID NO: 54815 - DNA, 568 bp, Populus trichocarpa
  Intron number 1 from transcript POPTR_0014s19010.1 (locus POPTR_0014s19010) derived from phytozome v7.0 (chr-ID scaf fold_14; pos 16717587 to 16718154)
acaagtaaatatctaatttttattttactgggtttatttggaaatgcagtttctattttctgttttttgttgggactaaaatgatgatgagggatgtgggctctgaatgtattggtgggtcattatatcttctgttttggcttttgcttttttactgtattttacttacttattgtcttgttatgctaaatttataatgacatgcaaatttacttaagcaaagattgtggtataatgttatcatctgggttaagagatccaaaagatggttatgttttttttttaatgcatggttaggactacacaacaatttgatccaattactgcagttttacgatgttatttgctgttgtttgttcttatcgtgctgctgtatgttccatttcaggtttgatttttgcttgtgttgtttgtgattatgcattactttcactgcttaattcgttcatcttaaactgtgatatagttcaccaaattttccttgtgattttcttatacttcttgttatgatgttagaaatgtgtgtgtaattctaaatttgttttcttctttgcattgtgaagtggca

SEQ ID NO: 54816 - DNA, 526 bp, Populus trichocarpa
  Intron number 2 from transcript POPTR_0018s13470.1 (locus POPTR_0018s13470) derived from phytozome v7.0 (chr-ID scaf fold_18; pos 13790063 to 13790588)
attccgacagcaagcaaggatatcgacagtggcgggtaattctgttttgttttttatctcttaatgtgccaacctttaggtttcttcacttgcacgtttagctcagattgaaacacttggtttgatgggtcttttgccttggttgatagatagcttagctgctagtttctttccaaactacttagtacttatgatcaagtcctgtttacatatgcgatatataagaatgaagaaattaggaacaacagtccttagaaagggcataattgtttttttttttttttggttgaattttaggcaggggccgcgacttgcgcagccccctcaaccacaaattttgacgcaggctctccctcttggggagaccttaggccagcacccctccggcgtgcaatggaggtcactgacctagaccataggtcttcttgatcacccattgatcccgtccataattgttaaatactaattcggtagccatttttctggtgcagacagaggtgggtttcttggcaaggctttctcatcc

SEQ ID NO: 54817 - DNA, 963 bp, Populus trichocarpa
  Intron number 1 from transcript POPTR_0014s15510.1 (locus POPTR_0014s15510) derived from phytozome v7.0 (chr-ID scaf fold_14; pos 11554306 to 11555268)
ttggctctgcaaactttcctttccataattatcaggtgagacctctcaaattatgatttgttccatctattctcggtattgtgtttgtgattatcaaatgttgggtatcagtgattttacttctctcttttctatctgctttctgtttggtttgtgaaaatgaaataaaatatttggagctctgcatcttttgatgaaatcttgaaatgaatgaagttttttgctttactgggcgttaaaaaattatcgagagtttaggttattgttgttggtacatttcatgtatatgctatcgctttttcgttgttttggttagctttgtgaaattaaacttcttgctttccttatttgtatttgttctacgcctgaaactaaagtctacgtagctacaaacttatatgcgaaatgtgaaatttttgctgtgttaaaaatctagtagaagtcgctacaagttccccatctagagtccacgaggaacgaggctaaagtttaggttttatttatgatccaaagctaatgaagcaacgatctttgccaaagatgaaaagcatatagaaatagaaacaaaattcgggaaataagaagaatcggtgatacaaggtgtgtaaaacttgaactgaatgcattagttacttatgccaggaaagaatggcatgagggatggatgatacctatctgcttagcctaaatgaatttgtgcttgaaataattccagcaggcctggttattgtagtttaaaaaacagttatgtattttatgtttgctttatcttggggaacttgtatttttgtacaacggtttacttttattgtgatggttggaacacggggaatacacatgaatattctctgtaaaagatgattttgcgagcgttttgaattacttgtcactttgctttgctaatttatatgttttgaacgtgtgttagtcattcgacacaactttagctagcttgagcagacg

SEQ ID NO: 54818 - DNA, 576 bp, Populus trichocarpa
  Intron number 1 from transcript POPTR_0019s04770.1 (locus POPTR_0019s04770) derived from phytozome v7.0 (chr-ID scaf fold_19; pos 4971959 to 4972534)
gtgtgctgagatttgtggtaagaggtggcgatggtatgctgagatttgtggtaaaatatcttgcaattttttacgcattatctactgccgaggcaacagcgacagctcctatgtcaggatctaattttggacccagctgaaaaaagtgatgaaggatcctttcattccttttttgtcattgaatcgagtaatattagcaaaatactcatgaagttgtaattaattattacatatattttgggtacaaagaaggtggtcctttccaagtttacaagaggctattatgacatcattcaaagagattttgccttacccatgtcaaaatcaatactcaagataacttctaacgttacaatggctaaaaaaaaacaaaattttaaaaggataacaatatggctaaacgtatagcagcttatgagcaaatcgattatgcgacttttttcttcattgggtgtgcgtcaagattgaaatatttaagcatacgagacattattttgacttccaaaatcactctataaactgtttgtttccataaatccaggaagtaacggtggattattatttggctgacaaacc

SEQ ID NO: 54819 - DNA, 967 bp, Populus trichocarpa
  Intron number 2 from transcript POPTR_0014s07000.1 (locus POPTR_0014s07000) derived from phytozome v7.0 (chr-ID scaf fold_14; pos 5272120 to 5273086)
ttgaaggagctcttgcacttgctaggcagagaaaggtacgtacgatttctattaattatcatcttcttcactcgcttcttgttggtactccatcaaagttagtgcataacaccttaacgttcgtaacaatggagatagcagatgtttaattttaagaatttttatcgcttggtatcttatacatgcatagaggtaaaaggatatgtccaatcctaggcatgaaaaagacagccttatatttccgcagtcaatatggacatgtatgcatacatgataaaatgcaggaaaccagcttctgttttcttctgtctaaagtcaaggactatgtcaattagctcaaaagatgaacacaatttattttatccttttgttttttattacagcagcaggttttgacagagcaaatggaagacctgcgcaaaaaggtaagcaaagccactatgctgagaataattgttttaacaagtcagaatcttctctgtgtattgttgagctaagatatagcagttttgaactcagaaggtttagttgcttccctttcgaatcttacatgcacataaaacttggatctgtctgtaccggccgaatgtgatcaaacattaggaaatggacaggactctagtatacaacattgaatttgtatacatcaattgctttaaaacggctgtagttcttcgaatatttcacaatccttgttgctttcactattgacaacctgcccctaacctcaaaatttaattcattcttctaatcactttctgatctgctttctcaggaacgtcaccttggagacttgaacaggcatctcaaacttaaggttctgcttcaacaattatcaacactcgtgcaaaaaatatgataattaaattcatatcagatcatgttaccagcaatatttctaagcttttcccttacaatgccttgcatttcagctagaagcagaaggacaaaatcttaaagccattca

SEQ ID NO: 54820 - DNA, 430 bp, Populus trichocarpa
  Intron number 1 from transcript POPTR_0003s03290.1 (locus POPTR_0003s03290) derived from phytozome v7.0 (chr-ID scaf fold_3; pos 3677426 to 3677855)
ggcaggtcgccgatatttttcgagctttatcgtaagattttctctttacttctctttctttgtttcgttacagtatcatccattttaatgtaattggatttgtggaagattgtttatttgattaaagttttaggttttatttacattgccatttcttgatcatctagctttagtttttgaaattatcaagttaatgaacgctgaaatataagatttgcatgttcgtcaatgaattatttggcattcgaagctgtagatttatttgatttgtttatgagttaattttgttggtttattgatgttgattttatagaaaattggcaagccataggtcgttattgttgggctagcatgaattggatagttaaatgcaatgcgtgtttgtgttgttgttgcagaaagggattccagaatttggagaagattaagg

SEQ ID NO: 54821 - DNA, 780 bp, Populus trichocarpa
  Intron number 2 from transcript POPTR_0003s03290.1 (locus POPTR_0003s03290) derived from phytozome v7.0 (chr-ID scaf fold_3; pos 3677903 to 3678682)
cgggagtgtaagaggtattcagaaattgaacctcctctctcttttcgaatgcatgttattagtgtgcatttaacagttcagcattggctgaatacactttcaaattcaatattgaatgaatacactacagtatgtggctgggaaaaaaacacttacctaagtgcaaaacatttactttatggatgaccaatcgtgaaaagtatattttattttctttgtttattatataacattcacgctctgtttcttggaaaaagaaaacgatgttttacacagggctgttattacatcagttgtactatatgttttcctggattctgtgagaattagatggtaaatttaaggggtctgggagtctctctgaccaactatagaattttatttactggtattccttttctcagggttcctatccatatatcttcaacctttttctatgctgaaactcaaattcttttacagtcaactccatttctgctatcatagtttcacattataggatgaatattaagctcatagataaagcaatgattgtaaaccctatggactgagtttctaagactttgatatgtttgggaatcttaaagtctatagagcaagtatctacaatctggacatctcatacaatacagtcaggttaataggagatatactgctgacactgtaattttactttttttatctgttctctttcattcatattcaattagaattagaatcataataatgtcctcctgttttccaggcttatcaaagagtttgacagagaagtgaaggata

SEQ ID NO: 54822 - DNA, 777 bp, Populus trichocarpa
  Intron number 1 from transcript POPTR_0014s02150.1 (locus POPTR_0014s02150) derived from phytozome v7.0 (chr-ID scaf fold_14; pos 1851615 to 1852391)
tttacacggacgaagttatcaaaagtacagtgctggtacgtagtactgtagtagcatgcaccaagttttctctgttttattacatctttagtaatctaaagtctgaactattagcggctgaaaatgtcgaaatttactgtacaatccgtaatcggcaagcccttttctacttgttcatagtgtttgattctgcaaaaccaattcgtttcgtcattcgtattagtacactgcttcaaagttttggctggttgaagctatctttggaaaagaacatagcttcggcagctcattttcattccccaaatttggttccggaggagaagagaaaaaagtgaaaacttgtctgtgttcttgtctgagctttaagccactattcattagattcttaacccccccagtgaagatttacttggttgtttgtgaaaacttgttgatatatcaaaatgagtatataaataatgaactctaaccatagttataagatccagattaaggtctagatcgagaattagctgggtcaatccacaggatataccaagaatgacataatatttgcagacaaaccccaaaacttggctggggatcattttacttacagttatagtgcgtttgtgtccaaaaatgtcttaagctctaaaggaacgggaatatcgtgtttgacacttgaaagttcacatttgtttctatgctaaatttccactattcacacagttaagtattgtcaaaacactaggagtatgattttcatcctaacaatgctaaagcaatgtataccag

SEQ ID NO: 54823 - DNA, 921 bp, Populus trichocarpa
  Intron number 1 from transcript POPTR_0019s03670.1 (locus POPTR_0019s03670) derived from phytozome v7.0 (chr-ID scaf fold_19; pos 3750740 to 3751660 reverse strand)
gtgggttttcttagtggagtttgccttacctctttgtttttggctcttcttacttctctggggacttttgagtttggtggcatttcattctttgccatctctcagggaaattctcctttgaattcttcaagttctgggtttatcagtgagtataagctaccaatgtttgttcttcgcttgctgtttgtctttggtacctgtcctgcaagttttaactggttttgggttgatgaacagggaatttagtctagacaagttttgctattaaattcataagtcttaactgctagttgaggttgatcggagtaattttaaattggtttttggtgaagataaggcacaacctcatgcaaagtaaggccaggaatgatcaaagggtgcactcgaagcaacataaacttcaagtgacttgttagatacatttgttggttacttctccagaacttctagatcactgtttactagtgttttacataatcagtcttccaaattttctctgatatacttagaattgaagcagcctataaccctactgttttgaggtagtaatcgataggatgatgcttcagaaagaattgtggtcttcaaaaattagctttcatgaagaaaagatctaactcaattctgttgtagtcggtcttttaagtaatcgctgtcaagttcatccctgagctatagctgctgttgattagttgttgatggattgttgatcacatgtaacttagtgctttaattctatacctgaaagcccttcgatgaatttaattgcagatacagttgcaaatgcggattgcaaatttaaaagaaacgaagttgttgcagagaggtgggttgattcaaagagaagtaaagatgggagtgatgatgagagagttttgttattgcattctgcttggagtgccttgttatccgaatcagttg

SEQ ID NO: 54824 - DNA, 842 bp, Populus trichocarpa
  Intron number 1 from transcript POPTR_0006s04410.1 (locus POPTR_0006s04410) derived from phytozome v7.0 (chr-ID scaf fold_6; pos 3002395 to 3003236)
gtaatcagtactgttaaaatatttatgtattctggcagtaattttgggagctcaatttgacggatgttttttgttagtgtgaaagaggactttctctaaccattgaaaaggggaccttcctcatttacaaaattctgatagttagctgtttcccacaagtgcaggtgaaagctctcaggaagaaggatgtgtttcctttaattcactgggaaatatttccctgcaaaagaacagtaaatgtacatctgatcaaagttatgttgtaagcattaacactgtttcagaggtttctgggtttaaacagagtaagagaaggatgaaacaattacaccgttgaggatgaaattgtcaaagttgatgctggaatagtcactacaaaggagaagctttcaattaaaactgatgctagttactttacctcaagctgaaccctggacagttcttgcacacaagaagccacagaaagggtggattccatataaccccagaactatgaggcctccacctttcgctgatgcagactctgtgaagccaatgtcttggaatgtcaatgggttaagagcattattgaagttaaagggattctctgctcttgagcttgcctaaaaggaagactttgatgtgttgtgcttgcaagaaaccgaattgcgggtacgtatcagttacatatttgatcgcatgaggtttaatttagagtttctgactacattttttcatttctggagcaaggttctagcatgcataccgaaccttgggttgatttggtgaaattgacaatttcttgattggttcctctgattttgaaagcaggagaagggtgttgattccatcaaacaatccct

SEQ ID NO: 54825 - DNA, 502 bp, Populus trichocarpa
  Intron number 2 from transcript POPTR_0006s04410.1 (locus POPTR_0006s04410) derived from phytozome v7.0 (chr-ID scaf fold_6; pos 3003281 to 3003782)
aacttggttattctggcactgcaattgtctctcgagtatgcttatccttttctggttctgtctataaattttcatgagtcatagagcatcaaatttgatcctgaataatacgctcttctgaagaagacgactctctctctgattcatatcataaaattacatcacattatggaataacatcacagatgaacatagaagcttactataatccaaaatcgtttctaactactcagcagactagcatgacataattacaatctactgatctagagaatagaattttagtttagccacttctgaataccgaatagttctgcctttatggtaaaagagtttgttgtaatctttttttgacctgcagagcttgtggactctacaattattttgatcccgatttttgaattgccaacttgccttttgcttttataatagattttcctgtcattacttatccagtagagatcaatgtttgtgtgacagataaagctcctttcagtccata

SEQ ID NO: 54826 - DNA, 794 bp, Populus trichocarpa
  Intron number 1 from transcript POPTR_0006s08250.1 (locus POPTR_0006s08250) derived from phytozome v7.0 (chr-ID scaf fold_6; pos 5991103 to 5991896 reverse strand)
ataccgccactcggactccctggctagtattccaggtatgaatccagttcggatttaagtgatttatcttttctgctaatggatctgattgttgtagagtattatcttgggtggagaaaaatatcttcgtttttatagccagctatgtagatcattcgattttatgcttgttgattctatgctgtttttatgttttcatttgattttcgaatcttgatgttttcctcaaaatattcgagtctcaaagcatttttagcctgaccatgcatacaatcttcccgtgccttttgtttttctttttcgaaaacgttaaaaaaccgacaaaatgctgttaagacttttgaaaaccaaaacaaggctgttttgtgatggtcgttgtcggttggaaaatgataccaggcggttgatgtttgtccggtgtgttagttcagtttcgaaagttaaatgagtttctgtttgcatttaaaaggtttaataatgtcatttatgaagacttcagttaccaagttgttcgaaactttgctagctttattttatttaagcatcatatcgtataaggaaacttgtgggagattggaaaatcaggtgattactgctaatatgttatctgtttgtcctggtccatgttcaatgctgttattttagatgcactcttaatttgagaatctacaacagattatcgatgccctgcaaaatgagcggttaagtagattgtagatcgcatctgcattctgagtgtacaccgaatgcagcagtgtctaaactattgatgtctgtgttcccagattatagac

SEQ ID NO: 54827 - DNA, 528 bp, Populus trichocarpa
  Intron number 1 from transcript POPTR_0019s01760.1 (locus POPTR_0019s01760) derived from phytozome v7.0 (chr-ID scaf fold_19; pos 1529119 to 1529646 reverse strand)
ctccttcatcgatgtaataagttgtccctctacactaattctattcttttgatcatgtctgtccatcgtttcttgaatttgaatattatatatcttctgggtgattgattagtttcctgtgcacttcttttttcctcttgtatgatttaggggatatgtaaccaatgttagtgctggagatgttcaacaagtcctcgtccgagtggccaataatgggtaaactttttgaaccttaataaaataatttcttgattaattttttagtacgatttcatgcaaggatctgtactatgaatggctgtcggaatcataaaagaattttttagtcggttcaatattatagttatactgatgtataatggacagaccggattccttcatgtttatgccgacaaaacttcactctcatcaacattcgcttcctatgacgtagttctgggtgtgaattaatgcctagtcttgtgtgagataggggcgatggacatggaattaggacaattcaccgcaaagcactgttagaggcactgg

SEQ ID NO: 54828 - DNA, 864 bp, Populus trichocarpa
  Intron number 2 from transcript POPTR_0006s05870.1 (locus POPTR_0006s05870) derived from phytozome v7.0 (chr-ID scaf fold_6; pos 4140683 to 4141546 reverse strand)
attctcaaacctatactttgagagtggataaacaggtaatttctggctcccactgaactgtggcccacgtcattgcagtgggtattttattgtaaacttatcttgtgttattatactttaggtgatcaatgagttcaaataatcaaattacatcttaaagctagttcttagggagcaatatgtatatccaaggaccgacctttttctgtttttattttttatcttttttccacctttttcaagagctccaaattgcgttttgagcatatttctattgtcataatgagagacagagaattactagaatctgaatcctgaaaaagacaaacaagaagaggaaattaggtggtcttaacaattacacttaaagcctcttcaccaacatagtcagaggatttccagtccttataaatgatttattgtgttgtgccatttatacctgcctaattccacacagctgacatgaagacaacggtctctagcatccaactccctttcccctctcaaaaacttctcttcatcaagcccttaggtaaaaaccttggagtattatccaattgtccaacattttacctactattcatgcagaaaatactgaggagcagatctcatgagcgacctgtcaaaaagcaatcacagaagatcctctatttccctgtgtcttttatacatgaaacactgttgaaaccttttttgccatcactagattcttagttgtaagaatgtaccctgcaatataatcttaatagggcctgtacgctaatatgtgagtgaggatttactagttgataacttgtacatgaattttgtttgtggaagccattaatttcatcatattttcacctttcttgaatatccttgcag

SEQ ID NO: 54829 - DNA, 687 bp, Populus trichocarpa
  Intron number 1 from transcript POPTR_0006s02530.1 (locus POPTR_0006s02530) derived from phytozome v7.0 (chr-ID scaf fold_6; pos 1645076 to 1645762)
tcagggtttctatccccacatacatttaacagaaggtatgcatacaacagagaaagcccgtgttttttcttaggcaactaagcttgaactgagtgattggagttaaagcaccaactgcatggccaaggagcattgctcaggcaatttattttcaaagtcaaaatcaaccactaggattgtatagagtgtatttcaatattattttttatggttttttcagagcttattatcaatttaaatgttatgcaagagattttagttgaacttgcagcctaatggtaacaggtataaatttcgatccgatgattgcatcaagctaggagattctagagtctctattccccatagggtctgatttttaggcctagaagttacggtttaagatttctcatattttcctaattaatttaggattcttttttctatttagtttagaatcttttagttctttttacagcctttgttcgcgatgtttttcctagtatatgagcgacaagaagagctttaataattggaattagagttttcgtggttgagatttttcggcagaattctgtctttttgtgcctgctatacttcttatattgtttccgtttgtgtcaagatgataattactatattccaaattaaattttgaaatattcaactaataaattcttggaaagttctgcagggctgttgggaaag

SEQ ID NO: 54830 - DNA, 961 bp, Populus trichocarpa
  Intron number 1 from transcript POPTR_0013s08360.1 (locus POPTR_0013s08360) derived from phytozome v7.0 (chr-ID scaf fold_13; pos 7437878 to 7438838 reverse strand)
agttctttccaaccctcagagatagatgtaggagatttttttttaacgcgtagttttatgttaatggacataaatttaattcaaccactgacattttgctagaagattttgaagatattttttttaggattaaaattttatagtaattagggatcaagaaagccttacaataatacctagaagctactattcgggatttgctatattttttttagttgaattaggatttttttttcttatttggttagattttttttcagttttgtttaagatttttttactagcatagaagcagcttagagaaatttttaataataaaattctgatttagaattttttatgtaatttattttgcagaattttttattgcttgtttttcgtttttcttatgttgtttctagttatacaagaaggaaaataaaacaaaagaagtggttgtcgctggtgaagcaagaaatattatttttaaggaggtggcttggagattcattcttatttcctacgtgaactgaattgttatcaatgaatcttctatcactttgttttatatatatatatatatatatataatggttgtttagacttaacaaaagcgtgagtccaagctacataagaaataaccagtagaaaatccacaatccaagactaccttggctcaaatatgaaggttagagttgaatatatactcttccaattcattactgagtcaaggtttgaatttctgattattctgaggtaacaatttcaatacagtctgtcgttccagaaatttcatttgctaaattccaccaatatgtagccgccaatacaatttcattactgagtcaaggcattcatgatatatgtctcctctcactaactcgatgcatgaacttacagctctttctcacctatatatatgtcttgctcaatttctcattcgttgccctacttcagttgactgcagaagttttatcagctg

SEQ ID NO: 54831 - DNA, 425 bp, Populus trichocarpa
  Intron number 4 from transcript POPTR_0006s12230.1 (locus POPTR_0006s12230) derived from phytozome v7.0 (chr-ID scaf fold_6; pos 9368328 to 9368752 reverse strand)
cacgaacactgattccgcaaggtaaaccatgacaacccactcgcttcctttattatcccttccttattttcatatgcctttaaattcaacttcttttgttgcaccgcacccccttttaagtcttcagtagtgtatgccttcaacacaattcaccggtctcaaaatttgatcgaatttatttgcatttatttctcgaagacttgccttttacttttgattatcttgattaacttcaaattttcctgaccaaccgtatagctataaaacacatctaccataaatgattacttgatgaaaacactgaaaaattgagtttatgaaggttcttaatcttaacctttttttgcttctctttcctctcctgccctttctctcgccctctctctcttgattttcttaaccttgcatcctcatcaattgcagac

SEQ ID NO: 54832 - DNA, 746 bp, Populus trichocarpa
  Intron number 1 from transcript POPTR_0006s08915.1 (locus POPTR_0006s08915) derived from phytozome v7.0 (chr-ID scaf fold_6; pos 6585681 to 6586426)
tgtgggcttttatcatctcctcctcaatgtacttgttttttctttcaatggtctatgaaaaggtttagtccctcctaaaatggatgttttttttttgttggttggctattcttaatagaatcaacaccataggagttttagggagaaaaggcattatttgagttgaggatgcattctgtccaatatgttttctatctaaagagtcagtggaacatctccttattcattgtcaaaaccactagaaaatttggtctagattcatggaatggtgaggtttatcccggtgtttgtcctagcagttaatttatcagatttccttagtagatcattaggcaccttggactccactcaactttaactactcaggcttcctatactctttcttggtctagattcatggaatggtgggttttatcccggtgttgtccaagcagtttatcagattttctttagcaatggaaagttatggttaaaggaaaatttcaaaggaaggtagaatttatgttattttttttgtgattatatagtctttatagctcattcgtaatgacctgatcatctttaataaaaaaagccagattatgatactttgtttcttcttatcttaatgtgtagttaaaagctattttttctttttttcatataatgtcctcgatttgcttatatattttgatgggttggttagatggactaatcataaaagtgctagacctcttaattattatatagtcttaacgagcaactca

SEQ ID NO: 54833 - DNA, 735 bp, Populus trichocarpa
  Intron number 1 from transcript POPTR_0176s00200.1 (locus POPTR_0176s00200) derived from phytozome v7.0 (chr-ID scaf fold_176; pos 3112 to 3846 reverse strand)
tactgcacatttctttacataatcagcacagcaaggtttctcttcctttctctcagaagggaaacctcaatttcaagtttcttttctttttctttatcttgattacatgtttttactttttagatgcctcttttttcaacgattgcttattattcgataaaatctgtttctttctagtttttagagcgcttatggtagttgtattgtagggtgtagttgaagttggtgagttgagatatggaagctgttttcttattgggctttcaattctctaacttttatggtgggtatcgatgaattttgtcattaatttctgattttgaagtttaatagctcaagttgtgatgagcttgatgggggtactgttttgtaaattttggcaatgttttattttcaaatgattctatattaactcactgtaatgagtaatctgttactgtcttgtaaaattctcgagagtcaattgctgtggtgtctggagtatatggttgctgtgtgattaagctgcttggagatgttaaaataatttgttatctggaagaagttatggtggctgtataggaaatttttttaaacaaatatgcagttagtttaaaccacagagaactcactggttcgtgaattgtgatcttctttgatctggcaaatgttcttatggtctttgtttccgtgtttcagagattgagaccatatcgtatatgcaaacttggtaaagcttcgtttgcaaatcaagcg

SEQ ID NO: 54834 - DNA, 1038 bp, Populus trichocarpa
  Intron number 1 from transcript POPTR_0006s05130.3 (locus POPTR_0006s05130) derived from phytozome v7.0 (chr-ID scaf fold_6; pos 3567042 to 3568079 reverse strand)
acgcacttttagaagtcttctcaagacattttttggtgagttctttttctgtgtattgagaaacaacgagaaactcggttgtttctatgatcattctagctagtttaattagtttgtcttgcgcagaatatcgaggagacatggtagcttcacggctaagatcttttaatgtttgaagcttcttttttttttttagctccttttgctctcaaatctttaccatcaactttcctttttggaattttgttttgggtctttggaagtgggattttatgtttctgaatctacagacaaaattgctttagagctaaaaatgaacaaacagaaagtgtgaaaacattggagccccccctctctacttctcttatttattttttatttttttcaagtccttaaatctattttatgttttcactgaactccttgaattctatctaatttccgaacaagatgcccacaaaaatctgagtgtgatattgttcttttttcacaggcacacgaaacttgaaacgctgactaacccaaaactccaaaaacttagatttatttcagtgtcatatacattcatccatttttctaatactgattttaacatttatttttctgggaaatacttaacagtcccttatatttgattctttgtatttttgaaccagttcttggaaattaaggctgcaagaacaattggtgtctagtttgtttgttttttttaaaaaaaaaaaagtgagagaaaggaagaaagacataaatgctgaggattttaagagaccaacaacaactgaagtggataccttgtaatagttcgttgaagtggagggagtggagaagttacaacaattgtcgtagaaaccatcaaactagcatccgcatgaattaccctttttcctcgtattagcttccgatccaaaaatcacacaaaccctttaggtccatatctagtagtcaaccattttatacccttggtttggtttcttattatgtttgttttgtgttttttttttttttgggtgtgcagtaactaagtgtaagacagcaaca

SEQ ID NO: 54835 - DNA, 801 bp, Populus trichocarpa
  Intron number 2 from transcript POPTR_0006s17890.1 (locus POPTR_0006s17890) derived from phytozome v7.0 (chr-ID scaf fold_6; pos 16126613 to 16127413)
taattttgcaggttggtgttttgtttcctattcattgtgcttcttgtgtgtgtgtgcatgcatctgcatctgcatgtgtttgttctataaatggttgcaaaaggagaagggttcatatgatcatatgattgggtaaattgtttgtttatctgattttgtttggagctctctccactagctttaatagtgagaaagaggatcaatcaggtagaagttggggggggggggtctctaagagggtttatccatgtgcattgatgtcctttttaatgtgtctgtactaattagtaagttgacttagtgaatatggaagaaagtagtgaacaaatgatacactaagaagtaattttgagtgagcagaaaatagaatatagcctttgatagacagagaaatgggggaaacaagaattggctgattaaggtcttgctgagtatgaatgggaagaaggcttatatgaaagactgtttctccaacatttgaatctgaaaagagaaaagcaaaagagactggcaggtgttttgcttttcttttgagtcttcgctgtttgatatcaatcatccattctgttttagaggattcacttattattcctatcgatggcgtagactgttcttttgagtgagtgatatagttgtttcttactctctccctctccctctccctctctctctgtttttattttttggatcttcaattttctgtgatatatcagagtgaagcttttcatgaatttgtattgtatgatgcaatgtttgttttctctctgcagacgactgcactaaaaagcggttccttacgtc

SEQ ID NO: 54836 - DNA, 717 bp, Populus trichocarpa
  Intron number 3 from transcript POPTR_0018s05420.2 (locus POPTR_0018s05420) derived from phytozome v7.0 (chr-ID scaf fold_18; pos 4953035 to 4953751 reverse strand)
gacaagccagttttttgccttgaaggtatcatatgattcagccgttaccttgccatattgttggctacatttggcatccagaatttctgtcttggtctctaggcctagtattagatcagttaatgcctgaagctgctgtgctatccattgccaattaaagtaatttgtaccacttgttgcatagttttttccactggtttctggctactgaaaatgacttcaattcacaaacatttttaactgttcatttggataaagaatagctagttttctgctgttggcgcagcggatttcttctgtgcccttttcccaaatttaatttataaacccgcatccaattccactcatactagatttttgagatttaagttttgagaattagagcaattatttgctaaaataactagagcaattacatcatagttttacgagcccttaagtcttgtatgctctgatattttgagtaaaactcagttatgaatatgggaggaataggcctctcacagttattttgaacatcactattacattatatatgaagtggtttcaagtgaatatttctcttataaactctaccaatatttacttcctgcgtgtgttgggatgcttatcatctttttatttcctgtttggttaataatcagtatacctttcatttacttgtctagttgtaactagtacgaatttggcattcttgttcaatttcaggttatacaa

SEQ ID NO: 54837 - DNA, 844 bp, Populus trichocarpa
  Intron number 2 from transcript POPTR_0013s06370.1 (locus POPTR_0013s06370) derived from phytozome v7.0 (chr-ID scaf fold_13; pos 4925176 to 4926019)
tgctgtattttcaaggagccatatacaggaaagatgtatgttctcttcctctttactatttctgctgttaattgtttctttaaaatttctactgcaataaatacttttctgccacaaaattttctttttgacattttccataacgtaaaaataagctatagatacaattttatgtattaagaacataaactggcatgcacttcccagttccctcctcgttatttctttttctgtgaaacagagattgtttagattaggataatttcatggatcaagtgtcaaagtacatgccaataaaataataatttattctattttgaggcatcgattccagcttatcaacttactgagttttttatatgcatatcttatcatgtagctgtcgaggtaaaataattggcaaacttgaatttttggctctgaaactagcgtggacttgatatctatatagtttacttcttacagatgtaatgaactagccatatgcacatgaatggagttcatttgtggtaattattccggcctgctgttgaggattggttgtggttacaaactccaaaaacaccaaagcatctcatgaaactttgccattataatccttgcttgatcttcacaatgtcaaaagacatatttgacttgctgaatgttttctgccacggaaacacatttcatgttcattagattctgaaaaaccaactatttaagatgatccagtatttttcttttcatcgaactattattattatatgcgtcactgtaggttggctttacattacttattccttgattcttcaattttggatttctcgcactcagggtggctttgctcggcaagaattatttt

SEQ ID NO: 54838 - DNA, 869 bp, Populus trichocarpa
  Intron number 2 from transcript POPTR_0013s15280.1 (locus POPTR_0013s15280) derived from phytozome v7.0 (chr-ID scaf fold_13; pos 15297069 to 15297937 reverse strand)
gagctttggtctattgatcctaaaagagctaaaaggtgcgaacttttttgttttctgattatgggttttgcttaacgttttgacttttataggtttttgtgggaaaagggtgtgcgtttgttttccatttgagatagtgtaatgttttttattttatggtttaattgttgttgattttgggtgtggaaaatggggaaagtgtgatgcttgctggatttaaaaattttgtttttgggtttagaatcttggttttgatttgtcaaactttgttacaatctgtcacattactgttaaattgttaatgttttgacctgcctgttgaattgttggatcgtgggatttaagagttttttgctactgtctgatattgaatagtgatgaattgtatagtattggtggcaaatggatactctagtatataattgaaccctaagaagaatttaagaaaccaggttaccgtctgatatagattttgattgtcttgtgagctttagtagttttcttcatcttatactgacttgccattcaccaaccactttatcatacctgggatttaagttatgttggaatacggtgggatttaagaaatgttagtgagtgttctgttttaggtgattggatctaccatttaacattgggaattttaaagggcatttaaatgtttaaaagtatagccacctcaaacatacttttcgtagttttcttttaatgatgattttgaatatataaacgaagacaagcaaagacatgcatcctcgtctctggattttttttttcttcaaaaaatttggcagctcttttgcttatgctgacaacatagtcgttggttcacaggatacttgcaaataggcagtctgctgctcgctcta

SEQ ID NO: 54839 - DNA, 262 bp, Populus trichocarpa
  Intron number 1 from transcript POPTR_0018s14700.1 (locus POPTR_0018s14700) derived from phytozome v7.0 (chr-ID scaf fold_18; pos 14817887 to 14818148)
acgacgaaaacgacctctgcaacatcggcgatcgagtcagtactctctaactctctttcttacttttctttgcttaatattttgaatcattgattgattattcaattaataattttattaaacgaaaaaaattggttcttgataaataaaatgaaaagaaaaaaaacgaaactttgataattaatcagtggtgatttcggaatttgtggaaatgcttggattttcaggttagattggatccgtcgaggccgttaagtaaacg

SEQ ID NO: 54840 - DNA, 809 bp, Populus trichocarpa
  Intron number 1 from transcript POPTR_0003s14860.1 (locus POPTR_0003s14860) derived from phytozome v7.0 (chr-ID scaf fold_3; pos 14811826 to 14812634)
aaggctttcttttcccctccctctccctcccgcaggtcagtcggatttctgtatcttatttatttatttcccttttcttctctccttcaaaccctagaaattattagttcgatcttgatttgcctcgtcttttttttgtgaagaaattacgattacgttttgcaaaatgaagtgttgagttcaaatctgttgaattttttagggttcacctaaaatggatcaacaaaccctaacttggatcagctatgaaatctcttgctattaaagctcatattgggtcgctgttatttgtttcatcaagtgtcacttgtctactttgctaaactcaataaaatattcaatttttaggttttggggttgctatgtgtctattacactgtttattagcgaaattgtgcttttcaatctgctgtctctgtcacaacccgctgaatgaatggatcaaaaaagaagtaagaataattacactgtttataagcgacattgcctttttcaatctgttgtctctgtcacaatgtatgttgaattagttgataaaaaaagaatttagaatagaaatcgcctgcaaaatttctccttttgttattacacatggaattctcaacaggttaaatggaagagaaagtagaaggatagaagacataaaatttccacaaatacgatatgaggcatttttatatggtttattaagtgctatttatttacgtagcttagctcaagaaaagtttcaatttttttttggtattggttgtgtatctggttcatggggttggaactgatttaatttttgtgaagggtttaattataaa

SEQ ID NO: 54841 - DNA, 600 bp, Populus trichocarpa
  Intron number 2 from transcript POPTR_0018s04770.1 (locus POPTR_0018s04770) derived from phytozome v7.0 (chr-ID scaf fold_18; pos 4137003 to 4137602 reverse strand)
tgaccttgacagtgtggaaccctcaatcagagcaggtgctttacaatccttgtatgctgtcaaaaccgttttatgtatttgcataaacaataaagtggttatagaaaatgtaagatgtaattcttaagggatttgaatgaagggaaacgtgagattattgaaactggacatggtagttgttttttcgagcatttggtgagggctattttgtgacgatttttttggcgaaaatcctcatcacattttgagcaaatgtgatggtaatttataatccaaattgagttttatcattcacttgtgccggcttctttcgcctaaagaattggcacatcatatttctatttgatatgatgaagaaattcaaactcccttcgtttaactttgtggtagaaagcccttgatcatgcttcttctcatttagactgacaaccacatatttacaaagtgaatcttttttgtatgaagttctcattcattaaatagaagggaggggatgtgtttgcctgctgtagcattccttgccttctagcacacattagctgattcaaatttgactgtctaattttcaacttacagacactgaaggtgacaacttgcgtc

SEQ ID NO: 54842 - DNA, 418 bp, Populus trichocarpa
  Intron number 2 from transcript POPTR_0013s07010.1 (locus POPTR_0013s07010) derived from phytozome v7.0 (chr-ID scaf fold_13; pos 5710638 to 5711055 reverse strand)
gaaaaatcacaaaatcttctttcagaaattgggtggtaaaaaacccaaaacccatttgctttattttttgttttaaaggctcaccttactttgtttacatgcagtaaacaaggaaagttcgcctaagttaaaagatgattgctttcaaattaggattaataatttgttgtgtagttgaaaaggagatttaatgcttaattagttatcacatcatcaccaactgatcaagcttatatggtgtggatttgattccaggattccatacatagtgccattttctctcctttaacccctctaatcaaggactaaaatgggatttactttttcctgtatttattatgggaaagaacatcaacaattttttcaaagacaattaattttcttctttgctatgtttatgttttcaattgctaggtgc

SEQ ID NO: 54843 - DNA, 978 bp, Populus trichocarpa
  Intron number 1 from transcript POPTR_0018s12960.2 (locus POPTR_0018s12960) derived from phytozome v7.0 (chr-ID scaf fold_18; pos 13422548 to 13423525 reverse strand)
ttcttggtcttctttgctcaaaagattggtgcttttttcttctcttctgctttattctttagtcgattggattagtataatgggttctttttgttgctatctttcttgggttgatctctgatcttttttttttaattgaatggaatttggatcattaagtattttgatgttaataatgatattcttcttgttgttgcaattgggattgtttgttttaaggtaaattttcctgggttgcttttaatttttgtgacttgaaagtgtattgactgtagtccattggagcaccgtatggtgtttgtttttcccaccatggttgctccatgttaataaatttttaagagagtttgtttcgttgttcttgatattttatttttctttgttactttcctaattttttatatggaatttttattgttttgctgtttatagaaattgtggtttcataatcctttggtggatcacacttgtttgtttggtttctaagtaaggagccgaaagaagttatagggtttctttgatagagctccttgtctgaggatgattttactgtaatggaacttcggttttatgtgagtgctgctgaattattgagtcttctttctttctatatttagcctatgagctgctgtgaattgtaccatagcagtcttcagcctgtcttttcaatgatttatatcaggattcattggtcttgcatctaagggttaacacgcagcagagaataagaaaatcaaactagaataagaagtcaaatttattttggatatgattgcttgatcattgaattctcattacataattcaatacattttgaaggatttcattggcctcatctattgtttctgcttttgttctatgttgttttttggtcttgaaacaaattagaagtgattaaagaaactatctttacgattgcttattcttgttttttttcttccagagcttctgacagcagaaacattcaccggaacctat

SEQ ID NO: 54844 - DNA, 1068 bp, Populus trichocarpa
  Intron number 2 from transcript POPTR_0013s03800.1 (locus POPTR_0013s03800) derived from phytozome v7.0 (chr-ID scaf fold_13; pos 2465062 to 2466129)
tcaatttggcttgtgctgctgttgctttgactcgggtaaacttttttttttaatttaaattgagaatatacgtgtatatttatgtatttatatgttttttgtgtgatttttcatgtgggatttttagtttgttgcttagcaagttaaagaaaagaaaaaagattggatcttgtaggtattcttttcttccttggtggttgtgtttgattagtgagaaaaaattgggaaagggagtaaagtatggatttttttttggcgtgttttaaagttcttaccatgttgttttagtttcttggtaatggaaacattagtttaattagttaactagctaatagatttgtttttccttttatttctgagaaaattgaagaaagctaaaaggaagtacatttatgggtgcttttgttcttagttcattggaaatggaaaagttcgctggatttagttcttttttttcttagaggagttcaatagctgtactagggaaatgctgcttgatgcttgactaaaactgaagcaaggaattcactgggaacgaggaggttagcacttttgaaattacttgaacattaggtttccatgggtatgaaacaatagaacaaaagttattgttgaagctaggtagtaaggtctattttatgcttcagcgagaggaagacaggaagtccacaaatcattttaaccaattgaactgtcagaatcattgcctgaattattgattgcaaagggattgttaaagccacttttttccagaatggtggaggtcccaagttaagaacttcagcttggaaactaatttggaatggtggaactaaagatttttgaagcaacagaacctaaatggtgttttgtgaataacaagggttaagtgctagttagcttatgttaatttgtatagtagcgctatgtttggataaagcaaatgccaaacatccatacaattttggttctttattctttagttattttcggttactgtaaatatttaaaaaggtttgtcatggttaattgaatatgttgctcttgtcaataggcatcttttgtaaagcctctagattctcctgccgc

SEQ ID NO: 54845 - DNA, 702 bp, Populus trichocarpa
  Intron number 5 from transcript POPTR_0013s03160.2 (locus POPTR_0013s03160) derived from phytozome v7.0 (chr-ID scaf fold_13; pos 1923735 to 1924436 reverse strand)
atcttggcaagggtaatttatcaatatctccttcaaggactgttcactgatttatgtcactgttatatgttctcattgatgaatgatgagtggacctggtacataacagtattgaatttctagttttatgattctggcttcctgtaagagaacaattttggagagctcttgttggtacttcaaactgacagtttcaattggtttaatataaagaacacagcctgatacattacccttcaatgttctttatcaaaattaaactgaacataatttggtcagcaaaaaaatgcactggaacatgttttttggggtctgattcacacagcacagccttattggaattcttgacttggatctccatcctcttccaagcagagcttcagttgcaattaatcagcatcatgactcttgttattgtagtaattgataatttgttcatgcatttagtagtcttggttgtagctagaatgcttcttccaggccatttaatcattagtgtcgatagtgcaggattttattttccttattgtgtccaaggggtttggggggtgcagagtaggatgtgaagataatgtttctttatacgtatatggttatatatggacttgtttactttatttttgtcacatctattattttattgcatcattctctaatcaaagtgatgttcattgattattgattttctacatccaggaggac

SEQ ID NO: 54846 - DNA, 893 bp, Populus trichocarpa
  Intron number 1 from transcript POPTR_0013s03160.2 (locus POPTR_0013s03160) derived from phytozome v7.0 (chr-ID scaf fold_13; pos 1925243 to 1926135 reverse strand)
tctttctctctctactctcgaaggggcgctctgaggtaaagcttcaatctttccattttctcctttactttttcttttgatcaaaatcgagggtcttagttattttctcatgatcgtttgatcttgataagaatcttttttgtttttttttttagttttattatgctttgacttcttaaagattagccttttatgatttgtctgatgtgataaaatcatatggctattacgaagttgttggctattatgtgttctttttattcttaaagtgtcaagtctatactcagatttggtttttttggttgtttctgcttgtgggttgtgtgatcttttcacagatctttcttgggttttgttttttaatcaaggcaagctacccaggtattgttagacctcaattttagtgttttctttaagacataacatttacttgatcttgtttagaacttgtagatagaatagtcaaagggcacgagagaaaataaagctgcgtaaattaggagccggatcgaaaaatgggtattttgtgtaaattagagatgcttaatgatactgaaactacactgatttcttatgggatcctcaaatatgtgcatttatagatttatttgattagctttgtgggtcctatatctttaattagtgagatttatttgttataatttatatgtgcttctgcacttatctgaattttagattttaaattggctgttttgagcgtagtcctttctgtgtgtctgtgggtgcaatgtgccttttgttttttctttctcttgttatatttggtcaggtgctattcttgcgagatgcagagtttgtgttgatgtttttaagaatttaggttattgtagatgtccagttttaacacttactcttttagatcacatagaaca

SEQ ID NO: 54847 - DNA, 922 bp, Populus trichocarpa
  Intron number 1 from transcript POPTR_0013s00770.1 (locus POPTR_0013s00770) derived from phytozome v7.0 (chr-ID scaf fold_13; pos 396204 to 397125)
gatcctatccaggtgagttaacccactctctttctcttaattttctctacaattcattgcatcctgtagcatacaattttggggctcgattaaccttctaacttatgcataaatttgtactgtttattagatctgttttttttattggagattatgagcttgaatattgtgtctttgagaaatctaatgatcttgatgtcgagttgcactgtaagtgcccatgtgattggttttgatctgtcaagccaaggtttttgatgagccaatttcgagattgacaaaggcattgtaagtctcatgtgggggtcagtttggagaaagaaaaaggcattttgttgtgtttagtgaagacccaattgggatattgcatttgtttttcatggtttggtggttttgatagaaactcatatgggattttgagcttgttttgtttcgtataatcattttaatcgaagcccgaatgagaaattgccgttgtgttaagtcattttaatggataccgaatgacgtatttagtttgttttcaatgtgctgaatcattctagtagaaatcaggttgggatattgttttgttttcctttgtgttggtgatgaaggattcagtaatttactatatagtcaatgatcaagatctttaatttttggcagagaattcaaatcttatagcatatatttgctgtctaattttttaattctgagatttcttttggagtctaatgataaggactgaatttatgaaagttggaatgagagagtgtagtgcttcttctagcatgtcttcccctttgttgttttcggttctatgagatgggagtattgttatatatatgaagtggaaatcctgattgggatttgattgaattttgtttttccacgtgaataatttatgtttaactctcttgacagccccctgttgaaaatt

SEQ ID NO: 54848 - DNA, 661 bp, Populus trichocarpa
  Intron number 2 from transcript POPTR_0018s12190.1 (locus POPTR_0018s12190) derived from phytozome v7.0 (chr-ID scaf fold_18; pos 12745916 to 12746576)
tgcacttcctcatcttacaagaacactctagtccttaaaacctttccgggccagttcttttctttaatctcttttgttgagttgttagtaatattttactttgatttgctttctttggtttggttaatttttgctatttttatagaattaagaacctcttactttatttgcttttctgggtttgatttctccttgttgttgatttgggtaggcaaacatattcactatcctaattagaagaactaaatgtgataaagcttagcgttagctataaatgaatcttgaggttacacaatgcataaaagaattcttgaaagaaactgccggtgatatgttatcaattaattccgaatctgataacttccattactaattaaaagcttttgcagaaacgcttgaagaaattatggtattccatctccatttttcttttaaattctcagccgctctcacattgcatcaccaaatccacacctatcttctccgcgccttactgggaagaagatccaatttcgatactaaccatgtcgaacgaagttcaagtaattgctcgtgtcttgctatgggcagcatgtagcaccctgttggtccaatcggggttagctcagctgccactattgcctaagatacccggcctgcccgatattacactacctccgat

SEQ ID NO: 54849 - DNA, 1017 bp, Populus trichocarpa
  Intron number 1 from transcript POPTR_0014s06470.1 (locus POPTR_0014s06470) derived from phytozome v7.0 (chr-ID scaf fold_14; pos 4910019 to 4911035 reverse strand)
ccggttcaaaaaatctcgatcgcctcattctccaggtaattctctttaactttcttatccactttctttcattttctttgcagccaaacatagtaacatatccttgcactactcaatgaaatggtaacaatgattaacctgaaaacagtttttctttctggtatttagtttttagtttgttattttgatgatggacttattggataacatttacttatgcgatcaggtcatttgaatttccattctcttgccgttttattctataaaacagagaacaaaagggcttataattatcttcctcagaaagtagtttctccccctgttttttcaagcttttgtttattagttgtgtaatgttgttaaggcattagtgttacataatccatactctttatctcctatcaatgcaatccaaatatataaaaattgtttttttcaagtgaaattttttaagcgaatttgacagtgcttattgattatcgatatttctcctcttcgattctttgtggcttgttaaataaggcatgcagaaaagagggttccttaaaacattacttcttgacgtgtgaaaagtagcttgggagttggtttattttgcaataacattgaagacgtttggcataggaggtttgatggtttgtcctttgatttttttttaaatttttttctttttaaatttggatcaggaagagcttctttaaaaatctagattttgttgttatttatcatttacaagaaaaggatttgaagttcatttgtcatatttaagaaaagaattgtaaaaatcctatctttctatgccccttgtttcaatggtagaaaatgtagtgctctctgagtaattatgttaacgaatcttgttccagcagtatcatttaatcagcatttctgaattcacttattgtttggttgaggtgtgtggttcatggagatctttttgttatgcttggttttgaagacaaccaaaccataaatccatttcgtgtttgcagtgtttagaaggatagtgcgaacaaa

SEQ ID NO: 54850 - DNA, 1055 bp, Populus trichocarpa
  Intron number 1 from transcript POPTR_0018s03660.2 (locus POPTR_0018s03660) derived from phytozome v7.0 (chr-ID scaf fold_18; pos 3124461 to 3125515)
tttttcatttcggtcccaaagtttctgtctttaaggtctgaatacttcaaattttctttttctttttgatcacttattttcctgtctttttctttttttgggttttagtggttttaagttttggttgagcagctgggttttttttatatttttagtggggggggggggggggggagcatggttctggattttgtgggtttttttttgctttattattgatgattttgatgaatattagttgaatgtttttttgttattgtttttctgttgacccttgattttgaattgattaatttgcttctctatttgtttatattcattttttgttgagcaaaattagggtgaatgatctgattggttttgggggttttgattgttagtggaattgtaaggattgtttgattgattgatcagctttgatggttatttaagttagattctagtacatgctcttgctactaagtattaattgtttgattcaatggaattttcctgagagttttgagacatttacagcgaatgaagattccgatagtttctcatgtgtgatagatagatcaatttgttgtaatgataacaatagaggtgtattcacccgtgtggtttcttgaattttagtttcttgtctaaagggtatactgcaggatggaattaagttgacttggttcaattggtacttataaaatatttagaaaatataaggctgaagtgggaatttgttgctggaaatggaagggtaagtgatggaggtgacaactcatttgccttatttgcatacaataatattgtcatcaaaggatcaaagcaacttgtgactttcaggttttccttgatatgtctccacttaactccattgactatttattcttcaatgcgcagctttctgcattttcatgctgtcctagattagggtttttccatctgtttttttctgttggagcttagctagcactatacttggtagttgctatattcgccttttttcagtttgtttgctgtctatgtttctgagttttcttaatgtccttgtagattgtcgtttggaggtgttgatc

SEQ ID NO: 54851 - DNA, 455 bp, Populus trichocarpa
  Intron number 1 from transcript POPTR_0013s04320.1 (locus POPTR_0013s04320) derived from phytozome v7.0 (chr-ID scaf fold_13; pos 2928945 to 2929399 reverse strand)
cgtttctaggagattttcagctgagcaagctctatgtaagctcttaattattatttttattttgttttgtttttgaattttggtaatctttttatggatttaaagtgggatttctttttattaatgagtttatgagttaaaatactgaaatagtttttataatattgcaacagttttcctgtttataaacagggtttaagacccttttttagcataatcctctgtttttatgtctgtgaatcattactcttgctctgatgcttttgataaattgagatttgttttcttttgatcacagaattaatcagctaaaatgctgagaagagttttgcttttaacaattttctcatgaatcaaacagaaaattagccttttcttgagtttgaatcactgttttgatgtatgtgaatcattagtctcactctgttgtgttctgtttgaaatgcagggcaccc

SEQ ID NO: 54852 - DNA, 256 bp, Populus trichocarpa
  Intron number 3 from transcript POPTR_0003s01710.1 (locus POPTR_0003s01710) derived from phytozome v7.0 (chr-ID scaf fold_3; pos 1561745 to 1562000)
gaccgtatcaagggtcttgcttacctcctttcaaggtttctttcttttcttgcttacgttttttctaatctaatcttgccaacattgattattagaaagatttagtactgttcgtaaagattatggtttgtttttttgaatgagagatagggaacgggaattgcattgaaccctttagtcacttgtcatgcttctaggtttattgtcatttgccagggtagagtaaatttgaaaaacccagaccacaacttctggc

SEQ ID NO: 54853 - DNA, 649 bp, Populus trichocarpa
  Intron number 1 from transcript POPTR_0018s11600.1 (locus POPTR_0018s11600) derived from phytozome v7.0 (chr-ID scaf fold_18; pos 12268440 to 12269088 reverse strand)
cccctaaggtttttttttctgccccctccctctcatttttcctctaaaagaatttaccccaacgttttgtccctttgttttttgtggttagatcttgacgattgttgatttcttatgatggttttatattcgtaaagttaatcacagatttgcgtgtgttctgggggttgaattttgtagattcttctttaatttttattaatgggttttcgttttcaaagccagctatagatttgaatgtcttttatgagtaacaataattgaaactggcgtgtggttttgcttttgtatgcataaagttgcggttttgattgattatcaagggttaaaattctaattgaacttttttttttgttgacggggttttagtttttgctttcaaaccttattggtgttgtatttccgtctgtgatttatggcttgaagttgtgctaaatgtatgtgacctcattgatttagttttatatggatcagcattgtactgggatgtctttttgttatgtttaccttctgaaatgtgctttgataaaatattaattggtgaagtttgtgattatttgcattttgactgttgtctattgggcactgaagaggtggatgatgtatttctgtaatctttgacagattgctatctctgcaaaagagattg

SEQ ID NO: 54854 - DNA, 691 bp, Populus trichocarpa
  Intron number 2 from transcript POPTR_0019s04530.1 (locus POPTR_0019s04530) derived from phytozome v7.0 (chr-ID scaf fold_19; pos 4709093 to 4709783)
ggtgagcaatccaacttctctctatagttattgcaaaattgagttaatgttaattggaacatcatcttttttccaacttatggaatctattatgcaactgaaaattgataatgttgtgaagttgactggaattgtctcactttgttcttcttgtagttattcctgttgcattccagcaggaagcttcctgaactaggcatagaattctctaactttttgaagcactgtaggcatgaattcttgaattttgaaccgttatagtccttttggtgttcagtggactttttacgtacaagtgtttgttcctccataaaggacctcgactggagttaattggtgttcttccttatgaacttggaccatatgattgtatctcagttaatattttgatttggtttgtttcgacacttttctaacctacttcttaatctattaattttctgccacacctgagtgtatcatatgacttgttttgctctagtgattactttgatcgctgccaaacaagttttgctggtgctcctagtagcgtagatattgttgatatgcttatattagaagccataactacttatgttaaattaaattcatattctccatcagtgcataagaagcatgttttatatttcagttatacaaggataagcaagcaagagttattatactatttctgtgatgcaggaaccattca

SEQ ID NO: 54855 - DNA, 398 bp, Populus trichocarpa
  Intron number 3 from transcript POPTR_0006s05540.1 (locus POPTR_0006s05540) derived from phytozome v7.0 (chr-ID scaf fold_6; pos 3917116 to 3917513)
gagtccatcgggtgaacatatcttgaacatttttggttagtctttgctttctatattctgaagagtcagtttggtatcatttctacgttttgattttgtttttaagaactagaaaataaaaataggaaacttgtattttttttgtgatttttttcataaaaaacaaaatagttttaaaagacttgaatagccgttgttgattttgctttaagaaaacaatccaaaacatacaagttttatattctatttctaaacaataaatgatatagaacaaaccctagtcagtccactgtgaattccaattgttttcatagaaaactaaaacataaagaatttgctttgcatatgtttgtatcgaatcagagacggaagaggaagcagcaattgctttcgaccta

SEQ ID NO: 54856 - DNA, 547 bp, Populus trichocarpa
  Intron number 1 from transcript POPTR_0006s14840.1 (locus POPTR_0006s14840) derived from phytozome v7.0 (chr-ID scaf fold_6; pos 12266816 to 12267362)
gttgccagacccaaacgcgggtctggtattggttgagtttgatatggctgtcaaatccaaggcatttgagtttgactaacaaagagttgagtagaggttaaaaattaatccattttattagatttaataacactattaaaacatcttcatactcttaaatttttttatattttaaaaaaattaatattgaccgttgtggaccatatgctaatatactattaataactaaatgctctcatatttgctaatattaccaccattgtatatgctgatatatacgaaatgtaacatactttttaagtgcgtgtgtgtgtgtatgccgacatgcatttgtttttaattctatttatttaaaggggtgtttttgttaactttattaaaattactggaaccaaaatcaaaaggctcgtacgtcctttttttttttttttattatttttaattaatttctccacttgtattcttcatttatttatctttttggtgaaaattctttctatttatattctgaggtctctctggttctgtgtgggcgtgtcgggggcag

SEQ ID NO: 54857 - DNA, 745 bp, Populus trichocarpa
  Intron number 3 from transcript POPTR_0006s14840.1 (locus POPTR_0006s14840) derived from phytozome v7.0 (chr-ID scaf fold_6; pos 12267692 to 12268436)
ctggttggttcattgctttctttcaatatcgcctttcttttaaagtctttattctctttgtttttgtttgattgtctcttgaagttgtttgagggcttgctgaatgaaaattagcacagtagtgtgtctattgctagtgttttatttgctgtttttgatttaatcttgaaagaattgatagataaaatcatgtgatgaccataacgaacatcatgtagttttttcaagttttagcaaattgattaaaacaagtaggaacttgggaagacgggcatcttgtaatacaggatatgataaggttttcgctacaggtgccatagtggtcaaggcaactggatttccacactttgattcacatcgttttgaagggtgcagcaccagtccttaacccccttcctttcctttgctttataaaggagaaatgaaggtgtgcgatgtcgagactctatgaaaaagcttagaatccgcaatcttttcaatcctgtggctaagaaaacttggaatatgataacatattgaacagaggattttatgtatgttacgtaaagttgagctgttcaaacgtctccctctagcgtttaagaaacatctgaaactagcctttgataacatgttaaaatgaacagttttaatgtttcaactgtacaattacgaaatcttagcatttgataatacattatactaaaaggtttatatggttgttaaatcaggttgagctgtttaaacatccccatcttttgctatt

SEQ ID NO: 54858 - DNA, 502 bp, Populus trichocarpa
  Intron number 1 from transcript POPTR_0003s15140.1 (locus POPTR_0003s15140) derived from phytozome v7.0 (chr-ID scaf fold_3; pos 15003575 to 15004076)
ctcaaagatgtatgtttccttttcttttccttttccttttttatttttatcctgatctgatctgttttcggtcagttgatgtctgcatgcctcttgaattcatttatttgttaaatctggaagataacatcattttgtagctaggaggagaggctttttcaatgagtctaggattatacctgcttaaggaacatgcatcatcaatcttaagaaacccagatcatgaatttacttaattttactatattcagatcatccatagtcaggaaattagacaatctttctttctttttagttagtttgaatgtgatcccgtagatcatgaattattcaagaagatcgttagcttgcacggattcagatcattaatttcggttactgttgctgatgttattgataatgatcataaattcaaagaaataaagaatcttgattttgtttatgtttgtgtattttgatggaaaattgcagcgggaaagcttccgaagcataacaacgtgtc

SEQ ID NO: 54859 - DNA, 1020 bp, Populus trichocarpa
  Intron number 1 from transcript POPTR_0006s03180.1 (locus POPTR_0006s03180) derived from phytozome v7.0 (chr-ID scaf fold_6; pos 2003321 to 2004340 reverse strand)
actgcactaatcctggtaagcttttcttagtccctatttcttcgacttgtttttttggaattagtatctgtttttcctgaggatttattcttttagccataataacaaaattattacaactagcccataatccaggttgtttgttttttaaattaagacaaaaattaaactgggtaggtcgacaactcagattttatcgaattaactctcaccaagtttttttaaaatccagtccaggctagattttgattcaacccatctagccaacggattagttggatccacacgactggattcattacaaattacaatcacataattatgacatttatatttgctctctgctttatcagttcttatagttccattaatcgaacatctttgtaaggttgttgaaaagtcacacaagtagttgtggattttcatcatctatttttactgtcaaacattttgtccgattagaacgatctatacatatttgtataaacaagtactaaatttttgctggctttatttgacttggtatcatgtttttccttgtattagttatggttgggtcggcagaacgcagaggatgttctttccatgtcaaatttttgtcgtgtaattagtctgactgagatctattcttattgcaaatgtgcccatataaggccttgagctgctatgtttcatgcttttaattatttgtttgttagcattttaatattcttcaactctcacccacttccactttgtgcttcgtttcacgttttgctgatcccaaaaacaaaaaataggccttttgttttgggctttgttgttgtcgtcggcgtcttaaatgttaatcagcttgaagtttttcttttttcatggttaccggctctggtttgaaaaatgatctagctcgttgggtcctggggttaattcgttgatcaccgagttaacatggagcaattatttttattaaaactgcgttgttgttgttttttactttgctatactattttctaaaagaaaaacattgacctgcagaaaaca

SEQ ID NO: 54860 - DNA, 504 bp, Populus trichocarpa
  Intron number 3 from transcript POPTR_0013s06900.1 (locus POPTR_0013s06900) derived from phytozome v7.0 (chr-ID scaf fold_13; pos 5589055 to 5589558)
tacggggaaatcccatagctatttttttcattcaggtatatgaggattaatctgccctttctgctttggatcaccgtggtatcataatatcatataatagcttcattttctcttttgattcagctcatttttgttatctagtaagtagtgcctttttgaactatctagtcccgtgccagccactgatttcttctataaggcatgggaaataaatattgttttactgataacaaacttaacaataagggatttaagtatttttccttaaaacttttgtaattttcagatattcgagattttgtattggttgatattaatggtcttgactcactttcagttaatttcatttctcacccttttctgaattgcttaatgtaactatcgagtgcagttcattactagctctgcaattactgtttgatctctgtttattcgtgctaaagttgttattgctgttgctgccttgcagctgattggggtttcggtggctggtcttgaaccgga

SEQ ID NO: 54861 - DNA, 853 bp, Populus trichocarpa
  Intron number 1 from transcript POPTR_0013s03780.2 (locus POPTR_0013s03780) derived from phytozome v7.0 (chr-ID scaf fold_13; pos 2439915 to 2440767)
aaatcaaggtctttcggtgatgttcaaatggtatgatggattttttcaagcccagcggcggggctttggatccatgtttgtaccctcttctttatatataaatattctctcatggatggcttgttatttttctttaatttacagcattataattgtttgatctatgaaaataattacagttttttgctttttttttttctcgttgatgacatgggaacatttttcggccgaaattcagaaaataaattgttttaacaaataaaggaaaccacccaaatccaatgtatatgaaggcccaagcgcgttgtcacaggaaaaatctcatgaggtgtccccaccaaactcaaccactggccctacaaatccaacgtcccgcgtttgtaaccttttacacctttgcccttgcttccctactgaattaccaaatcatcatatcaataaaattgttggaaaaaaacaatggtttatgataattaaatcgtatttttcttgtgctgcatgtcaaataggtcataataaaattaatttaaaacacaatggtaaatagatcgtaacaaaattaatttaaaaaaaatattgaaaatatattgtgagatcctaaaaagtcgtcctttttctgcaggtaaaattatctttgaaacaaaaattttctttttatgtatttcaaaaaaaaaaattcatcaaggaactaattaattaatcatcgcaagaacagtggcagtttcggaattgtaggaaaatcaaagtgcaaaagaagaccttagaaagtctttagcagttccttactacctacgacattcctagagtttttaaccaagaccagttcattcagactattcagttccttgttcct

SEQ ID NO: 54862 - DNA, 507 bp, Populus trichocarpa
  Intron number 2 from transcript POPTR_0006s02470.1 (locus POPTR_0006s02470) derived from phytozome v7.0 (chr-ID scaf fold_6; pos 1615979 to 1616485)
gcacctgttgcaaaagacacaatctggggctcttggtaaattgacgtttttgtattcctttgttttgacataatttgtacaggacgttatttgtttacgcttagtggaggtgggttttaagctaggaatgtttttattgcaatttcttaaggctctagtggggtatgtagatagagtgtttgctgcgccacaaatgattcttgatggacagatgcaaagatatctaattttcatgagaagttttgtaaatgggttttgataaaagatggtttagattggtatgatgattattgttagtttttgttttgtggtggatcgtattgtaagagaaattcttgagctgaaaccatgtattgcaatcatgcatgcaattttgtttctaggaaatgaaaagtagtgtttattgaatttagattcactgtttgcactgtcttttgattgttatttttatggtgttgattctgcttcttcttgttcctcacagtttccatcattgggctagtcaca

SEQ ID NO: 54863 - DNA, 454 bp, Populus trichocarpa
  Intron number 1 from transcript POPTR_0006s25700.2 (locus POPTR_0006s25700) derived from phytozome v7.0 (chr-ID scaf fold_6; pos 24073514 to 24073967)
gactggtaagctcctttcaatcgcttctatttcttttcaacttccaattcactgaatccaaacaaagctgattgtatttttttaatcactagttgattaatacggtagctgctaatcaatttccgggttaattagattttttttaattagtattaagtttgatttaatggttaataatgtatataggcatcaaaagtacatagggaaagtgaagcacgctgtgttccaaacacaaaaaacgggtcgaaagcgtgttcttgtttctactgaagagaatgctattgcttctcttgatctccggcatggcgagatttgtaagtttcgtttaatggatttgtccaatgcattctttaatgttaagtttcgctgctggagtagttttttctttttaattattattattattacttgaagggatgctgattagtgtttttttttttggcagtttggaggc

SEQ ID NO: 54864 - DNA, 272 bp, Populus trichocarpa
  Intron number 1 from transcript POPTR_0018s04590.1 (locus POPTR_0018s04590) derived from phytozome v7.0 (chr-ID scaf fold_18; pos 3862011 to 3862282)
ggaaagttaatattttttgtaatgataataattagttaatataacaatgtcataattcaaaattatgtttatcttttcagtgtgtttcctttatgctagtatatttcaatgtgttttgttttcttcctttcatgttggcttatttaatgaaaaagattgtgttataataattatgtcttattatgaacttattatatatttatttcttttcatgaagaaaatatggattcacatcatgttctaaataatcccaatatcagttattgagatat

SEQ ID NO: 54865 - DNA, 778 bp, Populus trichocarpa
  Intron number 1 from transcript POPTR_0018s09700.2 (locus POPTR_0018s09700) derived from phytozome v7.0 (chr-ID scaf fold_18; pos 10707288 to 10708065)
ttgtgctccgcgggccacgtggctcttctgctgaggtattgctttataacaacagcaatgacatacgccacctctttctttcatttttatgatctgatagatttttgtttttatttttgtgtaacatttttacttttattatcttttttatgatctggaaattgtaattttattctgaaagatttaattcaagattgaatggctttaattttcatgaccaatctctgtgattcttgttcatcttgattttgtatttggcgaaggaaggtatgaattttggagaaacacttgaattctttcagcatttcttgtatataataaaaatgcattagggtttataatgattgattgtgctcaaatttagggaaaaaaagcttagaaataccccacttttaatcatcagaactgtgctttttctcttttgataaagttagacgtcatagtgattagggcgtcttttgcatgttcttcaatccgagaaaactgaagtaaatgcaatctaacctgtttctaggaatttagattggattgggtactttccatctaaaagaaatatgttggtttttttttttattttattgttgcacaaataaggagaaagattcaaagatgattgaactgtgcttaatcattgttgtgccaaaatgttgtgttgtatcatcgagttgtggccaagaaaaactagcattcaagtttatgtaaattagataatggtgcatgccaaggtatttatttacatcaatgataatatttttcttgtttctcgaggtgtatttgt

SEQ ID NO: 54866 - DNA, 768 bp, Populus trichocarpa
  Intron number 2 from transcript POPTR_0018s09700.2 (locus POPTR_0018s09700) derived from phytozome v7.0 (chr-ID scaf fold_18; pos 10708102 to 10708869)
gagaggagttgctttttgtcagcagtaaggtgctatgcaacattctgtttatttgcaccattcctctttgttgtgcacatttcgttttggaatttcatgaaattgtttcccattatcaatccttaagcaaatatttataatatatgtttttttgtaatatttgtaaccagactgtaaattagatgcaaagaatgatgaagaaataattagtacgcagttttcatcctttaaactagaacacaagtggcaccctggaggaatcctgtactcaaactatcacttgtaaaggtatagttaaaaaataaaaaaaaggatagggaaatataaattggttcacagaatgttagggtatctaaatgcttctttcacattcaccccgctgtgctgaactccattgttttttgagaaaataaaacctctaatctatataaagtgaatgtagtgccttaacttcagattgctaaaaatcattggagattcagttacgggatttggttctccttgcactgtagtgaatacatttaatatcttgccatcttttgttggcctggatttttgtatttgcttatgctgttatcacaatactgctatgttctttgtcaccactttgcttagatgatgggagaagggttaattgacttgtgacatctttcctgagtttactttgatgtttgtcctctcctctgaaatactgtatgaaaactaaactgactataatcaatgtctcgtgcaggcaatattcaaacctccaaaggcaattcgaggcgg

SEQ ID NO: 54867 - DNA, 665 bp, Populus trichocarpa
  Intron number 1 from transcript POPTR_0019s15420.1 (locus POPTR_0019s15420) derived from phytozome v7.0 (chr-ID scaf fold_19; pos 15974791 to 15975455 reverse strand)
caatgtacaaatatacaatgcaagctttaaggattagaaatatacaaataattggataacttgaggtttgtgacaacccaacctttaaagaattattcaaagctgaaaaagatcaaatctttaggcaataaatccctaaacaactttagatatgtctaacgggatcttaaggactcttgaataattttgtttcatagtttccattatgtgtatgatatttggaaatcccaacaaacacaacctacttttcttcaaaaccttaaagaacattactaattttaaatggataccagaatgccagaaagattttgaagaactcaaaatagacctctcctcctctaaaatatatcacatccaagagaacatgaaagccttttcctttaccttagggtctccgatcaggagcataattcagtactggttaaagaaaaacaaaggcatacaacatcctatttactacttgagttgaactcttcttgatgctgagaccatttatttgaaagcggaaaaggtagttttagttctagtgagttcctagaggaagttcaaaccctacttctaagctcaccaaatcatagtactaacagatcaaccttttgacaaatactccactagctagacatgtccgaacactggcagtagagtagaacatccctctaaaattc

SEQ ID NO: 54868 - DNA, 687 bp, Populus trichocarpa
  Intron number 1 from transcript POPTR_0003s10100.1 (locus POPTR_0003s10100) derived from phytozome v7.0 (chr-ID scaf fold_3; pos 11212840 to 11213526 reverse strand)
aagatatctgtaagtcaaaactatgcatatttgctcggaatttttattttttttttgtttgacgaacagtttgttttcaatctttggtttcgtacttcgcatctaactttcaaaatcaagatccttttggagactttttccgtggtatgaatatgatccgataccttgtagatcgcagctagactttcaattcactctcttcatttctttctttccatggcaagagagcctcgtcaatagatagatagatgaaggtaatcgagagtctctcttctctcttctttcgttctcgaattctccaccacatatatataatatgaaaaaggaaacggcagttggaataaaagatcaagttgttcattgttgtttgcttatctccttggtatttgcttcaaatctgaatatagtgttttactccatgagtaatttttctttgtttttcaaccaataatgaagaaaaaaaagcaagtggtggaccaattgagtcgatttaaagaaaaacagtgtatcttcctctcaaattctttcttgttctttgactttgcaattcagtattattgttcataacaagtttctgaactgattttcttccctcaaatagaatgttttctagataagcgatttttggattaaaaatatatatatttctgatttatcatgtgtactgtccaaattcaacagtgctgg

SEQ ID NO: 54869 - DNA, 473 bp, Populus trichocarpa
  Intron number 1 from transcript POPTR_0003s20840.1 (locus POPTR_0003s20840) derived from phytozome v7.0 (chr-ID scaf fold_3; pos 19236274 to 19236746 reverse strand)
gctaccctttcatcttctgctgaccgtatccttatctgctcgcctgccctcttctttttctcttcacttgttgctcttcttttttgctcttgatctgccggttttgtgttttgctgtgtttcttaggctctcttgcagggatttcattgaacttgagatgggttttgagttttttcttaactatacttgtactaatagctatgcctttgttaggttgatttgcttgacctatatgtggcataagtgaattgaatttcacactatgaaatttgttttgtggattatgcttgatcttctggttgaagcttgcttcttgatgaattgcttgctctatttttttttccagtaataatattcaaagttgggattttttcctgttgtttgtttcaatattatgattccggatttatggaattcctttacttttaatctccatagaaacttcagatttgctgcagaagttatccttggac

SEQ ID NO: 54870 - DNA, 702 bp, Populus trichocarpa
  Intron number 2 from transcript POPTR_0003s10310.1 (locus POPTR_0003s10310) derived from phytozome v7.0 (chr-ID scaf fold_3; pos 11342716 to 11343417 reverse strand)
tgatagaatctgtcatcttattgtgcttaacaaattgacgagaacactggaaaattatgaatcacgccaacatgcagtgcaaaagctgttctacagttttttaccagtagacacattctgaagtttgttctgaaattgcaggttactttgtttttctctgtagaaaatcagtcttttcaaatgagatactcttcaaaacatccatttacctaatatttatatacttcattgtttctctacgagattgctattttttcacatgagaaatccttggatgtactccattttcctcatttatactcatttgaatattctttattcctaacttcctgcttgttcctcctgtatgcttaatgcgtactatggatgtaagcctgtatcttttcttttaaatagtttttatagcagaaaggtaagagtgtaaatggaaccgaaaggaatacggaaaggaaacaaaccatgaggatgatcaaagttgactcaagtttctgctgttaattgtgagattaacaatagagatgggaagctctagggtaacaatccttgatgtttgctgaaatcatttttcatatttgcaagatcaccgtgatcacaatgctgaaattttaagttattgcatgtataaagaaacagtataaagtagtcagtgtaactacataaacttcagcaccgatccatttattatccgctttgggccttatc

SEQ ID NO: 54871 - DNA, 661 bp, Populus trichocarpa
  Intron number 2 from transcript POPTR_0006s20680.1 (locus POPTR_0006s20680) derived from phytozome v7.0 (chr-ID scaf fold_6; pos 19682216 to 19682876)
tccctggtacctctctttctttctttcctttttttccccttgttgatttgaagttgaagtttgcttttttgtttgattaggtgatgtgtgtttgatttgtttgtgtttttagcttacttatggcatttagtgttgtaattttggtggtggtgggggggggggggagtaatttctgatatgtttctcttagagcattttattttttaactgagttgtcttttagagtaaagttggggttttatgtgggtttcttattattttgctgattggttggtaggtaagagggaatctgtaggttatggtggtatttagggcttagggttttggtatatttttttgttggtttttgttgatttatttcatagaaaatttggaaattttatctttttgtaattgctcctaggatttcaatggaattggttgtgaggtttactatgttgattgacagaggccaattgtacatggtgatggtaaatttcctgagtggtgtatttttcaatttcttcttttccctcatttgtaaaggtcctggatgttggtagtttggattcttaatgatgtgatgatgtgacattgttataagatgcatggagtggtctttattgaccagcttctttttgttgtagtttgtacggttttggggttggaagaaggcaaggaa

SEQ ID NO: 54872 - DNA, 950 bp, Populus trichocarpa
  Intron number 2 from transcript POPTR_0018s09340.1 (locus POPTR_0018s09340) derived from phytozome v7.0 (chr-ID scaf fold_18; pos 10215533 to 10216482)
ccactagtagtaaccgagtaagaattcttctattttatccactaaggtcaatcaattctctttgatttcttgctttgagaaactgtgagtttgtctcataaatttactagctgacaaaacttcagattctgatgcttgcttaagaggaagcaactgaaatgttcatgcattaagggaaacgtggacttttctggtcattgacgggactgttagagttaatgtagttacctgtagctgaaagtgtcaccatcactcgtataagcaagcatgttgatcaatgcaacatgcattctgtacttgttgctaaaagaaccaacatgaaattgagttctcctggattgcaatggccatggtgttgttgtgtttctgctcagagctttttcgttgaatttgaatatgcatatctttcagtttggatctacgataaaatagtttgattttgtggtcagaatagtcatactccaccaatcaaagagtgggcggtgtggatgctgcgaggtgatctttttcatatcttcctttatggtctgatttaatgtaaaataagctcttctattctcctggaatgctaataactcatctaaaaaaaaataaaaaataggtaatgttagtagctatcctgaagcaattgaatttagaaaaacatcatatttctgaaacccatacagtccagctagagcagcaacaaaagtcttcaacaattaggagggaccctactctaattaagcattttggattgatttcctatattttctggtttatcattctatagggtttcaaagccctgtttagttttattttctttcttgtattctctttttggaggatgtgttattcttcttcttgtattcttctttattctttgtttcaaaaaagaaaaagtctgttccttaccataatagtttcacttttcaggaggttcctgatttttcgtcgcaattcacttctat

SEQ ID NO: 54873 - DNA, 607 bp, Populus trichocarpa
  Intron number 1 from transcript POPTR_0006s03500.1 (locus POPTR_0006s03500) derived from phytozome v7.0 (chr-ID scaf fold_6; pos 2264469 to 2265075)
aaaggcctgacagtcatatcaaacgctaggttttctctcctctccttcttaatgccttcatttttatggttgtggagatgaattcttaattaattacttgacctcttattgatgggttgctcatgtatgtgagcctaatattcagataacatttctttacaaggtcatggaatcatttacatggacatgcgaacatatagaatatagcctgggaaattcatccaattcacacctctaacttcctgaagaatgttttattccatgcatgaggcagaaaacatcaattaaagaaactgcaagtctcagttatcttggagcaaatttataaattattggaagtagctttatatattgatatcgattgctggatttggcattcatttagatagttcagattggtgtcatagtgcctaatcgactataaaatgtcaattattaaactaaaacaaggttggccctgtgcgatccatagtttgactatattttccttgtcaatcttttagctcctccataagttttggattcttttctttgggggacctttgacttgattcctttgtcaatttttgtagtatattgcttttctgcccatcctcctgaatcttac

SEQ ID NO: 54874 - DNA, 939 bp, Populus trichocarpa
  Intron number 2 from transcript POPTR_0014s08450.1 (locus POPTR_0014s08450) derived from phytozome v7.0 (chr-ID scaf fold_14; pos 6282412 to 6283350 reverse strand)
aaaatgtaagtttgttttcctttgttattctcacgattcttagctcaactgaagttaatatctcatgattttgtagctcagctgaagttgttgctcatgatttcgtagctaaactctgttataatgctaacaatcctcattaactcaaaaagatatacacaagtaagtccgttaatgtatgtgatatgcacaatgggttttgtctgctcacagaactcatattgcattgcatcctttctacttgtgtattccgcttgtcttgtgacagggaagagtgtaaagaaatctcttggtgaggggaaatatttagttgctaagtaaacacgagtaaattaatagagtctgacaggaggctgagctgccacatggggactggaaaattttaacaagaaaaatcctaccctgtgacaatgctactaagaacctgagttctgttgcaattgagattctcttatagggagtgggatttttgttaaattgttccgtgtttaatttattcttattatcgagtgggtgattccttgataaattaaacttttaagttttgctttcacaaagcatgatgatcttggtgattcagaggccagttgctgggtcgactagagttaccttggattcatttgattcacaactttcttttgtattcgacgttgtcctttagacatgtgctctggtagctcaggattgactagattatcatgattgctaagttccttaacttatttgttcgacttctttttatcctcatttgagactagtttgtcaacactctgtaattacgtgcatagaagcatacacagcatgggtgcttgctgacgttgtaccgcagaacctgtctaatttattgtttctatggtgtttttttttgtatctatggtcgtgctaatcatttactgctcctcaggttattgctatcaaagacatcatccggcctcccca

SEQ ID NO: 54875 - DNA, 374 bp, Populus trichocarpa
  Intron number 1 from transcript POPTR_0006s19800.1 (locus POPTR_0006s19800) derived from phytozome v7.0 (chr-ID scaf fold_6; pos 18823842 to 18824215)
ccaagctctagccaaccctcttcttccactgacccgtatgttttaagtttcatctacctttttcttttgtttatgatgtaattgttagtttgtttataagtaaacagaaaaacccctaacttttgtaatatatgaggttttttgtttttttttttttgaagaatgattgttgttacttgtttggtttattcttatgagcttatttgctttaactgtgttttgaaagaatcgagaatggattcgttgcactatatactcgttgagtttttggttactgggttttgatttagtgtattcactgtgcggtaaccaaacttgtttatgcataaataattataggaaaagtggtaagaaagatttttcgactgcgattt

SEQ ID NO: 54876 - DNA, 748 bp, Populus trichocarpa
  Intron number 2 from transcript POPTR_0006s06030.1 (locus POPTR_0006s06030) derived from phytozome v7.0 (chr-ID scaf fold_6; pos 4287277 to 4288024 reverse strand)
ttgaatttcattcagaagagtctccttttcatcccgtaagtaagctttggattattgggatctatttacttccggcctgcatatctctttgtattatgctagtctgttcattgtcatggtcatcaacaagcatgcttgctatattttgaaaatgcctccttaacagtgctctcgccacatgttcttgtactgcttaaaattacaatacgatggtggcctgggacttggggacggtgttgcactgtacttttggcttgaaaaaatgaaaatctatcattagcacaagtcttggaagatgaatggttctcaaaaagtttgtatgcaaagagagctggtattatttgattgtcaatgagagtttcctagttcattttctgcaacagatgggtattgggtattgagggattgaaaagtgacatgattgcaagatgcttaactctgttgtaatattaaatagctgcaggttctgtctgtgtgtaatctattttaagccagtttcttaatgctcagaccaggactgatgtatttactttcttcctttttagcctctccacatcccatgaggctgttatttttttttttttgtgaaaagcatttccctgaagcaacctaatgaaaatttattgggtttctgatgtgatagaccataatttgtttccgttctagttccttctatgttgaatatggtttctttatcttaattgcagaaaaaaagtgtgtttttgttttaatccaacattcttgcagg

SEQ ID NO: 54877 - DNA, 644 bp, Populus trichocarpa
  Intron number 1 from transcript POPTR_0006s06030.1 (locus POPTR_0006s06030) derived from phytozome v7.0 (chr-ID scaf fold_6; pos 4288032 to 4288675 reverse strand)
caggtaatcaaagatttctgctttcatgtagatttgttagctttatctatataagattaacgggtctttgagattttattgtttttgacatgggtttttcttgtttctatttggttctcaatttgagggtgagtttttgaagaacttggtttgttatgattaatcaatgggtaatgagtttcgtgagctgttttattgttcatgcaatgttttttatttaaagcttattatgttttttgtgttgaagacgttggagtgtttttttaatggtttctttttttggggagagaattcagaggggttagtaatagtttgaaatatgctaggaagctgaattggcgtgaccttttttattgtttagttgttttagatcaaagtatgcggtgcttaactgtgtgtgagcctttgaaaagaacaaatagatgaacaactaagtggtgggctgtaatgtaaccattactgatgttggcagtgatcaatcatttacaaaggtggtttgtgttttacatgttaagcaagtcagtcaaatcaatgttattaagttgtatccttctcctgtttgttttgttttgtattttgtatgtgctttgactttctactaattaacaggtggtacgttcagtcgtagttctcgtgaaccaaaa

SEQ ID NO: 54878 - DNA, 1036 bp, Populus trichocarpa
  Intron number 2 from transcript POPTR_0006s05060.1 (locus POPTR_0006s05060) derived from phytozome v7.0 (chr-ID scaf fold_6; pos 3518446 to 3519481 reverse strand)
agaagctgattgcagatatttttcctcgaaaccaggttagcattctttacattgttttcttttaacatgtttgtttcacatttggtatgtttattcataataacaagttgctggtgataatttattgtttctgacctatcattgcatttgttggataatctatatgaagacaggtttaaagcatagcaatttcagaaaataagctagttatactttataatgtggcattccaatttggagtgtgcattttctttttcccctcttttagctgattgtctcccagtgacagaaaatgttcatctttctgtagttagtattgcattgattggaatcataccatgtcaatgtcgcagctgccagcacatggtcgcttaatatgaaaaaaagaaggtttaaaagacaagcatcagccttgcatcatgtcactggttgcaaataatgtatcatttttgataaaatcttaacataacaataagatgtacaagaacttggaatatgcaagtaagattttaccatccaactcctagacggtctgtgttttctttaggtattagaaactagtacttttaagcattcacaaacagatttcattaagatcttgtaccaatgatcctggagcaattttgtgacttggggcgatattgaatcccctaatggctttgaaggtaaccatttaagactcaacatcttgttttcttttcctctgccaccacaaatcccttttagaaaacctcgttcttctttttttctgttgttgaattttttttattccacaccatcagtcatctttctttctagtaaattgaaactgaattttttttgctgtcccttttgatttacttccccagtcaagcacttcctgcataaagatgatgaatcttaagccgctacagtttctggctcttctttgaaaatatggtttcatcaagcaagcataatgcatatgaaatttttcatttgttcaacagtggggtgattcgatgtttaatgtcatttgtttgttaacgctacatttaatgacaggaggaaggaccta

SEQ ID NO: 54879 - DNA, 567 bp, Populus trichocarpa
  Intron number 1 from transcript POPTR_0006s10460.1 (locus POPTR_0006s10460) derived from phytozome v7.0 (chr-ID scaf fold_6; pos 7816624 to 7817190)
gttacttgcctcttgatctttacgtttataaagttagtttttttttttcttgagttatgtccctttttggttttggattaggtagctcaaaggatgtgagcttgtctcagtgatgcttaattgtgttgtgtagttgatgctttacaagaaaacatgggcttacttttttacttgttggttttgatattgtgggatataaatgtttctttgttttgtagaatggagtgaaagttgattaactgttctcattctgttggttttgacgattgctaaccttagcccatgtttttgtttgttttgtgtaagatcttgtgattgatttttgttacgttggattttgaaataatggcatttcctgatttattacacctttatgcctttgttcacttgttttccttctttttcttcttgttgttgttgttgttttattctgtgtatgatatgacgatagcattgatatgtttctagaatttttagatgtttttcttcttactctggcttaactgatctctgcttgtatgatgcattacaggctagagggttgaagaaacacttgaagaggctcaa

SEQ ID NO: 54880 - DNA, 493 bp, Populus trichocarpa
  Intron number 3 from transcript POPTR_0006s10460.1 (locus POPTR_0006s10460) derived from phytozome v7.0 (chr-ID scaf fold_6; pos 7817524 to 7818016)
ggtacgtgtaattctttctttacccctacaagttttatgattttttcatgtgcatcttctagatgggagtgggatttttttttccaatgctttggtattggttccagatgggtaagtagaagtttttatcattattatctctggatgaaagtaatggatgaacttgctattattttgatttttcacctgttggtgggcatggtatgattgagaaacagcaaaataggtggtggcaagtgatcatatatgtgatataggttataagagcccttctctgccagaagttaatgcttgttttaagttgtcactatgtgtaatgagatctttttcctgccagcttactgtcatgcttgattggaagcgtaaattatgtgtgataatctattagagtttctgcactttttcacttatatgatcatttccttttcattgttctccctcaaattctataatttcattcaggctgctcactttgttttgctttctgttaaag

SEQ ID NO: 54881 - DNA, 747 bp, Populus trichocarpa
  Intron number 1 from transcript POPTR_0019s13030.1 (locus POPTR_0019s13030) derived from phytozome v7.0 (chr-ID scaf fold_19; pos 14034075 to 14034821)
gagcttagggaattctgagtaagctcttgacatatatcccatgagaaaattttcgttcatttgttgaggatttgaaatttaatttaaaattattgagaatgatgagctctgtgaatccatatttattttatttgattttgaaaactttattttgtaaaaactttatttttttattttaaattaatttttagtgtttttaaattattttaatatgtttatattaaaaataattttggaaaaaaaatattatttgtagtgaaacgctggtataaatattaaggcttgtattgatatatattaagtggttgtttgtttttatgtttcaaaatgttttttttaattattctttttattttaaatatttttttagttttttaagattattttgatgtatttatataaaaaataatatatttttgaaaaatattttttgatccttacggtaaattttacaaggacagacaatgttttcttttgtcgttaaataatattctatttatttgaggtgaaaaggatgatatgagaaaacatcttatgcatttgcagttaattgattacatgtagtttccagttttcaacgtacgcttgattaatatagaatgtcatgtatttttacattagcactatccttgccaataatgatgctcaattactcatacgtgcctgctactaaaaagtgagtatgtttctatgtgttcttcttatttgccaggctggagtttgaatttattaagaatatcgttggag

SEQ ID NO: 54882 - DNA, 570 bp, Populus trichocarpa
  Intron number 1 from transcript POPTR_0014s16670.1 (locus POPTR_0014s16670) derived from phytozome v7.0 (chr-ID scaf fold_14; pos 12767262 to 12767831)
atctctcgaaaagtcctctgcgtctcgtattgcaggtataaccttcttctttcttttattactctcctctctaataaattctctctataatgttttgttttttaaaaacacatatttcatttacctctgtttattcatcctatgatccgtccatccatctgtctgttttcttagcttttcttttctctataatttctcagtgaacaaacagcctttgatgtgagtatctttcgtgttttaagtaattaaagcatacgcgtctcgttgggaaactatataataataataataataataataataataataataataataatccaatgtctcatgctttttctacgattgatttcggatttccttaactgatcaactgactacttcattaatatcaactgtttaaaaggcggatcatctaaagcttgtgtcgttttttttttaattttttttatacagctcatttatgtttatgtttatgcttatgcttaccataattatttttcttttaatcggaatcaaaggctaattgggtttgtaatctcttgcagattttcatttccaatattctca

SEQ ID NO: 54883 - DNA, 759 bp, Populus trichocarpa
  Intron number 2 from transcript POPTR_0006s00780.1 (locus POPTR_0006s00780) derived from phytozome v7.0 (chr-ID scaf fold_6; pos 412347 to 413105 reverse strand)
tggccttcaaaccttgctcaggtttctctgttcaggtctgtgttttttttttttttttaacttggccctacattttataaaatatctgtttggttgatgtgaaaatacagaacacagaaaatttttaaagcctttaagctttaacttttagaatcccataccttgattgattttgacaatagaagtataaattttatgctctttcttgacaactggtaaatctttgaagggatggtgatagttgatctattcttcaacatatcgaaagactgcttgtggttcaaattccattaccgaagatgcacacgacagaatatttctaaaaatacaaatagaggctgagaaaaggacattgcaaaatccccatctagttgtggtgttaagagaaatgaactcaaacaatttgcttttgtttgaataatggagttgactatgactataattctagttgcattactttagcttgttggtatatgattcaagtgcattttcactgtttgagaatctgttctgtatgtgttcttgccttaggggacaaagtgcatgatgctactgacgttggattgttgttgacagagaatgaaatgccttcttaatttgttttgtttgtcatgaatttgcatatgggatcatattcctgaaggtcattggtgaagaaaaagtattctaagtgaaaacattcatatgtgattagctcgtaggtaacttttggcaataatgttgtcatatgctaacaatcttgtctctacagagcactgc

SEQ ID NO: 54884 - DNA, 902 bp, Populus trichocarpa
  Intron number 2 from transcript POPTR_0013s12480.2 (locus POPTR_0013s12480) derived from phytozome v7.0 (chr-ID scaf fold_13; pos 13137696 to 13138597 reverse strand)
caaactagatcctgacggcaaaaaatttgacagtatctatgattttaattctcccttaattctctttttatagcttcttgttcaatgcttatgcattagctagaagaatcaaccaaggctaaaaattttcaacttgagttcatttccctttccgatttctgaaaaatcttcaccttgccccaaaattgtgatttttcttgtactggattgcatatttactttattatatccatgctcttgtcaagtgtggtgtgaaacactttttttgaatgattctgatgaatgatcctattattgtaatagatccattgtccttaagttcttcaagtcgaatgttccaacttctgtatttatttttatgctttcctcgtcaaaaccaaagaattcaagtggagatatcatgtctgttttaagtggtaatccccaattatgagataatcatatctatgcttcatccagttcccgtgttagaaagacttccttgtgacaacagtatgcttttgcttagaaaattctgtgctgtgttgtgcataattatttggttgggaacttgatgtggttgatctgagtttattacaaaatactgcctggtagtgtggtctgttgttctgggacgttggaacgttttctcttaacttttatcatgcaatgaattatgttttgagtgacatgctttcagtttaaggagatactcctacacactgcaatcttgttatcgaactgataaaaatttggccatgatctagctactcttccatctttgctcttctgaatgaatcttgttgatagcatgtttggaaaatatgttttgacttcttttgagttaaccggaggcgcagatttgtaacttcttttatttggatgcagtgacccgcattgaagcacatagtcagaactgtgat

SEQ ID NO: 54885 - DNA, 592 bp, Populus trichocarpa
  Intron number 1 from transcript POPTR_0014s04340.1 (locus POPTR_0014s04340) derived from phytozome v7.0 (chr-ID scaf fold_14; pos 3402005 to 3402596 reverse strand)
gaaggtatctctctctttctcaatctctagccccttttacgtttttgtttctctcttgatggtcatggttacagagatgagaccctttttatctatattcgtttcagtttaattcagtccgtatgttataggggtgaaaaatatataaaaaaaaattgatttttacgtctagaaattcttatttttaaaacaaaatagtgggtgatgtatcgtatcgaatgagaatgatattcagtattggattctcgtttctgcgtaactgagcataggcttattaatagagctgctgtttgtttcaatcataaatttgacgtttcattgattacatggtggctgttcttttcattttcttagtttttcttagtatccaaacagtgtataataaaattgattcggtgatgtttaatgggcatgatttttttatatcatttaatttcgggatgtttatgacagtaaaactcactcttttctgtatgaaagtagatttttaaaaaaaaattataatttgttgagtaatgatcaaaagattttattttattttttgatctttttgttcttcaaactttcttctacttttaaccagttacagata

SEQ ID NO: 54886 - DNA, 552 bp, Populus trichocarpa
  Intron number 2 from transcript POPTR_0013s15330.1 (locus POPTR_0013s15330) derived from phytozome v7.0 (chr-ID scaf fold_13; pos 15356532 to 15357083 reverse strand)
gtgctagctgcgcaaggagttctcgacttcatttggtaagatgcattgcatttctagtttgttgtatgcatcgtgtttgaatattagtttgaatgggttaaacaactgcttttggttttcaaccgttactggtcattctgtcaaaagcatgagtcattcatagaggcttattagatcacacgctacacgtgtgaaaataggttgcaagcattatggctttgaagactttggttgtcctggtgattctccagaaatggtttcaggattgttgcctgttccttttatacaatttggtgacagacatgattaatgtgttcttgtgaaagagctgaatatatatggaagcttatccttaagcattatagttaaacaatattgcatgtgcctatagatcctcatgcttgatttttattttgatgacttaaaattatggttgttgtacataggatgatgtatgctgttggcattttaaatgatctgactgtaagacagtatgcttttaatggctctagtcacatggtctttcattagtttctttatttgctcatgcag

SEQ ID NO: 54887 - DNA, 939 bp, Populus trichocarpa
  Intron number 4 from transcript POPTR_0003s19400.1 (locus POPTR_0003s19400) derived from phytozome v7.0 (chr-ID scaf fold_3; pos 18133032 to 18133970)
ttgccaaacataccggccctggtctactttcagtatccatttttcttggtatataaatgtgtcccatcttgttcttactattgggtgatttttgcttttcttgttgttattagaagataatgcatttatatggcttgtatcatttcttcgattctcctcttagatttttctctgctaatcatcacaaataatttgacgctttaataacttgtgagatcctgtggtgtataaccagtaagtctgttttggaaacttagttttattgacttgaaattttgtcgttaagatagataagatatggggttcgttcttttttgagttagtagtagttttttttaacttcctttggataattcttgtgtataggaggtggagtttcttaatgggtatctcgcttagcatatttctgttttactgctaaaagaatagatggaatggcttgatttaaatctaatcgtaggggaaaaacttaagaggggatagtacccatgtgattcgactacttgttgccagcttcataaaaactcacaagattaaagtccttactagagttgtatattgcttagaatccatgaggtcaatatgagtgaaggtgtaagagccaagaatacctctgagatgtctcaaatttcgttatgatgcttttcatattatgtttatttggagaacaccatgggtagaaatgctaactttgatggggtaacttgaagaatcatgaccggattttttgttgtgacaaggatttcatcttcgtcagtgtccagtctctaaatgacttcatcctcaaattctctgaacacaagctcccaaaatatctatgcaagcctttgtagatttattatcaactatcattaccatttgaatttgaagattgtgttttatcactaacaacgaagacctcattgttccatttgcaggcaaatagtgggccaaatacca

SEQ ID NO: 54888 - DNA, 899 bp, Populus trichocarpa
  Intron number 1 from transcript POPTR_0013s12740.1 (locus POPTR_0013s12740) derived from phytozome v7.0 (chr-ID scaf fold_13; pos 13425800 to 13426698 reverse strand)
aaggctcagatttgggacactgctggccaagaaaggtctaatctttttttcttaatctcaaatcatggatctttctagttttctaacacgggttttgtcttgttttgtgaaatctgcatttgagtttatcagatctgtatgcctttaagcggtttatgctataaagttttgttttttctttcttttctgatttgggtttttgataccttagtgtttttgcatattgaagatggtaaagggtgttagtagattgccataatgtgcattttattggttacttgagatcaagttcgttatgatatgctctggttgtagttgtagagtagttaatggccttcttaatctgtaaaattttttttgtttttgcatgaatgtaaaatgtacgttatggaaaataagatcaaaatgggattcccatgccaaaaatgttaggagctgaaatgacctgaattggtctatttggagatttggaatttgctgaggaagggatcaaaggtttgcacctttgataacaaatagctgtttttgagttgctgctagttttcatttttggatttgtaaaagactaaagtgagaacaagaaatatgatagtccagtgttttcatctgatctctgtgtttattttctatcttcattttgcatccaccctaggagttaaaaacgtcatttccaccctaggagataaaaacatcattttgagagatggagtgtgatccaatctgctcttgtatgagttgtgttgacacaagtgtgtgtgtgtgtgtgtgtgtgtgtgtgtgtgtgtgtgtgtgtgtgtgtgttatttccactcattatataataaggcagttagttttcattgtattttgtattcattgatacagataccgtgcaattactagtgcatattatcgaggag

SEQ ID NO: 54889 - DNA, 672 bp, Populus trichocarpa
  Intron number 1 from transcript POPTR_0014s02920.1 (locus POPTR_0014s02920) derived from phytozome v7.0 (chr-ID scaf fold_14; pos 2411797 to 2412468 reverse strand)
aaaaagcgcgaacctttcttctccaattgcaacaggtaacctctctaacataatctataacatctgactttttattgtcttctactttaagcatttcatggtaaccaaatttacttaggcaatcttaaagtctttgaattctctactttgtcgatcgaagttggaaagataatacccacttcagtttaattgtttccctttcaattgttttgttacagtgtcatgtaatgttggaaaaaaactgaaaatttgagaattgtagactgcatagagatttttttttgtatagcttaaacatgatatgtgtggggagggttttttttatcccacttttggtggtcagaagagaatttgaaatattatttgtgtaattttaggaacatgaatatcaagaaatgtattttcaggaccaccttttcatgacatcctttggaatatcttttttatttttttaatttcagatatttccaatgaagtaataattctgatatttctggttttgtatagtgacgcattgaatgccactcagttgatggaatgatatgaagagtgaggaatttttggatgatgaatatatcagttgatggatatattgttgttgatatgccaaaagtttagcttgtaaaattcttgttttttttaatcagcatatagattgcggaggctcgctga

SEQ ID NO: 54890 - DNA, 765 bp, Populus trichocarpa
  Intron number 1 from transcript POPTR_0019s06110.1 (locus POPTR_0019s06110) derived from phytozome v7.0 (chr-ID scaf fold_19; pos 6616294 to 6617058 reverse strand)
aacatacaggaaaaccctctgaccccatttggtgttttacacacctgaacaagatcttggagattcatcccagctccctgataatttttggcaattgaaataacaagccgaatgttggattttatcattttgtctttgcaaaggatagcatagtttaagcgcttcctcaaagttatctgatcaactctagctgcagcagcccattgtgcaaaggtgggcttgcctccaaatcgctccttaagctcctcctcgatcctttcaagttttagtaggtcctgaagaacattaacaaaatatgagacatcacaaatctgattgacatgcaatatataagtgcagcaataaccttacttatctctgattatacaaaatacaaatttcaacacttaaatctccacttccttgcaaatggtcacataatagtaatcttattttgttatgaatgaagtaacagtttttccagttacccatagcataaaaactcgaggaagacatgttggaagcttcctattctagaaacctaatgcgctggaagacattgtcaggtacacaaaatagcaagggaaaatttttctttttcaatttcaaacaaccaactaacaaaattagctcccatttatagtgcatctaggataatttacctcccttctaccaggtcctttaaagctttagcagatattagtttacactgcactcttgggtgaaaaagctcaaaacatgggagaacaaattgctgaattaccaggaatattcattcctgtaaaa

SEQ ID NO: 54891 - DNA, 875 bp, Populus trichocarpa
  Intron number 1 from transcript POPTR_0006s16300.1 (locus POPTR_0006s16300) derived from phytozome v7.0 (chr-ID scaf fold_6; pos 14220566 to 14221440)
ttggcgatcgtgttttttcagagaaggtaacatggcttcctttcctttactttctttcctttaatgatgttaatgaggttttgtgggagtaaatttaatgctgaactgaggcacatctcagtcacggagattgcaagttgatgcaaaggtttattgtcttgatgtctcataagacgaagtttttttctgaataatgagggattttgaccattgggcgtttagcctagtggtaattagcaagtacgagggaacaactttagattccaatttattgtggagagcactgaaattttttgggaggctatcaaagtttatacaagatgttgcatgaatgagtaaagtgtgttagtgtcaatcctggaagactatgtaggaacttattttgcctttgtttgtgctacaatcagaatgagttttcttcacgttacatttagtgaatggcacaacaatttttctccggaaagtgagaaggatgctggacatatgatgcctgaggtttgaaacgaatggtataggaagaactgaacatagactgatcaaatagatagaccttttttttttctactttctagatttccagatttaaaaaggtttgccatactgagaattagttcagacataccataaaacccaaagaactgaactgaattgcataacatttgccaattatcaaattttatgaatgcctaatggttgttcctctgattttggaaagaatggtccgtgcttcctggccctatgagccatgttcgggaatttcatgtttttgcttgaatctcgatgtgaaaatgttgaaatgactaattttcttatgaagtatcatgcataagatatgttacgtgaaattgtcaggtttcatactatttcagaaagcc

SEQ ID NO: 54892 - DNA, 438 bp, Populus trichocarpa
  Intron number 1 from transcript POPTR_0019s06100.1 (locus POPTR_0019s06100) derived from phytozome v7.0 (chr-ID scaf fold_19; pos 6615169 to 6615606)
ggacatatataggggggattggtccacccaaagaggtgagacttgcattatttgggatatcactgcaactacggtccactaagttagtagcaagctccctagatactttgtttgtcatattgccaatcaaaccacagtcaaaaaaatttctaccattcatccagggcctcgatttttagtttctattagtttcatttctttttcaagctattcatgatcttcttcttctttttattttttttgttgatcccctgctatctaagttacaaaattgtttggcctaattattgaacaatctttttgtatatatgtagtttctgcagtctgtttgtttctgatataatctgttaatgatctgtataaatggtgatgtaatctattttctactttgatatttgtgcagccactctttggaactagtttagccactgaaacact

SEQ ID NO: 54893 - DNA, 732 bp, Populus trichocarpa
  Intron number 2 from transcript POPTR_0018s14250.1 (locus POPTR_0018s14250) derived from phytozome v7.0 (chr-ID scaf fold_18; pos 14505153 to 14505884 reverse strand)
cattgcctgtttgcaaatctgttacatctactcctgtaagttgttgttgtcgtcttgtttttgtttttctattctttgatttaattgtttttgcgtaatgtgacttgttttttgtttgaattgttagaaatgtgtgttatttttgtttggtttgtaatgtatttgctttggaatgttcactggaaggaaatggatcttggttttgtttgttttgttgtttagtggatggtattgattattggatttttagtgttgggtttggcttgcatctgtggggatgagaattgaatccaattcggtgatttacttctttttttttgaacaagtattcagtgatttacatgaatggtagttatgtggtgttaattcaattctgtgattttgccagtgtgtgtggtgtaattgatgaggatcattcgggagggtttatgagctaaaagcttcttcttttttccattaaaaattttgttgggatttgaagataaatgatagcaagtatgtgtctgatgcattatagcatgcatggtgattgtatgtttaaacgaattcaatggtgctgctatgtcatgcatttttagtcttatgaggttgtgtttgtggtgaaatagccttattgatgcttatgttcaaagaaaagcttcactgtatccttaatttgcccaggtctgtggttgtttgctaggattatagatgctgaaatagtttgtttattcaatgcgttagggtttattc

SEQ ID NO: 54894 - DNA, 432 bp, Populus trichocarpa
  Intron number 2 from transcript POPTR_0006s18410.1 (locus POPTR_0006s18410) derived from phytozome v7.0 (chr-ID scaf fold_6; pos 16824859 to 16825290 reverse strand)
cccctttttttgataaaaagaaggtgggaaataaaacaaatgctcttattcttttgaatactattttttttaagttgtatttggatgggatgcatagagaagaaaatgcatgtaaccaaagttatataatatgaattaattggcgccatttccaactggagtatgatagatggaactgtagcttgagtccctattttttaggaaagactcacattgtctaatttttacttggagaaagtgacgagcgcacaaatttaatagtgtctctggggatgctgctttccaatgtcagttaatcttgttgtctacttggtattttgattcaatcacacttttcaaggtcctaataagagggacatttgattgagatgctaatttcttacctttgttttgataatgtttcttgttgtttgacagaatttactacatagt

SEQ ID NO: 54895 - DNA, 605 bp, Populus trichocarpa
  Intron number 1 from transcript POPTR_0006s18410.1 (locus POPTR_0006s18410) derived from phytozome v7.0 (chr-ID scaf fold_6; pos 16825359 to 16825963 reverse strand)
gataataataataataaggtaaacccaagccttttcttacactgtagtgttctcttcattttcttttgaataatctgatatttagtgattttactgttttccctaaccaaactgacgagtattactgtcactctttgctagctcagttttctaagtgattgttcttgaataggtctatgttttacgtcttgtagttatctataacaggtcttcctaacaagctttatgtgataatctggttatctaaaaagggtttagtttgtgatgtatatgcgtgtgtgtgttcatttttggttatcttttttcttttcttatcctgggttttttgtgttttttttcttttatttttttggttttttgttatgggcttttcaccacattatataaggcacataatttcaactgggatggtgggagttcctaaaggaacaggaaacggattttttaagggcttgtgcatgtattcttactttcagattagtcgtattatagaattgaatcattttaacctttttcattgctctgtgttcttttcctgatttgctttattttatctcctgtgaaaaataaattctcattcctggtctcccgtttctgttgcagcc

SEQ ID NO: 54896 - DNA, 785 bp, Populus trichocarpa
  Intron number 1 from transcript POPTR_0006s18260.1 (locus POPTR_0006s18260) derived from phytozome v7.0 (chr-ID scaf fold_6; pos 16564135 to 16564919 reverse strand)
agtgatctccttcttgctggtgaccttaactggaagtacgtatacgttatcattttgacttcttatattgccatgttttaatgtcattgactaaatgtacatgtcctttaaccaggactccatgtataaatggttttttttattatgaaactctatttctttcagcagtaagcaatcctattaaaaacttatagtggtatagtttcttatcgcctcatcagttatatgggtcttgtatatttacgtacagagatagatctgattaatatgattattttaactacacaaatttattgatataacaatcaacatagagatcgttattgacacatatatgtttatatgatgattgatatactgatattggtagatttgttgatatatttatcttgatcatgctgatgttgatggatctagctattaatttatttatattgactatcacatcaacatatatatatatatatatatatatatatatatatatatatatatatatatatatatatatgataaatcgataaatatatatttatgttaatgaccacattagtatatctatgaacacgtacggatccacttcatgttccgtaatgaaattgtagcatcgcaaacccataacctatagaggtctttttcttttttttttttctttttcgctcgataaattattggttatgcctgtattgtaaatggttatgctacactatttcttgctcttaatttgtcactctgggtgtgaatatatagagactttgtgcgtgtggcgaagaggattaggatac

SEQ ID NO: 54897 - DNA, 551 bp, Populus trichocarpa
  Intron number 1 from transcript POPTR_0003s16680.1 (locus POPTR_0003s16680) derived from phytozome v7.0 (chr-ID scaf fold_3; pos 16226651 to 16227201)
attcattcgtttgcatttatcagtaagatctctcttcttcttcttcttgaaccaccaatccccttgtttcaggttctttcttaatcttctggtggtattgtatcgttgtcgtggtttcattttgcttcttctgttttctttggagtataaaacattcatccagcctttatcagatgaatattaacttttgatcacctttattgctttgcatatcagtaatattaatgtttttttaggctgttctagttatcttaacctcttacgttgaataattttccgattatagtttaggatgctgctcatatagtagttgtacagtcccgtctttcgttttctgttctttttcatttttaaataaatcccaatggccagtctctttagttttgatgactttctgtttagatattcattcaatttctgatttctgtttgacatttcatgctaattctgctcaacacattttaactgctaccattttttgcatgccctgttcttattctgaaccatccaaacttttaatacagagaaatttataccaagttaaaggagaa

SEQ ID NO: 54898 - DNA, 400 bp, Populus trichocarpa
  Intron number 1 from transcript POPTR_0006s19640.1 (locus POPTR_0006s19640) derived from phytozome v7.0 (chr-ID scaf fold_6; pos 18681912 to 18682311)
tagtatcggttatttttacgaacaagcattgcgaggtccgtgcaattttcttttcttaccttcattttttctaaacctctgcttggttcctaagaaactgaaaggaaagaaaagcataataataaaaacagccttgatcaattcttaagttttacagtaccgcttgattttattttttttctaatcaagaatttattttcttgacgagtttcttgatttccaagttcattgtggctcaaatgatggaagtttgcttccctttctttgattttcttgggaaccaaacaccatcacacctcaaaaaaaccctactctcttctccgattgaagcccacaaatttttatgctttaatcttctcttccagcttcctatccaaacgctgatccgcgacaaattccc

SEQ ID NO: 54899 - DNA, 626 bp, Populus trichocarpa
  Intron number 2 from transcript POPTR_0014s15690.1 (locus POPTR_0014s15690) derived from phytozome v7.0 (chr-ID scaf fold_14; pos 11712420 to 11713045)
catatttggcatttttgaaggtaagatttgtgatgacatccgttcaagtgctcatcttgttttctcatgttatcttggttagtaaaggactgaagctaataattagttaacttggctaactataggtctagcttgcctattcatgactattatctgatgttcttccttgaaatctctgaacactggactgtttttctcctgtacctctatgttctacatttctcattttgttactattggctaatttgctttttatatgcaagaaactatgttattttgagtaaccaatgacttaattttaatgagtaaaatgaattacctatctcctttttcttgcctgttctgcctcagcctctcattccattagttcattctttagtcgtcaagaagaaatgtgagaggttgcccagatgagtttgaattccctgtaaatcttagtgcaccaaattattctgtcattttgaactgtaattttccttttcttttatcagtgatgaaatacattatttgagtagccgacagcatgtgtttatccacaagtaataccggttggttttattttgtgctatgctctgcctcaccatctcctttgttactcattgtaggttactgtggtgaatcctgcc

SEQ ID NO: 54900 - DNA, 988 bp, Populus trichocarpa
  Intron number 1 from transcript POPTR_0003s01100.1 (locus POPTR_0003s01100) derived from phytozome v7.0 (chr-ID scaf fold_3; pos 964380 to 965367 reverse strand)
tctctcccgctctcgccttcgacgcagatcacagggtaaacggaagatttgatagctcaaaccctatttgctctgttttgtttcgttttgactcaggtgtactgagtcagtcgtaactcgcagatctcgttattcaggttttatgtgtctcgttcccgaatttgactcagatctgttagtttttgcgtcgttttcgtgtgaaaggtgcttagattattgaattattgaaaaattggatctgattatgacctgatcttttttggattatattttagggaattatttggctggtttttcattaggaaacaatttttgtaacttatttagatttgatacctaaaaacattaacgtaacaatgggtttaaatgttaggttgattggtgttcatggatcgagttttgatttcgcaaatggcagtttatgcattacattgtgaaaggtgcttcgtgtgtatagtgtttgttggtgagatttgatgtggaaattcactctgggttcaatatgttatgttttatggataggatgaacttagttaggagccatcgagtttggatttgttgaggaaagattttgggaacaaatgttagctgtagtggacttgtgacttggaatgctgaagtggtttgcatcttttgtttgctttaaaacttttgttttcatatatgtttgcggggaatgagaataattgactatgcatgattttggatgatgagagaatactggaaagagtgactggccatatagagagggacacacattccattttcggtagtaaactgacgtttcttctcttaatcttttaataataagatgtgatttctgacttggtgtgagctaacttggctcaatcttttctcatatgatccggggtcaaaatgattttcctgatggttttatttaaatgaaatgaattctttagtcaaccacttactatgcttttaatttaccccccaattgcaattttgttttttaaattatgtctgcagt

SEQ ID NO: 54901 - DNA, 848 bp, Populus trichocarpa
  Intron number 4 from transcript POPTR_0006s20960.4 (locus POPTR_0006s20960) derived from phytozome v7.0 (chr-ID scaf fold_6; pos 20015005 to 20015852 reverse strand)
tgtccacggtgccattttgtactagtaaagaccaggtaagaagaaacttttattttgttttatgtggcttttaaaagaagttaagcatttttgttggtcttcaatttgtttgctcttcaatgtgtttatttgccttaaattcttgctgaggcaaaaaaagaaggaatcaattgaaacttgtgtattgtgagaaggaaatggattttgtctttatgttctatttgaacctctatccaaaaagttcttggagagtttcaactttcaaatctaccctgatcctatcttgattcctacaccttgccacctcagctaacgaccgaaaggtggtcatttttcctagttaggcttttaacctagtctgatttatacttgcgacgatagatgacttgcttcatgtatttttcttggataatgagttcgtgttgaatataataataatgacctggtacttgcatatcctcagaaaatttccatacctcactttctacacatttgatgggtttgttacagcagagattgggaaattctgttttccaatatactaaagattgagatcttcatcgcagaattctctcatatacatagaagacccctgaatatgattcggagttttatctatattaggggcgttgtatgtcatggagatttctgcacatggccatctgttaaaaaaaaaagaagaagaaacaaaaggaatagaaagtttctctagtaatagcttctttagtaacactcctattcgattttctccaggcttgattcaatcttttttatgccattaagatcttcccttttgatttcactaaaatgaagtcttaatcacagtgggctggatttgcttgcctgtg

SEQ ID NO: 54902 - DNA, 416 bp, Populus trichocarpa
  Intron number 1 from transcript POPTR_0003s15230.1 (locus POPTR_0003s15230) derived from phytozome v7.0 (chr-ID scaf fold_3; pos 15084807 to 15085222 reverse strand)
accatactcctgccctgaggccagtaccataaatagtaagtatacatcatcgcttattgcttatcctctagtgtaaattttaacattggtgtatgcgcatgttcttcctttcttttcttttgtgttttggtatgtgtgttttgtttgtcctagatcgatgtaataagctaggttcctctaattgcaacatccatgagaggaaatcatctcaaattttgacggttggttctcaaaaaagtggccggttttctgtcagtaccgatgaattttgataaaagaggttcgggacatttccatgagtaatgaatctattaactcatgaattgtccacctctctttaagcccatgttatttcaatctctctttgattatacttgttagcacaaggtgaaagtcatattcctggaagatcacaa

SEQ ID NO: 54903 - DNA, 656 bp, Populus trichocarpa
  Intron number 2 from transcript POPTR_0014s05620.1 (locus POPTR_0014s05620) derived from phytozome v7.0 (chr-ID scaf fold_14; pos 4186218 to 4186873)
atgtctctgttgaaatcttggatgatttcccctcataccacaaaacaaatgagaaatcctcccgcaccatgtcctgagcctcagaagagaacgagaaccaattgtactagtaaatttgagaggacttcaaagttgcaaattcgtgctgaatccgttgcaactaagcaagatattccgttggaaaagtaaattcgcactaaaggtctgtaatttctacttgcacaatattttcttggaaaccaaataaagttctctcttcatatgttttatgcttttccatagcttacaatggctggtatttctcaactggaggttttaatcttgcagcaacgagagggaacagagtcttgcctagtcagaaaaaaaggttaaatggggttaaccgggtacaatcattgacagctgatgaaaaagctgctacttttgaaagagccagtgctgctttaaaacctgatagtccatttttcatggttgctatgcagccataatatgtttatcctggatgtagattggtaagcattcaattgaaactcttctagaccatgaaagtcatttttcatgttttaatattttttgtattagtccttttttagttattttcctttaatgtgctttctgtagcctataccaaaaagctttgctcagaaatatttcaa

SEQ ID NO: 54904 - DNA, 344 bp, Populus trichocarpa
  Intron number 1 from transcript POPTR_0006s20960.1 (locus POPTR_0006s20960) derived from phytozome v7.0 (chr-ID scaf fold_6; pos 20016661 to 20017004 reverse strand)
tttacctctctccaggtattctctctctgattcttgcttgtcaatttttttttcttgtttagtgcatttgattgattggattagctgtagttgcttagggtttcgttttgcgtttttatgaatcgtaaattattatttggttaaaataagtcttcaaattctcaattgtcttacagtattgtggagatgaaagaaaggaatagtagtagttcgacgctgagacgaattttagttaattgtgctgcccaggtttgttttgtttagaagatacaagtttgatttatagcacggttttggtttctttgatagaagtgaaggaagtgttcttttggtaggcaaaagaa

SEQ ID NO: 54905 - DNA, 827 bp, Populus trichocarpa
  Intron number 1 from transcript POPTR_0013s05060.1 (locus POPTR_0013s05060) derived from phytozome v7.0 (chr-ID scaf fold_13; pos 3577344 to 3578170)
ttgagttttttgccctggttagttgcatttttttggttagctcttttgtttgtttaaaacacatttgtaaagctcttttaacttttgatgggtgtgacgtacgtgttgctgtttttggttcttagagcgtgtttgacagtgtggttgcgagtgcttttcaaataactttttgtgccaaaatacatgccaatgatgtttttttattttttaaaaattatttttgacataagcacatcaaaacaatccaaaacatacaaaccatattaaattttaataaaaaaaaaaattcaaattttttgggaacgcagccacagctgcgttcccaaacgtgcccttaatgctgtaggtaaaaccaggtttgagtgcagtagcggagccagaaaatttgtaacgagggagtaaattactaataaatatttgatattatatattatataaacatgtgttatatatagagaaatcaatttaaaatacatgtactaactcacgtcaagcaaaattaatttaagaatatttttaaaatgaaaaaacttacattataattattcttttcgagttttcatattttaaaactgtttcataatgacttcttttttaatttcattaaagatattctttcttaatatatacaattaaacttttattcatctatttctaaatctttagagactagtgaaattattggcaacaattctttattaccttgttgttttatacaagtgggttaaatacaaatattaatatatatttttaattttttttattgtgtccctaattttttgagttgttcagtacttcatttttaatcactagtaagttgatcacca

SEQ ID NO: 54906 - DNA, 611 bp, Populus trichocarpa
  Intron number 1 from transcript POPTR_0014s13950.1 (locus POPTR_0014s13950) derived from phytozome v7.0 (chr-ID scaf fold_14; pos 10216015 to 10216625)
acgaacagggttctggcaacatctcacacccacaggtatgtctgtctgttgtattttttacatgtccgaggaatttggtttctttcctttcttttctgcaacttactgaagcctgtctcattgttaccagagaagcaataactgtatataaaggattcatttttcttgatttatttcatttatttcttcgtgagttcaatacataaccaaacagaaaccaaaaatctgatcaaaagaaatcaaattagcaaaaccctcccgcacacacacacacaaaaaaaccagactgatgcaggcaccgcactttttttttatttcttgataaactctgtttcagtaaagaacctggtttttttttttacttgtgttaaacaattgtggaagcaagtgcagatggttctataggtgtcattttaaggtatttttgtgcctttgcatttggttgagtgataatcaagtttttgtaaatgcctggaaagggaaggtgggtttgatctcaaaatcaattttagtctccagaaattccattaattaaggtttaaagttttcattcatcttgacggggtgttgttttgatctgaaggtggttcagtgcagcaagaatatagtac

SEQ ID NO: 54907 - DNA, 856 bp, Populus trichocarpa
  Intron number 2 from transcript POPTR_0019s09690.1 (locus POPTR_0019s09690) derived from phytozome v7.0 (chr-ID scaf fold_19; pos 11304911 to 11305766 reverse strand)
gttatacaggtatgcttcctatcaatttttcttgatgttcttagcgatctattaagttaaaagatgcgaagagagcaaggctttccatctgatggaaattaccataaaaaatggcccagtaatgtgccagagatgaaaaatggaattttttttaaagttgtttttctattaaataaaccaacaatcatattgagaaatgggcaagaaatggcagtggtggtggtagtagttgaagtgtttataactaccagctgtggggttggtggttgatttgtttataagtacctgctttctttgatcttgtgttactcatgtatgttgattccatagggtttgagactgtttggttggtaaactttgttctgatagggcattactctccactagattcatgttacaattcctctaactatatttgtttgaagtgtctatgtttataacttgatcttatacttcctacaaactgacatggtcttgtctatgcaattgtcccagcgtctgcaattaatctttcaatacttttttagccttttctttcccctaatattattatatgttgtcttaggaaagcttaaacatggtagttttttccccaaaatctgtaaagaaaggcacacattgttatcttaaattgccaatgttgccactcataggaagcttatgggacaataatattcatgttgaagtagaatttgttttcaattaggctctgcctttaattcttcttccttgaggtatctttggtataaattagtgatgttattccggatctgtgctatttcaaaattctttcatcttttagctgcattgttttcatagattcttacaagctaatcttttatttccttcaatttag

SEQ ID NO: 54908 - DNA, 562 bp, Populus trichocarpa
  Intron number 1 from transcript POPTR_0019s09690.1 (locus POPTR_0019s09690) derived from phytozome v7.0 (chr-ID scaf fold_19; pos 11305947 to 11306508 reverse strand)
cttttttattttttccgaaactcaattcaatacaggtgatttcttcattaccctttttaaataaattgattgtcatatcattttctctatattttgttgtttttagttttatttggggtgcttttatggaaatctgtttttttttaatgggatttgttgatttagtttagttatagccagagttgtttcactgtgtatgttgcttatgatccaagtgcttcttttgtttttgctttaccgctaagttgatttttttgcccgactgtttaatgatgaacccgctgtagaatatcaacttcattgcttaaggagtaactttctttttgccttttgagtgttttgtttgtttctgaagaaaacccatttgctcactttgttgaattaggagttgtcaatgtcctttttagctgaatttgcaagttaaatgaaagccctttataattctctgaatttggatttaaatcatacttgtttttttggattttgattgtggaaatgaagttaagtttttgtgctatttgttgcaggttaatttgtttttttcattaaaacttgaaagtta

SEQ ID NO: 54909 - DNA, 998 bp, Populus trichocarpa
  Intron number 1 from transcript POPTR_0006s24420.1 (locus POPTR_0006s24420) derived from phytozome v7.0 (chr-ID scaf fold_6; pos 23034661 to 23035658)
gcttggaggcgcctaatcactcaggtcacttcgattttcctcttctttactttaatcaaaggcttgtttccattgatttgtattattgtttcttttttttaattattattattgttattattaagtttgagattgttctttgattgacaaaaccctagtttttcttcttctgtttgctaattgattcgggcctgttaattatagggagttagagttattgaatctaattgcaatttgattattagaaactggtttccatgtgtaaaacaaatgggaagttctatgtcaaattttattagattgccgagggaagttgttgaataggggaaaaaatagggttttgaatttgtgatgatgtgctattctttattgaacaagcgcagtaaaaatatttgggtctggctcaaaagtctgtttcttagtttcaattgtgggattagaagcatagatttttttttgagaaaaatatctgtttcttatggtcataattgtaatcactttaaggaagtaaattgaatcctgagttcataatttttttaggtgcttgattgtgtgtcaattctcgcaccataactagtgataccatcaatagttttccagctgcttaattgattgcgtaactgcacagatattttctgattcaattttctatagaaacaatggtttatggtatatgcaaatgcttgtgtaactgcacagatatttgcatacggagccaagagcaacttatggcctgctaatttgttgggattagttgaattaagcatggcaatcctttgtcttattctgttaagttcttaaagctggtggctttctaaaaaatagtcgaaaaaaaatatacaaggaattagtatgtaaaatgtctaaaagaaagttgaaaaaaaaaaaactaggaattagtagtaaaatgtcatggtgattctctctcttgttttattgaatgctagattcatattgtgacaggtttcgaggcatcaatcagagttgggacaattcaa

SEQ ID NO: 54910 - DNA, 850 bp, Populus trichocarpa
  Intron number 1 from transcript POPTR_0403s00200.1 (locus POPTR_0403s00200) derived from phytozome v7.0 (chr-ID scaf fold_403; pos 11122 to 11971)
gaggaaatctagagcctcctgcttctcaggttaaggtacttgggttcttcatgcactagttttttctcctgttcatactcccttgtttcattatttttgttccaacaactaagaacgtttaaagctcccaaatcattgaaggtttcttaatttcagtgctacaaagctcacatggtatgcattaaaaataaaccttcgatcacctttgtaccctgaaatggtcagggttttcgcctttcccccacttactttgcaagggatgaagttcggttatagtttttttattttttattttttattactccatgtattccctattaaagtttggttgcagttctttttttctagatcaaaacaccaagttctataatactaggctgctagctgcttgtttgttttagtaccttctccttcttctagctaacttggggcaactgcatgatgcttgaggaagaactcttggctgtacatatacaatatctagttcagaaacccccaatatccatgatatatggaacattatgctataaaaccctgaaccgtgtattttactagaaaatctaatttggcttgtttggttagtagaagaaaccgagcaagcaactagttgctccaaacgatccactgtgataaaaagtttgagatgtcatgaaagtcagactcctgataaatttgatgttttgcatagtattgacttataccggtgtataatttatatatagaattcgatgttttgagatgctatgaaagttcttgctagcgagtatgtatagaattgttttgagaagttaattttattgctagtggtgactcttgttttatttgtcatgcgagcagaaaacttccacaa

SEQ ID NO: 54911 - DNA, 971 bp, Populus trichocarpa
  Intron number 2 from transcript POPTR_0014s13580.1 (locus POPTR_0014s13580) derived from phytozome v7.0 (chr-ID scaf fold_14; pos 9979556 to 9980526)
aggtatgtcgacttcattttgttacaattcatctccgttctttgacttaacattttttccatcactgaaaagtttatggggttcaatgctgctcaagcatgctatgacatatacataatacaatctactgtctttgtggccagctccatcataatatgcatttcactttggtacgagtttactgtggagatgagctgaactgattttaggttcacttgatgtaaagttctaggctgccatcaacctttaattttagcatggagattaatagacttagctttcttgtgatacacgccacttggagacatgaactcaaggaaatcacaattttatgtttccttgaatgcactgtgaattggctctgatgccaattgcagagaagtaaaaagtgttaacacacaaacactgatttatcgagtagaaatgaatgctggcattttaattttaattctcggaactgagctgccacactcaacacacacaaattgtggcccacacagcttgcaccatggttgccacacaacctagacaacccacacagacaagttgccgcacacagcttaacttacggtggcacttccctggatccttaattttactctacgtagtttctatttctttttccataccacaactacacgcatggttttcttttgttttacacagattggacacaaataaatgaggaccaacccatatttttatactagagttattgacccttaaaagtcctaaaccaactagtatggaactcctattcagacaattacattgtacaagtcctacttacatattgacttggattccaaatatcctagaactgctgggttcaatttccaacatcaactactgatttaatagcttcactttacatcttcactttacatcttcacatagcttagaaagctttaaagaatctggctaaattattcacagagagagaggcattccacgaacaagtgggaaggttc

SEQ ID NO: 54912 - DNA, 677 bp, Populus trichocarpa
  Intron number 1 from transcript POPTR_0071s00230.1 (locus POPTR_0071s00230) derived from phytozome v7.0 (chr-ID scaf fold_71; pos 74110 to 74786 reverse strand)
ggattaaaaaggactggagggtatgaaaaaaattaataacagaaactggagttggttggtctactgaacttgggaccatctcagcaactgatgaatggtggcaatcaaaaattcaagttagtttgctgatttgcaatagcctcataattttttttgtcatgttgtattatttattcatctactatcattcctaattacatctagctgtcattgcacaagaaatgagaggagcaaagaagtttaggcatgtcggcatggagccctcgttgtgtgccaagtacgatatcatgtttactaacatagtggccacgggagaatatgcttggactccctcacaaggactcttatcagatgaagataatgtgactgctggaatgaggaatacaaccaatgaggatactaatatggaaaaaggaagtggcgactctgaagaggatgcaatccctgatttcacacgtgatgttagcaatatagttggtggaagcaatgtcgcacacagttgcagcaaccccagcagttcaaagagaaagggtgcacatcagactacacctcaattatgaaaaaagaaaaggggaactggaatgggagcagtactagttgcacgtatggataaacttgttgagactgtctccatgcctagagggatcacagctccttgtagagataaaaaaaggttg

SEQ ID NO: 54913 - DNA, 385 bp, Populus trichocarpa
  Intron number 2 from transcript POPTR_0019s09000.1 (locus POPTR_0019s09000) derived from phytozome v7.0 (chr-ID scaf fold_19; pos 10600513 to 10600897 reverse strand)
agcttgcagtaagtaaaacatgttttcactgttagccttaggtaacagagaacgaagatcaatgcacgacaaggttgtcaagaatttctctctacttttacacgaactctcattcacttttacaatttaaaagacataagtcaagacttatctacatctatatgcatggtgatgaaattatacttgagctgtaataattcgtcgatgcctatttgaaacacaaatatgaatttctgcatcaggttctcatatgtgatcaacacatagcaatatattaatttgtttgattcagttttttagtgtgttcaatagatagagattaatcacagaacatatttgataagtgaaatgtgctgtctgattggatgcaggaactgagtacttc

SEQ ID NO: 54914 - DNA, 273 bp, Populus trichocarpa
  Intron number 1 from transcript POPTR_0006s21560.1 (locus POPTR_0006s21560) derived from phytozome v7.0 (chr-ID scaf fold_6; pos 20602577 to 20602849 reverse strand)
attttgacaagctttacttggttccttataggtaacgttttcttctctctctctctctctgtttggttactgagaaaaccaaggaaaggaataaactttcggtgatttcttttttttttcttttttgtgttgaaagcaaagaagctgaattccttgaattcaaaccaaaaaaaagtaattatggtgttaaatgcagtgttttagttaaatcttgttgtgttttgtgctgattttttaggtggtggagtgaggtggaaactggtggtgaacaag

SEQ ID NO: 54915 - DNA, 622 bp, Populus trichocarpa
  Intron number 1 from transcript POPTR_0429s00200.1 (locus POPTR_0429s00200) derived from phytozome v7.0 (chr-ID scaf fold_429; pos 13372 to 13993 reverse strand)
ggctgctcctagcccccagggaaaaatttaaggtgggagagacagagagaggtagggatgctgccggcgccatcgctccagatttgaatgttctttccttattttgaagagttaataattttgttttgtttggaagttgattagtcgtacgagaaggagggtgatttgatattggcgatggagacacttttgatgaaattgttatggaacaagagtttttttataaaaaatatttaaaaatataatacagtttcatgagtcgtaattggcaattgcgacaagcaagtcttgaacgaaactgttcgtagttggctcaactacgacacacgaatcacgaataccatccgccatttttatttcgcatttgtcatctacaacttcattctaaatttatacttagagaccttttcttttcttctctcttttctctctgttttttttgctcactctctctccacacaaccacccacccctcccctcttaccattgttagcaacctttcgttctctctctctctctcccccccatcacgaaacacacccacaacaacacgagatcacctaactctctctagcctatatcattagctatccctctctctctttccaccgcgaatcatcca

SEQ ID NO: 54916 - DNA, 371 bp, Populus trichocarpa
  Intron number 5 from transcript POPTR_0018s11020.1 (locus POPTR_0018s11020) derived from phytozome v7.0 (chr-ID scaf fold_18; pos 11832525 to 11832895 reverse strand)
taaaaggtgagacagaagatcctcgttatgtgggttttcgaggtagctttcacgactgcttttatagctatctatgttttattactaaattgatgtttaaacagaagttcttgcagaatgaattcaaacagttgtgagtcaaaggtttgttgtgactaattgcatgatcttgcacattctagagatgggttattgtatttcttgtcatgccaatctgtgcttgtaaaagaaaacacaagtgatgagtgctgagtttatatagttctacgaggatgagagaaagactaattaatcaaatcgtatttgccattaattgccttgtcatttgtttatcttttccacaggactttgtgcattctctcctagtttgg

SEQ ID NO: 54917 - DNA, 444 bp, Populus trichocarpa
  Intron number 1 from transcript POPTR_0013s05240.1 (locus POPTR_0013s05240) derived from phytozome v7.0 (chr-ID scaf fold_13; pos 3728806 to 3729249)
tcaaacttctctctttctcagaacagaacagatccgtactgttgtttctctgtaagtcttgagttttctctatcattttcatttttcttcttagaaatgctctgtttgagtatttgtttcttgacaaaatgtgaaccaaatgacacaaaaatatgattatagtttgacagtaatgattatgagtactaacatataccacgtactactaatggaattgtttgatatgtttctctcagtgctctgatagactagatcaaatgcagttattttgctgttaaaccattatactgctgtgtacagaagttttattctttcctgtatcagaattttatattttcaactctggtcacaactggaatgcctttcaggaacagaaaaatggctataatatttcccattttcttgatgtgacttgtcatctaggcaagccttggcaaaagcaga

SEQ ID NO: 54918 - DNA, 786 bp, Populus trichocarpa
  Intron number 2 from transcript POPTR_0013s06180.1 (locus POPTR_0013s06180) derived from phytozome v7.0 (chr-ID scaf fold_13; pos 4587136 to 4587921 reverse strand)
gagaaactgtgagttatgatttgtgagggttgatgtataagtgttaatgtttgatatcaaagaaatatatattgttttatttgtttaatgtgcagattttactatgatttgattccttggatcggaatttagattctttgttttcggaacaaccgatatccatgttcagattttattaacttatgctatcttatcagagtgcattgggatttccaaaaggactttgtgtgtgtactttcatatgcagaatacattaaatgataagaagctacgacttcaaaacacatgcccgtgtgtattggataggtgctcgctagtaatagtcagcaaaatctcttcagataccaagtcttaattgcgcttataatggcatgggtttggagtgtgtggggttggaggagagagccacttgatttatgtagctcagccactggactgatagtgactgtttatcctagctaacaagaaagaaactgattaaatgtatttctgtttgaattgtttggcttagaagaatgaaccaagactggattccaattattaggtaaggcaaggagagtgtagtcacccatagcctcagacctccactactgttctgcagcctcaactgctttgtttcacatgtatttatatgtacgctgtggtacttcttctgcatgtgttattacttcataattgtcgtgttgaagttcagctggttgtcttcatgtatgacctcaggttcttatgcttatatctacattattgcttcttttctgtagattatctatacatctgtttgtttgg

SEQ ID NO: 54919 - DNA, 332 bp, Populus trichocarpa
  Intron number 1 from transcript POPTR_0013s06180.1 (locus POPTR_0013s06180) derived from phytozome v7.0 (chr-ID scaf fold_13; pos 4587980 to 4588311 reverse strand)
ctatttctgtcaaaatccccgtcggtgacagacatgtaagtttattttacttaattcaaatatttcttctgtttcgataattttagagtttagttttgaggcatttcttagtagaatttgctgtatttgtatcatttttttgttttggataatgaacagtatggttgaatttctatcagtaatggtaaaaggtattgaaatgcgaacttgtgtttgattttcagtttagttttgttgtcgttatcaattatttgagattgctcgttattgtgtttaaataatcgattatttatttaaatctgtgtattttatggctgttttttccgtagata

SEQ ID NO: 54920 - DNA, 1066 bp, Populus trichocarpa
  Intron number 2 from transcript POPTR_0013s13050.1 (locus POPTR_0013s13050) derived from phytozome v7.0 (chr-ID scaf fold_13; pos 13617527 to 13618592)
aaaggcacaaagctgatttttccatctccacaaaggtttttccttcctcctttttcgtacatatctcctgttgtgaatacagctttctcctcattttgcccccatttgggagtgcagcccaaacagaggtcggccaaaattcatttttttttcttaaaattattttttttctatgttttcaaatcgttttgatgtggtgatatcagaaatgaattttaaaaaatgaaaaacaatattattttgatgcatttatgagcaaaaaacattttgaaaagcaaccgctaccgcacttctaaaaacctccttctttgacatgtttaccaagtgtaatggatgatgaagacccaccaatattaaccagaattcttcgctcaagaaagccaaatccaaaaatatgttagtcattttcttggataatttggcattgtccttctctatcgagaccaatctcctttctctggaccccttcaaacttctgttttcttactgttcttgtctgtcctacagtctttggtccaagtgttcattctgcagtcagacaagccattctttgaaggtgcctagttaacactggctagaggttgaagttatgaccccaacttttctttaggaacgagacaattgtaaattggagcatggttactgaaaacatggaaggaagtgctttaggagaaaaggttttaatcaagcctatatgaaccgatgctattttgatgcactgaaatcgcttagatgatagcacacagtttacttttagtttaaggtatttgcaaggcagagaagttgggtgctttggcctttggtgatgaatgggtcttttattcaaagtaggtcaaaatcacccagaagcatattatctgtccttggcactggttcatttccagcaaacccagagtctcagagttctatacaatccttgtccttgttactaaatgtcaatcttctcctttagcaactgtattgctggtcattttgatgtactgtgctcgatttaatgtgcatattttcttgtatttgtgttttggcaacaggaacgaaaagagaagctcggggaacgaattgtagc

SEQ ID NO: 54921 - DNA, 1006 bp, Populus trichocarpa
  Intron number 1 from transcript POPTR_0006s04740.1 (locus POPTR_0006s04740) derived from phytozome v7.0 (chr-ID scaf fold_6; pos 3273668 to 3274673)
ctcaagtgcctcttccaactactagtatttttatagtattttgactctataattaatttttttttatgtggatgtataatcaattcaaatataaataatagatgtaagatgtgattggaaaaggaattgatattaatacgtggaaattagtatgagatattgtcatcattaaaaccccaaaaaacacagagatttatgtgatcctcaataagattttcatcgggctggacggtacctggccatcaaacgtgtgtgattgttgaattgatggtggagatgaagtgtttgaagaaaataagggggacccacaagcataatgaagggtggagatcatcgatgactatagtgtaaagcacctagagaatgaggggccataatgatgctttgcaaggaaacatatgaaaatgttaaaacacaccaagtatacgtaggagtccaagaaatcatcaccaccacaccgcaaaactccacagtctccctttatattggccacctccaaacactatcatcaccttgtcggcctctttcatctcccatttctcctctcctccctcaatcccacacctctctctctctctctctccctctgccaattctctctatgcaaaaccaatcaatctatccatcctcttctctttgattcgacatcgatcccctctaacccttcttcaattaaacctagcttgttcaagctccttggcttcaaataccgactagtttccctttctttctttctttctttctttttaacttctctttgtgacactgaacattaattaaccatgaaacaccaacagattacccttcaaagaagcagtagctgtagcagaagcacaagaaaaataatcccatctaactacatgagatcaatccctgaacaagaagatcatcactctccactctcttcacaacgccttgatgataccaaaatctattcaagattcacttgtttctttcgttcaatcctcaagattatatctttccccaatataatcatccccaaaac

SEQ ID NO: 54922 - DNA, 793 bp, Populus trichocarpa
  Intron number 1 from transcript POPTR_0019s04190.2 (locus POPTR_0019s04190) derived from phytozome v7.0 (chr-ID scaf fold_19; pos 4283296 to 4284088)
accggtccataaatttggcatgccgactcaagtcgggtttttctatctatttttaaaattgatttttctcattcttcaatattttatttgctagtaattaagcttgagatttgtttttatatttttctttttacgagattatttcattgtaattcaattgttatattgttattaaataagattgttgagatattttaagaatatttttttcctaatagtgataagttttttttatttcaattagtcattgtgttttttttttagttttttttagttattaattttgttataattatattattaaagtaactaagtgtatattgaattacttgaattccaaatttttcttactcctttcttcaaaaacactatcttcgcctgattttttcttattaaaaaaacttatcccggcctatgatttactgatgcggatcacctgtctagtaattcactgttaatcaaacgaaacggcaataacgtaaataaacctaacatcgatgtccaattccgaaaaacagtctgcagtgaagattaaagatacaggctcaagcaagtgcgcgagtcatgacagactcagttcgagacaacaactaatttaaaatccgatccatccaactcaccttctgaaaacatctctatttctctctcattttcttctcaacaaaacacacgtaaaatggcaatggcaatgcagatcttaggattgattttctgaataatccaaacaattaattactagtaaaaaaaagtaatggcagttccagtcgaagaagccatagcagctctctctacc

SEQ ID NO: 54923 - DNA, 688 bp, Populus trichocarpa
  Intron number 1 from transcript POPTR_0013s03420.1 (locus POPTR_0013s03420) derived from phytozome v7.0 (chr-ID scaf fold_13; pos 2112848 to 2113535 reverse strand)
taatcccctccattaaccccctatctcaattcgaggtctactttttttaaaccccttatttatttttcttttatctttttttagtgttaaatgcataattatgtgtgggtttttatttgctggtcttttgggtctctattctttgtcatgttgagagtagaatcatgggttatggtttttttttcctgggttagtttgcttcaaagttgagattatggttgctttttttgaggttacatgatgttttgtttcgtgtctgtgtatacttgtctgaattgatttggattttagtgggtttgggtccttcagagttttttcactgctaacctattagggttttggagtttttgtttatctatgttaaattgaaggatatgggtaaattgctatcattttaatgagtatggaatccaatcgtgggttccaactgagctaaaagaagaaaataaatggtaaaagaaaaatgaaagattttcttttgcagattttgttcaaggtttggaaagtatgcaactttaaagattttgggtttgttgtcttttgattaattggaaattgtaatttcctttcattgtggtggttctttatcatttgtaaatagtcgggttctaaggatgctgcttctgagaagtaatgatttggtaaccttgcaggattctcttgtatttaattacatcaacaatctctc

SEQ ID NO: 54924 - DNA, 633 bp, Populus trichocarpa
  Intron number 1 from transcript POPTR_0003s09690.1 (locus POPTR_0003s09690) derived from phytozome v7.0 (chr-ID scaf fold_3; pos 10956587 to 10957219)
tctcaagctctctctcattccgtccctttgttcaggtgccttactctctctctctctctctatggtctctattcctctctctatgcgctctatcactttagaaaacttgaaagtttatgctcaagggcatttatcagattcccttttctggattcctttcttggttggtttttcttttcttttgtattggattagtcattggttcttaaagttctgggggacttagtgattagttcttactgtatgaactttgattttctaactttggacttagtaaaaattgtttattttctgttaatttaaagcttgaagacagacgggaaattccagttttgctatttgattttgactgtaacttgatttgatttgatttgggatttggctgtttttgttgaaagctcatgcattgactctaaaaagtaccgagtttggatacgtttcagtttgaatttttcttttttgactttgacatgatttaagctcagatggtattttgtataaactggttcttctttgctatggttgaatttggttcatgttaatttgaatttggatcaaattattgatcagtttgtgatttattcgttcaaatatgaaggcttcaaaggctgacccaggtgggggtatacgact

SEQ ID NO: 54925 - DNA, 813 bp, Populus trichocarpa
  Intron number 2 from transcript POPTR_0006s11570.1 (locus POPTR_0006s11570) derived from phytozome v7.0 (chr-ID scaf fold_6; pos 8778151 to 8778963 reverse strand)
agcccggtgagcttgcaatcatctccaaggaggcggtaagccttttcttttgaccacatgtgaaataaatttcagatcattgctcgcaaagtcatatcatgtgttttgttactcctgcaagagcaagattggttcgaacgataaagtttgtctgcatgttcttatcagtgtttctaccagttcattttgtggacttatactcaaatagttttaaacagaactttaatgttttcggtatacccagagcttgtttcatgtttattgcaacgatgaagatgtggtaacttttaaaaatgcagcttggttcttctttgatagaacttcagaacttggtgttgtattttacaggtttgaattttcttattcaaattatgactaaaatgaaagaaataaaagggtttcagagaaatttgacgagtaagaattttaattaattaaatggcactttagataaatgaagttgatcctgcaaacaacacatgttcacattcttgctttagtgttctcacaggatgctaatcaatgattttttggttatgctgcggttaattagagtagatggataaagtttatcttgtgagcagtatgttattattttattagcatgtgttatggtcatggtttcactgtgatgcagtcttatacaatgtagtaaagttcatgaaactattgaaatattgggatcctttaatatagacacatggttgtggttttggatctgctttcttcctgctcaatatgctgtttctagtaccttttttacggtgtcctacagtaaacttgtatttctgctatttctacaggtggctcctt

SEQ ID NO: 54926 - DNA, 623 bp, Populus trichocarpa
  Intron number 1 from transcript POPTR_0006s11570.1 (locus POPTR_0006s11570) derived from phytozome v7.0 (chr-ID scaf fold_6; pos 8778966 to 8779588 reverse strand)
tgatcatcggcggtggtgtatctgctgtgagtctttctcgattgacattccttctttttttatatgatcacttctagcatgtgtttctgtttttgaagatcgatccaagatgtgtagttgatgtatttttttaatctcttcttttttacagatctaaaatttagtactctttatttctttaatttgattaccggtcgttttcagagagcatactttctctttttaatattattagatgaatgaaataattagtaagaaactatggactgttcgcttagtgaattataaaggaagcaaagattaggctaagacattaaggcaaaacctagccgaggaaaacattttgctgttgtagtttcggttaatattgttttttggttcaactagaaagattctgttggtttttgtttgcttaacttgctaaattgaagcataatataattgcccaatcagtttcccctctttgatgatttgacagaaaggagataaggctaattgctttttgtttttctttcatttgttcttctttttttcgggcatggtaattgacgaccttttttttgcctgaatttttactctacattgcagggatacgctgctagagagttttgcaagcagggggt

SEQ ID NO: 54927 - DNA, 1005 bp, Populus trichocarpa
  Intron number 1 from transcript POPTR_0006s00670.1 (locus POPTR_0006s00670) derived from phytozome v7.0 (chr-ID scaf fold_6; pos 358312 to 359316 reverse strand)
gtgttattaagctgttaaaggtaaccccattttttgaatttgagcaaaaatctactctttgtttggttgctgagaaaaacctagaaagggaatgaaaagaagtgaaatttggttggtttaagctgaatttcttgcattaggggtttgttgcatgggaaaaattgtttgtaagaagggcttaaaggttggaactttttttaggttaagctagtcaagttgtagaataacgtagattgttttagtgaacctttttgtttgtttcgagttatagttgagggagtttgtttgaattagggttagcagtgccaccctttcaaaagggttggcagctcgtgaaaaacttcgtctggtcacttgttaaatttgccttttttggttctaaagtgtattctgttgagctcttgaggatttggttttgattctagggctgaatttctgacctaagccgaggaaagtggatgcttagtgaaacataaaaggatggcaaagaaaaattggaagccaagtagattgtgaaagttttaggggctactcaaattaacatgtcaaatatgaaagaattgccattctaactttcacattgtttgcaagagctgtcattctaactttcactttgtttgtgtgttaaatctttcgagattaaaacgtgtggctttgatccaagcttttgattatactggttgaattagggtgccctgatattgtttttcttttgcctatcaaaaaagagaggaaaaagaaactgaattaggtattgaatttgtgctggtgcatgttgctcttgacctctaagctaatgtatattaggaattttcaaatgtattcgaccttggtttgtgtttgaaatctattaatgattttgagttttaggcaactgtgttgagtttttttctattcataaatgcaacagtgtacaatcttagggttcttgtttttatagtaatgttgctgaaaatatttactttatggatttacctgcagcaagctgctgcttgtctttctgag

SEQ ID NO: 54928 - DNA, 446 bp, Populus trichocarpa
  Intron number 1 from transcript POPTR_0013s02750.1 (locus POPTR_0013s02750) derived from phytozome v7.0 (chr-ID scaf fold_13; pos 1650821 to 1651266)
gaaccagaggtatatttatcttaatttttgttatggcttcactattcacccatacattcttatgtttttaactgttttgagttgaagtttaaatctcttgagttctttttatcaatgttggtagtcatgggtatggtgttttggctactattgctaacattttgcacaatttattcttatcaatatgcaatgaattggcatatataattctagtttagtgggttttaaaggataagggatgctccaaattggccattggtgatagatacagtaagctttgaaactaaaactttcaaaatcaattcagtttttcttagagttagatatcttgattgagggaatgtagagtattgaatgtcaaatgtgttcacaatgtcagaattattttttcatcaacttggttattgtatcttgttattaggattacagtgctgggctgtctttat

SEQ ID NO: 54929 - DNA, 687 bp, Populus trichocarpa
  Intron number 1 from transcript POPTR_0003s02030.1 (locus POPTR_0003s02030) derived from phytozome v7.0 (chr-ID scaf fold_3; pos 1968361 to 1969047 reverse strand)
aaggttagttcaatgtttctgcacttaaatataatcataaaataaatgaaggttggttggtgtttaatgtcaattatcttgctttgatgattctctttccaggcttcgaagtcctatcatcaaaactgaggaatcttgacctaagtcaaaaccgatttaataatgataaaagcattttgtcatgtttcaatgggctttccactctcaagtctttagatctatcagacaatgagttgagaggatcaggtagcttctgtggtaaccttctaattatttagcttcgaaaccttttcttttctccttctaatatcatttctttctatgcatttatttccttccaatatgcttttgagaaacatcatgcaggtttcaaagtcttgtcatcaaggttgaaaaagatggaaaaccttcatctaagtgggaatcaatgcaacgatagcattttttcttctctaactggattctcatctctcaagttcttagatctagcatataatcagttgacaggatctgctagtatcaatagtaagttatatataatttctacctaactgctttacgtggcattcttttatacggtttctttatcaagaaaattgaggacttgcaatctatcttcctcaaaaaaattatattttttatgtataatttgagaatatatatcttgtaggttttcaactccaaccg

SEQ ID NO: 54930 - DNA, 657 bp, Populus trichocarpa
  Intron number 1 from transcript POPTR_0013s05030.2 (locus POPTR_0013s05030) derived from phytozome v7.0 (chr-ID scaf fold_13; pos 3549433 to 3550089)
gccctcagatttcctgctcaggtatacagatcattagcatttcaaacatggttgaattgacctgaattatacttgatcattgcattcatgtctttcttttgttgatcatttcttcttcttcttttgctggtatttgatttctttgtgtttggttgcttctaattttgattagggtcaactttaaagatttatatttttttattcaagtccttaacttttttgttttgttttgttttctttgtaaagcaagataatggaatttgagtggatctcactttcctagggtccctccttttcttccccttttgtttttatgtttctttcctaagttttcttgaacctttcaagttatctaatcacctttcttgataacaagcacaatgtttggtaaatgttgcctgtgtgtcttcaattttctgaaggaagaacgttgatccacaacgatccatcttccaaaaggaagaaacgtagttttgaaaggaacaaccatgacttgctttccaaagaaaattgacagcctttctgtccaaggaaatgaccaaattaatcatgccaaagctattacgaagcaggattgaatagtaattgtcaaaatattaacaattgaatgtctccatgaaaggcagcagggtctgtgggaggttcactggctatctt

SEQ ID NO: 54931 - DNA, 670 bp, Populus trichocarpa
  Intron number 1 from transcript POPTR_0018s02490.2 (locus POPTR_0018s02490) derived from phytozome v7.0 (chr-ID scaf fold_18; pos 2297481 to 2298150 reverse strand)
ggctgttggagatctctgaaagggtttacggtatgctctagtttgaattaatttgcaaactttatggttaaagactgatgggttttggttcttttgtgttttgaatttcttgcattgatgttggtaggtaattggtcttgaaagtctctttcttttgtgatgttattgctggtaatgtaaatgctttgtttgtactgattgttagttttttgaattacctgcactgggattgtggataattggtttccctgtctctatctttaacttgaggtttaaagaagattcttgttttttttttcccgattttgttgtatttgtcatttgattttcaactctttgaaactaattgtattgatgctgataggtaactggttttaaagtttatatcttttaaaatactgttctggattatgcagatatcatgttacgtaaatagaaacagtttgctcactttagagttcaagattgttggttttcttttgtattgaatctcatctatttatcattcatgtctgaagtatcgcttgcatggatgttgatgggtatttggttttatagtctcttatctttggaaatagtactgtggataatggtgcgtggagtttttatgtttgtaaatattaatgatggttcgtgttgtttggtttcagtctttgattgctgctattgt

SEQ ID NO: 54932 - DNA, 814 bp, Populus trichocarpa
  Intron number 1 from transcript POPTR_0006s05660.1 (locus POPTR_0006s05660) derived from phytozome v7.0 (chr-ID scaf fold_6; pos 4005271 to 4006084)
agcaccgaaaccctagtgtttcttgcctttcaaaggtaacaaccaagcaaacaagaaactcttctcatttctctgttctttcatttgggttccattgaaatgttattttgttatctgggttgttggagatttatcattttatagcagaaaaaaatctggttctcgttttgttatttcacttgttaattgcctttatcctggtttctttggattcttattcttcttttaaaatcagcggtatggattttaagacaatgttatttcctcgagtgtgtcgctggagatttcttgtttcatgaaagaaattgaatttgggtctgaatgatgataaactgggagctttctcgggaaatgggaggtttgcccggaaaatgtgggagatctctgtttcttttattttttgtttcgtttgcagtgaaagaaaccctaattttcctggaaagttttattttctgagaaaaggagagtgggttttatagttaccccagattattcattttcttgaaatgataaatgtaaaccttaggcttaggttctttattgtatccagtaaatgattttgcatctctcttcaatgatcaatgtaacaaaaccgtgtttgattattctcttgttatttttccgagaaaaccttcattttctcgtgaatctttacattttcatggaaagtaagtgggttctctttgcacaaatccgagatctctgttttctttgaagaatcaaactcagtttctcttttgtaaattaaacttgtgtaatattctattttactagtcaatctaacagaagcttggtcaaattttctcagttaaaa

SEQ ID NO: 54933 - DNA, 792 bp, Populus trichocarpa
  Intron number 2 from transcript POPTR_0006s05660.1 (locus POPTR_0006s05660) derived from phytozome v7.0 (chr-ID scaf fold_6; pos 4006428 to 4007219)
tcactgctgttgttagggtaattattttttttttcgtgttgattggttataatttaattgggaaagtttggtttcaaaagagcagcgatgttgaagtgcatggatcattcttgacaatattgctactataaatttgcttttcttatattcaggctgcctgtctagttttgattccgaggaatataaaatatatggctttcatgtaattgaattttcaagaaaccttggtctttgcatgaaatggaggaaaagatttgtgccggtttctttcaaaacaatcaatgctatgatatctggtgtgtattgagtactgagtggaacagactactggataaacttctgcatgttctatatggtttcatttcagtccctgcagagtgaagtgaaatgtgtgtgggggtctctattccccctgtcactgcggcgggatgggctgctctcaagtctgtgtcctaggtttttagatcaattcgcatgcgtgttttgtcaaattggtcatagaacagaatcttactggttttgaataaaaatccccattgtccaactcgagtgcccacgttaaatgggctgtcaaataatgcacactgccttgttgacaaaaggccaactcattctctaatctcagaggcttcaactgggaacctttattgacctgttatggttcaagtaaggtgggaatgttgctgaaatagagttcatgggttttggttttgtttattttcctcttcaactaatgttggggaaattctttgatcaggccattgaaaggagaagggaacgcttgggaggaag

SEQ ID NO: 54934 - DNA, 564 bp, Populus trichocarpa
  Intron number 1 from transcript POPTR_0003s12090.1 (locus POPTR_0003s12090) derived from phytozome v7.0 (chr-ID scaf fold_3; pos 12774299 to 12774862 reverse strand)
acacggcagtgagtttcttcagaaaacgctaatttgattctactcaattttcttgtttaactgataaacaatatgcttatttgtgctcttagaatataagattttgtagttgtgttttggttttttcgtaataaagtttgaattttgaatcgtgggctgctgcttaaattgggatttgaatttacttttgagtgtttgaggagtttagtgctttgattggtgttggtttttgggataatgaagtgaaattacgggtaaaagtttagttttttttttttgctagatggtctatatattttatgttaatgcattttaaggagctttagtgaggttcttggttgcatttttgttcatgtctttgaatttttttatgtggagctctttgtctaggcaaaagcaaaactacgatgtcactacttttttgttattcttacttgtttgcttctgtatttttcatgaaaagaacattctattttacatctttttgattttgagcttcgatcatattttggaggctgattatgcgaaatcaacttatggttgcagttgcggaataaaagaata

SEQ ID NO: 54935 - DNA, 864 bp, Populus trichocarpa
  Intron number 2 from transcript POPTR_0003s05540.1 (locus POPTR_0003s05540) derived from phytozome v7.0 (chr-ID scaf fold_3; pos 6861652 to 6862515)
gaggtattgtttgcttctcatgtttgaaaagttgtgcttttgaaagtcaaatttctctagcatatcctttgatgaatgaatcttatgagttttgaaaaaggtgatgattattgaaggagaaaaaaagttgaagatgtgaatccaaacaaattttttgtttccagcagggcacagaaaaattattttaatttttatgatgaattaattttttatcttctgtagtgttgggagtgcattgctgggtgctttcgggtttttcgccaagttaaaatgaccaggaaaacaaagatgagattctaggattctgaaaaatcgcaccaattttgaagagaaacaattgaaatagaaattagaggctactagcatcctccctgtagggttcctgttcttaggaatctcagtttaagattcatttcatcatgcagttactgagaataaattgcttatatttgctgtgtccaaagacttgagatcttttgcctttgcaaccagcaaagacttggttctcgtttgttcttgattagatagtactctttatggttgggttgctgttaaacctctctatgaaatgcttaaagacaaatctgggacttggttacattcaaattcataatataaggtctcctaattataaacgaagatatggaagtggtaaagatgtaggtcaatatgaacctaggaactgaaaatattgttgttcacctcttttatattctcacaatgcatgtaatttttattccactacaaaatccaccctctgaatttttactccttgaatttttaaccactcaccagatttcagtacattatttattttaactttttttgaaattttgtttctcttggtttccagaaactttatcc

SEQ ID NO: 54936 - DNA, 427 bp, Populus trichocarpa
  Intron number 1 from transcript POPTR_0006s13530.1 (locus POPTR_0006s13530) derived from phytozome v7.0 (chr-ID scaf fold_6; pos 10748757 to 10749183)
acaagttccttgaagcccttcaattgtaagtttccttttcgctcttgtttctataactactctctctcccctcgtttctttagttctctctcttgaaattcaaaataagaaagaaaggaaaacaagtactaattgcttattattattattattattattaatcttgttttaacaattgactttgatttgatgcctttgcttcttagtttttgacaatttgatggtgttagaagtaccttggaatcaatagaaattctgtttgttaaaagcaaaatataatttgacaccgtaccacgttttgaactttcagttttcaaattgctaatcaaatacctcttgattctgtaccatgcttatctattttttttttctatctggtcttcttcattcaggtttgatcgtgactggaaaaagattgaagattttg

SEQ ID NO: 54937 - DNA, 680 bp, Populus trichocarpa
  Intron number 1 from transcript POPTR_0013s05700.1 (locus POPTR_0013s05700) derived from phytozome v7.0 (chr-ID scaf fold_13; pos 4106671 to 4107350 reverse strand)
cgtgtaagaaacttccatatttcttcatcgataaggtacagaacattcttatatctcaccctttgctaaaacgaggaaggccgtctttttttcaccctactcttccgctctcattttcaatctttgataatgttcaatggagttctagatttgattttttgtcttaattttatagagatttgacagcttacttcgtagttcttttcatgcatgcctttgacaggattttggagtaggattttttcagtctcgaggaacaattatctattctgctttcatgacatgaaagaatagcgagttgtttcactctctgtttattctgaaaaattcgtgtacactgtgaagaggttatatgaaatataaatcatttttttcacaatcttaaataatagaggcagattcaatttttggtagtgcccaatggttcaatctgtggcacatcatattttcatcaagagttatacccccttccttggatccatcaagagttctacttactagatatgtatgcatgatgtcataaacaagcaagtgctcttgataagtacatacggttctatgtcctggagattctaacaagttgttttgagtaggttctgttttctttgttgcttgattcttctccctatttcttttgattcattgtttggtttatttggctgttgtgtagataaagggag

SEQ ID NO: 54938 - DNA, 945 bp, Populus trichocarpa
  Intron number 1 from transcript POPTR_0019s07700.1 (locus POPTR_0019s07700) derived from phytozome v7.0 (chr-ID scaf fold_19; pos 8833960 to 8834904)
ggtacatcacaggagaaaaggagagaatagtagctagtgactaactaattaaataatggagtacaaaaaactctatactcatatcatagctcatcaaccctgtgcaacctttgattgcttgtggtatctttcattagattctgctttaaaaatctagaatgctactagctaaatgtactcacgattgggcaatgatgcacaggtttgtgagctatggaaaaaggttcgtgaaaccaagcaacgtgatatgtttgtagcccaataatttatggaaccgagtagtttgttgtgggagttatacttctactaggatttctaggtagattgtccaagtgatgcagtaaaatttcaaaaactaattgacaaggaacgagtctatgacttcttagctgggttaaacattgaatataaccatattagagatcaggttctaaggagaatgcatttcccttccttgaggcaacatattctcatgttcagcaagagaaaaataggagaaatgcattgttgcatcatgttactcatgagaggttagctatgatagataactccaataaaaaaaaattagtgaggggttcacacgtcttagtgaaccaatgttagcagacaaagaacaattgaagtgtgattattatagacgaaccaaacatactagaaagacaagctggcagttacatggacatccttcaagaggatgaggtgggaaaagaataggttttcctagatcacaagcacttgtgtcaaagataactaggactccaattcctgatggtcaatcaaacacttcaactttgtccaagaacaagtttcagacacttagaaatcaaatgaccaagcatgatcctccctttttatccaaatttgcacatgtaggtataccgatgatagcttttaattcttccaccattttttattccaatccttaggtgatagattcaggagcca

SEQ ID NO: 54939 - DNA, 1026 bp, Populus trichocarpa
  Intron number 4 from transcript POPTR_0006s23230.1 (locus POPTR_0006s23230) derived from phytozome v7.0 (chr-ID scaf fold_6; pos 22024771 to 22025796)
gaaaaactgtaatttgatttcttttcttttcttttcttttcttttcctatgcttgttgtgatatgtttagcggatggatgttattttatcagctgcattctctatgttattttatctaattttgtagtaatatgcaaactatataaagagaggaaggtgtggtgttcaacatctaattgaattttcttataggctctgattatttttttaaaaggtttctgagctttacagaatttatgagatgctttgccagcatcggttcaaatgattcgtgcagcattgcattaatcaattgctaggtgcctgtggaaataatttttagacaagtttcatgtcattggagatttggctttcaatatctgataattattcttttcagttttaaagatataacttcataaattgtgtcaagatcctgcaaacatatactattttgaagcagtactttaagtagtttcctatcagagcccatcaggggggggggggaaggttgtttctatttgttgatggcattgaatgcatttatcctcattatgcttaaggaacatcatcaggaagccatagctagtatgagctatttgcaaaagcaaacatgtccaatatactatcggtcaattgtcttgtttacaatcttagaatttgaaaccaagagagctgaactactgagagccttttagcggcccgctgtggtgtaggcttgtagctatttggtttgtctttatcttagacctttacctgtcgactattctgtaagtgcttgatgcctaaatgtcgattttgagactaaaataaagtgtgtttgactggtttttttgccctggtacaagtacctgtattttttttttctgctgcagttgcattttcaggagcatcttttgacaactcaatattgctgtcttgcattttatttttttaacaaatgcaattatttccatggctcaagttttatgagacttaatagcatttttaagctgatgcacctagatctgcctttggttcaggttttactggaaggactccctccaa

SEQ ID NO: 54940 - DNA, 771 bp, Populus trichocarpa
  Intron number 3 from transcript POPTR_0019s07730.2 (locus POPTR_0019s07730) derived from phytozome v7.0 (chr-ID scaf fold_19; pos 8861679 to 8862449)
ggcgcaggtgcgtctaatgtgtttacccctctttggggttatatttattttctggatagaacacttgttagaaattttctggtttggtctcttattttccttctttgtttacatttgcatagtcacaaacacaatgcttacaagtcaagtaataggcttgaattagaaacatgatcttgtggtttttttcttttttttttcatacagaataaccttatgattttgcatgaggaagaacaatgtcgaagcattatgaaatcaaagcactctatctctattaattgacttttacgtttccttgtgatgattgtatggcctgccatatactttattatcatattccatggcgtgcttcttttcccctaccatatatataggaccaaaactggttctgggcagggcaactactattttcaaaaaggaatggaattggaaggataactgcaactgctactgaaagccttgaaattgcaggataatttttccagatgagaggtgatagaatcaatatatttataacagatgacttttgagtctctgttagctgctttagctataataaaggaatcaaaatgaatatgctgtgcaataggagctgggcaacaccattgaccagtaatgagattcaatgcaattttttatcctgggctatcttgtgtttgctgattaggagaatatgctcacagttgacacgctagattatttactgttgctatttttactttgtctttggcaggagttatagcccccgtgagagaagatctccaagac

SEQ ID NO: 54941 - DNA, 832 bp, Populus trichocarpa
  Intron number 2 from transcript POPTR_0019s07630.1 (locus POPTR_0019s07630) derived from phytozome v7.0 (chr-ID scaf fold_19; pos 8720153 to 8720984)
caaggcgctttatagggtgtgagtgatgttgcaatgttttatgatatctactacttgttttcattatgcatgtgcatttgatattcatgtgtctctagttttcattacgagaaagatgtttggttttcttgtaatttctgaatgccttttatttcaaactggactgtatttatatgtttatgagcttagtagttatgttgtactgtgtttctgccaacagatgttggcatgctagatacatctagagcaatattgaattattgatacgataatgagcagcatgatagtttgaactcactgcttcttacttttcttcatgcaagggtgagctagagaacctagggttttaaaatgtatctctggaggaaaaaaaaatcctttttttgagttaaccctgaagattatgtacttatattataaaggcgtcctttaggaattgaaaggtaaattaagagtattacttaatctgtaatatgcaagttcaattggaaatattgtctatttgataatgaaacctttctgtattatgagctgtgtttttcccgtcattggtacctgacttggaatttgttgacattataatgtcatttgatatggtataatgtttgagttgaatattaagtttatttataaaaggccaagacactgaattggacttttgaaatcatgtttatggcttgaagttccatgaaatgtgcaaatgtgcctgttcttgtttggagaaccctttttgtagagaatgaagctaattagcattacctctgcattcaaaattataactctgctatctgtggatataggaagctctgaagtgggtgacagatcagcctgc

SEQ ID NO: 54942 - DNA, 661 bp, Populus trichocarpa
  Intron number 1 from transcript POPTR_0006s02700.1 (locus POPTR_0006s02700) derived from phytozome v7.0 (chr-ID scaf fold_6; pos 1719052 to 1719712 reverse strand)
ctggcatctactaccctcctgattctctcaaggtcacaccccatctctaagtatcatgagtagattataacttagttcttgtattttcaagttattaataagcgaatcctcctgtcaaaaaccctatatttcattcctatgctttcatatttgtttataatttagcccttcattcttaggtcctgagcatatacttggatagtagtcagtaatttccttgagtgaagaaggttctgatccaagtagttgcggtttcttctagttatatgagaactgctccatttgtatagcttaaggtcctttgaccttctgataaaccaaaaacaaactacaaacaagttggtagtcatagttggtcaaggaattaagatgtaattttaaaaatcagaggggataaccttaattttgttgacaaagttataatttgctcaaatatcattggtggttgctgaactgataattgatttacatgtgaaggatgcattttgcatgtgtcaggataagagggaaacgagtttagattcttttataggaaaagaccattgctaagtgtatatagttgttttaatggttatgcagtgttgtgtttgagggaaatcaagatggattttcttatttttggacaggctttattttgtgtgaggggaagagaattgctgta

SEQ ID NO: 54943 - DNA, 1017 bp, Populus trichocarpa
  Intron number 3 from transcript POPTR_0013s07660.2 (locus POPTR_0013s07660) derived from phytozome v7.0 (chr-ID scaf fold_13; pos 6503472 to 6504488)
aaggtagacacaaatcagagcgtcatcctgatcctgtaagtttttctttctttctttcttggatacttaattactctgatatatgattataatagctttcatggtggggaaaagaaacgaggccattgcccaagaggcccaacattgaacttttgttgatatttgcggcaggaggggttaagaaggcgattgatccttcttttgaaaatctaaccatttaaccaaaatgggataaaaaatccagttactggagcttactttcgattttctccctgaattatggattccaatagacagaaataaattcccttggaagcactggtgactttgagggattgaataaaaaaccaactattgctgcctagtccaatatttttttgttttctgacaaaaaatggaacaagaaattgtatttaagaatagatgaagaataaatacattatagaaaatgagttactgtccaaagcttttgcaatgaactattacgaaagcaactatgctctagactcaaccctaatgtatttattactcggcccatgagacacaagcgttgttttattcaatgttatacagacaacacaattaactatgtcttaaaatgaaaagaaaaaatacaataaaatcagcagataaacttcttgattgattgcataacagttgtacatcagcatcattatatttttgttagttttgttgtcataataaaaatatctaatgcaaccagctggtctagcatctacaacatctttaatcattggcattgtatttatttctatgcttacagtttcatgttcctttgctatagttgcttggcaacctaatttttggatactgctattgctccaaaataatatcttgtatatttgtttctagatacttgtattataacagagtatggatttttgactccagtgcaaaaacatgaggttgattttggccactgtttgatctgaatctgttttattaacctcttttttctcaggtggaggagactaaaaagcaagcttcaattcttga

SEQ ID NO: 54944 - DNA, 759 bp, Populus trichocarpa
  Intron number 2 from transcript POPTR_0003s02960.5 (locus POPTR_0003s02960) derived from phytozome v7.0 (chr-ID scaf fold_3; pos 3185665 to 3186423)
tgtgagtagagcttgtttgatttaaagaaaaaggtgtggcttttcagcttaagactgtttgttcaaatttgtggaagattccatcatggtcaactcgatttttggaaactggaacaatttttttattttatttttaaactccataccaatctgggatccaagaaaagttacttgaatcttttggagctatttcttttaccactgtactttgactcattaatttgacgactcagaaaaagaaggctttagcagcgttaagtgacagtgaggcccagttctagtgtttgcggatgctctttctatgaatgtttttgaaagaccaacttttttttttttgtcgaatttctgctagtgtaatctggttcttgcattttgagccaaagggtgtccagatctttactagttttctttttttgggtgggtgggtttacaatttgttgattaatcaaaggaggggccaaatacaattgtagggctgtgaaataggtttttgttattgattctagaggagcttgtgttaaatagtgaaaagggtcttgtcaaaggtgtggtctgccgctgctataacgggaggggtataggttttttgtcggtggttcttgtcttttgaatccaacatggatgggacagtgtaataatgcatgaaatatcttggtgcgtcttgtagtcatgcttttgttgttggctctataactgtagtggggactttggttaagagaacaagtggaggtttttgataaattaattgtggtggtagtg

SEQ ID NO: 54945 - DNA, 601 bp, Populus trichocarpa
  Intron number 1 from transcript POPTR_0003s10960.1 (locus POPTR_0003s10960) derived from phytozome v7.0 (chr-ID scaf fold_3; pos 11816649 to 11817249 reverse strand)
gaagattactaccacttctgtgctttcacgtcaaggtttgtggccaacccatcaagaagcaggatcagtactgcatcctcttcttcaagaatactaggggccacttctcactagaataaactaacgctgtttagtcccatgttttgttgtcttgttttggtttcttttgttttttggaagttaacttgtcttaggctttagtcgcttctgatggagcatcgtgtgtacattcaatggaggatctgatctgatcgcatcttaagttttattcttctaggtaaagagagttagttattatccacggaagagagaagctagctagctagctagcctcaaatgggtaggggctttactgtacttttatgcggtatttacccacaatactaatttgatagagcggtgcttttttttatatatatttcttcagcagctgagctttcatgtgaagtgatggatacaggagaagaggaaaactatggtgaaattgaggagtaggtgctgtataattaatcaaaatccaaaactatttctgtaatgataaaaagttcgctttcttaatcttctagttgggtagttgtacccaaaattaccgcacaagaag

SEQ ID NO: 54946 - DNA, 629 bp, Populus trichocarpa
  Intron number 2 from transcript POPTR_0006s07780.1 (locus POPTR_0006s07780) derived from phytozome v7.0 (chr-ID scaf fold_6; pos 5690628 to 5691256)
cgttgcctgtttgcaaatctgttacctctactcctgtaagttgttgttgctcttttgtttttgtttttctgttctgttgcttacttgtttttgcgtgtgacttgtttttggttcgaatttgttagaaacgtgtcttctttttgtttgatttgtaatgggttcgcgttggaatgttcgttagaaggaaatgagtcttgggttttgtttgttttattccttgggggatggtactggttgatggctctgtagtgttgggcttagtttgtatttgtggagctgggaattgaagccaattcagtgatgtacttgaattgtagatacgtggttctatttcaattctatgattttgctagcatatgtggggtgatgtaaataatgaggatggtttgggagggttaatgagctcagaggtcagatttttcattaaaaatgtttttgaaatatgaagataagtgatagcaagtacatgtctgatgcatttaacctgcattgttgttgtatgttttaaagaattccaatgatactgctatgcatttttagttttatgaggttgtgatatctagtgaaatagtccgtgattgttacaaatactgaaatagtttatttattcaatgcataagggtttattc

SEQ ID NO: 54947 - DNA, 546 bp, Populus trichocarpa
  Intron number 1 from transcript POPTR_0013s14450.1 (locus POPTR_0013s14450) derived from phytozome v7.0 (chr-ID scaf fold_13; pos 14631096 to 14631641)
tccacttccactggtaaaaaaaaatagtctttgctgattttttttattgtttttctgttttgtgtttggttgctgagaaagtgggagaaaatagaaataaaagttgtagaaagttagtgtagttaggaggttaagcttttaacattcaattgtttgattatagattcattttttcacattcatgaggaattagcgggatttattcatttatttttatgaattgtttgtgtgaaaatttctgtttaatagttgaaaagaactaattttgtgattgattcagtaacaaaatgaagtaaatatattttagtatttttttttaactattaatgattcacctagtggatattggaaacttagacttgaaatttatatgtatgtttttaatgcgtaattgtagtttctgagaatttgtggtcaaagattttatttttccttgtcattattgtgtttatggttttaattctgcaatttttaggtttgttgatgtagcgtatgatagtgtgtggatttgttggtaatggtttgtttggtttattgggttttcag

SEQ ID NO: 54948 - DNA, 927 bp, Populus trichocarpa
  Intron number 2 from transcript POPTR_0003s18900.1 (locus POPTR_0003s18900) derived from phytozome v7.0 (chr-ID scaf fold_3; pos 17809170 to 17810096)
tcaaagctttgtgtttggcatcttgtctgattcaggtatttaatgttcttgttagattcttttggtttgtgctttatttattaatttttttgttgctagatttgtgtcaaccaaggaaaaagtttcaatttttactgttcctattgatagtctgggagattagtatactctgttaaatacagtatggcatggttcaatttttagttaattttatcgttatagaaattaatggagtactattgcaataaacgacaataggatttccttttatggacttctatagttggtgagcagaaatgagttgtatgcaacaagtttgtttactttttcatgattttggaaatgggtttcgtcttggtattagttcaagtgtatggctgagccattgttcgtttgctggcttccagatttggttaaaaacatttaatgaaatagagagatcagggaagattataaagcgtttcccccttcactttatggttctatgatccggctattttttttttttgttttaaaaaaagtttatcatcactagatactcaaatattgttagctaagcctttttattctttgcatgagttcttagtgctactgtttgacctttctttgcattgtctgcattcccttttgaggagtatctggatgttaattctcatgcctgtatacccttttgttttgcttctataatagctttaaataattttgttaatcttcatgctttgacttggtttagattttatttgggtgaagcatgctattttcaccccactggttgtttgttgcaataaccagattgtattggaaaaataatgagttttttgggagatggagtgcaaatataaaagactagagagcaaaaggcggcctttttcatcatctgtgttaattttgtttccacatcttttttggttcaggttgtttctcatt

SEQ ID NO: 54949 - DNA, 979 bp, Populus trichocarpa
  Intron number 3 from transcript POPTR_0003s18900.1 (locus POPTR_0003s18900) derived from phytozome v7.0 (chr-ID scaf fold_3; pos 17810506 to 17811484)
gctgcacatgtaagtgtataatttgttgctgttagatattcgtgctgcactgcaatccttttcgtctttgtattggcttttgtatgaatattaacagggaaataggggctaaaagctgcgtggactgtaattataaactgttaattgaaataatcacatatgctctaggtttgtagctacacttgacaatctcatctgaaagatcagatagtttaatctttttcttcacagagcgtgggctttaaactgtgaagatgagaattctcaaggatttgtctttgtggcctcttttgtgggatagggttactcttttgacttcttaacagtctacttataactgaggattttaggaatttgtttagcagatactgagactaaattcctcttttcacttgatttttcccattttctcatggagggtaccttttctcctttacataattccatattcatttacttgcaataagatgttatatttacttgacatgatggtgcaatagcaagctatcatattttaaaaaagttcagatgtaaacttctgatgcactaaggttttagctgtttcctatagttatgacaatttgaataaccctcaacacacacacacatgcacagaaaaagaagaataaaatacatgcatacacatcaatctgtaaatcccaggaatctcaaggggctcttcttctgggtgataaactctgatctacagtcacgagtcaaggcctaaactggttattctggatttttcagcatccatgcatgtttaaagtctgaatgtactgtgtgtagacttgttgcaataatgttactgatgaaattttttcatatctgtggctagtttgcatatgagaaatcattgtagttgttgtcggtttcaaggtctcctaagttttcatcctgaaaaggtttctgtagcatcttaatctgggtctgatgtattcttccttttgctcctctcagttgcctggtcgtacagaca

SEQ ID NO: 54950 - DNA, 713 bp, Populus trichocarpa
  Intron number 1 from transcript POPTR_0014s08110.2 (locus POPTR_0014s08110) derived from phytozome v7.0 (chr-ID scaf fold_14; pos 6013955 to 6014667)
caaagcggcctggctgtgaaaataatttcgttctggtaaagctttgaggaaaaattccttacttcactttaatttttatcttcaaatcctctctgttgattctgtttggatggtgagaaaattggaggagaggaaaatgaagcaaattgttaacttttaggcagctgatttttgcgatgaattgttagttcaattttgatgcgaagtggtggtaactgcattagtttcgtttggattgactgaagtgtttataatttatattttttattgttatgatgatttatgtttggttgcttagcaaaggagggaaagttgtgcgcagttgatcgttcaattgatttttcaaaaaatgaatagtagttgtagactttgagaggatattcgctttatatgattcccatttttttctgtttgaatattacgaaataattgttccaaaaataatttgaaaataaaaaattaattttacatttatcagagttttgttctgctcgtttgaggatggcttatgctcctaaccgcttctgtataatcttttcttttaattgatggaatcgtttgttatctaaaaagaattaatttccattcagtttttcttttactcattcaatagtgaatgagaaattaaaaatgattacttgcatttgtaaatgtcgtttgattttacctgttattgaattttattttataggtcaaagtaccaacttatatta

SEQ ID NO: 54951 - DNA, 972 bp, Populus trichocarpa
  Intron number 1 from transcript POPTR_0003s07580.1 (locus POPTR_0003s07580) derived from phytozome v7.0 (chr-ID scaf fold_3; pos 9138809 to 9139780)
attggagtggtgttacccgttggttacatgatgtttcgtaacaagcggggtccttcttcttcctcttactccaaacagacgtaggtgtgcctttgcctattcttgctgatttttccataataatcctataggttttggtagggctattaatcagttgattttggttaaatctgaaggaaatttaaattattatttccttttaatattctcagggcaaagttttgatagagtggtagtgattgaaagagagagggagatctggtgctggatgagttgaagagtttgaagaagatgcaagaaaaagatgaggtattttttgacagattgtgcaaatacaaatgtaattgacagaaactctaattctgttattaatattttcttttgggaaagaaaaaaaaaaaaaactctgattattataaaatgggatgtggtttgattccatgtttttgatcaaaatatatacttctttttgtttgattgaataaattttatatgtttgtgattgtgttttgtcttctctttttttaatttcttccgaacaatttggtctcgttctgatgaacatatgtggaaggagaatagaaacttcattggtttcttcgtgatcttttttagctgcatatgagagtagggcatttgcttggtagaatttagattgtctagtgacactgcagaatgcttgttttaatcggtgatacatttttgtattttggatatgcctgacagcatgggttatgccagtgattggtgagttacctgatggttggatttactggattagcatggaataataaactttgttctgctggttcatgctctctgtatcagtctgagctatgaaacgacctgttagaatgacaaaatttgctgttttcgagtgggaatgtagaaaagagcggaaaatatatatggttgaaatgtgttgcctatttgctaggagctaccgtggaaacagctaccatttggaattga

SEQ ID NO: 54952 - DNA, 650 bp, Populus trichocarpa
  Intron number 1 from transcript POPTR_0013s09170.1 (locus POPTR_0013s09170) derived from phytozome v7.0 (chr-ID scaf fold_13; pos 8739137 to 8739786)
gcaccatttattcgaatagtgctggaagtgctcaggttctgctttgggaattgcaacacagaccatgccgatgtaggtgtttgggagtgtggttgtggttgcttttcaaaatgcttttcactcagaaaagtatgccaacaatatttttttattttttaaaaattatttttgagattagcacatcaaaatgatttgaaaacatcaaaaacatttattcgaatagtgctggaagtgctcaggttcttgctactggaattgctttgggaattgcaactcagaccatgccgatgtaatacagttttttactttgactctttttactttgactgggaatacagttttttcttctagcaattccactcttggctcttcttctacatcaaacataagttccatcttgtttggcacaactacatcatcatcattcgctccttcgcctctgtttggaacaggtacaagctcatccctctctggaacaacttcatccccaatcttgtttggctcaacctccttttccttttcctattcctattcctcaacttccgctacgactctatttggcataaactcaccctcgtcattgtctgcctgagcctcctccacaactacttctactctacctctataggagaacttaactgctgttgtca

SEQ ID NO: 54953 - DNA, 768 bp, Populus trichocarpa
  Intron number 3 from transcript POPTR_0014s15350.1 (locus POPTR_0014s15350) derived from phytozome v7.0 (chr-ID scaf fold_14; pos 11431281 to 11432048)
gatcattaccagctcgagtttcctgcgcgcccaaggtgagcaaaaagacctaaatggtcccttttacgtgctcttcggatttctttctctcaataattcactcttacagttgttctttcttgcacgatcagttgatcgctgtcaattggtggacatatatttaacgtttacggcaacaaactacatatcctttaggatttttcaagtcattgaagaagtcacccctatacattcaagctctatgaaatatagagtcatgaatgttttattattgttttttgtcattcaaattatataaaagatgaaaattcaagtgtatgtttatcctccgcttgtttatgccttgctagataaatccccattttcacttcacaatctgcttcaagaaaaacgatgctctcttcttcttcttcttcttcttcttcttcctcgtcttcttcttctctgttgaagaatatttgatctctttataaagtaaatattagctagaaatagcaacaacacagttgtacctcttgagaagattcaacagtgatgctctggttgatgggtctatgataccaccaagctggatcattgaagtttttgtgaaaactcattttgcacttgaagcctaggaggatggtggaggcacgaacatgggcaacaaggagaatcagcaacctaagaataatggatggcaccaccgtgtcaaccaccaccaatgaccaagttcttgacatacttcattaaggtacttgtctgtgtcttttaatcaagttattgggg

SEQ ID NO: 54954 - DNA, 695 bp, Populus trichocarpa
  Intron number 1 from transcript POPTR_0014s13780.1 (locus POPTR_0014s13780) derived from phytozome v7.0 (chr-ID scaf fold_14; pos 10087433 to 10088127 reverse strand)
acttctccagttttgtcaggcagcttaatacttatgtaagttgattagtctattgttaatttcttcactttggacatgattttatcttattagtacacaatttaatgtctctagagttgttttgtcttcttcttttcatggattttggaattttgttatatctatgctaatcaataataatccttaatctggaaaaacttttttttgttgttgcccttttctcccttctcttgtgtctgtgtgcaagctgaatggtacttctttagttataatgattcttgttcgttcccatcaacacttgttgacatcttcaggattttataaatctaaatcatgtttattcatatatccatttctgctatagaataatttgtgagtatgcggtggtttaatttacacttcaaatcagaagtagccttgacacaaactcaggagtgcacgaaaataactttggagtgagtctttgagacatggtttctttgtcatttaatttctcctttccttctagttattgtgcctgatttgaattagtcatgctagcacaccattctgtgcttaatcgagtatgggtatccattcgctctgcaatttgaacatttttacatttttctggtgaattcttttcgttactaaactcaagcttgcaatctgtggtttcagggatttaggaagattgatcctgatcagtgggagtt

SEQ ID NO: 54955 - DNA, 974 bp, Populus trichocarpa
  Intron number 1 from transcript POPTR_0019s12570.1 (locus POPTR_0019s12570) derived from phytozome v7.0 (chr-ID scaf fold_19; pos 13619588 to 13620561 reverse strand)
gaccttagggaattctcagtaagctcttgaaatatatcccatgagaaaatattcgttcttttgttgagtattgaaatttgatttaaaattattgaaaatgatgagctctgtgaatctatatttgtttcatttgattttgaaacgttgtagcgaaacacttctatagatattatgtggttggttgttctgtttattaaaaaaaaaaatttagtgtttttagattattttaatatgtttatattaaaaaatattttaaaaaataaaaaggtattatttgtagcaaaatgtttgtatagatattaagtggttgtttgtttttctgttttataaaaaataaaaaaaataaaattaatttttttagtgtttttataatattttgatatgtttatattaaaaatatttttaaaaaaaaattatttatagtgaaatgcttgtatagatattaaggtttgtattgatattaagtggttgttagtttttgtgtttcaaaatgtttttttaaaaaataatttttttattttaaactattgtttttagtgtttttaaattattttaatgtatttatattaaaaataatattttaatatattttaaaaagtaattattattttcttgaatatccttgagttttaggagataaaaagtagatttatttttatgagggcaataaatgttttcttctgtccttaaataatattctatttatttgagtatttatttgaggtgaaaaggataatgcaatattaaaaagtaatattgattgagatgattctataagatacgatgatatgagaaaacatcatatgcatttgcttttcattgattttcatagataaacaccgattataagtagtttttccagtttcaaggattggttaactcatacgtgcctgctactaaggagtgagtatgtttatatgtgtttttcttgtttgtcagcccggagtctcaatttattgagaaaatcgttggtg

SEQ ID NO: 54956 - DNA, 348 bp, Populus trichocarpa
  Intron number 2 from transcript POPTR_0018s13490.1 (locus POPTR_0018s13490) derived from phytozome v7.0 (chr-ID scaf fold_18; pos 13807680 to 13808027 reverse strand)
agggagtttacaaaggtacgtgttgttcataactccatactcttccttacaaatatctttatataaaaaactcaaaccaataattgagttacatataattttgtttataattgtattaataggtgaaaataatgatgtaaaatcacccatcaagtttctcttaatagcttaatattctatgttgagatcttatttgatcatctaacaatttaatttttcaaaataagatgatttttcccctcacagtagagtctctttgataaaataattatgggttttcattgattgatgtgtaatggtgagcaaaattgtttgactgtttttttctttctcttgtcaatagagcaa

SEQ ID NO: 54957 - DNA, 263 bp, Populus trichocarpa
  Intron number 1 from transcript POPTR_0013s15710.1 (locus POPTR_0013s15710) derived from phytozome v7.0 (chr-ID scaf fold_13; pos 15599395 to 15599657)
ctatccacactcaaggtgctgtgctgtaccgtacctcttcttcttcctttttcaattaaaaacttaaacccaagccctcaccctcctcttatttctctatggttttacctttttttttcagcaattcgtttttgtagtatagtttgtttgtcacgataaatcacaattgattaaccaaaaagaaaaaaatcaattatttaatcattcttaaaattatactgagtgggttttgtttgatttgggtacacagcaatactttgggt

SEQ ID NO: 54958 - DNA, 370 bp, Populus trichocarpa
  Intron number 1 from transcript POPTR_0019s14150.1 (locus POPTR_0019s14150) derived from phytozome v7.0 (chr-ID scaf fold_19; pos 14914521 to 14914890)
gtgtcatcaaggccgttttcttcgaaaccatattggttagttcaatatcaaatttcttacttcatctatttctttccaggcttaaatttttagtacaataattaatgattgttcaaaatttctatattttgatagcttttcaaggtgatttcttcctatgatcatgttttcttcttctttttttcttcgttttcagtactccttcaagcttaaattttcagaagaattgattgtctccaaaattatatttttagttcatcaaattctttatttcaggttttttttttatttgtttgtttgttttaatgatgatcatatgttctttcattgtttgtcagtccaagagagttcgtgatcgtaaagggagtca

SEQ ID NO: 54959 - DNA, 425 bp, Populus trichocarpa
  Intron number 1 from transcript POPTR_0003s11340.1 (locus POPTR_0003s11340) derived from phytozome v7.0 (chr-ID scaf fold_3; pos 12177644 to 12178068)
cggtgtcaccacgaatctcactagttgcggtggtatgtcggattctgtgtttgagggatctttttaaagtaatttgatctgtttttttttttcccttttttttgggtaaagacttgagagttgttgaattatggggttaattcgcacgttgatagttttgaccctttggggttcaagaaatcccaacttgatttatcatgttaattttgtttctgataaactgaaaattaaaaattgattcttgtctttcagttcattttcttcaaatttccttaatattgtcattttcatttacacatctgggggggtattatgttatttttcaattgacgttcttgatcatgaaactgattattttctcccccccccccttttttttttgcaactctttacagcttcaactccaaccggcacgcctccaggta

SEQ ID NO: 54960 - DNA, 906 bp, Populus trichocarpa
  Intron number 2 from transcript POPTR_0003s11340.1 (locus POPTR_0003s11340) derived from phytozome v7.0 (chr-ID scaf fold_3; pos 12178031 to 12178936)
ctttacagcttcaactccaaccggcacgcctccaggtaatgtgacttattttgtggctgaaatgtgataatatcgaaagtaaaaagatattagattatgacgttttagtgccaggctgtctctgatttttggtcagtaattaatttgtgaagcgccttcacgtttaggctgttttggtgaaatagtatgcctactaagctgctaaattaacgtgtcataattgaatcctttaggatactgtaaggtgagttcatatgatgatgcgtagcgaagctctttcagttccaccgatttcgactgtatttagtttatacccaccaaacacgcgttttcgaggagcacacctcatattttgtctctgttggttgtcaatcagtttatgaggatgatgaaaaagaagagagtaaaatcttgaatgccgtaatgatacttgttagaagaacaatggacattgttataaccatatttgctgccttgttggttgtattcaacatgcctgttccttttcctatctaaccctttgtaagcatccagatgaaggatttagttacgctgcttcaaggttggtgttggcagaacaaagaaattgagatgaaagtgtctgtgtgtgtgctttgcgatattgcttctggtgtacattgattgactttctttaatttgccagatgactaattttaaaatgtatggtagatctgctaattgactttattaagtaataactcggcgaacatgcttgcaagaatgtatcgatgaactgaaaaactggcactcaaggattggtgatccttgtgcagcagtggttaaaatttgcaagcttggatcattttgattttatacatgctatatcagttttccatcaagttcattattgatgtgtcataacctgtacaggagttcctgtaaagg

SEQ ID NO: 54961 - DNA, 818 bp, Populus trichocarpa
  Intron number 4 from transcript POPTR_0006s14580.1 (locus POPTR_0006s14580) derived from phytozome v7.0 (chr-ID scaf fold_6; pos 11917029 to 11917846)
gaggtaataatgagcttaatttcatcttaattttcttgcattaaccattggagttgttttgcttttgatatgttagtatgataaactttaggacttgagttagcatgccttcttgcatactgttggatctgaatgttaaagtggtaggattggtgcacttgtatccactgttgtcaccagtacatggagctagctgcttaatgcctattagaaaccaatttgtggcgaatttttttaattaacctttgttagaatatgctgtagacaatgaaatgctagctgaagttgagtttttgccagaggatgtcaattccagtcctggctgatataaaggattcggcatgctaaaatacctgcctatttttggttagtaatgtgtgtatatgaagtgcctaatgagattggtcgctaattctctcatatcaaatgtaaaggttttgtagctactaagtgggatacaatccataaatagaattcatgtttcaaatgtttggagaagagaaggattttcaagtgttgttctattatttgaggatcgaggatagcaatttactagtttagtagtaaaattttaaaatcatataatatcgagaaaattgctattcttgggattagttatgctatgttcttctgaaagcgttccaatctgtttcatatgattgtaacaactgttttggtgtcttggtatattacttggttgaaatctatgtgtaaaattaaaaaggaaagttttaagctggcgaaacatgatccactgtatgaaacttgcttgttttgttgaaggtggagtatcttcctttgtcatcaattgacaaatc

SEQ ID NO: 54962 - DNA, 991 bp, Populus trichocarpa
  Intron number 2 from transcript POPTR_0013s02110.1 (locus POPTR_0013s02110) derived from phytozome v7.0 (chr-ID scaf fold_13; pos 1252129 to 1253119)
aagttgttattagcttagttcctggattgcatcaggtttgttaaaccaactcagcttgtaaagcatatttaacagctgtgcatgtgatgatatgttaattggttcttgttccattatataactatttaagtgagtttttcaggcttgaaaggaaagtaactcaaatttatgctaatctttaatcaatttggttatgctatgcaaagataacccacgactttgttagttatccatgagaattcatggaccttttgctgtcttaagttgtcaaaatggagagcacagaaatgaaaggcaatagattctttttaatatgtaacaaaggaacatggtaatgaaagctataatgaagctggtcttatgccattactaaaaaaggaggccatctttgaagagcatcatcccaatggaacataaatgattcaggattatggtgttttcaaaatgtttcccttcacaaggttaagcttctgggacgtaatccattgccttttccattgaggtcaagattactgtcatactagtaaaatgagtttgtttaagtttttgtgtttgttaacgtatgcattctgcattagcatgtggttttcaacaggttatatctgttgctttctcagaatgtttttaggtctgatttgattaacatacaacatattcaattttctctcaattttagaagtcagttgaattaataatgttattgttttagtctctaagaaattgaatgtgtggtaggcgaagctatatgaggaaccgtaggaactgctggttgctgtaagcctggaacacttgcagggtcttcatttttctttttaacatgtaaatggttgtagggaaggaataggatgttaaagtgttcttggtctggtgtaactatgtttgctattttcctcattaacattctcatcaacacccgtgttaagagatttgtatttctaacatctctgctaccgtcaaaattgttgtcattttcacatgcagttcaagttct

SEQ ID NO: 54963 - DNA, 944 bp, Populus trichocarpa
  Intron number 1 from transcript POPTR_0013s07290.1 (locus POPTR_0013s07290) derived from phytozome v7.0 (chr-ID scaf fold_13; pos 6056707 to 6057650)
ttctcttgttttcctaacaaactgttgttttccaggtatgcagctcttcaacttatacaccatttctcttctttcagaactctctaaattttcttttgcgtttccttattcttctgctgtaaactgaattattcttgttcttttggccactttgtttggatcttggaacccaatttatgggggacagtttagacagagaagagcttgcatagctcataatttgaaaatatagtagtaaatatgaagaataacccacaactgtaaacaccatttttgatcattagctctgcaaacgatatgggcttctacttcaacacttggagtattgggactgagttaatgtatctgccctccactcattcatggtttaacatcaaagtctcactttattggctaaagcttgatttcaagatgttataacacatacctgtttcaggcatggtaatatatctcaattgttattaatgcagtacagaaaattaaactatggtttaatacttaatttgcatcatattagttttgtatttagtatttgatgggatctttgtttttaacttcactgttatatttctttccatttcctatatgattggagattgatgtttttagaaattcttagttcaactctatttactttgtttctggatactaatcctctgcatatccatatctgtgaccccattccctgatactcatgtagttgtttattttggatagtttgaatacaatgaactcacacaaaatttggtagattgttatggaatgtgatgcgacgaggatcgctattgtctccatacatttttttacaatctacaaaacatatagttactctttttcttttcttttttgacctattgaggagcctaatatttgttttttccccccaatttccttcgattttaattccagaagggctatcaaagtgagctttagggagatttatc

SEQ ID NO: 54964 - DNA, 575 bp, Populus trichocarpa
  Intron number 1 from transcript POPTR_0003s10230.2 (locus POPTR_0003s10230) derived from phytozome v7.0 (chr-ID scaf fold_3; pos 11305405 to 11305979 reverse strand)
cgtctcttcgttaactgtcctggtggttctcttaggtaatcctaaacaatatccatttttcattttcttattttgagctcaaagtttgaatcttttttactgctctttttttataggaaagatggatacttagattttttatcttgtttattaaagcagtgtgtggttggttcaagtgattgaattgaagtgggattagtgaaacgcatggggttttaatcctattccaggggaaaaaaatggtattgaaattctttggaatggttatttgttgtagaatgcatccaagtgagtctagtttatataattaaacagtcattagttatgattcgaggcttcacatttgcaagagaactgattatagattgatggttagtttcatcttgatattgtgggaacgggaaaataaacaacatataaaagtgaacaagagccataaatttgagaagtgtgtttgtagatgatagatccacttgggtgatctagggcaaagaaaatctatttccttttttaccattttgttttttttgttcacttgctgatcagcttttaatgatattatgcacagtgcttca

SEQ ID NO: 54965 - DNA, 975 bp, Populus trichocarpa
  Intron number 1 from transcript POPTR_1134s00210.1 (locus POPTR_1134s00210) derived from phytozome v7.0 (chr-ID scaf fold_1134; pos 5944 to 6918 reverse strand)
cattcgtaagtcgctctctctctctctctctatatatatatatatatatgcttgaagtttcactctattcttatgcttgaatttgtaattttgtatccagtttgttttatataaatttaataccctttgaaaaaaaaaatcaatagaaaatattgaaaacctggtctagcttattcaagaaaatctagtcaatgaaaatcattttagatgtggaatttttcttttatgttgtcaactgttttctagagctgtccatctttatcatttagtgtgaatatgctataggtgaaatagtttttctttgaatataactaaaaaattttaacctataaaaaattatttgatatttatattaaatttggattaatatattcatcttaaaatcttctgatttgattattatttagttcaaattaaaaattaaattatgtgaaaattatcttaatttgatctaatcgacttaattaattcaaaaataacttaaataaccaataaaataaaactaggataaaaataaaaaaaaataaaaaatataatgaaaaaaaatagagagaaaattaaaaaaaaaatgaaataaaaaagggggtcacagtgaaggaggagtgagtcgcaccccaacttttttagtatagtaatccttgtaactttacataagttattgagttcatattatcaaaaaaaagaaaaaaaagaggacttattgagttcatatattatttgagtttccagcttaaaaaattcttgtaaatgctaaaaagttgatattctctgtcaacagtactagcaattgtatgacaaatttaggcgaatagtatataaattagcttttatttgtttggttttcaaatgaaaacagctataacgtttttctttttttaatattcctattcttttcgattgattttttagtgctttaatttatagtcattaatttgcaactaattaaacgtccattttgctgcagggactgttgct

SEQ ID NO: 54966 - DNA, 693 bp, Populus trichocarpa
  Intron number 1 from transcript POPTR_0003s14120.1 (locus POPTR_0003s14120) derived from phytozome v7.0 (chr-ID scaf fold_3; pos 14283674 to 14284366)
gaagaatccctgttgattatcttggtaaacacttagtttttaaccttcacaagaaaaaaagcgaaatcttgggccttgtttaattattttgctttgaatgtcctttttagtgaaaagaagactccaattcagatgtttgttttgcatttcttgatggttttaacttttaagcgtctgctatctgggtttttttttttgtggtgattttgcgtgtattgctcttctgtttgatatccaagaaagtgagggaaattatcaagaaaatgaggacattggagtgtcctttgtctttttatttactgattttgaagagatggagatatcaactgaatacagattctgagatatttggtcatttatttgtttttctttgatcaattactctaggcactgttagtgaacaagtcaaaagagccttaactcctgaattttcctatcatttcttgccagccaaacagatttttcgcctttgttgctaaaactgacttttccaatattgattatgtttacttgtaaagaaattctttgtctgggccaataatagatactgggaatcagtagtttatgtatcttgctttagatttctcttagtgaaacaaggctggtttagaattttttttcctcatcagttcttaactattgtcatttatttgatcagcattgcgccttgggcttccctttgtaccaagttat

SEQ ID NO: 54967 - DNA, 650 bp, Populus trichocarpa
  Intron number 1 from transcript POPTR_0003s17210.1 (locus POPTR_0003s17210) derived from phytozome v7.0 (chr-ID scaf fold_3; pos 16650250 to 16650899 reverse strand)
acaatttcactctgtaagctgcttatttttattttgatattttaaaagtgattttaaaaaaaaaattattttattttttttaaattaatattttttagtatttttatattattttaatgtgctaatatcaaaaataattttaaaaaataaaaaatattatttagatatatattcaagcaaaaaacgcttcgaaaaacaacaattactaagctttcatatacacatttcatgtaattccatgaattagatttttattgaatttgactggttaaaattatgtttgtttttttattttaaaaataattttttaaaattaacttgtcaataagccaaattctgtttagttttttaatatctccttttgaattgtaattttatttccagtataatgtatgagtttttatcctattatctgtgaaggttttatatagttttatgtatttatgtatttagactttattttatgttgttatgattcaagaatatggttctatagagaagagtccaattctcatcccggtgtttggaataaacctagtcttgtatattcgaccatatgtaaaaacaaccacaaaatcatcacatggactaggcctcgacattgatatcagtatgatccttgtttgtaaggcagagcttacaagatagtg

SEQ ID NO: 54968 - DNA, 577 bp, Populus trichocarpa
  Intron number 1 from transcript POPTR_0019s03260.1 (locus POPTR_0019s03260) derived from phytozome v7.0 (chr-ID scaf fold_19; pos 3276205 to 3276781)
gcagatttagttacgccaaaaactcctttttgcaggtgatttagaaaatatcggatatattagaagtaatttattcaatacacttagcattcaggtttcaggtttagtcactatagtccataataaaactatagattatagagtatttaatgcttctctgaattgttgactgatcaatttttatggggaaaaacattaataacaaatatatatatatatttattaatatctacttatataaaggatttgtgaatgatttctcatgcaaaaatctcattacgaaggatggatatatttatgctcgagttcattatcaagtttttaaaattatttttgaaatctcttcccatatacgaagttttttgaatgaagcagttaaaagtttaaacttcacagctaatagtgatgggtttctgaaagtttaaagttcaattttttttttttatttaataagatatattagagaataatataaaaaaagttattataatataagtttttatttaccgagatggttatttcacaactataacatgtaatcttattttgctttgaaatttgcaggggcatagtgtaa

SEQ ID NO: 54969 - DNA, 843 bp, Populus trichocarpa
  Intron number 1 from transcript POPTR_0022s00750.2 (locus POPTR_0022s00750) derived from phytozome v7.0 (chr-ID scaf fold_22; pos 357421 to 358263 reverse strand)
aaaagaccttcttccttcaagtttgaaggagcttggtacgtatatatatatgcatataccttcaaatttaatgctgattttctatatattacatccttgagatatagttgactatatatatatatcgtgagatcatcgacttatagtaggtttttaaatatattatttaattacttttttttctaagaaaacgaagaaaaatcaatgctatgttttctaagatataattaaaagtctgcctgctatcatttatgaaaaacaaatttaaattataaaaacgagtaaagtgaaaagtaagtagtagtgtttgtttttaaaagtattttttattcataaatatattaaaataatatttttttattatttaaaaattatttttgatatcagcgcatcaaaatgatataaaaacatcaaaaaacaatattaatttaaaataaaaaaataaaataaaaattaattttaaaaaaaaacatttttaaaatacaaaaacaaataaaacgttattcattcaattttctaaatcaattttcaaataaaaagaagaagaaaaggagtgaatggatgaaattggctgttgaaatgatctccccaccttgaactctgcatgtaatggagcccatttgaacgtagcacgatcattaatgcatttgcaggtgtggttgatccatcattcatgcccccccactcccatcacctctcatgaccttgcttttgctaaatttttatatatataaaaaaaaacagagataattaatgggataaaaaaaatatgtttttaggttttgaaaatacaaaaattatataaaaaactaatttagcgggtacttttcaggctgttcagct

SEQ ID NO: 54970 - DNA, 749 bp, Populus trichocarpa
  Intron number 2 from transcript POPTR_0006s06300.1 (locus POPTR_0006s06300) derived from phytozome v7.0 (chr-ID scaf fold_6; pos 4496875 to 4497623)
ggaggatctggaacttggctcggcaaaagaaacaggttgattttttttcagatcaattttgtggcgcttttagctgtgctcttgatttgatatttggtatttggtgatgcgtttgtatttatttgagagttgagaggaattttttgatgttggaaaattgtgaacttgattggatggatatttttggagggaatgggagggggggggtggagtttggttacttttcttacatgggatttaacctttcaataggttgtttgatcacaaatcagtgttagttaatggggtttgatattgtccatttgcaatcgcaacacacttggcacatgaccgttttggagaagatgatcatatggtaatttgtctgttctcattccaaaatattattacttgcgatgcgattagctttcaagatctgttgagatttcgttgaaatgtgtgagcttgtaggtaataaattctcttgttgatgctttgcatgtgctgatatagttcaatttttcttttaatctttttccatccttttttgggggtgagcgggtaatgtgtccaaatggaaagtgtttaccttgtagctgtctagttttgcaatgaataacgtgtcacctttcgttttttctttggattttctaaatctcagtgtacaaaggagatgccacattctctggctcatggttctttttatcttgggctgaatgattgactattgtattttcttttgtagcttgagggagagctagcccatagaa

SEQ ID NO: 54971 - DNA, 887 bp, Populus trichocarpa
  Intron number 3 from transcript POPTR_0018s02830.1 (locus POPTR_0018s02830) derived from phytozome v7.0 (chr-ID scaf fold_18; pos 2497627 to 2498513 reverse strand)
ccgaggatcctgcatttgtaaacttcaatcaggtaaacttttcgcttgtgcaattctctttggtttgaatttgctatttttagaattggtgcctttttgttggaataaatgttgagaaagactataaaagcatttgggaacttgtgtgtttaaggatgtttgtttatggaaatggagttctggttgtaattattcataaattgattggctctttaggaagttccaagtaatctttttgggtgaaaaaccaggacatgatgaaaccccggtgacccaatttcccagaacagattgtgtaatctcacaattagaaagatggatgttttgcatatatttgatgttcatgacgtgatgtgtctgttccatgtataatactgattgattgattgtattttttaatcttaacgttacacactattgttgcaacgttgaactggaaaacaatgtccttgaaatgatagggttctttcctgtaaatagtaccatacaacatacatgctcaacaaagaggtatgataagtgttctcatcataatatcaaccagctggagcatcaaggaacatatgttcgttttcgaatgtaacatatgatcgattaatatgcgctgattagaaggttgcatgttttccaagtggtgtgtaaagtgattgcaccatttgccagtaagcaaccaaaattgaataaatagtgaggctctgcacaagtgcgtgcccaggcagagatatttcctgggcaagtctttttctgctagcaaagcctacatttctgaacctcaaaacactcgtctttgttcaatttctcccattattgctaacaatatatgcaactactgcatctgggaaacaatattattatgtctttgatttcttccttctttcagattattg

SEQ ID NO: 54972 - DNA, 1007 bp, Populus trichocarpa
  Intron number 2 from transcript POPTR_0003s05480.1 (locus POPTR_0003s05480) derived from phytozome v7.0 (chr-ID scaf fold_3; pos 6760715 to 6761721)
tgaactccgggagattcccacacgatatcgatccagtaagaaatttctacacgtgttaaacttattcgtgaaatgtcattgtgcttcattcgttctctagttatataatagtggctgtgccctgttctgtgtgagaatgaattcctatggagagtgaataatttacatcttgaattagttggacagatgtgctcaataaattcggtttaagttgatttatttagccaacgtgctgatgttatacagtgctgttgttgtgaaatgtggatttgatctggcttgagttggacagactacatgcatgttgtgccaacttttttagtttgtgtttagaacttttcccatgctcttggagcggtttggactggaagggatgtattgggaactgattcagtttgaagattgaatgcgcaaataaattgcatgttgacaaagcattgctattattttagatattaactattagctctatccctttccataatttattggtgttgatcgtctctgtgatatatttattgtttaaggtgatagcctacctcattcttaccatgcagatggctacaaaagtcatgtgtcatgaagtaatatcatcctgaaacttgcttctacctgaaattttaacacgttctgatatctccttgttattttacttgttttgattctgaatcaaccaatattaactggtggagttttatttcctgtaatatttcaaatgttgtgttaagggcagtacttgtgagcaatctttaccaatatcgatactggattggcttttgcattatcatctttataacagtttctttttactgttatgagggaattaataaccttgaccgagctatcaacacttgcatgtcgtttcacccttcttttccacagtctgcattgctatccagtctaagagctgttatgcacatcttatgcagcgtctttctttattatcttttttcattctcaaactattgttatatcagcaacaataatatcacactatttccctgcag

SEQ ID NO: 54973 - DNA, 963 bp, Populus trichocarpa
  Intron number 1 from transcript POPTR_0019s11320.1 (locus POPTR_0019s11320) derived from phytozome v7.0 (chr-ID scaf fold_19; pos 12644646 to 12645608 reverse strand)
ttgcctcgtactatttcagatcttcgcttgctcaagtatgccctccttttctattctcttttaatttcaattttcttcgttcttttctttattgctcaaatttggatgggttttaatttttttagttttttagggttatttggttatatatgtgaattgattgtttgaaattgcatggatagatgtgggattttttcctcagttgtttttttttttttttttttgtgaatcataaggattttatggtaaaaagtcagctaaatattgatggaactagttttcctaatgaaaatactttggttttgttcgttaatttattgattgggatacaggggttgttgaattctaattctggaagttgtttttgagtgcagggagatgttgcattggagttaaatttttcatcttgaaggttgaattgatagatttaatttgcttttcatgtgcaattgttagtagttggaaaatttagaagtgaaaggatttatgttgttcgtggtgaaattcaggaatgggatttaagttagtcctttcatttgagactatggttgaggtcatggaaatgaaatgaactaatttctttgttcaagatgttgaccataattttatggcagattaagttattaggtaaagtgggagagtttttatagattatttttacaatgccgcagatttggagaggcgaatcagatcctcaattttagcctgactagtctatataaattgcgtagattagtaatgtacaatctctgtgtgttggttttgatcttctaaatgtttgccctgcatgcttggcagtcagagcctcaaaagtagtacaaacgttgttgtgttaaaaaaaaatttactatttagtggctaattgttcttgtctattaccttctttatattcttgttctaactgtatcgtacttttgctgaactacattgctctattttgcttcagagacaatctcgcaacat

SEQ ID NO: 54974 - DNA, 471 bp, Populus trichocarpa
  Intron number 1 from transcript POPTR_0003s13210.1 (locus POPTR_0003s13210) derived from phytozome v7.0 (chr-ID scaf fold_3; pos 13605982 to 13606452)
aaggtgaatcttcctctatccagtctccattcttgctaaccttcctatcaaaaatatgaattttgttttagttcaatttgatttaatttattggttctttctttagggtaataaaactatgatttcttgtgaaatttacccttttttcccctcgttgacatatgataaagcattagtcttttttctgcttttgtcaatgttgggactacatgtgtagattagggaatcagacatcttgttgagttttcttgatgtctcagcttggtcacttcattgttatttctttgaaagacaatgagtagtttggattttaatacatggcttgtgttcccttttggtcctttataggaaaatccccttctttctacaggtccttgtctgtagttgaagtatgtattttgtttactttcttgtttctaacccactaatttctatttctattacagaaagtggtgttgaaattggacctcc

SEQ ID NO: 54975 - DNA, 639 bp, Populus trichocarpa
  Intron number 1 from transcript POPTR_0018s04970.1 (locus POPTR_0018s04970) derived from phytozome v7.0 (chr-ID scaf fold_18; pos 4414336 to 4414974)
tccaatctcaacaggtagcaagcaagctaaggttagttctctctctctctctccccgttttttgtttttttttcttactgctatattcatgctctcttatctgtttcataattcctaccttctatttgattttgaatttcatactaaaaataattttttttaaaaaaaccccaacttgcttgtgtttgcctggaaaacgtagcaaaggatttagcctgagaacaattaatttggcgacttttttagatgtatacactttctttggttactaaacaatgcatatcaactgagaattttcatcttttttctctgcccatgacaataatgaagaaaatgacattccgagatattctcgagtttgaaccatttgctgcatcttatgtgggaattcaggttgctggccgtggcccttttgttttgctgtttttgagctagatgttctgttgtatgtcgatgttatttgtttgttactcttctattctccggtcagttgacttacatcagttggtcttcaaaaccattagtgaattcgagaattgttagttggcatttgaattgggtgattgatacttggcattcttgtttttttcatggattgtagtaaaacaacagggtatcaaacttttagcttgattcagt

SEQ ID NO: 54976 - DNA, 699 bp, Populus trichocarpa
  Intron number 3 from transcript POPTR_0018s07300.1 (locus POPTR_0018s07300) derived from phytozome v7.0 (chr-ID scaf fold_18; pos 7483366 to 7484064 reverse strand)
ggaagtctaggtatgtttgttctttttttttttgttttcagagttgtaaatttggtggtgtttattctgattttaatgatgaatatgaaaattttagttagaaaaataagaagggttgataagtatattgaaagatgagattgcatgtaaatacactttttaaagaaaagttgagggtgtgaaggtatctttgaagaaacaaagttggactgtgaggaatcaatattctttgtgctccccatccaatatgatgtgggaataacttgctgtaatgtagcgttatttgagcccatggttgatcaagcatgatacgttcaaactgatagaacatccactgagatagaacatccactgagtgttgggggtggggggttgattctgagaccacaactttgggagtagttgcattgtcaaatttgatcatgttccccaatgaattctcttccctcgccttaattattatcaaactataaaaatatgaatattctacttttagtgtttctgaatgtatttcaagagttacattttttttgcatgttttggagaaatataatgctaacaatttggtttctgttactattccactttttatttctgagtgctttggctattcagcatgtaatagtcttgttttgaattaatgcactcctgtattgtttgacagagcatccaaggaagaccaaaaaatattgtttcgca

SEQ ID NO: 54977 - DNA, 863 bp, Populus trichocarpa
  Intron number 1 from transcript POPTR_0003s01430.1 (locus POPTR_0003s01430) derived from phytozome v7.0 (chr-ID scaf fold_3; pos 1327114 to 1327976)
gcagcaggtaataaatgtattatctactcatgtttttttggagttcattatgactccttcggcccttggtccctcccctctacgtgtatttttttttggagctacttatgacttagtttaaatttttagttaatcctcgtatgtattatcaagaactatatctatatgtataatttgtaagcttttaatccatttataacttattccctctatgttgttttccaatttatttagttccttgagaaatttgatttggtaattgaggatagtctatgcatgctatagaaatcatactaataagtttcggaagccaacccgagacacgggtcagttgcgatgacctgagtcacgggtcaattacgatgactcgaatcaactcaaatcttataataaaattttttattgacttgacccagatcaaacttctaatcggttagctactggattagcctattaagagccgggttgcattttataatagagatagaataaactatgtatttaatcttacatttttcaatccatgtataacttagtcacccattaatttcacattcttttttccccttatgtttttttactttttttatataaagaaaataaagaagagagaagtaggggagaggtgcaagttttgattatgaaataagtactttaagaataaaaacagctaaattgaggatgatcaatgatggtggacaggatttgttaattatttattgatactacaaggactaatttactagttcactaaactatagggactaagtttataatgaactcatgtttttggtttttgctgttgttttgtgatgttgctttgggcagggcaaaacacgtccacagaggcaaaaagttttacg

SEQ ID NO: 54978 - DNA, 464 bp, Populus trichocarpa
  Intron number 1 from transcript POPTR_0003s19945.1 (locus POPTR_0003s19945) derived from phytozome v7.0 (chr-ID scaf fold_3; pos 18586181 to 18586644 reverse strand)
ttccccagcactgaaacagctgtctctgcggctaggtacatatggtgacttctctcttcatgtatttttcagtcggaaaagaaaaactgatcttggttactgttccttataggcctggtgatacaattctaattgcttgcagcaggagggaggcatcttgcctctaatattcaaagaaacaaacctctttgcttggtatgcggcaacaatctaatatttaacaattatgatataaatacctcgcaactagacttggcattaccttggcagatggtataatagcattccactgtcatttacaccctttcttctttctcttccaatgattctaacctttcaaattcaaaggagtcaggcttcgtgaatcaatcatttctttatgcagtgccctggggttcttgtctacttgcaaaatagcaaacctgacagtgaggaaaggcttggttgctgcttgcatcacgaaa

SEQ ID NO: 54979 - DNA, 436 bp, Populus trichocarpa
  Intron number 1 from transcript POPTR_0006s29190.1 (locus POPTR_0006s29190) derived from phytozome v7.0 (chr-ID scaf fold_6; pos 26641473 to 26641908)
agagcaatcagacaacattagctagagactctcaggtaccatctctttctttacctcctgcattactttgtttcagttaccgtaatgaaaagaacaaaaaaagaaagaagaaaagaaacatatttagttcttggatgtctgtttgattaatgattaatgattaatgattttgatatttgattagtagaatgttgttagtgtttgcttcttggttttaaaaaatgggttttcaatgttttggagaaacttgtggtctttttaatgattgtcacctccattttgaaaaagaagccaactttttgttatatgtaagagaaagaggcgtcttttattaggtagattgtcattcataaatggaatgaaaatgcttaacccttcaagcttctttgatttggggctgagaattcctttatgcagttggtggggatagacagac

SEQ ID NO: 54980 - DNA, 1069 bp, Populus trichocarpa
  Intron number 2 from transcript POPTR_0013s01640.1 (locus POPTR_0013s01640) derived from phytozome v7.0 (chr-ID scaf fold_13; pos 928989 to 930057 reverse strand)
agctggttctactcctccggtgtctcctttctctggtaagacaataatgcccttcggttttttcttctctcctgaaaaagcggagaataagggtacttttgtcatttatggggtcaagtgtactgcggttattgtttaatttggcggggtgatgcaagttgtgtgtttgtttgtttgattgccgttttagataatgacattcatgtccctttcaacgttcaactatgcatgagatgctattgatctatgccctacattaataattttgatattaatgttgctaatttttgacttggcatccgcattttatttagggttggttggcatatcacatcaagattatgtgtaatggataatggtaggtagacattttttgtgtggactataataatatatagtgtagttcatttttgataaatatcatatgttcatgatgaagttaaaatgaaactatttgctagtcaatataggtatcatcacttggattgcgtgaaatatatatatatatattaatacgattaatttagctaagaactagtagcttttaattgacaaagtcaacatgatcttacaaagaaatgaaaactatcaataactaatgggatgtcactactgaacgaacacaggacgtgggatgtttctgaagtttgggatgttactggttttagttcgaacacaataagattaattactctatgaaaagttggtgcaaggcatcccatattgccacattatgataattgctacttccataattctattgatctgtatgctttgctagtgggaatatatatatgtttaaggttgaggatagtttaattgattctatggtgcttggtagcctgttgttgtctcattaattgcactctatagaggtctagcgagccacatggtttcgttacctaccacctcgcacgttcttttgttacctaccttgcacgttcttttgttacctaccagactgataatctgggagaagtgaggatgagtgaacctggtcactgacttaaaccgattgtattttgttaaggaagcagagagtcctttcggtttcgaagaaggtctacgt

SEQ ID NO: 54981 - DNA, 723 bp, Populus trichocarpa
  Intron number 1 from transcript POPTR_0019s05210.1 (locus POPTR_0019s05210) derived from phytozome v7.0 (chr-ID scaf fold_19; pos 5462193 to 5462915)
ctcattcttaggcttcacaggttgcttggtaacaggtatctgtaatattccctgtgtaatgatcggattttatggtctcggggttgctgattcttttctctctattcccatcagctggaacatccataattaggttgatttggatctctctcttgtttttaatttattctgttttttttttagggttttgttatgatcttccttaattcctcaaaaaactagaagcttgactttcgattaacactttaaattgtctcagaaacgtaattgttgggctttaacttaaaagggtttccccttgtttatttctcttacctttcgcttagcaatccgaggttctatcatcatcatgaatcatgatgatccgatctccatctcttttggaaaaagtatatattcatacatgcatgtacgtgtgcacgtatttatgcctcttctttttttgataatcgtcgtatatatttatgttattgttccttttgtcttcttttctcgttcctatagcaacagcgttctaaaactaactccaatgtattgtattactttatttgtcaacgttttacacagttcgattaatagagagtataatgggcagatttagggctattggaagtcgccttttggtttttgaatttgaaataacttagatcgatgcttgctaggcagtaattttgtctgtcaatcttacttttgtttggttttccttcttggaacaggtggtct

SEQ ID NO: 54982 - DNA, 229 bp, Populus trichocarpa
  Intron number 2 from transcript POPTR_0006s23950.2 (locus POPTR_0006s23950) derived from phytozome v7.0 (chr-ID scaf fold_6; pos 22677417 to 22677645 reverse strand)
ttgcctgtaagctttcccattgagctttgtatttttattgctaaattaaattatacgccctcgtaatcatcatgtaatcatgattcttattactcaaggagtgtttttgatgtataaatgtggttagatggaggttttttttttttgaagacagaaaattctggctttcatgtttggtagaaaacttttcaactgatgctgtgggtttgttgtgtttattacaggaaat

SEQ ID NO: 54983 - DNA, 737 bp, Populus trichocarpa
  Intron number 2 from transcript POPTR_0003s04240.1 (locus POPTR_0003s04240) derived from phytozome v7.0 (chr-ID scaf fold_3; pos 4954324 to 4955060)
ctattcggatccaaactgcttttcgaggcttattggtaaaatgggttccttcaacttctctgttttgtgttacaaattgtgtgattttagggtttttgtcaaataggttttgtgttttcttgagttttgtagatttagcacctgttttcaatttcatgtctctgaataaatatttaaaacctgagcaagaagaacaaataaagaagcaagcggagaagttaatttctgattcttgaacaggatctgatcggtgatcaccatttgaagagtttctggttttttttaagatacttcaatggagaaattacaaaggatgaaatttgattcttgaacaactgagccaaagtgttccagtgttcaatctggtgtcttaaaatttttttcttgagcaaactcatctcaaataagcgtgatgtacctcacttgtaaagccattttcttgttgtttttgttgtttgtaattgcaatgcgtaaagttgctgctcagttgtaatgctatcacattctttattgcctcaagaatcacatgattattgttgaggaagcatttcatgaccatacagattttctgcttgcattgtaattctttaatttgatgttttctttttctttgattatctggttgcttttgggtgaaaagtgtggtgcgattgcttgggaaaattctgtttaggttacggaggcttgtttggataattgcaggcaagaagggctacgagggctttgaaagcagtagt

SEQ ID NO: 54984 - DNA, 1019 bp, Populus trichocarpa
  Intron number 1 from transcript POPTR_0003s10130.1 (locus POPTR_0003s10130) derived from phytozome v7.0 (chr-ID scaf fold_3; pos 11238038 to 11239056 reverse strand)
tcgctgaagaaagatcgactgtgaacaaggctcaggtatgtgatttatttttatttttaccaaaggtcaatattgctttggatgaaagaattaggggtcccggataagtcttgaagcccagaatgtgctcgacactttctctagcctgtacatgcatgaagttctttgacttctcaatcgatcttagatcggagaaatgattagatatatggaagaagaagattatactctatttttcgcataaatatatgtgaaaccggttataaaagaaattgttcgtgaatccaaacctttatgaaagagaatacatcccctaagatagtgtagggatgcataacccaagcacttaatattagatgaagtctaattaatgattttatattattctttctaaacactaatccataccttttatagttcacatgattcaccatttaacttgcatacatcaattttctctaaattaattataattgttctgaaattgaagttcattttataattcaaatccgtgttcttaatttacaaaactctttacgtcaatcatatttctgtagaaatacatttctaaattaccaagttccatcattgttcattaaaaaaaaaaaacaatcacattaactaccgtacgttattcctatcttcttctcccttgtcttttgagcttgtgggattcctgcaattactttaattcatttatttattggtcgattaaactgctccagccgtccatgtcctctttttataaattctcatggcatgtataatgtttagtggatggtgatcgcacactaatatggactctttacattttctttctcatacgaatctctttatctattttgacggaaagaaatgtcgattatcggtgcaatattctgtctatgcttacaacaaaagtctcgaatgaactattaaaggttcaactttcttttcgacctcatttgtatttagttcttaccttctttttttcttggcgtgcagaaaaggaaaagaactggcaaaaaacaagcaaacat

SEQ ID NO: 54985 - DNA, 655 bp, Populus trichocarpa
  Intron number 3 from transcript POPTR_0019s03110.1 (locus POPTR_0019s03110) derived from phytozome v7.0 (chr-ID scaf fold_19; pos 3123516 to 3124170 reverse strand)
agcttctacagccaacagttttctgcacttcaaaggttattcttcttgattctgtggtaaaatataggaaaattattcgtcaagagcaagctgtggcgatgctactgaataacagaggaattctgtgtaaattgttcacacgtaatttcaaaaaaaaaaaaaaaacgtataatatcctcgttttgtagaaaatacaccgctaattggtaatttcatgatactattttgtagtttatatgaggtcattgggttaatttgcttgtcattgtgtgttcaaaatgattttattttaatttttatcttttaaaaaatattttttaaaattcaccatgctaagcacgtcaacttaattataaactaatcaattagaacattttaatttaactaactcaagattaaaattaatttaaattaaagttcaagccatgatggatttgtcatgtcaactagatgtgcatgtcaattctcccactattcctaaacaggcaacatcgccttgtctgctaatcatttgtccatatatactttgaaaaatgtaacagtaacaaataatggcttgatgtgttttaatttttttgtcaaaatcaaaaggcaactgggtatataatgtcatgccatatcaatatcctttctgatgaaaaaatgcaggcaaagc

SEQ ID NO: 54986 - DNA, 941 bp, Populus trichocarpa
  Intron number 1 from transcript POPTR_0003s07950.1 (locus POPTR_0003s07950) derived from phytozome v7.0 (chr-ID scaf fold_3; pos 9443027 to 9443967)
gctcccctccaggcctgctccccctgctcaagctggtgagctttgatttagtaacccttctttatcttttgattaagtctggtacttttggtttatataaaccaataaacgtgctttgaaggtgtttcaagcattgagattttttttttaatgtagattgttttcattttgtttctttgttctgttataatttatagaaattgttgattgaatagttgtttcaacttgatttttcttcgagtaagcctactagtgttagatagttctggttgttgaggaaatagaagaaaatgaggacatgtttattaaatctgttggtgtttatcattacttgaaatgggctttgtattttttttttgttttgaaatttggatttagtaggagaaatttgtttaatctctgtatttaaaacaacaacaaaaaacacaatgattctgtgttattctttcaaacacaaccttgtctggaattgaacaagaaacaacagtcaacaaaagcttcataatcttgtcttttaaaatgtttctatttgatgagtttttggattaatttagttttctaaccttagtttgctagagtgttggttttttagctggtacacctgtttgcttacttatcattgcaatgctgattagtgttgaagttctagatgattggttaatcttgttttggttgttggaagataaaattggtgattgactctacccatgtagtcctgctaggtttcttctggtcagttttcgttctctacactttacatggtttacttttttccatgtattttgaaagtaaattctctgtttatatgttttgttagctttttgttatttcactgaatcatagcacaggatgacagctgaaacagattattgtaggagtttcatatcatgtttttattactgatgtttttttttcttctcaaccagtgagggaagcaaaga

SEQ ID NO: 54987 - DNA, 651 bp, Populus trichocarpa
  Intron number 1 from transcript POPTR_0013s14660.1 (locus POPTR_0013s14660) derived from phytozome v7.0 (chr-ID scaf fold_13; pos 14807826 to 14808476 reverse strand)
tctttatcaaaacctggctagagaaaggtaacatgtttctccttctcttttagttttctgggtgctagttgcttttatttttgttctctcaaaattggttctttttttgtttttgtgtatctcttggttttttgtttgagagaatgaattcctcttgcttgtttctgagaaaaaagttaattgtgcttgatatctgtgttcttgaataaatgggaaaagatttctttttcttagtttatgcatagattggtctcctgtttgtttgaataacagcaacgtgtctctgcttcattgagttttgttttctgaaatattgaatttgctatggttggctgaagtttattggctgctgctttggcgttatgtgattgctaaggactgatggctatacagtttttgtgaatgctattctttgatttggttcttgtttagaaaccgtgtttgagaaagaaagcatctttaatgccatgtttgttttcttatttcagaaaattgtttttgtttcttcatgtttgcctgttctgatggaaacaacccaatgtgggtcttgaagtgttcatgatgggttgccaattgtatcacccctgcagattataaatatgcagggcatttttttgaacttttttccttaatttcaggccagcatttcct

SEQ ID NO: 54988 - DNA, 960 bp, Populus trichocarpa
  Intron number 1 from transcript POPTR_0013s01360.1 (locus POPTR_0013s01360) derived from phytozome v7.0 (chr-ID scaf fold_13; pos 763984 to 764943 reverse strand)
ctcgaagaagaaaaatttaaagagtctgtccataagtaagcctctgtctcttcctgtatgtatatttgtacgtatatgtgtattttttggatgtatttgtatttgtctgtgaaagtagtggattttgaagcgttatcggaatgaagtctcgcttactgtatctttctgtatgtattttgtacgtatttgtatatttttttggtgtttttgtgtattatgtgtgctgtttgtggattttgaacttttgttacgtgggatggatttatggctgttgagttatagataaagtgctaactagtttttgttaagcttatttaagtggtgtggtggtggttttttgggctgtttgtggaagttgaaaatttgaaagttgtgaaaaatttactgatattttctctcttttttttaaaaaaaggataatttggttttatggtgtggaggaaatcaggtaaaagaaaaattttgagcggggaagagaagttttggaaggttgtcttcgttttttgaaagaagaaagattttgagttaattgttttagtagtttgaattttaacttaaaaacttgaatggaaagagaaattttcaaagatccgtttttgtttatcgagaaaagaaggaaatatttcgagtcttaattctttataattgttgaattttatcttagaaaagttgaatgaggccgttggattagatgtagttgagtggtttgaggttttgatttattgagctttgagtgatgaaagagttgggagttttgttgggctgagagttgggtttttatttatttattatttgttttttgtcagggctggggttattcaaaatgtaaaagttgaaatatttgcgatttggatggtctgttggtttttaatctttgtgacttaattgatggagaaattttgattgaatgtaaatgttgtgtgctttaggcttgagaaggaatctggtttttatttcaac

SEQ ID NO: 54989 - DNA, 855 bp, Populus trichocarpa
  Intron number 2 from transcript POPTR_0018s05830.1 (locus POPTR_0018s05830) derived from phytozome v7.0 (chr-ID scaf fold_18; pos 5464402 to 5465256)
cagaaattgaggtatgcgtggttattttctcgccgggcaagtttagttttgtgcaaatatttctttgttcatattgtttgcaagcaacatgatatggatctataggcattcacggtaaaataaaattatgagataggcagataattgcttaacactgccatgttctcttgtggatgacagtctctttgttgccccatgttctccttcaaaaaaattatcattattggacttttatcagccttttggctaagatcaagggcttccagtgcatggattaggtacaccatcacatttttggtcattgaagatagatgcaatgtatacataagtttctgttggggttagcttttatgataatgagcgcctgttttgacatattctttctgggaggttttgcttcttgtcgtttttaccaaatggttgcccattttcatttacactgagttgcatttcaatttggttgaaaagtgatacaaatatattcataaattgctgtggaaatatgagttggacaatgtttatctgtattagcatggccattggcatacagtatgtttggcttgaaagaaccaataaagatagattggtttttaatccgttcatatataaaaaggaaaataaaattgtatgacttccaagcattcaactttgttgtgtgagaatcactaaaaggtatcctagatatatttaaaccaaagatggtaatatggtttcttttgactgaaagattttaacatgaattcttttataagttagatcaaattactaattccaaaattttatgaatatttctcttgatttttttttgtcatctttacaggcactgtcctgaggactgtagggaggctgtttcat

SEQ ID NO: 54990 - DNA, 548 bp, Populus trichocarpa
  Intron number 1 from transcript POPTR_0003s21230.2 (locus POPTR_0003s21230) derived from phytozome v7.0 (chr-ID scaf fold_3; pos 19480918 to 19481465 reverse strand)
caggttaaaaaacctttgttcctcctttgtttttttcgccttaaatttagatgatcaaagaataatctttttttttcttttaatctatccatgctattttaaaattttttgggtgtaatctgaactgggttttgattgctttctgttctggtatatatttatagattaaatgcatgtgtacatggttgttcttgtgtcttcttgagggttttagcttgcattttaggataaaattctattttatgtgtagaatttagaaaaaaaatcgtgtgtgcacatcagtttaaattgagatatagagcatctttgaattttggaatttaatttctcgcacattctaatccttttgttttgtgtttcctgtcattgaagcaagattgtaggagtcaattttttgttaaagatatctactttaagttgctgtagctttagaagaaaaattgtaaatatctttatggaggtttcgaggatggtttgtacttgtgttgatttggggtggattattttgtgtagaggttgatgttatactgatttgttgtgtagtacga

SEQ ID NO: 54991 - DNA, 975 bp, Populus trichocarpa
  Intron number 1 from transcript POPTR_0019s11080.1 (locus POPTR_0019s11080) derived from phytozome v7.0 (chr-ID scaf fold_19; pos 12475175 to 12476149)
agaaagaaaagtgagattttttttttgttattttttatttaacaaaagaaaaggagagaactttgagatttaattttgtcacagacgagggataatcggattaaaggtaattatttgatcatgcgacatgaagatgtgttgagggcatgttgttaatttctacgtggaataaatggattgtgattattcacttgaattttcatttaacaattttttttttatattgagataatcatatgtttttggctagcatattgtatgtcaaatctgtggcttgttatgtttttcctcgcttgttttatggatggtgaagttaatgtttcttaatgcaaaacactgtcgtgccaatatgatcaccagctctaaaggtttatattttgcgaccagatgatgagacttttttaagcaagaatgtgtggtttatgtgttcatttgttcaaacaaagcggagtgtattggttttaggacaatctaattgtggggttaaggaaaaggtttagtggattttctacgggaacgtgtttgtctgttgaatacgcatgaattggattacaattgaattatattcagtgtgaatggttgcaaattggatacaagcttactggctaaagctaatgagtatcataactgtgtagaacttgtaggatatgctctgcctaacaactctttttatagattatttggttcttttcctattagtcacttcacctataaggttcaccttttgtagttataatactaatgatttgatgtgagtgtagaagctagtgctagagactgtggagtttgagcagaagacatacggtagatgctaccatgttttcaagatcagagttttcacgatctgccagtttacaaaataattaacttggatagttctattgcatcatatatattttagaattatatagatttattgatctagctgcttaagatgtagatctatttcacttggacagtcaccagttggtttgt

SEQ ID NO: 54992 - DNA, 753 bp, Populus trichocarpa
  Intron number 1 from transcript POPTR_0006s20700.1 (locus POPTR_0006s20700) derived from phytozome v7.0 (chr-ID scaf fold_6; pos 19691622 to 19692374)
agtgagtttttttttcttctttttttgttaattttcaggtttgttcatttgcttggttgttgagttgaattgacttttgttgtatgattagtagttttacgtgtgatgctaatgtgaatgtgaattgattttatatgctttagaacaagtttggattttgtatgtcagttttattggctttttggtggaattgattgtaagtatggggtttgactaggtgaatctgtttacttttgtagctggtgctaatttgaaggaatttggacatctctttgatacaatctgattggattctctatgaatttaattattgttttcttgtgagtcgaattgatttcttgtgagtgatcgttgccgatgtcaactacttctagtgttgctgtttttacattagtttgtgtggttaagtttagtattgtaaggcaaactcttgaagatctatggtaactggtaagagtggttttcattatgatggttatgtggattgatgcttcttcagcctgctctgtagttttgtgcatgtctgtttctctgtttgcttgatttgctagatgatggctgattaccaaaattgaacatagtccattgtgtggtagctcgtcacccattatttgtttttgggaaaagaattacggaaaaggaagtaaataatgctttcagtgtagaaactcttacgacatgtattctatttaatgcttttccagacaacattctctatgtgatgaaccataagcaattattgctttgtagggc

SEQ ID NO: 54993 - DNA, 960 bp, Populus trichocarpa
  Intron number 3 from transcript POPTR_0003s04460.1 (locus POPTR_0003s04460) derived from phytozome v7.0 (chr-ID scaf fold_3; pos 5179636 to 5180595)
gtttcctgcatttgggttagtttttagctcttcatactttagaaatacttaaggcttttaattcagatgatatcaataatagccagtcaaatttgatcagtggcctttttctttagataagataactctgctaggataacattcagataaagcatcatgttagcattgacccaaggaatcttaaatgtgtgcgtggaaagttgtccggttgcaagaataaatcagaatgaggcagaggaatctttaggttttatgcatgaaatagagagggatggtatacgtttatatatttaaggtggcaatgtataggaaccatcaatgttccttgtataaatgatacatgattgaatttctacttgaattcataaatttgaagacacacatgtgcatgcacaaataaggtggtaattatacttgctgaccatggcgtagtctttaagtatataaggtaatgaattgctactttttccttgatttactttagttttcttctattctagtttcattattccacagtcacaagtttttttccccattcttatggagacataaacagccacttcatcatatatagaggaaactgtatttgttgagaattttgttttttattgtatgcataaccataggtcatggaagtatgagagcaactgaacgatggctagtcttaagtcataaactgaaataacttgtacattggaatataaaaatatgaactgttgtcaatggtgatttatagcatgttatattaatgacttttcctctttaataactatgagttggttctacatggcaccaatgtacattttgatttttctattaggtttttgttatgttgatattgtcttttaagatcccgacagagtaccagttcaaaatggtgggttgggagtgcttaactaaatcggtagttctttaacagattatcttatattgcatgtgtctattcaggtatttgccatt

SEQ ID NO: 54994 - DNA, 455 bp, Populus trichocarpa
  Intron number 1 from transcript POPTR_0014s13030.1 (locus POPTR_0014s13030) derived from phytozome v7.0 (chr-ID scaf fold_14; pos 9591027 to 9591481 reverse strand)
ttcaagattggattcaggtatttcattctttctttctttcccttttcttttactttcagactcctttaggatctttgaataagattctttaacgcttctcttcttacatgtatgtttttcctgtaagttagagatgtcatgtggtctgcttctgctaccgtttcttcctctgcaacaataattaagtagcaatttctggtgttttagtatcgtcatctctttcttgatcttaaattgtgtttatttaactctttttgttggtggggatcaatttatggcccaacttgtaatcaaatgactggttgtctatatatgatggaaatgggggtgccgtaaatgcactgtttctggcatttttatctttcatggctttgctaatgctacagctcatgatctgttgcggtttatttattaaattagcagaagagcttccatttcaagatcagtttctcttg

SEQ ID NO: 54995 - DNA, 480 bp, Populus trichocarpa
  Intron number 2 from transcript POPTR_0013s03470.1 (locus POPTR_0013s03470) derived from phytozome v7.0 (chr-ID scaf fold_13; pos 2149597 to 2150076)
agtgttagtaatccctcaaagcttacgtttttttttgctttgaattgtattgtttacttattttttgtgcattttttttctatctgggctttcttttggtttaaagattgagacttttcatccttttttatattgttggtatgttgatttttaatttttgatggtgtttccttttgagtttgtttaattagctctgaattttgagagagtaggtcggtgagatgacttgtaaatgtatcattggaatttaattctgccattcagctgctatgaataaattataaatgggtgactgtaaagattttcatcagatcaaatgcatatgttatgatgcctcattatgtgtgacaaaagtactgcctttttatttatttaaaggtcagtaagatgtgtaagatgacatttttcttctcgctggccatgcattgaattgtatgattcccagctccgaaggggttatttccaccagaacctgaacat

SEQ ID NO: 54996 - DNA, 663 bp, Populus trichocarpa
  Intron number 1 from transcript POPTR_0018s10180.1 (locus POPTR_0018s10180) derived from phytozome v7.0 (chr-ID scaf fold_18; pos 11157794 to 11158456 reverse strand)
ggcgttttccatttcatttcgttttcttatctcgtgtaagcacctctctgtctcgtgtataaatgggggagagatttgatagatatcctatttaatttctttttcgttagggttggtttttcactcattaatgcatcatcatgagttttaaaatcagtgttactacttttaatccagtaagcacctgcaatgaccatgctaattgcgaagaaaacatgtctgtttagaggttttgaaatttgtgcaaaatcctactagttgatttggaaacttctgtaaagtgcaatctattatagagtagagtagttttaggaagtcatcgcagtgcttaaatgataatggaaatggggggtgcttttgttttatgattggttctgttttattttaggaaataatataatataatgcttttcgttctcattttgatgtttatggcggtttgtgcacctatgtatgtagatgcagtgttttgcaaaggcttgtattgttactatcgtatatgcctgaacacaagtgttttgcgacggcatctatcattttctcgttttgtttcttctttttttcctgtgttgttgatagaaggcttctttttggtctgttgctcatgtgaattgtcttagttttacagggtatagttggcaaatcatttttcccaattaaaga

SEQ ID NO: 54997 - DNA, 1045 bp, Populus trichocarpa
  Intron number 3 from transcript POPTR_0006s04980.1 (locus POPTR_0006s04980) derived from phytozome v7.0 (chr-ID scaf fold_6; pos 3474786 to 3475830)
tccttgcagcaactgttaaggtttgtctttcaatagcctaaagttgaagtcctgaaggtccatgagtgtgaaatcatatagatatactagttatcttccgcggtgaattgtatagagtagcaaatgggctataaaatggaaatcaagggacattggtgctattttatcaagtgatgcaatttcagatcaaaagaaagaatagcacggcacacacgttctacactctaggcacttttgaggcagtaatatctggtgaattgtcgcattggaaataataataaaaattgctactacatactttggataagtcttatgatacccaaaactattgatcttattctagaaataatgttgatatgaattgtctgtcctgaaatcataaagcaaatcttagcttgaggagttgtagtatctctaaaggaacataacttatagttggaattttatagattgttaccttatagatatggatgacaccttatatgtttaaattagaagaaacaggcattccaaaagcaatttcaaataagccttctaccaagggttttctgttctatgaattgatcaccttcacaaatctaccacttgatttaactggcaaggccatgttgagacaaatggaaaggtgggaaaatgaggtggtgttggagctttccatgttctttttatttgaatggggatcaatgacacaaacattcattctatcgcaggtttcattttcatgaaatctattttcattgcaatgctaacattagcagacatagtccagaattttgttggctgcaaagcataaaacatacgaccatggggaatagtcagtttatgtgaacgatctgaaaacatactacttcaataacacattccagcagctaggttgtgtcacagtgctttctatcaatgtaaccaggcatagaagtaaaaacatgtttaatgctttcattgcaggccttcttttcatgaatccatgttctgtatatccggtttattaattttctcattgtttttaacagggccagggatattctttatcagcagatatacaata

SEQ ID NO: 54998 - DNA, 940 bp, Populus trichocarpa
  Intron number 1 from transcript POPTR_0003s11290.1 (locus POPTR_0003s11290) derived from phytozome v7.0 (chr-ID scaf fold_3; pos 12148889 to 12149828)
cgaatcgtgctgctgtttatttggagacgggaaaggtaaatttaacattttgctgtttattttggtttgatttgcttcatattggctttaattttatgggctctatgatttttgaatgctgttacttgtgctgctgacaaaaaagatatttttttgtgttagatttggaatgattgcatagtcttaactcttaaggctgtctgttcttgtttaatgttaactatcttaaagcaatgcactttttgttggatcttagtaaggagtagcccaagctgtgtaatattactctgttgaccaagttccttgtacatactatttttgaagggtgagagtaagttctagtgacgttttatcttattagaagtaaagagaagttctgtttattgaaggacgagtctatcatgtccacacaaagctcagattatagtttgagaagagtctaaatggagactaggagacacataagcatgataacaaatcttctgtcttgctctttctgcttccttttattaaactgtaaataagtaacgcttggttgtctcccacctttctcttcgaaagtttgggtccaaaaggagttgcaagttttggtaactattgcagcggactgcattatgcgaggaagacattgactagggatctccgattcaagtgtttggaaatttttctggaaatggattgaatagaatgatgtcgggttatgatgttcatacttgaatggaatctggagtatattagtcctgctttttgtaatagctagcgagagaaattcaggtgatcacttgcagtctgactagcttactctgcattgatgaaagtttttaatgttatcgtgctcatatgggctaaccatggttttgtataggagtagaattatcacctgtgtttttactatttgatttcacctgtacccctctctgatccaattacaattttcagt

SEQ ID NO: 54999 - DNA, 639 bp, Populus trichocarpa
  Intron number 1 from transcript POPTR_0003s02870.1 (locus POPTR_0003s02870) derived from phytozome v7.0 (chr-ID scaf fold_3; pos 3000212 to 3000850)
ctttgaatcttctgaaagcagaaggatagtacaaagtgaaggaataactattgaagactttacaaaaaaacattgatgattggaaaattccaaaaatttctcaaactcagatttatcaaaaatctaaatatgatattttcaaaacagattttactatcaaaactgaagaaagagatattcagcttacaaaaccttttgaaaccattcaactcctctcttaaaaatccctacaaaaacatctagcccgaaactataaatacattcatgttggccttgtccaggtcggaataaaaccccttacaaaggaaggcttaaacacctccattctagctgtcctccgtgatgctaaatttcaaaacttccaagactccctcctcagttctattgagtctagcctttgcagtggtccggtatcatttgtctgttatccaaacataatcatatccctcaaagacaaatatcttgcaaagtatgatactacaaataaagacccataattatgacatgctcgaaggatctatccatgttgctctcatattcaaaattcattacaaagccatgttctcagcctttgccagcagacacaaattctaatctcaaaaaggagaaacactcctactacaaacagatttatcccgc

SEQ ID NO: 55000 - DNA, 982 bp, Populus trichocarpa
  Intron number 1 from transcript POPTR_0013s14430.1 (locus POPTR_0013s14430) derived from phytozome v7.0 (chr-ID scaf fold_13; pos 14620819 to 14621800 reverse strand)
ccagggtgcgggcttggccttgcaagcccctacgcctagtgtttttattttatgagccaggtgcaatagcccatctaggacacttggccttttttaaataatatttttctaacaattaggtgtaattttcttaaaagttgattaattacaaatatataagaatatatttggatattattttagttagtaccatttaaatttttttttgaataaaattataaaaaactttcagaaacgtggttcgactgtcctcccaaacacatatttaaaatctaataacttatttgtttttgcgttttaaaaacgttattgaaaaaaaaaatattttttattttttctttacttcaaattaagttttttgatattttcatattattttgatgtgctgatgttaaaaataaatttaaaaaaataaaaaaaataatattttaatatatttttaaatgaaaaatactttaaaaagtaatagttaatacaatatcaaacggatctaaaccacacatgcatgaccatagtgtgccacctattactcccatttttgcctcatctattatataattgagtagcaggcagtttagaggttgtgtccattattggttgctttactctaatggctgcattattctgcccaatttcaccatcaaagtgtgaccaaaacccatatttctccttgtataattgacttgtcaaatggttgtgcatggtcaagagagtcattatgccaaaacaagatactaaccttttgctttacctggggccaaagccactgccttctagctatagctagctgatggtttctagtttcttgtttctactcctcaccttcactcactacgtaccgtcaccctctataaataaaaccccattgcaatccattattcctactacatacagccatctacctaaaagaaagaggagatttttaggtttaaagaagaaaatacgagcacatcaagaagggcttggattgtgacagttagca

SEQ ID NO: 55001 - DNA, 224 bp, Populus trichocarpa
  Intron number 1 from transcript POPTR_0003s09670.1 (locus POPTR_0003s09670) derived from phytozome v7.0 (chr-ID scaf fold_3; pos 10935739 to 10935962)
ctgttgagcctattgatcaacttgaagtttttgatatccttttcattaatttttcttaattcaattctaaagtttagttttttcccccttttttctgtgcgttcttcttatgtttggttcaaaagcgatcaaaatattattgcttctaaagacaaaatatttgatgattttttctgtttgggaatggggctagatagtgtaagaattaaccccaattacgctac

SEQ ID NO: 55002 - DNA, 363 bp, Populus trichocarpa
  Intron number 1 from transcript POPTR_0006s05610.2 (locus POPTR_0006s05610) derived from phytozome v7.0 (chr-ID scaf fold_6; pos 3967148 to 3967510 reverse strand)
tcaacttcggcctcctcgccatcgtcttctacgcggtattcactatactcctcttctatccttctaaacaaaccctaactctatttcattccttgtttcctgtttttttttttttcattctatttgctcgctataattaatctagccagaaattcatgctaaaattaattattattgatgctaaagttcatatacattatgcgcaatttgaattttgaattattattattattatatacttctgtattctctaatattatttatttatttattaccttttttagatgttaatggtgctatttattgagcttgtttgatttttttttatatttattttttgtgtgtttgagatttttagctttt

SEQ ID NO: 55003 - DNA, 919 bp, Populus trichocarpa
  Intron number 2 from transcript POPTR_0019s05690.1 (locus POPTR_0019s05690) derived from phytozome v7.0 (chr-ID scaf fold_19; pos 6055023 to 6055941)
aagccagggcatcattgtcaaggtcaggtgcttaggtaatttttctttcgcttcatagtgcatgttctaacaattttctttttcaaaaagtaatcgcttatttttcatgtgaaatttatttagttgactatcgtcaagatcatgctgaatagtaactgttaattggtcactagctattggtgaaaccattttattgttatggcaaactatggtcatcatcaaagcctacattttttacaaattgaacaatgtgcttactttctgagctaattggccaagtcaattactattttgtttgttttatggagttaattatccgcatgtcacaagtcttttttctggaaattaataattttgtatttcaagaaagtgcaatgtacttttttctggctcgtgcaagccctttatgcttaggctcagcaggaccttttcagtgtgtcatcagcccgttatgtagggcaagtttactgagtagaattgattctgatgtaatgctactataaaagaaaacttgtttaccgccataccatcgacaattatttcttgtgatgagatccctttccgcaaaatagctcaattagttaccactttagggctcctttttttcaccattcaccttagcttataaattttgatgtctattcatgtttgttgttaacttcaactcaccaagaggatatgttgtagtgagtatacattagagtatctctgtacatatttgggaagtagtaaacgttgactagcttggcctgtagtcgtccatgaggcttggtcttgtggtatgatcgctgcatgctacttcagaacagtagcatggtagctgattgttggttatcttcatctgctgtgttatatttcgcaaagaaaatgatcctatggtacatttggttttgtaggttgtggtgggacagggaacatc

SEQ ID NO: 55004 - DNA, 625 bp, Populus trichocarpa
  Intron number 1 from transcript POPTR_0013s14070.1 (locus POPTR_0013s14070) derived from phytozome v7.0 (chr-ID scaf fold_13; pos 14403010 to 14403634)
ttttccaaggaaagcttgattttccatctccaaaagtactctctctctcacacacacacacacacaatttgattacatttttgtttttggattttgagaaggaagggatgctattttcttttttttctgtttttttttattaattaagagattggaaattaattattgtagttacaaaagaagcattgatttttcgttccttttcttgttctgtttatgtcttgattctttttgggatgacctgcaaagtgtaatgagtatacctgcaagcatgattgtgactgctctttttgctttctttttgtttgtaatgataattaatctttggcagtttgactggccattatgcaaattgcaatttttgtgtgtatgtgttgaaagctttttcttttttatgctttcttgaacttgtctttctgaaatcactttttggttttggtttattatagtaaccattgagatatcttttatcaatgtttaagctctcaaattctgtatatatttacttcttttgacagtgattaacatgaaagattaagtctttatgcatagataaagtatcaatttcttcttgttccttatttcatcagcatttgagggagttcctgtttgaaagaatattata

SEQ ID NO: 55005 - DNA, 590 bp, Populus trichocarpa
  Intron number 1 from transcript POPTR_0019s08680.1 (locus POPTR_0019s08680) derived from phytozome v7.0 (chr-ID scaf fold_19; pos 10214694 to 10215283)
catcagctcttagcaagcacctctctttatctcctgtaagctcttaaacatcaaccccttttcaattacttgaaaaaatctatgatctctgtttttaatttttctctaaattttaattactgcatggataattggtgatcaataaataaagcatttcacgattctttagagtttagataactgcatgctaatcttttcttctgggtatttagaaaggaaggttcctggcttggaatggtaatttttgctccttttgatgcccatttcttttttcttgaattttgttttttgctgacacgtatttttgttgcccttttacttcaaataaactcgtcaagttttctatatgatgttttgactatgcatcctattatttgtttcaattcttataaatttggtcaatttttcatcatattttcagcattgtttggtaatgggtcttgataggaacacttttcttttctgaatgcttgaaaatcagatgtcttgacattgttgaatttgggggttattctatttgatagttacatacttaacagcttaaaatacttgattaatgtaggaagctccttcaggtgaccttggagagt

SEQ ID NO: 55006 - DNA, 1011 bp, Populus trichocarpa
  Intron number 1 from transcript POPTR_0019s14770.1 (locus POPTR_0019s14770) derived from phytozome v7.0 (chr-ID scaf fold_19; pos 15439047 to 15440057)
aatcgtgcgcatttaatatcagtctaattaatgtatcttttcagcaattcattctgatctctccaatgttacttcaccaatggatcactaccactatcatcatcatcataaggcaactccagccagaatggaggagaacttctgtcgatctgttggaaacagtaccacatcaatgggggattggggaaagagagagcaaagctatggaaaacaatgaaaaagcctatcatcaaatggcttcggccaatttgatttcgatgcagttagcaaagaaggcttaatagcccaacacaaggcaaagcacaaaaatgtgctgcacaggcctgtccgaatctcgatacggtagcagaacccaaatggcccaatggctgaaactaaaaattctgaagcacaacaaacaaaagattggcggcctaagcaaaacatttgcataaagagaacacactcgagtgatgagacactgatgagccagtttgaagtcagaaatagaaactgcgagattataattttttatttaagggattcgagctttgatttgaatcaattatcttagattaattattaattatatttcttttattaaaactctaattacgatatgttgctaggctataaaaagttaagttgtgctgaacattgatcaagcaacaaaaaataatatatcaaacactttacataaatttttctacaactttctctacgttcttgagttatcatcacacacatacaacctcgggaaaagtgcaatggatatgcattggaaattcgaaatttaagatacctatccatactccctccttgggataacaaattctctgacttgattcttcaagaaattagattctcttaatcaacttaacttgtcaagtaatgttttgactggtgaaattttttatttcattaaaattttgaccaacttgtctttgtttcacctttttcaaaacgaattctctggtcttattcctttagaaactagattgttaaagtctcttaatcaacttaacttgtcaa

SEQ ID NO: 55007 - DNA, 916 bp, Populus trichocarpa
  Intron number 1 from transcript POPTR_0014s18530.1 (locus POPTR_0014s18530) derived from phytozome v7.0 (chr-ID scaf fold_14; pos 15799738 to 15800653 reverse strand)
cataataaggtaatttgggtttttcaaagtttttacctttaagggtttggagtattatttacttgttatttttgttgcaaagtttcaaattatggtttgtatgtttgaaatgaagggttttgtttcatgagttgtttaggttttggacatgattaatacgaactttatcataagctagtaactagttacgttggtttaaggtgttgtaagaaagtaatgatctaggtttggattggtaatggttttgtgttgtatggtatttgaattgaattgaggagtagagtcttgcctgctgcatctttaagtgctgttgtgaacttggaatgttttttgtgagaagtaatgaatagaatccgagtatgatcactgtgatttttaccttgtggaaacagctttatcatatacctttactatgatcttttaattgatttaaaagttcattatggatatgtacaacattattgttaaccctccacgcagcattgatctgatactattaatctttgcttatgtatgttcttctaagctatagttttaagtctggtataacgtaatgcaagatgatgtcatagaagaatttccgtcattcattactagtttcaattatagtctggaaaacttagaatatgaaagatttcacaatgtatgcaatgtggttttaaaggttcttgtagagtatgttattatcggctagatgtagcctagctgcttgccttatgggttatgctatttgtctcatacccaactatgcatgttttctttaaagaaattgtaatctaatttgttgccttattatagttttcatgtcaattgatatagttcttaacaatatctcatttaggaaaatggttttgataataacttatatgctttgtgactacttgacaggttctatctgttgttgggcttcttcaag

SEQ ID NO: 55008 - DNA, 770 bp, Populus trichocarpa
  Intron number 3 from transcript POPTR_0018s09690.1 (locus POPTR_0018s09690) derived from phytozome v7.0 (chr-ID scaf fold_18; pos 10696829 to 10697598)
taattttacaggttggtgttttgtttcctatccactgtgtttcttgtctatgtgcacacacatctgcacctgcatgtgtgttttatatttggttgcaaaaggaaagggttcatatgatcatatcattgagtgaattgtcggttatatgattttggatgtttggaggtctttcctctaacttcaatcatgagaaagatgactaatcaagtagaagttgtgggaaggttctcgaagatggtttatccatgtgcattgatgtcctttttaatgtttctgtacttattaggaagttgacttagtgaacagggaagaaaggataagtagatgacaaatgatacattaagaagtaattttgtgtgagcataaatagaatatagcctttgaaagacagggaaatgggaaaaaacaaggatctgttgattaagatcttgttgagtatgaatgggaagaaggctcatgtttcattctcaaaagagaaaagcagaagacactggcaagtggttttgcttctgttttgagtcttatctgtttgatctctatcatgcgcactgttttagagcattaactaattctgtctataaattggtagactgttttgttgagtgagtgatatagctgtttcttataccttttttttttgaaaggtgaagccaattctttgattttctgatatttcagagtgaaaaacttttcattaatttttattattatgatgccatatttgtttttctccctgcagacaactgcactaaaaagtggttccttacgtc

SEQ ID NO: 55009 - DNA, 573 bp, Populus trichocarpa
  Intron number 1 from transcript POPTR_0003s09630.1 (locus POPTR_0003s09630) derived from phytozome v7.0 (chr-ID scaf fold_3; pos 10907706 to 10908278 reverse strand)
gattcttagctcgatttcgaggatttcaacaaggggtaattaaatcgcctgattgtatttgcgtggtttctgttaattttagccgttaatttgcatgattaagctgaatttcaaggttgccttttctttttcttttcttttagggttttgattgatcagtttctatttacagattgccattacctgaatttcttttcatttttagggatttggttaattcatacggtttatgtctcattttttactatttcaataaatgattaattcataatctagggtttctcaaaatgaattatagtctccgcaaatagttttggatatgatgataactattacggagaagttagaatctgttgaaagtttgaagctttgctgtgttggatatgcttctgcagcttctgctgtggctttgttttttgggaatttttattacccttgaaattaaaacttatatggaggcacaaatatgatatatattattctttttcttccttcagtaatttgactgtaaattgtagttggagtcaattcatgggtttgtaatgatgagaatgatggctgttatattgtagg

SEQ ID NO: 55010 - DNA, 789 bp, Populus trichocarpa
  Intron number 1 from transcript POPTR_0003s21290.1 (locus POPTR_0003s21290) derived from phytozome v7.0 (chr-ID scaf fold_3; pos 19509842 to 19510630)
tatcctactagggaggtactaaaaatggtttctaaaatgctgtagtggatagcaaattgatgcctttctgctttctgaagttgttatttaagcacccacgattcgaaactgaaggtaatttatccagttagcactatgaaatttgcagatggaaatttgttgggttgcaaaagtttttttcttcatctgattaggaaaaatgactggtccttgaattcgttatgtgatgttagtagttagttttttttttaagcagctgcaatagtgtgaatgtgtgatgttaatgagcttatgcttggggtttttagtatgattaagtgcttgctttgtgagcatatgcatgcagccttgaattatttccaaagtcatgttttcaatccttgcctcctgttgctactttgatagttgcctcttcgaaaaactaggtttcccacttggaattaagatacaaactttgtttgaaatatgcgctatatggttccgggaagtcccaaaagaaaaggaggggcatatgttcagtatgaatcttttatgtacctttgatttgtatgtggtagcttatgttctacaaatcaaactctgtatatctccctaggtaccatttcgctgtgaaattgcatagacatggaattgaagaaattgttaatgaaagacatttgtttataatgccttgtacaatcctttccatgtctattaacataaaattaagttgtgttcatgattgctgaacttggctataaacttctagtttataagactaatgagttttcatttcagattttcagggct

SEQ ID NO: 55011 - DNA, 823 bp, Populus trichocarpa
  Intron number 1 from transcript POPTR_0003s18040.1 (locus POPTR_0003s18040) derived from phytozome v7.0 (chr-ID scaf fold_3; pos 17254336 to 17255158 reverse strand)
tctgcaccaaattctcaaaatctacaataaaaaaggttacttttcttttacctttcttgtctctctttcccacatattgtcaatggactggatattgtttggattctgtcgtgacctttctttcatttgtgcttttgttttgcttacaatgtaatggtaaagcaaagttttgagttttgagttttgagctttgtgtttttgttttgcgaacaatgtaatggcgaagcaaagttttgagctttgcagcaagcaagttctaatcttcgaaagcaattgatttacttcatacatgcaaaaaaaaaaaaattgctgcagaaaacaattagcattgacatccagttctccatttcaaaacccatgattggataggtcaaactaggggattggaatcttgaaacattcttctctggctctttattttcttatgtcatggtttgatttctatgcctgagtttctttggttatcatatagactggggatatgaacatcgttactctggctatatgtgcacttaatatgctccaattgtgtgtttatttatgttgtggaacttcatttccttttgaactcagatttggcataacctgcaacgtttaagatccgaattccaaaatatgtcttgttaattattacttagatatccataattgtagtcaccagtttgatatatttttatctctcatcaacacggaaatctggttgtaaagcgtatgctaagtggattaccatttattgtagcaggaatggcaggttgtcagcattgatttttagtgaccgaaccatttaatacaacttggaattactgcatcagattgagaaagt

SEQ ID NO: 55012 - DNA, 1003 bp, Populus trichocarpa
  Intron number 1 from transcript POPTR_0003s06270.1 (locus POPTR_0003s06270) derived from phytozome v7.0 (chr-ID scaf fold_3; pos 7733423 to 7734425 reverse strand)
ttcctgcttctgttcaaggtaagtggagtcaacgatatacgacggtcaatatgagattttttttatctatttttcttcttctttcttatcagtgtttctgtttcaaaattaagagattttctgaaagataattttatgccttccgggtttcatttttcagtctatctcataaaatatgagatatgaactgaagtgtaaaacgtgaagattttctctttaatgttatcagtcattggggtttttttgttcttttagtattgtaaatataatctttgcttggttgtatcctagaggctttggcttttgcttttgttcttccacttcaggaaatatagatctttctttcttactctctcatttaatttgatctggtattgttgtttttctcaatccattttcatgtttttcttgtttttttttttttgtgagagtactgtttctttttgcttatgggaatttatctggcattgactgattttgttggggtttttcatagtttacagttattctccacacaaggtcttcaacttgggattgggtttttagagaaaaggttcctttttgtggaaaaaagaaagagcagtttgctttcttttctctcttttgaatgttataaagcgagtggtagtaatacatgtatggttgttgttcctctttttttatctctgctttataccttgtcttgtccatctgtgcttggttgttgagaaaatgaaggaaaaggcaaaaaaaaataatgtgtatactgatcacttcagaccaagcacaattattgcattaggctttgttacctgataggtttatattgcgtgtagtctatgtgatttttctttgtaaaagttcagagagataagataaaataattgcaaggtagaggatatcaaatttggtaaagctaaccttttgattctgtattctatttttttccctttatccggtatttatctgagtttctttttatgtaggaaaaaaactggtcttgatcgattgaggagagatagag

SEQ ID NO: 55013 - DNA, 817 bp, Populus trichocarpa
  Intron number 1 from transcript POPTR_0006s13960.1 (locus POPTR_0006s13960) derived from phytozome v7.0 (chr-ID scaf fold_6; pos 11208510 to 11209326 reverse strand)
gaccagtctcgtgttttgatcaccaggcctcccaggtgcttttcttgtccagttatttactttcttttttcttttggagtattttttttttacttttttttccttttttggatcgtccaattacttgctgactatgatattgagtgagccctcaatttccttgtaaggctgtgtatctataattcagggataaagtaattgttgtctttataatagaatctttttattgctcattggattatgattcagttccatgttctgcacttaatttttattgggatttgtagtgctaattattatctgtggacttatttttttcctgtgaaaaagggttcatcatgcctttgtgaattggaaaagttacggaagtgcacatttgtaaatgttatgtgtagttgtgtatcctagccttcataggaaacacagtctttgatttgtttgaaaagtttattcaatggtggtaactcatgtttgcatatgtgatctttcttgtcacaaacaatcttgtgtaaatttctattaaattagcgaggaagtaaccaaaatctcccaactggtttggttctcagttagagcagtttgaatgtttcgtttccagattttggacaaatgtatgcttgctgaataactttcagatatttctcataaattctcagttctccgcaatttttagttaagttccaagaaatggtctgatttacagtgctgccaaaatcgtattatttggctctggttctgtcactgccaactgaattgtaattactgcatctctggctttccttatagaccgtgtgattcttcatctaattgcaggcaa

SEQ ID NO: 55014 - DNA, 940 bp, Populus trichocarpa
  Intron number 1 from transcript POPTR_0006s13110.1 (locus POPTR_0006s13110) derived from phytozome v7.0 (chr-ID scaf fold_6; pos 10329534 to 10330473 reverse strand)
gcaaaactgctacccaggtcttctttttttctttttgttctttttattaatatcaattttgtcaatttgattctttcgagtttttatggggttaattttggtttcgaagcgttttggggattgcccatttcgttaactgcttgtttggaaacacttctatgctagaattgattttagctatttaagtagattgaattgatttgatttgctaattgattttttttttgtttgaaataggttttaaaattgtggaattcttttgactttagtgaaaatccatgatttatccaactttccctcatctataaaaaaaacttatgtcaagcatgtgtgtgtgtgtgagagagagagagaagggtgtgaatgggattaaattttaatgggtcaattttgaagcaaatcacactccttgtgatttgcaaatctataaatatctctaattttaattcgttgtagaactcatttatactacttaaagctcagctgtaaatggtgttgaaatgattgcattcctactcaaatcttaagtttccaaacagcctgtaaaagctttatatttcttacaacttttcgtgttagttttggttggtgactcttaagttttagaaattttttctcattgtccttatatttgttgtggtttttggtattttgttttagcattggcaattcattaattttctaggggttttttagcaacaccctatttttgaaatcagcatctgattggatttggtcaactatcatgtacttggtcaatgcccatttattagaatcaacatttacttggttatctgctaaattttgatattgtcatttagttaatgtgataatgcataactgtatatttatcaatgtctcaatttgagtttttgattagaaatttggttaaatttgattatcaggtaaccctagctaatctcaaggacaagcctgcccc

SEQ ID NO: 55015 - DNA, 904 bp, Populus trichocarpa
  Intron number 1 from transcript POPTR_0003s13020.1 (locus POPTR_0003s13020) derived from phytozome v7.0 (chr-ID scaf fold_3; pos 13430024 to 13430927 reverse strand)
aacactcagtttggatagcattttaattgagcaaggtaatgaagtgcttgtatttgcatttaaacttgtgctgtctggtttcttcgctcaaccccatgaagcttctctcttcctttccctaatgctctctcttttgtgctctcagtttcttctatccaaatttagctatgtttatttcgattaaaaatttgctttttaacggtactagtattgtgacacacacactcacactctttttagagccaaattatgtagagctacagagtttttaagcaacgaggagttccgtcttcttttttatttttgcctgtttgaaaagaaggaaacataaatgacatacaatgatttatttttttttatcgttaacttaaggtgatttacaagtttgaatttttttttttttgctttcttttattttctcacgtacaattcaaattcttcaaagagccactctgcttcactattagttgaatcatgttcctttttttttgtgtctgtatactgcgcttaaatctggttgattaagattgtttacatttaattcaactttgattcttctaaattagttaaatattgattcgagctgatgtaataggtactttataaggctgtttggaatcaattctttgtagaattgaattgatttctaagtaatagatttgattaaagaattcttatgttcggaatgaaatcttttgggtgatagaattcttttaaattatgaaatttaaaatttataccacgttaaccttctgataaagaaaacgatagattgcttttaggagggagagatcagattggtttacagctagtttatgcaagatttaggattttgggctatttattgttagtttaacttggttaaaattctgggttttgatcaagaatatttgcgagtgagaag

SEQ ID NO: 55016 - DNA, 770 bp, Populus trichocarpa
  Intron number 2 from transcript POPTR_0019s08030.1 (locus POPTR_0019s08030) derived from phytozome v7.0 (chr-ID scaf fold_19; pos 9358271 to 9359040 reverse strand)
cctgccgatttaatcatcctcctaatcggaagctggtatgagctgcagtgttctcggatcacaaaaactacagtaatattactacattttcaattagattcttatctagaatcgatgaacgcagttgaactgagcacccgagtcttggcagattgtggtttctgtcttattgttatagaaatgctacagaactattgcatatgttgctatttggttgtttacaattgaacataatcaactatatgtacttaactgtacttatatgctgatttccattgtgtctattatcaaataatgtttctaaaaactgatttactagtaagttcaagcaaaatgcattgaactcacctattgagttgttttaaattagggaagtatacccaatatcctaaagaaagctttctgaactttcagttctcctttggtgcgtaattatttgcttttcccttgtcagtcaatcacacatccgcacacatggccatgcatgtgttttttgtttgactgaatgcagacatatccaataatgatatggttgaatgtaggaaggagggatgcttttgtatcgaaaaatgttttcttgtatgcatatattcggaatgtaaacgctgccttgcatggagtagcaaaattgcaattcaagttttggcatgctcattttcacttagcagttttaattttcatgtttccttgctaaacaaaaaaaaaaaaatctcttggatttatatgttgaactaagatttgttgaattctaggctattgcagcggccagg

SEQ ID NO: 55017 - DNA, 708 bp, Populus trichocarpa
  Intron number 1 from transcript POPTR_0019s08030.1 (locus POPTR_0019s08030) derived from phytozome v7.0 (chr-ID scaf fold_19; pos 9359164 to 9359871 reverse strand)
cgaggaaacttctctgtcaccgtctttaagcgaaggttcacatgttgcttctctatctatctctctgctgtcttttatgataataaagtaataaataaacattgaatttcctggtttgtttgttgtctttggtgttggtcattgaaactaatgaaagaaatgctgagaattctctgttttacccttcctctgtcgtaaattttgtttgatcgtgtctgaatttgttcagttccagctcgtttgtctaaagttataagaattttggtttttgtcggctgatgggtcagaattttagcctctgtttcaagcgctctaacactgtcttgcgttttgtttaatgttttgcatgtaaatgtaatgaaaagcaacaattttttttaactgtccaagaatctaacattcgaactggtgtttgtaaaattaacccacgatttttgcatgaaatatttagcttcttgctgccccctttattattatgcaaaaatctcaagtattatgccgtgtacaagcttcactttttttttccattttataccctttactttctgattcgagcaactctgcatatatacagacagggaaaacaggatttggagagatccttgtaggagatcatgtagaaaatgaatatcgggaaattattctttgtttctgtttggcgaagatttctcatagatgtttgacctcacctgtccagtttcatttcag

SEQ ID NO: 55018 - DNA, 774 bp, Populus trichocarpa
  Intron number 1 from transcript POPTR_0006s26310.1 (locus POPTR_0006s26310) derived from phytozome v7.0 (chr-ID scaf fold_6; pos 24549133 to 24549906 reverse strand)
gtctttcttctcctcttcagctccaattccatctggtgcgttacgatcttctctcccttcctccaaaaagcgtgccgttctcaacttcttttcggtatctacttgatcactcctcgtgattagtcaacctttttgaaaattaggttttttttgtcataattggggatttgtttggaagcggtaaatttgtcttgttttagagtaattaatggttaatgatattaaataatctgtgtggttattgagaaaatcgagtgaattaatcaaagaaaatggattgatgggaaagttactttaaaaaataaataaatctagcgaaatttttattcagtttttaatacaatttacatggttgagatagaatttgtggtaattgagtacttaattggatactaaatgtggggtcggtgttgttctgggttcttgaacaggtaactgattgaaagttttgatctttcattttttggaagaaaaggttcggcattagcgttttttggtggtcgaaagcacaaaattttgatctttaatatttgggttttgaagaaaacccatgaagatagaagttaagaattttgggttatttgacttttcatgatttaagttagttagctgggccaagtgggttattaggatgtttggattgcggcttgaattttctgtgttgaattaatgagttgctaagccttctcagctaagaaatacttgatgctgataccgttgtgtttttcttgttaaacagaatcgggattgttaaattatctgctgcttgtggtg

SEQ ID NO: 55019 - DNA, 734 bp, Populus trichocarpa
  Intron number 2 from transcript POPTR_0006s20250.1 (locus POPTR_0006s20250) derived from phytozome v7.0 (chr-ID scaf fold_6; pos 19307730 to 19308463 reverse strand)
ttgaagaagattcaaaagcacttcaacttttgcaggtactttctttttcctcttttttttttttttttttgtcttcattaaagcattttttttagttcatcgcttactgatttggaaaagaaaaatcgagttgctcatggtgcttaattaagtgtaaaatatcaaacaaattaatgttgttttcttaatcttgtttataagaaaatggaagtgcttaaatgggtttttcttatatgattgaagctcaatctgcttctggttaacataatattatgccagcggttttggaaattaggggtaattaaaactgaaaaaaatgggttttgtcgcggcgatgtgtttttcttaaaaatggttttcagtgtgattattcagagtgaaatttggagtttctaaagcggacagtggatgctagtatttgtgaattttatcatatttggtaaaggaccgaccctcaatggataaaaggagctttcggttgtgagagagaacagtaggtcgctgatatgtatgtatctatatatatgtatgggcactttgcttttagttgtgtccagatttatttatttttttatttatttatttatttttttttttttggggggggggggtggtttaattctttaagctttctgaactcatcgttttgctcatggattttctcagtcaatctaacatgtgtttgcatgtccaatacagccagatctggtgctcttcacaggcaggttttcttc

SEQ ID NO: 55020 - DNA, 919 bp, Populus trichocarpa
  Intron number 1 from transcript POPTR_0013s04930.1 (locus POPTR_0013s04930) derived from phytozome v7.0 (chr-ID scaf fold_13; pos 3444879 to 3445797)
accctgttgtcctggctactggacaggttagaccaagaaaatttgtcttctttactttatttatgcatttgggatttcttttcctatatttcttttggattttgagagttgtatgaagttgaattgttattggtttggatgctattcgaatgtgcatgcaagaaattctttatctctggggatttattttaagggtttaatgctaaatttgatgttggaatttgagtgtaatagatttttcaagtattctgcacatacggattcttttttgggttctgcttcaaaattgctgaggctttggatttgcatgattttattttgatggaatttctgcaagtactgaatttttcaaacaatggggttggttcttgttttcttgttttcttttcttctttggttttttgtatatttgatttcagttaacaaatttattggaaaaagaaagaaatttatgggcgaaaatctggttgattattgatcattgtctgcatccaagattttgagataagagctaaaggaaattccagttttgattctttatacagccttgataattttggttaaaccgtttgccatcgttttccacattagagataacttagtctgatggccaattaattttcgatagaggcctcaaagactaggactaggaattgaaccctgctctcgagcattaatgaacctgtcaccaacaaagtgaagatgctcttgtgctatgactgatttgtatttgtgatagtgaccttgcagaagtagaaagaggaatgtgcatgtccatgttcattttacttgaatttctgtggtatagtagttggtttcatatttgttctatgatttgatggctaccgagttactcatttactaaaatgtttgatgatttctagacttacgatcgcccattcatccaaagattgctaaa

SEQ ID NO: 55021 - DNA, 894 bp, Populus trichocarpa
  Intron number 3 from transcript POPTR_0013s14970.1 (locus POPTR_0013s14970) derived from phytozome v7.0 (chr-ID scaf fold_13; pos 15041442 to 15042335 reverse strand)
aggatattaggagcttggatctctcttacttacaggtaatttgatgtgtttctttgtctattttggtttctgttctctgtttgttttctgagaaacatgaaggaaagaaaaattcgaaggcttcttgttgaattgttgtttgtttttacttccttcaataattgatctttgttgaagttattattaggacagtacatgcttttgatgttgttctgttatgtaactgtggtgtttttacttccaatatgatgtcacaatgtttcctttgacttggatttaagtactgataagaatttaattgtcagcaatgtgatttcttgccacttggggttgaaattgaagtttggctttttgatgatttgaaccctgctgctgtttcccgacgcattgtttctgtttagagcactaatcaagtctatgattgggaaaattctaatcccagtgggacaatatttgatggtcagcattcctgaaaagttgtctcagaagattcaagaattaggttatgtcccgtgatagtttgtctgaatttatttatttgtttcttcagctatgttttatggtggataataccttctagagaggtttaatgtttgttgactaaaacttggtcaaaaaagttgcacgcgatataaaaagtccatgcaaatgcagctacaaagtgagaatcttttggtaaagtctcctctccactgtacaattgattggcgctttttaaggaatttaccactttagttaattatacagtattatatgggattactgcctcgctaattttgtgtgttctaatcagcctcctaacagttttctttcaaattgtggtaattaaaatgcaatgcaggcagttttgagaactctaaaatgattgtgagtttgtttgcagattacagagaa

SEQ ID NO: 55022 - DNA, 941 bp, Populus trichocarpa
  Intron number 3 from transcript POPTR_0078s00210.1 (locus POPTR_0078s00210) derived from phytozome v7.0 (chr-ID scaf fold_78; pos 30422 to 31362)
agcttctacagccaacagttttctgcacatcaaaggttattcttcttgattctgtggtaaaatataggaaaattattcgtcaagagcaagctgtggcgcgcgatgctactgaataacagaggaattctgtgtaaattgttcacacgtaatttcaaaaaaaaaaaaaaaacgtataatatcctcgttttgtagaaaatacaccgctaattggtaatttctgatgaagataggaagttttagagaattgagctaattgataaacttcagaatagtatatatttcgtcatactgaataatacaactgttaacatatatatatacacaggattgcaggtttgaatttagaaacaaagctaagattgcgtcttagcatttacactgcatttacattgaagatttatttgccgttacaagcttgatattaggcttgaatgatggttgcacaatcctgtgcagggggcaagggattatttgctgaatctgtggggatttcctttataatttcatgatactattttgtagtttatatgaggtcattgggttaatttgcttgtcattgtgtgtccaaaatgattttattttaatttttatcttttaaaaaatattttttaaaattcaccatgctaagcacgtcaacttaattataaactaatcaattagaacattttaatttaactaactcaagattaaaattaatttaaattaaagttcaagccatgatggatttgtcatgtctactagatgtgcatgtcaattctcccactattcctaaacaggcaacatcgccttgtctgctaatcatttgtccatatatactttgaaaaatgtaacagtaataaataatggcttggtgtgttttaaattttttgtcaaaatcaaaaggcaactgggtatataatgtcatgccatcatcctttctgatgaaaaaatgcaggcaaagc

SEQ ID NO: 55023 - DNA, 603 bp, Populus trichocarpa
  Intron number 1 from transcript POPTR_0006s27580.1 (locus POPTR_0006s27580) derived from phytozome v7.0 (chr-ID scaf fold_6; pos 25440469 to 25441071 reverse strand)
ctcgctgtttcggttttttgccttgtgattctcaggttagttagctggtttttgtttggtattttagtaattttgtatttattaattggatttggaattgtattaggttttaatttttcgattatgattgaactaaatgcgaaggaaggaatgataattgcagctttttttttgcttttcatttctaagagaatgaaatgtgacgcaatggtttcgtgtttattggattaggcagtagaagatttatgtatgcttgtggattttaagtgattttttaatttaatgtgatttagtttcctaactaggaggatatgatcgcgcaaaaaatgagacatttctgttcttgattttgtaaattgatcctttttattattattgttatggaattgaaattgaataaaaccaaaatatgaagctgatttggaagtggattcggaactggaatcgtattttgcatgtgcagtttcaatttcaaaatcaaatgttaccttatggttttgatttgaatgatctaaaagtgatttttgtttaaatggtattaccaagcaattgtcttccagatttgggtgatcattgatttaattgttttgttacagttagagg

SEQ ID NO: 55024 - DNA, 703 bp, Populus trichocarpa
  Intron number 2 from transcript POPTR_0014s08380.1 (locus POPTR_0014s08380) derived from phytozome v7.0 (chr-ID scaf fold_14; pos 6234762 to 6235464)
gagacctgataccaaattgatcgccattcttgtcagtattttttttttttacatcttgatttcttttatgtatactattgcattatttatggcaaattttgattattctcgtgtaatatattcacatacatttacacctattacacgatttgcaaatgcatgtacatggttctggtcgaatcacattttagaaataacgtggttcacgtatccacatttgttaagattctattgaaattggaagatcggcaggtgtcaagggtgagtttagctagttagcttcactggatgcacaattgaaaccagaacctggtgctatcgaccaaattattgtactactacttagttttatggggaacaatcttctttcttgttttattttattttattttttactgggataatgatatagacaaaatggcacatagagcggttcttaaataatttttttttctcgactcctggtctgaaaataaagcctgcattgaatttatggaaagtgaattctgatagtgttgctcatatatatgttttttattgtttgcagacatcatctttctttctacatatattcaaggttcagtactctgataaaagaatacaaataggagggaagcaaccttctggtttgtttcttgctaatgtatctcttcttcttagtgagcaagtgccttttgcagataaggacttgacagtgtaagca

SEQ ID NO: 55025 - DNA, 906 bp, Populus trichocarpa
  Intron number 1 from transcript POPTR_0018s06420.1 (locus POPTR_0018s06420) derived from phytozome v7.0 (chr-ID scaf fold_18; pos 6339240 to 6340145 reverse strand)
gcaatcctacaattgttgacaaggcctcagatcagaactcaaggaaactgaatgggtatattgtctttgtttatgttgcctatctttcatgtcattcattggtgttttggtatccgaacatatttcatacgacatacttatgcaacaatttggttttgatgcatcttaactcttaaattggttacctacactatatctagacatgccacattccaccaaaatgaaaagaaaaactttggaaagagacatggtgtatggtgtggttaaaagctagggttctcaagtcctaaggttacagccttaaaatgtagagaaatttagaaaaaactctctattgttttattaaaagtcttaataataaccttcttctcaaaataaactagacgtttctatttatattagtcttaaaatcttttatgagaaaggatttctaattaaaaatagaactctttatagaaaatgattcacaactaaaacttacctaactaatagaatccatctagcattagaattcctaaatactaattaaaaacaaataattaaaatccaaaattaactagaaaaataattaaaataacaacttgaagcttcatattagatgcttctgggtttctttacggacttctcttcatgcttggtcttgtctatttggttcataaatatggttgtaccatgctccacgtcagtaagttagctctatttttgtgcttgtttacatatccattcatcttataaggttcttgttatgtctgatgtggtgcttgtaaagggaataaaaattgcagcacgaagcaaaagtaaatcttcaactagatcaagtttatcgtcttaattcagtccatcttccctcctgccacatacacacaaatgaaggaaagaggaaaacttgctactccgcacagataa

SEQ ID NO: 55026 - DNA, 748 bp, Populus trichocarpa
  Intron number 3 from transcript POPTR_0018s09900.1 (locus POPTR_0018s09900) derived from phytozome v7.0 (chr-ID scaf fold_18; pos 10965868 to 10966615 reverse strand)
cagaagggaaggccaaagtagaaaaggaaggcaaggtaactaagcttttcttcatgttattcttgatttctttgaggatctttctttttctaatgtgcgcctatagtgcgcatgtccgtaacatggtgtatccgagatctgggattgaggttcagtggggaacagacctttggtagtttgtggcagaaataaatggtgaaagaatattgtccaatgaaatggactgcaaaacccgagaaaatgaaaaaataaattaaatttaataacctgtttcattaaagggctaagatcttctggggtttggaagaccattagattttgttacagggtgtgcatttatgagagattttgatgtggtttgtttctttatgtggcatgtacatggcgaatgattgcttccccatggatgcgcaatttatcatcattgtccttgcagtttatttgggtgagttctttgtttttccccgtctattggtcttatgatattaatcatgattaaatcatcattttgctttactacttgtatgacccaaatgttttccttcatgaatgtatcatcatcatcatcatctcctagttcagattggacactagatttttgacactgtaacttgagattccttttttcccatgaatgtgtcatcgagttcagtatctatgtatctagattcttgtaacgatggcactgttattatttctaagtactaaatgatcatttccttttttgtaataatattcttaggtggct

SEQ ID NO: 55027 - DNA, 570 bp, Populus trichocarpa
  Intron number 1 from transcript POPTR_0006s07730.1 (locus POPTR_0006s07730) derived from phytozome v7.0 (chr-ID scaf fold_6; pos 5633406 to 5633975)
ccaacggctccgatcacatcatcttcaccaactgtgtatgtttgattctttctctgtttctcttccaagttgtgattttttcttgctgtgttttggatcttctgctttgtcaatcagatcaggtcctgttgccttaatgcttgtttggttactgagaaagagaaaagtttggaattcgagctggtttgtgatcatggggtttcattgttggaggttttatgtctctgttgtgttggttttcgggaaagtgtgatttgtcagtgtcgatgtttttttatgctaaaaatggttgttttcaatatttcttgcttgctcttagatcctactaatatagtcaaatatcttaatttacgcttactgtctggttgagtagttacataggggaggagggttttaaattttgtttagttttgggcaacatgcaacattgagttcaactactggaaaaatcttgtggttgtgtgtgtatttttttttcttcaatatttgttgtggtccagagtcttaagactagattgatattattgagtttctttcatttgtgcaggttacaggaggattttttttttc

SEQ ID NO: 55028 - DNA, 691 bp, Populus trichocarpa
  Intron number 1 from transcript POPTR_0003s21800.1 (locus POPTR_0003s21800) derived from phytozome v7.0 (chr-ID scaf fold_3; pos 19825455 to 19826145 reverse strand)
tggcaaacactcttctaaggagacctctcttccctgttccattttccacccatattttcttctttaatggcaacaacaaagtgtgctgaaaatgacttgcaccgtccacccttcttctcacgattgttttcctataaattaaactctctcgcaccatgctcttagccatcttcctcttttgcattaattaaacctccacctctctttttgtttgtgagatttcttctggggactcctctcttgctattattctggactggtactgcattttcttcgtctcgagttcgaatcttacatgctgcaagatggaaaagaattttgattttttttttgtttatttcttattttcttcttgttaaacatggccatgcatgaagtctgacgtcccatgtcacgtgccattacattatataagtgctctttcctgtttccttcaaattctgttcatgaatccatatcttccttccatccctaaccagtttctgatcttattttgcagagaaaatattctattgctgctatggattcagacccttccaccgattatgtaaaaacaaattcaataattagtaaatactcaagatatataaacgtgaatttatgttcttgaattcatgaaaacattaacattgttgtttttatttttttaaatgtaagcaggtgacaggagaaagtgtcatctctagagaaa

SEQ ID NO: 55029 - DNA, 765 bp, Populus trichocarpa
  Intron number 1 from transcript POPTR_0006s04170.1 (locus POPTR_0006s04170) derived from phytozome v7.0 (chr-ID scaf fold_6; pos 2829211 to 2829975)
ccgtgtctttcgtattgttggcaagtactttcctggtaatgataacaatgacgcagtctgtcttacccttctgaaaagtttgtttattttcttggttttgagtgcttatttgtgagtgtttggtgatttttaatgtcttttgttaatgggttctgtcttgttttgtttgaggttgttataagattgattgatggctttgtttcccttttactgtttgtgttattatgagaaaattttgcaactttatgtagagggttatgtcttctattctaactgtaaaagtgcaagatgatggttttcactagtattgtttcaacttattagtagtggaagtttcacttctaggtatctgggaatcagctacttcactgtttcttttttgccttaattctgcctatcctagaatgatgtggttttgtttgatgataccgtgtgtctctacttgagtctcgtcatcaaagttatgttttttggacagaatgtgtcagtaactccaataatgactggtttttttagttagctaagttcaaatatgctcaaagttagtgtctttcagtttttaagaagagaattgagagatattggctcacatgattgacattaaatatctagtggaagccagatttttttctttaagggttatactggagaaatttactctctcgcagaatgttattttgatttgattgtcatttttattctgtttcatgtgcttttttgtggtatgcagctcaagttgtgagtggggagcgactgaagaagtat

SEQ ID NO: 55030 - DNA, 696 bp, Populus trichocarpa
  Intron number 2 from transcript POPTR_0006s04170.1 (locus POPTR_0006s04170) derived from phytozome v7.0 (chr-ID scaf fold_6; pos 2830171 to 2830866)
tttgcaacccttggtcgattcttcttgagtggagggtgagtgctttcttgatattaagatctatgcagcaataaactaaaatacttgggccaactatggtatataacttgtagtgaaacataaacaatcagataactcatctaccttgttgaagatgtctttaaagtctaaaagtataccaggatatatagaagtgggaagagtggcttctagcagcatttagagttaaatatgcaatgtgctgaagtgatattggataattcaagtttattagttgtcgaagagttgcttttgtaatcataccataagttgctgtggttttataagttgttaagttgaagatctcttgttagacaaaatatattcatttgattacataattcaatgtcggcatcatggaatgggcatcagctgatagatcctcattgcagttgttttcaattgcaagaactgcagttcacatgcctttcatttgtaatgcaagcattcctatgtgtaaaagttaatgaaaagtcactataggatttggacaagatattgcaacttcttatccaacaaccatacttggccatggcttatgttcggttttaagcgtatgaattgcaatgaaattctggatttgttcttctgatttattcacgtgcttcttctcttctttttttggcactaattgtagattatattggaagatcaagt

SEQ ID NO: 55031 - DNA, 599 bp, Populus trichocarpa
  Intron number 2 from transcript POPTR_0018s00600.1 (locus POPTR_0018s00600) derived from phytozome v7.0 (chr-ID scaf fold_18; pos 526704 to 527302)
tgcttgaaattgtaagtgctagtgggctttctttagtatgaaagattgtttatttgtggtttaatgtgaattttaaaatgctctgtgggggagatggcatgttatccttccatagattgcattgaaatgccattatgattttatttttcggggatatcattagcatgagagtcatgattacctcaatttttttcattactgatcatttttctttctgttcaagaagtcctgagggtgggaactggaattttctttgacctctgttaactaatcccatctcttgttcttttaagttgtggaatatctcgtcatgatgtaggtgagtatagtgttgatttcatgtgattgttttttttccatgtgtatctaggaattggtgaagttgattgaatgaagttgtgagttctgtttcccttactgtatgatttagcagaagtacaatttgttgggttttgcattgaatttttaagtaattagatgtgcaattttaattttgtaatggatcattatttttcccaaaatcttccttttcatgattaacaagcaacttcctggaccttttaggtattgcgagtgctttgctgctggaattcattgta

SEQ ID NO: 55032 - DNA, 704 bp, Populus trichocarpa
  Intron number 3 from transcript POPTR_0006s26520.1 (locus POPTR_0006s26520) derived from phytozome v7.0 (chr-ID scaf fold_6; pos 24717559 to 24718262)
agacaattgcccttgcaaagcggcctcatattgttgtaagtgtttattttgcaggcatgataatacttttgacttttcttaagttgcaaaaggagaggttggcttgtttgtatgagattggtgcccagtaaaaggagctaagatttgagaatgcttcagttttgaattctgaactgagaaagagtgatgttatgagtttcccatgcttatggcaatcatttaaatacattactgttctctgcttgagttttaaattattaaactatagtgctgtttttttataataagtgaacacatggccaatggctaacattctgtttgtttcagggtgacgtgaaggcatggggatagtgcggtcatgtgcttgttatattttcttcgcacgtttctttttttatgcttaaaaaacttgatttttagttaaggcatgtttgatttttaaacagcttgcaaactttaatctatctctctctctctctctctctctctaaatataaatagacacacctacgcatagttagcaagttattgtaccatgactgtgcttgtctctgttcaaatgattatttgtgcatggaaactctaaatttctagtgtttcttgaatgcaagtgaaaatggaattgctgatggtgcattttatgaattgagtgatgtacatcttttgtaggttggtacaccaggtcgccttttggatcatttgtc

SEQ ID NO: 55033 - DNA, 591 bp, Populus trichocarpa
  Intron number 1 from transcript POPTR_0006s06050.1 (locus POPTR_0006s06050) derived from phytozome v7.0 (chr-ID scaf fold_6; pos 4311204 to 4311794 reverse strand)
ataatcgcacggctgctgctcagtatattatcgaggtttgtttcaattctgggtggattttgtttttttgattggtttcttgaaatgggttcttttgttttttgtgttcttcaatggatttgttctccttgcttgttttattagttttgactgatgggtttgattttgaggtattgaagggtttattgatgtttttaagtgtttattgttagttcatttctcgatcaaaagtgatgattttgatctgggtagttggattttgtggtcaagtttgtatcttttggtttgaattttttgaacgaagttcaaattgtttggttgaggtttgatgcattgatggagttttttaagtgcttttgtgtattgatagtggaactgggtttgcttgttagttcatttttatttatttttttgtttaaaaagtgataatttgattttgggaacttgatattgtggcaaagtttctgtcttttagtttgtttgtgttgatcgaagagagttcaattaatgatatgtgatgatatctgatttggatttgatgatataagatgatcgactgatttggtactggatgtttttctgattgccagc

SEQ ID NO: 55034 - DNA, 593 bp, Populus trichocarpa
  Intron number 1 from transcript POPTR_0162s00260.1 (locus POPTR_0162s00260) derived from phytozome v7.0 (chr-ID scaf fold_162; pos 36256 to 36848 reverse strand)
aaccctcctcctgtaagagaacacaaactttacttaaaaacccttttggggttttgtttctctttaaaaagcaaaaccctttttctgttcttgcttttaaaggaaccccatgaagaatttagggttttagatagagaaatactcgcatatgttaggattgcttggattaaaaaataggaaaccaatctttgtttttttttttatgatttttgactacttctgttgtgtatgttaggttttgttgagtaaagtttgtggccttaggcaacttaaggaggtgaagtcaccttctactcgatgtttaatatatcgaggttacttacgcctatgtacatgcttgtatgtctgcttttgttgagtgaagtttgtgactatagggaatctagaaagctgagcttttgtttgtctatgtatgcatgcttaaatgtttgtttgtcaaattagaattatgcatgattttgtgcgttcaattgggcttaatgtgtatgatatgtgagtgagagagtgtgagagattttttttggctaatgctatatcttgaacttgaatttgttgtagaaagtcaaccctccacctgccttttcaataataaa

SEQ ID NO: 55035 - DNA, 894 bp, Populus trichocarpa
  Intron number 2 from transcript POPTR_0006s11130.1 (locus POPTR_0006s11130) derived from phytozome v7.0 (chr-ID scaf fold_6; pos 8443348 to 8444241 reverse strand)
attggtaaatctctgacgctttccagattcggcaattacatgttaaagtttttttttcagatttttttgttcctttatttttggtcaacatcattgatgctagttgtgtctggtataagatttgtttcatttggaattctggattcaaagttaaaaatttctcaacagatttgtatcgatattgatatgtgtaggtatgttggattgatagttccaggggaaacatggtttgctaaaggatcagattgtcttggaagtcctttaactttggataatcagtcccccttttctgctttgattaaagatattttggaatggatagtacaatttaggcaacccaagaagaaaaaaaaagaaggaactctgattcttatgttgatggcacatagggatctcttatagagttttgcgttctagcctttaatgaattcaaaatggaaatcctgacctcctttgttctgatgcttctcagagttgcagacaactttgcactgcttatttcgaatggtgagcaattttattgtgcaagatagagaagagtatcatgagaaactctcaaaatggcagttggacatggttgaataccattcaaaatatttctaagcgctttcttatagaccaaaaacttgacatttttaatatgagttgaagttctaaccaagacattgtcccgctgttaatttatttgcacttgactgacaagatttagcaaataatttaggcttgaagtattagcagttaaatgttcgttttgtgttgaataaacatccataggctaatcttgttactcttgtatcgaaaaccaagaaactagcattcatataccataacccatacttatttctttttttgtcatcaggcttcttaccccccctggaactcctctttctcctc

SEQ ID NO: 55036 - DNA, 574 bp, Populus trichocarpa
  Intron number 1 from transcript POPTR_0006s11130.1 (locus POPTR_0006s11130) derived from phytozome v7.0 (chr-ID scaf fold_6; pos 8444309 to 8444882 reverse strand)
aatcttctggtatgttatggattttctttcagttatgttgccggaaatgccctcggtggtgttttgtgtttctcgcaatcctttgatgaggtgctggaacgaggaagaggataatttggtcattttactgacgaatgagagatttggaaatgaaaaatgatgtcactgactaatatatatattgaacactatatataataaaagaaacagaataggaaagaaaataaaatcaaaacgttgtcgtttctattgctagcatggcggccagtttggaaagaactaccattgcctcttctcttatttttgtgtttagttttgatggatttgattcattatttattgatctctgaatctacagatatggtgatttattatatgggatttttctcttaattcccaattttattttaatttagccaggactgacttttgcttgtctatatggctgtgattttctctctgtttctatatatatagttgttcttgtggggaaaaatgtgtggtggtcttatgatttgaagtggggttattggttacagtttcagtgaaattggagagacttgcagttggctca

SEQ ID NO: 55037 - DNA, 798 bp, Populus trichocarpa
  Intron number 1 from transcript POPTR_0003s19050.2 (locus POPTR_0003s19050) derived from phytozome v7.0 (chr-ID scaf fold_3; pos 17895076 to 17895873)
ttgcagcattaggttttggtaagactgttacttaatttttttttttcatattgctaattccatttttcctgctataaaggagttttagattaatgttattttcagctttcgagtcattaaactacttctggttctcccacccctctcaaaagcattaatattttcaatttcaattttctgtgtctattatgtaatttgtttgataacaagcgatctaaaactcgtttctgtgtttgttcaactaaacaatttatttgcgtaaatgttcaaataatttatatttatcatcctccaaatttcaaatgtcaatgtttttatactacatgctatgctaagtacttcatattgctcttagctccttgtaatgcatccattataggaaagaatgatggaatttgtttttcagttcatgtaactgtagtttttgcttttcatagctgcacaattgatgtaattctaatccattttccagtttaagctaccagctttgaggaggttttgatggttgaattctgtttccagctcagtttatttttctttttctttttctgggttctattgtatgtccccaacgtgatagtattaaaagttaccatagattcctattggttaggcatgtccttttgttttcctgggccttttagctatcagagaaaaagtgtattgattcaccatactattatctgattagtcttcctttaaggttttgcatgctcagttcattgtcgtggtttcttcatctgctaatcagctgtttatttatcccctcactttttcccctctttacagcctcaataa

SEQ ID NO: 55038 - DNA, 698 bp, Populus trichocarpa
  Intron number 1 from transcript POPTR_0003s20530.1 (locus POPTR_0003s20530) derived from phytozome v7.0 (chr-ID scaf fold_3; pos 19020809 to 19021506 reverse strand)
cttctaaaactgccggttgtcgagagcttttaggtgtttaagtttctatccaacaggttttttatgtctctgttaattgcttttagagtaatattaatgaaatttatgaaaactacaagggtaatagtgggaaaattgaaattataagagtagaagtagaacaatgatgaatctataaggataattattgaggtttacccttttattttacaagaagacaccactaatttgcattccataatcaaacataagtgaaaagcttgtcgctaaaaaccccccagaaaactgaaattttttagtccaaaattgggtaacatatagaactggataccagttctgtatgttaattgttttaacgcatactgttttcgggtccaataggctttttatgtctttgttaattgttttaatgcatattgttattttcttcctgatactacattgaataacattgaatttattttagcattttggtattttgcctttatagatttatcaatgtttcaattttatccctatagtttaaaattatccaatgttttcacatctatccctatagtttatttactaccaagtaacttaaaaaaggtagcttttcatagtttttcttacttttcaagttgacgtccaagtccgaaaacgttgacgaagaattttgtgtagaattagaagaggtgcagaattgcaggaaaaaaaag

SEQ ID NO: 55039 - DNA, 861 bp, Populus trichocarpa
  Intron number 1 from transcript POPTR_0018s14010.1 (locus POPTR_0018s14010) derived from phytozome v7.0 (chr-ID scaf fold_18; pos 14262399 to 14263259 reverse strand)
aagaaagaggaagtatcctacacggaaaaggagaagtaaagtctaaaattaagaggacttatatacggcaaaagccttgaaggcagcaactcaacccgggcaaaacttgtttctgacttgagttttgagttctgatttgttaccatagtttagatttacccttattagttatttttcaataattaaaactcttattaagctttattgaaaggttataaatagtcaagatgtattgaagtttcatcaagcaataagaaataaaatatcaaacacctttcttataaacctatttttctcttgagtttccatcagtctcacagtactgcaggcaacagcagcaaagtaggaatctggtttcatggtcagctattatttctggttatgaacggagtggagaacccgttttcgcagttgagttcgttttcaaaattgaaacttgtgcctaatgagcgcgcgcgcatagtgtggtcagggtagtgatgctttgttggtatctaacgaagcattagagcttaatgttgttgcttgtaaattaagctttgattacagggtttgttgagaatcagtaacctgagaagggatttgaaatgttcataatgatgcatcaagagggttttttgcctgatagattaattacttctctgggtctgttgaggacttgtaatggtagtgatgatctgagaagagggaagttttgcattgccaagcaataaacctgagaagggatttttttttccacctctaatttttctaaagaaaattggactattactgtttctcttgaatggatgtagcgtgaggacaatgactttacttttgctagtgctcttgctgcctgttctaggcttgtgtcgatacgca

SEQ ID NO: 55040 - DNA, 967 bp, Populus trichocarpa
  Intron number 4 from transcript POPTR_0014s14420.1 (locus POPTR_0014s14420) derived from phytozome v7.0 (chr-ID scaf fold_14; pos 10571039 to 10572005)
tcgacaataacactgttgggtcagtttcttttaataattttctttgtctgaaagtttttccttcccgattgtttgcttgaagttttgattttttttgtaatattaatttcttaatcatgaagagatctcaaatgcttgttttttgtggtattgtttcttatgttttggatagcacagacgctttcttgctatgatgctctagttatttccatgtttgatccgaataaaacaaatcacattgcattggaattgcaagaactggaaaatgttttttttttttttttgttgagatttcacttttcaatttttcatacttttccttatttcttggactatatccatcatgtcacggagtgaatggatttggctgttgttaaaaacaaaattaaccaagaagagatgaagtctagaataggaaaaacatgccaaacttgattgcagatcatacttggattgtggaaaatcattaaattatctgggaaggaccggttttggacctcattattgcttgtttctttttcgttggcaataaatggcatttaaaaaaaaggaatgattttctgttttgagtataaattcttgggacatatgggttttcattagtaaattatattttattagcagcatttatttaaaaagtttctaccttgagactcattttgaaatggcttaaatggtcttttatgagtttggtgttccctcattgtattgctacacattacaatgttacacacaaacatgtttgtatctcttctctgaatgtctctaaagtccattagaagagttctcaatgtggacctgttcccactttatactatgagtccttcgctttcattgatgcttttctgaacagaactaattttccttcaaaataaatgtatgtgtatacatctgcatgtacatgtctagaatttgcttgtacgatccgtgatccatttttctcttctcaattttcaggtatcagtca

SEQ ID NO: 55041 - DNA, 130 bp, Populus trichocarpa
  Intron number 2 from transcript POPTR_0019s15180.1 (locus POPTR_0019s15180) derived from phytozome v7.0 (chr-ID scaf fold_19; pos 15748949 to 15749078 reverse strand)
aggtggcagaggtctgtttttcttctttttttttctttgattaattagcgctgattttctttttttaatttattcttatttctttgtgagagcagcttgccccctttgatccaacaaagaagaagaagaa

SEQ ID NO: 55042 - DNA, 854 bp, Populus trichocarpa
  Intron number 1 from transcript POPTR_0014s16100.1 (locus POPTR_0014s16100) derived from phytozome v7.0 (chr-ID scaf fold_14; pos 12174059 to 12174912 reverse strand)
aaaccaaaacaatttctctctgaattcttgctcaggtcagtacttcttaacctttttttttggggggggttaaatatgctaaagggtctgtttctattgggatgagctgatctagatctgtttctttgctttatgttgaactacattgtgtggtggctgtggttttcttttttgtccaacagaatttgttttgacttgcttttactagcttccagtcacgaaagagaaaggaaagcaacatagattgcactgtttctctctctcttttaccttaaaaaggacaagatgtattgtacttttaatggggttttgatcttggtttttgcaagaatacttgatcttctggggatttagcaagttgggtatggtatttcatccttgtgatttgtgcatgatgtttcttttctacggcattggcatttgcattttttatgtcatcagtcattgcttcatttctctgtcattagattagatcctcttccaacctttctcaattaatttaatatcttatttgtgcctagaagagagggttggttttgctatagtaattgttttaaaactatctatagatgagttgaaaaggatcttgttttttttttgttgttgttgttgttgaagtagtgatagccatggctttccatggtcattacaaagatttggttactcggattttgtggatttgggaatctcacctggattctgaaatgctgggtttgatttctccaattattagctagtttttctgttcatgctgtggattcgcattggtttgccatcgatagatttgtgctcataaattgagatataatcaatgatgggatttggttcttgcagggatttagagaagataaacc

SEQ ID NO: 55043 - DNA, 665 bp, Populus trichocarpa
  Intron number 2 from transcript POPTR_0019s11150.1 (locus POPTR_0019s11150) derived from phytozome v7.0 (chr-ID scaf fold_19; pos 12529415 to 12530079 reverse strand)
atcaggtaattcttttttaccaaatgtggaattctctgtatggttttgttggttttctgtgtcattaatggagcatcaggcattgggatgtttctaattggtttaatttgtttctatggttaatatgttatgatacttgatagattgtctttatatggtgttactgtatcttgctaattttatgcatcacaaagagaggaggctctatactaagcatttaataagcttaaataaatgctttgagctgatgatggtaatcccattaggtgttgggaatcaatgatactaaggatgtcattaaattgtaaattatgttcaaagtgagggaaatggtcgacttatatttgctctgcatgtaaattcattaaacatatgagctgataatgtttgaagaatgccttaggtggaagtacagagtaaagtaaggcaggaatttgatcatgtgataaattgaaaactaaatcctctgataagagccattagtttttggcaaatgatgtattggaaatttcataaatcccgtgcttctgacttctccaaatagaaggcagttgcaatgtgatcgtatgcatttgtcaggggtatgaatttagtatcatttatatgattttcttgaggtcttatgtccaggtttttgtacgagactttgtacccagtgccctagc

SEQ ID NO: 55044 - DNA, 966 bp, Populus trichocarpa
  Intron number 1 from transcript POPTR_0019s11150.1 (locus POPTR_0019s11150) derived from phytozome v7.0 (chr-ID scaf fold_19; pos 12530474 to 12531439 reverse strand)
agctcttgcaggcaagctcctctttctttctttcaactatatctctctcccctactcgtgtcttctccttttctttctctcttcaccgaccgtttgccggcgaaattgccgtcgccggagagattttccaccagtcattttctcattgcgaaggtttttctcttcttcgagtcattccttctttctttgtttgtctctttttctgtgtagatattaaagagaagcatttctttgaaggtctttagatctgggtttttgtctctcaattttgttgctttctttgttgaaactctcaattttgactctttttttgtttacatttttacatgaagtggtcttttattttaagatagtaaaagtctttgtcttccgttattttgatattttgtggatcttgatctactgctgttggttttcaagttttcgtttctggattttaatggaaaatgtaattgaaatttaagtgtaatgtatgtgttttgtgtaaaattacaaaaaaggtacctttgttttccatttttttttatgccttgtagctttctgtattgtttaaattggtctttaatggtttcgtttttcgtttttttttttttaaaatcctatgaggtgagacataagagaactggttaagttttacaagtctcaaatttcttcttctccctcttagcccattcaatgtctataaagctaaaaagggataagtgttaattattggagtatatttaaatggataagaggttttaaatttttcttataaatagagtttatagcatgttgcattttctattttgagctttccaagttttaatttctggtttttactttcctgttgatgatatttctgtgtgattgttaaataatatcttcgtatgttggctgttgaatgtttatgttctaaagctggtgattcttgttttgcatttggtgatagaaacaaagcattttctgtagcaatcaagtattgaa

SEQ ID NO: 55045 - DNA, 933 bp, Populus trichocarpa
  Intron number 2 from transcript POPTR_0006s19720.1 (locus POPTR_0006s19720) derived from phytozome v7.0 (chr-ID scaf fold_6; pos 18756894 to 18757826)
ttccagaggtaaatcattgcatcataattcttagattgttatatatttctttgattactagttcattacctcgagtatcattaaggtactggatatagagtatctcttcaaggtctaggttcttaacaaacagtatgctgcatctaatcactttcactcgtgcttctgggattggtgttgaaaccatgtttttccttttgagtttcaaagccactatttcctttcttcgtgaatagtgggtttcacatggtggcatctgaggcaattgcgtatcaatgtgctttctaatgttaaagacactggcaataactattatcgtttgtttttggaatgtaaagttagtttttgggactatcaattaagcttcagtaggtcccttagagttctctggcatatccatgatgtagaaaagctcaatcttattctatcctttaatgaagcaaggaatttatcgtgtcatatgactcacagcacataccaaactgttctatttactataatttaacatcttgttagaagtttattccatgagattgatatgtattgtgagactcggtatactggagtgatggcttgcctagttggcttgttgttccttcaccatgactgcatacttccacagttgtttatgttgtctctcctgcattatgagatgcccaacaaacttggtgcgtgaatcttaagacagaatgtgggaggctaccattagatatgcatggtttgactttgtcaacctgtttgttggcatgtgtattgtgcataaaagtcctttcttaagagaatttttggaagcatttctccttctcaaatcaaccaaagttgaatctgagagcttggactaggcttttcttccttgtatgatccttacattgcttttcttatgctttccttggctcagtattgctggtaaggcaaacctggagaaggcagacc

SEQ ID NO: 55046 - DNA, 519 bp, Populus trichocarpa
  Intron number 2 from transcript POPTR_0006s23040.1 (locus POPTR_0006s23040) derived from phytozome v7.0 (chr-ID scaf fold_6; pos 21879917 to 21880435 reverse strand)
gaaggtatgcccatgtgacatgaattaatgacttgacatccaattttatctcatctttgtctctttctctttcagacgttattatttgacagaaagtgtctctatactctctctgtcttctattccaaaaacaccccaatttgttttgttttatgtattcgtggcaaacaccaatcagagagaaagaaaggggggagggaggtcattaacttgatttaacttattaggagtactctgtttcaaagaaattttatatgagatcatgtactagccaacatgttacatatggggtcaaattactagccctggactgtgcgtttcgttcagccaattcaacagtcatgtcttcgtttggattccaatatcaattatggtttttactctgaaagatggctattggatcgttaaattagaactaagtgatagtttattcagattaaggtgctttgatttacatcggcattgatcatgtgtacacacacaggtgtgacgtctttcagcatagattttgcagccaag

SEQ ID NO: 55047 - DNA, 419 bp, Populus trichocarpa
  Intron number 1 from transcript POPTR_0019s09760.1 (locus POPTR_0019s09760) derived from phytozome v7.0 (chr-ID scaf fold_19; pos 11356849 to 11357267)
ggattcacaggttactaggtaactgtatattctcgtcttcaaccttttttttctggaattatagcaattaaaatttatttatagcaattaaaatttcttgaagttgataatcatatttttggattcagaagcatatgttttgagctttataatatgttatgtgccttctaaatgttaccaaatgagcagtttaaagtatagtttttccatgcatctgtaaatttagaaaaagaattacttgcaagtgattgggattagatttcacatgtatgtggtgttataatgtatggcaattggaatccgtcacacaagttccaacctcaagaaaagattgtgtttctttggggtactatttgacatatctgttcgcctccatgttggcaggcctgagtcgagtctcgtggaacaaattgtgcatc

SEQ ID NO: 55048 - DNA, 528 bp, Populus trichocarpa
  Intron number 4 from transcript POPTR_0014s13200.1 (locus POPTR_0014s13200) derived from phytozome v7.0 (chr-ID scaf fold_14; pos 9730606 to 9731133 reverse strand)
ttcaagacttactgtgaaggccaaaaccgtgacgggtaagcttctcttcacccttatattgcatgtccttttaacgttagccaactgcgcttggaagtttctctattataaaaccctcgactaagtatgctgatttattggagatcacataagatttaggtgaaaaaataaaattaaacttttttctttaatttaaatttcacttgatcatgatggatgggtatcctagtctggtcctctcaattgttaatcttagatggaagctaggggatgtaaactgtcgttatttatttatgctaattaattggtttaatcttatatggctttttttatagaatgaaattacattatcaatctgtcaaagtgtctgagcatctgtgactggagtttgattcactgatgtgatattaagaatggtcatctggatcttcttgcatatgaataatccagtcgtgtgcttttattcaagtatacgatggttgtaggggattttgatggatttaaaaattgttggtgcaggtgtgtgag

SEQ ID NO: 55049 - DNA, 672 bp, Populus trichocarpa
  Intron number 1 from transcript POPTR_0006s28690.1 (locus POPTR_0006s28690) derived from phytozome v7.0 (chr-ID scaf fold_6; pos 26297772 to 26298443 reverse strand)
ttggtccttgagcgtctgcaacagtcttcaagcatgtgagtggaacatttaaactctttactccacgcagcttctttctccttgaaatctgatggtgtctgtggttgccttgccctttcttagtgcctccgtagtacctttgattgcgttctatatggttctcactctcttctgtcctccagctgtaggctgctaatttggaattgttccttatttcattggagttctatttgtttaaaacatcactctgtcccatgtcatggaaagatgttctttttagttgtcactctatcccatccattaatttttttcttttggtttctttttttaacaaacacatgcagtttgtcctgactgctatggacaattaagttttgcagcgttgcttggaatagttagccatgttttgcaaacactattctgactgctattaaattttaatctgctaatactgaacttacgtttagttcctttacgaatgttgagaagggttcttggttgcagtgggcaggaaaaagggatgcccatggatgaactttgccaacagctgaaacttcccatggagaagatcaagtaacctctctctccccttctcactctacattatcaagtaagtccttcaattggccttttcttttgtcttggtcagggaatctatcagatcacttgagg

SEQ ID NO: 55050 - DNA, 726 bp, Populus trichocarpa
  Intron number 2 from transcript POPTR_0003s17260.1 (locus POPTR_0003s17260) derived from phytozome v7.0 (chr-ID scaf fold_3; pos 16674147 to 16674872 reverse strand)
ctcattgttgcgtgatctggacaaaagtttgcagggtatgcttcgcgctaaaaacaaccgtgctttgttgtttattaaatcgctgtttctgtcatatcttccatcgcttgttttaagtgtcgatttaagatttgataagataccctagattgattgaattgattagaactgcaatagctatttgggggttttgactgcttagggggagattagactcctaattgagggaattttctcttatgctcgttcttatcgtatggcattttgaatctgtaggttagggaaaccataacttgcagagaactcgaattattttgttaattttacctgctaatggaaaaatatgtcggatttcgttttgtacttgatcataataggacttgagtgccagaaactcccaagataatggaaaattccccaaagatcaaaaggtcactggcttggaaaagctggcactagctcaaaccaatataacatgggtggctgtatggttccttcttgtttagctgtgctttgtgatattctctgtgctttcccttttgccatctgttcccgctgcctccctttcttggttgcgtgtgcaaacagaaatccctttcttggttgcatgttcaaacaaaaaagttaatcgatattctctgtctatagttaaacaatccttgtctcctttaagcacacttctcaagggacagttttaatgcacgtgaacagagattcaacgccaaa

SEQ ID NO: 55051 - DNA, 580 bp, Populus trichocarpa
  Intron number 2 from transcript POPTR_0003s15650.1 (locus POPTR_0003s15650) derived from phytozome v7.0 (chr-ID scaf fold_3; pos 15410600 to 15411179)
ggcctgtggctttcgtgttacttctatcaagattggtctgttctgctgcacctttctatcttaaatctccttttcttttaaatgtttttttaagctttctattactagaaaaaatataagaaaagaaccgctactccctcctgtgtttcttctctccaaccaaatctcatgttcagtgtacagaaatcctacccacctctctggacatgtcaccaaaacttctgctttgggggttataaagttaaatgttcggtaaaaagataagcatgtgtagatttcttttgccttttcattttcaattccttgaaatgggcctatgttaagtttgcttaaaattccttcgacagttttcttgttctcaagtcctgttgctttgcactacttcatgatcttttgatgttggtcttcttgatttgcagtccgttgttaattacaataattattatgtctcaattaggatcaggagctgtcgctactttctccacttcttttgagtgctttacattgctgttcatgctaacaatttcttgtattttttgttcaattttacgtcttcattcagatccatacttaaacactg

SEQ ID NO: 55052 - DNA, 495 bp, Populus trichocarpa
  Intron number 3 from transcript POPTR_0003s15650.1 (locus POPTR_0003s15650) derived from phytozome v7.0 (chr-ID scaf fold_3; pos 15411234 to 15411728)
gtggcgaggtagaaagttccttcattttttttaatgtactcgagaagatttgttaaggggtctttgagaaagcaataactgtagcttatgcatgctaagcatgtggataaatttcctggactccacatcctcgagaggatatttctatgattcaaaagattggcttccatatgccttttgaattgtagtccatggcattaaaatttatggaatctgtcaaaaattactgctggatatttctcatgcccctctattttgtttatgattaccaactctgatcatgctagatcatatccattaaacctgtaaactaataaatttcttactcgtcacgagtgaaagtaaaagaaaatggctggagtgtatgttatttcaaggaaaacgaaaaaaaaggaaatcagagtaatgactttaatgaaaggtagggaattgttctagactgagagaactgacttatttatcttgttttgaaggtggacctggaccttggaaatt

SEQ ID NO: 55053 - DNA, 467 bp, Populus trichocarpa
  Intron number 1 from transcript POPTR_0003s01500.1 (locus POPTR_0003s01500) derived from phytozome v7.0 (chr-ID scaf fold_3; pos 1362972 to 1363438)
aggtaatctaacttgctacttccacttccattactgttaatattagagtagtattcatgctaaacatagagtaacattttatgaagaatcaagcataaataaatacctgaattgatctaaaaaagcatcaagaaatgaactcttcggtgtttttgatgattttttcgaggaaattgcataggatatgttatggctaaagtagatgtaatcataacacctatagtacatgggtttaaatgataatcataataataattaaggaaagcctctataattcagatggggtttgcatggtttagcccagcatttgatttgaggtttaggattgccatcagttggttggatcatgtgtccgaaacagtagtttgaggagttctcttcatagctcattggcattttaatgtgtgtttctgtattaatattttgtctcttctttgatcagattgctcaggaacttgaggctgtga

SEQ ID NO: 55054 - DNA, 995 bp, Populus trichocarpa
  Intron number 2 from transcript POPTR_0006s06520.1 (locus POPTR_0006s06520) derived from phytozome v7.0 (chr-ID scaf fold_6; pos 4715258 to 4716252)
gcaggtttgttgtaattctcagttttccacacatcactgtgtgcttatgtttctgcctgatatgtttcatggaggttttttcccccttccttgttgaagattgggttttagacaccctttcatgttgatgattgaatttgtgtttttttcctctttgcacgggcttttatttctactttcaactgtttcatgaaacatgctattttgttgcctgcatttcacttggtgtggcttatatgattgctattaggttcaataatgcattgttgtggaaaggaaaaggtgatttgccttcatattgtctgtctgactttctcagtataataaccaactgaacaaaatgcacaacaagaagagcaacttttgaggcttcaatcataagtgatcccttggcggattaagtgcaccatacactcaaatgaactgagtatttgtttggttcaaccatgctttaggggggaaaaagcttctagctcatccttccgtctctcataatcagctaaaaacagtgctttgctttcaagcacatggggccaaagagaccttaagactcagtctcaaactattcagagttagatgcatggattttatttttttatccggctctgtgttaggctaaatctttgctttttacacccagggagatgaaatttcgttgtttgtctgtttttcagcctaatttcttgtactttcacttgaaattagttttgcttgttaggccaaagtgaaaaactactttctaatctgattgttgactcttttttttcccacataaaatacaatgttttatttaggaaaagatgacattacatttttaaggttaggtaactatgttttggtctccctgtcaggacagcaggtgctttcaatcatctttaacagttgtcattgatattcttctaatcttctttgaagaagtttcctttgaggcttaatacatgcctttttttgctcctgcagagtatctctactgaacaagcaaagagatttacaaa

SEQ ID NO: 55055 - DNA, 858 bp, Populus trichocarpa
  Intron number 2 from transcript POPTR_0013s07790.1 (locus POPTR_0013s07790) derived from phytozome v7.0 (chr-ID scaf fold_13; pos 6626422 to 6627279)
tggtatgtggcaatttccataaatttgtcattcttgtttcttattgattgaaaatttggtgaaaggttcatttattttacatcaattcagtttttttctactccatttgttttcaagattctttttttccagcaatgtatttcatctcagattgtgtaatctaggcttcctattcataacaagtttgtgctgtggtggatccccattcttaattccttcccttttcacataggaaaacttatatgaaccttggacttgccctggaaacacgaaatcttgttaattacaggattatcaagcgctgtttgtggcagttaaccatgagtgcaatagtgtcatgtcaataataaaagttgaatttgtattgagaggaaacgattctagaaagtgactcaagtgccatggtttgagctttgggttctaccttgttgtggaagagcatgatgcaaattaacatcgaagaggaaagaggaggaagaagttatcaattgaagcttttaaattatataatatgcctatttgacaacattttccattaatacatatgtgtgcacttttactttgttactttcaacctgtttcgtatggagatagaaaacttgtattggtagtttaaccttgggttttaagcgcagtttcaggtgccaatccatgtcttttcaatgcgttgttcgtgcatctgtgttatctaattgataaatgtttcttcgcttattttggtcaatcaggcaatgaagtaatagagtgcttctaaattctgttgctgcttgcttgatcacttgccgcattagattgaatgcaaatgtccagtgtactcatttattttcctcatcttttgtttaacatttccacaggtgg

SEQ ID NO: 55056 - DNA, 395 bp, Populus trichocarpa
  Intron number 1 from transcript POPTR_0013s01890.1 (locus POPTR_0013s01890) derived from phytozome v7.0 (chr-ID scaf fold_13; pos 1096255 to 1096649)
gctgctgttcttgaatatctcgctgctgaggtaacagttgtggtcttttacatcttgtttcttttctttaaaaagaaaaatgtcttataatttacaacgttaaaatattttgagattttttttcctttgtttatatcctattgctctttaaattttgtatctggatttttatggggatttaaaaaaaaaaattaatctcctttttttttattaattagttaattttgatccacaaaataaccccttgtttccccccccgattaatctgggattaggactttttgtttagtttttgttttgtttcctattgttttttatttagaccctgatttgatttgatttatatctgtgtgttttaaggtgttggaattggccggaaacgcagcaagagacaa

SEQ ID NO: 55057 - DNA, 1006 bp, Populus trichocarpa
  Intron number 2 from transcript POPTR_0006s04640.2 (locus POPTR_0006s04640) derived from phytozome v7.0 (chr-ID scaf fold_6; pos 3184995 to 3186000)
ctcttctcttcctttcctttctcttccctcaccaggtaaactccatcatcatttctcctttttaaaccctggaacttgaaaaaccatagttattcccctctctttttccttattataaataaataaacaaaaagaaattcgagtgttgtagtttcttgtgctttctcggtcttaaatttccgttaatttccgtttcgcgatatgtcatcgttgattttcttttctgttttttttccttacatgtaatgtcgtagatgctgatagtgttgataggtttttttttttttatgatgctcgattgtttataatggattaggaccagcctttaaacattcaaattcaagtgttttaaattgttaatgctggaaattagggattcaggaggtgggattagctcaaacttcagaggttgtaaatgaaatgatagaaaaatattaatgattatttgcctgtaattactgctaaatccttttcagtgtagtgccaatccagcaatgctttgcgctttctgcttttagcttttattcaaattttcatttttttgaggagggagtaaattccgttcacttgctctgcatcaatttctgttatcaacttgtttgctccaacaaatgttgtcttattaaggttggatatgcttttaggagcatggccgccaaatcgtgtgttgtgaatgtggaatcatgattagagttcgtcatgatcaagaaaccattctcttcaagcttcaaagcagtctcagacgacttttttttgacaatgaaatatttgaatacattttacttttcaaatgcatggaagctaccggtatctttgtgtctaagaacggatgtttttctctagttgtttttattgctttttttttttcagattttgtcaagtttctctctatgctccatgtttagtggtaaaatttatttatcagccactgtgtatatcgtacatggaatcttacagtagctattgttttaatagaattttttgagaggatcgcggaggatcttat

SEQ ID NO: 55058 - DNA, 747 bp, Populus trichocarpa
  Intron number 1 from transcript POPTR_0014s11730.1 (locus POPTR_0014s11730) derived from phytozome v7.0 (chr-ID scaf fold_14; pos 8698778 to 8699524)
caactttgtgggaggctattggacaggtgagattttttaaccttgattagattttattaaatcattaattagactatatatatatcaaagtaagacggatacttaaagccataacagggattctatccatagagaaccttctgtttctttttgtttaccttgtacatatgagctgaatagaacagtcagttttgttccatatggaaaggcagcccttatagcatgcaaacctcaccaagatttgcaaccatgcatagcatgtgtcagctctgctatacaatttgctcgggagcccatacaaataatgcagggacgcgtcttacatgaaccaatgtaaacaaactgcttttatatgtgtctctctctgagtgtgtgtgtgttagttgaaaaaaaataaaaactctccacaaaattcaatgatgtagccacctctctttattgcatctcgtcaatagctactgcgccgcattaaagattaacaaaagcaaagatactttttttccttttctctttctttttttatcgaacaaaaacaaagatatataatattactgtcttttaaaaaagtagtaacaaaaaattattaattttaattatcttcatttgtggattcattctttaccaaatgcgtataatgtcaggcaagttgccccctttttttttgaagaaaaaaacccggccaatatagtactgtctaaattttataaaatataaaaacaaacccgtttaccatgcaggttgtgtctg

SEQ ID NO: 55059 - DNA, 809 bp, Populus trichocarpa
  Intron number 1 from transcript POPTR_0006s15400.1 (locus POPTR_0006s15400) derived from phytozome v7.0 (chr-ID scaf fold_6; pos 12760796 to 12761604)
agttctacgggtctgacattacttgttcattccctgtaagtataaaattttccatttgcattttttaaattattatctccaagtttattttgttccaccttttgggcagaagctaatgcaggcatcttaattgaggacaagtgttttacttgtgtcaaatacaatactaacctgcactattctgatacatccatttatcagtaggctgatcttaccacctatgtggacatgatatcagttctttcttattatcttttgggaagtcttgatggttcacatgttttggtgaatagagagttccctgtatcaacaattatgatgaagagcaataaggataaccaagctgatttctgttgaactcatgttctggattttagatagaactaggcctagtcgctcccaactgttaatgattatacctttcatagacaactgtgattgaggagatatgttcagttttaccttttgaatgattagatcatctatatagagatagtgacccgcatcatcatcaacatcattttcttcttcactggcacgaccaccactacactactacaactgaacatattttaactaatactattaagtagtgtcacagattcttcatggaagcaaacagatgaaatgattcataagtttctaggtattataaattacatataaaaattaaagtgtttgatattatggcaattgtggctatggattttaaagggtagtcaagagggcaggccacctgaatttctgttatttgcttcctcaattcaatgttttgtctgaaagtgccattcccccctgtatacaggtga

SEQ ID NO: 55060 - DNA, 913 bp, Populus trichocarpa
  Intron number 1 from transcript POPTR_0014s16270.1 (locus POPTR_0014s16270) derived from phytozome v7.0 (chr-ID scaf fold_14; pos 12357850 to 12358762 reverse strand)
ttcctccatcgatccatttggccttgtttcaccaggtctctctctctctctctctctctctctctcgtgctgtctttctttttatttgcttctgtttggttgctgagagaacaggtagaaaaaccagaagaaatgttttgacttcttttttttattattattgtttgtggtttaagtggtgaataaatagatagagaaattttttaattaactgatagatttttttttttaaataatttttatttcatgttaggaaaggtttttgagaggtcagatctggtaactttatgtttggatttggtagctttcttagtaattaaacagatcacttcctttgctctgatctactgtttgcttgttgcagctttggtatatttaaaaaaaaaattcttgcttttttttcttaattagtctgattcattaatgatgctgattttcttttaaaaataaataaatcggtgagcgtgtatgcgttgctttcgtctgttatagctgagcagtagctgatatggtctctccatgtgattgtgctcaattttcatcaattatgcttttatatatatatatatgaatatcctctggaaatcatggttaattctaagctagcaacaaaaaacgttcttgtaaaaagaagggattattacatataattttgatcaaaactttactggacagaaaagccttttttaagacaacatttaatttttattgcagattttttcctgaagatttttttattttttacaacggaggtgttcctagttgggccatgcttctctgtactcttctttcttcttttttcacacatttccgtagcttgaattctaatgatagtgatgataaaagtaggtggtgatggattgatgatgtgttatagttccttgtgacattgacaggaagaaaccactaattg

SEQ ID NO: 55061 - DNA, 594 bp, Populus trichocarpa
  Intron number 4 from transcript POPTR_0014s18620.1 (locus POPTR_0014s18620) derived from phytozome v7.0 (chr-ID scaf fold_14; pos 15949937 to 15950530)
ggtcatcggaggacgccttgggtggtaggttggaatttgttttttttttgctaggatcgctaattttcttgatcttttgtaattctggccagctacgtataaatggataatggataaatttgacgcaattatttggcatatactcaaattttaaattctaacactttcttttttaatcctgctccactgagatgtcttcctaaaaagtaatgggaatagaatatattcagtgaacatgctgattttttcggttagggcattataactatctttctgcggtatactcatttagtactatagcagtctacctgtctacaatttatcaaatacaaaaactgcattttctcaagggcgactgcttccctttcctttctgttttacaaccatttcccattatctttcatgtacaatcacagttttgttgttgatctcccttctctttccttttctccccatttaaagctattaaccctgcttttcagctcaaatcaagtgccttttcttgaaaatgaacaacctttaagttatcttttccatattaaagaccctaattttataggtcaggttccacccactgcatccagaaattcttgc

SEQ ID NO: 55062 - DNA, 761 bp, Populus trichocarpa
  Intron number 1 from transcript POPTR_0006s11310.1 (locus POPTR_0006s11310) derived from phytozome v7.0 (chr-ID scaf fold_6; pos 8584638 to 8585398 reverse strand)
gctaacaacaatcatttggagcttgtaagcagcaggtattttctatattttctcattttcattctgtctttcttttctttttttctttttttttgagatgcaacaacaaattgtgcccccccttttttttccccaagaaatggtcgtgttcaatatcagaatttagaaaacaaaatggcccacaatcactaattttatgtggatgggccgtgggtggtccatttcagattttgagttttaggctaatcacatgtcctaatttagcccatgatctcctctgttacaattgacagcgttagaagtatggtgtatttaaaaagtgtttttaactcttttttttttattcaaaattaatttttttataattttaaattattttaatatgatgatgataaaaataaatcttttaaaataaaaaaaaattatcttaaaatattttcaaataaaaaatattttgaaaagaaaccattactataattccaaacactgaaataacaaaaataaagtgtagatttagtttctcaaatatttatgtttgattcttgaattttatcaagctagaaaatttagatatcttccatcaatcggtaaaaccagttttaaatggctgaaacacatgtaactaatcaatacaatgggtatagattgtattgacaaataatttaaatttatttatatgtgattattataggcattgaatataataattatcactgatcactggccgtgttgatttcctgtttcaaatctatcatagcacc

SEQ ID NO: 55063 - DNA, 479 bp, Populus trichocarpa
  Intron number 3 from transcript POPTR_0018s12060.1 (locus POPTR_0018s12060) derived from phytozome v7.0 (chr-ID scaf fold_18; pos 12662848 to 12663326 reverse strand)
atagttttattgttaggagaaggtttgttctcctttctttttttaatgtaagatgtcaagaattttgaatgttctgagaactaaattgtgcgtctctatggcacaacgaagagttatcatagtttgacatatgctaacaagtgatgtggatttactagttttataatgctgtttgttctgaatgattttgatttgttgaatttttatgatttttctttgagtttggaagatcattttgaatattcatttgtaatgtggatcaccaagcaagttacttttctgaaaaaagataatactgagtcagggattttctcatgtttttgctttagagagttggaaaattgattatatttctcatttcttggatctctgctttcagcttgttggcatttgttagccaatatggatcccccctcttttctgatgtctatctacctgcttcaggggcatcttgaggccagcagcaaacaccaagaatt

SEQ ID NO: 55064 - DNA, 1052 bp, Populus trichocarpa
  Intron number 1 from transcript POPTR_0019s09100.1 (locus POPTR_0019s09100) derived from phytozome v7.0 (chr-ID scaf fold_19; pos 10658743 to 10659794 reverse strand)
aatactcaaccattaaaaacaagattttatcaattgttttatgcatatcatctttttaagataatatattccttaaaatatttcttttaaaaattgattgtcaatcaatgaaatatgtcattgaaaaagctattcaaaagattttatcaattgtttcatgcatagtgtattttcaagatgatttatttcttaaaaaaattctttttaagaattaattgtcaatcagtgaaatatgtcattgaaaaagatataaatattgtctcaaaacaaaattttattaaatagcaagctatactttctaactttgattttgaaattgaatttatcaaaggtgacactaattcttttcaggaaatttttacagattcaggatgagcacactaatcaaaaaaaattaaagagtcatatatcataatccctttaagacccaagtcctgttaattcaacccaagtcaagcctccctccataagactagtttttacctcaaccaacgggttttcaatcctgtcaaatttccctagtcatactacctcaccttcaaacgtttttcaagctttgcaaaccccgacacaaagactcatttcaaacatatcatcaagaatttctcaaaagaaacttgtcaacacatataaatcaaggaactatcatatgtatattttccttataaaaaaaatcttataatgaagatcctaataaaatcatccttcgtatttttcctcatcaatttcaattttccctaaaaaaaattacaaaagaccaaacaatttaataaatttatcttgattgacattgactcacttgagataactcataatcataatacaaataattcttttagaattgcatattccaaaataaagattttaaaggtcttaacttatcaatattgaaatcaaaatccttatacccaagagattttctcaaaactttcaaccttccagatttagttttcttgactattaacaagcatggttcaatactctttacctaaaaaattatgatcattcttggtttatttattttgataaaagttgttcaagaattttccaac

SEQ ID NO: 55065 - DNA, 746 bp, Populus trichocarpa
  Intron number 1 from transcript POPTR_0006s02850.1 (locus POPTR_0006s02850) derived from phytozome v7.0 (chr-ID scaf fold_6; pos 1792724 to 1793469)
aaagcagaatttgtctttttgaccctttgtttcaggtaaagttttcatctttaatccttatttgttcagaattcaatgctttcacttggtgggttggttctaatgtttgtgaatgttatgttcgtattgaatcttgatcatgttttgctgtcaagttcaaaattcatcgtgttttggagtagaggtcaaaactttgatcatctttgatccttatttgttcagaattcaatactttcacttggtgggttggttctaatgtttgtgcatgacatgtttgtattgaattttgaacatgttttgctgtaaagttcaaaatttttatcatgttttggagtaaaggtcaaaactttgatcatgggaattcaagatagttggaaatataatggcaggagtctgaatttttagagcttgaccttagtttttgctgttatctttttttgcgagtcagtccaaattatgatgacagtggtgaatcatgatggggttaccttcttaaggtagaagatggtgtcaggtgacatattatctgacaggtcgaccttgctgctttctttatttgattcttatccatagttttttgcgctaacagaagagaatgaggaatggatcagtttctcttagatattgtgacagattatggagctgttcctttttggggtatgattgatcataaaatgtaattgaatttgttatatattgttgttatattagggtgtggcaatattggccgtggtgagtgaaggagt

SEQ ID NO: 55066 - DNA, 395 bp, Populus trichocarpa
  Intron number 3 from transcript POPTR_0006s02850.1 (locus POPTR_0006s02850) derived from phytozome v7.0 (chr-ID scaf fold_6; pos 1793813 to 1794207)
ggcagagcttgtaagcaatcggggtaattttcaaatatattaatttctgcaagtgaaaagaagaatgaagaaagtaagggaagtttcaaatagtgcaataggccgattgcagtcaaaactaacttccagttccaagatttcaggatttataattttttttcctagttattcagtgcttaattcttaattttatcaaacagtgccttgataaaaagatctcaactttttttgtgtgagctatgattttggagttaatcgctactttgattatcaaaccattcaagcctttctacatttatctgggtattttggatttgggattcacatgtacctcttcgatttgtttcctttgtttcccaggttttgaagctgggggccaaaatactccctcaaat

SEQ ID NO: 55067 - DNA, 879 bp, Populus trichocarpa
  Intron number 2 from transcript POPTR_0013s04230.1 (locus POPTR_0013s04230) derived from phytozome v7.0 (chr-ID scaf fold_13; pos 2813998 to 2814876)
gctccagattctgaagaatatccagaagtctgcaggtaattcttttttcttatttatttagctcattttaatccacggttatgacatagatcctttaattaaaaactcccagttagttctagtcaaatctttttctgcataattttaattttgactgtggagactatcagctgaagaatacttcatggtagtctaagatatccacgaaaatgcattccctgtggcagaaaaaagtgcacattctttttatacagcgcagcttattgatgaaaaagtattttgggtggtgctcatatttgataacccacattgatctagaatttgccatcattttatccattagtctgtagacttgccagtccagtgtcctgactgccaacctgcagtagagtctgcatgctgcttctcggaatgtcgatgtaacaggtgaagcttgtttatatgatgttagatctcactcttacccagcatcataaatctccaagttcaatttgcaatcctacataaatctctacctcatcaaattcggatagccttttaaaacatgctgcatttgtttaggcacaacagttactgtgttaaattctgcccgctaagtttcttaagtttttaggcaataaatttatagtaacaagtattacttgtcattatgttttatgtaaatgcaccagcttctgtaataaatattagcaccagcaagaacaactcccctgtattggaacagagcaaaaaagtccaaggctgaagaaatgaagctgacctagctgacaaactctagtgtgcgaatgcttatgaaacttctgttgattttggttttgaagctgttgagtttcacttattgcagggagatagaaatcaaatatttagcatatataaaga

SEQ ID NO: 55068 - DNA, 339 bp, Populus trichocarpa
  Intron number 1 from transcript POPTR_0014s08800.1 (locus POPTR_0014s08800) derived from phytozome v7.0 (chr-ID scaf fold_14; pos 6510800 to 6511138)
tggagcgtagcaagagcttcatcaaagccttgcaggtactactctcttgtatcaaaatcagagtcataagtgtgcagtctttgtagaatttgttaccagatctgttactaattctttaatattatttgattggtttgtcttcgcatttcccctctgtagatgttttttctgtatttttttaatgtctttatttttatccgaaaatggtctttgttggattgagtgttttttgaagtgacagtattgactattgaacgagtgcaaaatatgatggatgattttaattgcaattgttcttttataggagctgaagaacttaaggcctcaattgtattcagc

SEQ ID NO: 55069 - DNA, 653 bp, Populus trichocarpa
  Intron number 2 from transcript POPTR_0014s08800.1 (locus POPTR_0014s08800) derived from phytozome v7.0 (chr-ID scaf fold_14; pos 6511152 to 6511804)
gagaagtcttatcttcatagtgagcagaaacaaacgtaaggattcatgtgtttcgcacgttaatgatttgattgatgcattcgctattcattgcattatttagctccttctgcaagttattacgaaaccctatttttccgacttcttgaatcggtaaagattctttgttagatttctatttaagtttatgtgtggactattggttatgaaagcctgatttgattgtgttatatatgttacagagtttatgaaattatagaacttgatgcataaattatattagaacagatttttttttaaaaaaacccaatttctatcaagtgtgaggtgaaggattgatgtagccaacccacgttttaggatacacaaagtaaagatgtagtgaattttatattttgagggaggatggaattgtgtcttcagaattaaagagagagaaatggtgaatatttctggattaattaaccatgaattgtatccgactgtgtatgttcaaggcatgggtttttaacgctgtgctttaggaaaattaaaagttaaaaaattaaatacatgtgcatacactcgttttggtgtaagtacttgtgttctatgctcgtattctcaaatactcttatttctatggaatagggttctggacaaccttaaagatt

SEQ ID NO: 55070 - DNA, 409 bp, Populus trichocarpa
  Intron number 3 from transcript POPTR_0006s13640.1 (locus POPTR_0006s13640) derived from phytozome v7.0 (chr-ID scaf fold_6; pos 10859434 to 10859842 reverse strand)
cgggttcattgatttcttgggtggattaggaaagcgtatgctccacttctggaatcctttttactgatcttacactgttgatttgatgaactgttgttatgcacttttatgtctcgtttttgtagagcttgttcgcatacaatctcaattacttctgcacacttcttccctgtttctcctttgagggaaagggttgtggaattaccttttcttcttgttctttttaacttccggtacgaggaggctgtttatgtttatagggccttatttcatttagtgatgctgaaatgatgatcctgttctcctatgtttggaatattccagctggagttgatttcaacccttttgtttttattactacaatttttcttcaggttatctaagtcttggatattcaacaccgttcctc

SEQ ID NO: 55071 - DNA, 932 bp, Populus trichocarpa
  Intron number 1 from transcript POPTR_0006s12580.1 (locus POPTR_0006s12580) derived from phytozome v7.0 (chr-ID scaf fold_6; pos 9723458 to 9724389)
ggctttcaaaatcaccggtgagttatacggatttaaattgagcttttttggttgcaaaaaatcgattggaatggagattctcaatttctattgtttatactttctgttattatttgttgttgatatattttttaaagtttttatcgggaaaggtcatttttccagtctctctctttttaaaaaaaagaagaaagaaatttgtttttcctgttgcggaaatgaattaaaatatgtttgttagtaatctttcagggtaaaatttaggttcttagaaagaatactgaactgtatcttaatgtatgcgggtaactgtatacgccgcagcagcacaggtattgtgtttgtcttcaccggattcttgctcataacttgttgtggttataatatcctgacttttctgcaaccaaatgcaaggacatgtgatcataatttgagtactttttctattgtttatactttctgttattatttgttgttgatatattttttaaagtttttatcgggaaaggtcatttttccagtctctctctttttaaaaaaaagaagaaagaaatttgtttttcctgttgcggaaatgaattaaaatatgtttgttagtaatctttcagggtaaaatttaggttcttagaaagaatactgaactgtatcttaatgtatgcgggtaactgtatacgccgcagcagcacaggtattgtgtttgtcttcaccggattcttgctcataacttgttgtggttataatatcctgacttttctgcaaccaaatgcaaggacatgtgatcataatttgagtactttttgaaaaaagactgtaacaaatggaagatggatggtgctggttcttctattaagtcttcgaaattttatcaatttaagctattctttagtgacgcttcaagtttgaaattttaggttttttttttgggagattta

SEQ ID NO: 55072 - DNA, 647 bp, Populus trichocarpa
  Intron number 2 from transcript POPTR_0006s12580.1 (locus POPTR_0006s12580) derived from phytozome v7.0 (chr-ID scaf fold_6; pos 9724671 to 9725317)
ttggtggtgaagataagtccgaaaaagacaaccaggtaccaggcctcttatttaagtttttgtttggtgtgcgtggttgcttacatatttttttcagtgatatttctgagattttaattttgtagtaggtgtgttatgctttccaaagggatccctgacatagttgttcttgaccatataataatttgattgaatgctgtgggatattgatggttacgcggtgcccttttttagagagtgtgtgtgtgtgtgtgtgtgtgtgtgtgtgatagtgaagggcattaaaccaatgtgtgagtgtctgcttcttctgctaaccttgggcaaaatattcttgttttctcacttttcttccttgtcatctaggtgacttcttttcctgctgtttgcatgagtggaatcttatttatatgcttgtttgtttgtttgttctataaatttatgcgatagtgaagggcataaaccgaatgctgtatttgggccttgaaaattgttttgtatgagagggagggagggatttgatgtctaagagagtactgtacttgtgagtcatttctgtaagccttggtcatgattaaggaacactgtatatgtttgactgatcttcttaattgtagggacttgcgtggaatccacttgaaaaagct

SEQ ID NO: 55073 - DNA, 321 bp, Populus trichocarpa
  Intron number 1 from transcript POPTR_0006s02110.1 (locus POPTR_0006s02110) derived from phytozome v7.0 (chr-ID scaf fold_6; pos 1364190 to 1364510 reverse strand)
gtggaaacggtatgattatatatttgtgtgtgttaatttatcttttaaggcatcgatcctcttaatttggcttttcttctttttacgtggaggtcctctcaatatgttacgtacaagattattaatttatcttttaaggcatcgatcctctcaatatgttacgtacaagttcttgataatctctacagcggattaattcttccatgccagaacatatttttgagttcttccaatctttctgtctataaatttatcatgacgtttttttctatatgaaatgcatgcactaactagctactactgttacagaaagtcacagag

SEQ ID NO: 55074 - DNA, 832 bp, Populus trichocarpa
  Intron number 1 from transcript POPTR_0013s00540.1 (locus POPTR_0013s00540) derived from phytozome v7.0 (chr-ID scaf fold_13; pos 254627 to 255458)
ccaaaggtggacaagcacagcaagacaagcgagaggttgatacctggttccacttttttgccgtatggttgttcttagggtgatttggagggcaatgcacgtacccacaggcttggttttgaactagggagacagcaattaatggtagcaatacacaatttggcccaagaaccgaagaaagtccattcatcaaaagaagggaagaaggttaaattagcagaccaggcatacgaggagaaacgagcacacggtctcttaaccattgtgcttatggttccagaggcaatcaggtttgaatccatgctgaaatatgcaccatcaaacttgacatggaacaccaatacatcattgccttatataccaaacctgacaaatgagtggcaaacactttgtaagcacatcaccaatgcttcaaatagagacttttatgaatttaaggaaatcatattacaagaaacaccaaagcgccgtgttattaagacaattgaggatgtatgcgaggaaattgcaatagtaaagaaagaggattaggagcaaccaaagcgattttgaatctcaagaccgatcaggaagggctagaaagcttggaatctactttgcattcaggtattttttctgccttgtttatttcttttatgctttcattcatatcttagcacgcatgaaggctaacaatggactgtatgtttgtaaaagaattttcgttttctgcatgcagtttcgatatctttgcatgcatgaaggctaatagtgacctgtttttcatattgatactccatatcttagcctgaattaaggctacacattaggcaggctgccaagagcatcattg

SEQ ID NO: 55075 - DNA, 681 bp, Populus trichocarpa
  Intron number 1 from transcript POPTR_0019s08100.2 (locus POPTR_0019s08100) derived from phytozome v7.0 (chr-ID scaf fold_19; pos 9522674 to 9523354)
gcatctttctaagcacccccgatagcaatttgcaggtaaagttgaacgaacatccagatcatgttgtttttttttttttaattaatttctttaagatttgatgcttgtaaactctcttttccattattatagcccgtccgtgaactgcctgtctcaaatctctcattattgttattaagaatgcttggatctaaattagatgccataaattacttgggatttatgtgagtgagtcttttgtaagttaactaaagaaatttattgagaattgttcattttttgagcgatccgtttagaccaattgctttcaaatgaacgattatgctgtccaagatgcgtatttctgatgagctttcagtactgggattggtatgtttacaagattatcattgcgtatttccgtactagtgctcccctccctcaccctaatcactccatcgctcaattttattaattaccgtgtgttcaacgttgcaatataaattcctagcttgtttcgatttatgatttataagaagaatgatacaagttttatgtaattagcttctgatcttgctctctattgctgttcaaatgttaggtttttacctttctattcgaactagaaagcccatatgcatatgattttgttttggtgatttttctctaatgcgtgcctcttcttcaaggaacttggattca

SEQ ID NO: 55076 - DNA, 752 bp, Populus trichocarpa
  Intron number 1 from transcript POPTR_0018s13480.1 (locus POPTR_0018s13480) derived from phytozome v7.0 (chr-ID scaf fold_18; pos 13796819 to 13797570)
gacgtacaaagcatatcaaaatcaagtttcattttattagagaagttcaacaatctaatgaagtgatgctgattcattgttcttccgaagaacaacttgcagatttatttaccaaaccactacctaaagagagattcgagacattaagacaaatgattggaatttgtcatcaaaatgtcaaggaggagtgttagacaattgacattttaactctagtgtttcagtttgtttaattgttattcaatcaagtgttgtctgttttcttttctttcatttctgttttgatttcgtcaaagtaaattccttgtttttctgaggttgttgctgagttagtggcagcacattgtccactacagttagtggctgataactagggaagtttgttaagttttttcatgtatttaaagacatgcagttaataaaataatgataaagacattttatcaaacaccttgtgtgtagttcgtgttcttcaatacccagcattgttgttcttgattgtgcatcccttcacctgtacaaaatacaacaacacaattcacaacagtttttaatgaccttataattcactcttcaattatatacggatccattaactagtatgatgtccggcagcatgattgattttccctatataaactgaatctatgtagtaaatttcccttgaagtgcttacggtagtcaggtaacaaactgtttgtgctcttacttgttgtcatttattggtacagacagagatcagtttactggga

SEQ ID NO: 55077 - DNA, 471 bp, Populus trichocarpa
  Intron number 3 from transcript POPTR_0018s03640.1 (locus POPTR_0018s03640) derived from phytozome v7.0 (chr-ID scaf fold_18; pos 3116924 to 3117394)
ctcttaaagatagacaagaaggtatcttggtctatgtcgtctgccggcctgtcagctgagtgatatccatgtccatgccaaccaaatcgatagaatttgccccagaaatacttgtttctgacagattacgttttatatgtgtactgatttttttaacggtgaaagaaataatgtacagagataaatatgtttgagaaataattttgtaataaatttttattttttcaaaatagaaagaacatgagatatgtcttctttatctcagttattttcatcttttttatctcaagatatattctattgaattggctgggaaggggatgcttcacaaagcatatttatacagattagtctagtagatagagtgcaaaactgtaatatggctaatttgatctgcagtgtgccttcattttgttaccttgcctgataatttgtgctcaatatttcagcaaattaagcagatattgatcg

SEQ ID NO: 55078 - DNA, 506 bp, Populus trichocarpa
  Intron number 1 from transcript POPTR_0003s10500.1 (locus POPTR_0003s10500) derived from phytozome v7.0 (chr-ID scaf fold_3; pos 11450146 to 11450651)
gcgtttgggaattactttgttggaagcagagaaaggtgcagtgccttaccttgaaggggtaacaatatggagatatgaatggctggacatagcgctatgaggaattaaatatctagccacactccatggtttttaccttgttaagttttcaaagaatttaatcaacaccatcggtgaggacagaggaagactattgcacatccatcaagttctctccagcttcaaggatggaaagtggatgcgacactgccttaagatgggggtttcctcgtttctcaaaatagtctgtggctgctaataattgtatcttcctttctcggttttcccctcaaatgtcatatcactaattgtaaaatgtgagtaaagataactatgctaaagatgaaggggggaaaaaattcccctgttgtaaaattagggttagcaaaaatttagacaataattcacaagaagaccgcattgaattttaaaatttttttgttttctgtttttccgtgatgaatcag

SEQ ID NO: 55079 - DNA, 945 bp, Populus trichocarpa
  Intron number 1 from transcript POPTR_0019s14450.1 (locus POPTR_0019s14450) derived from phytozome v7.0 (chr-ID scaf fold_19; pos 15226570 to 15227514)
aggagattaggagtttggatctctcttacctacaggtaattcatgttttttatttgtctattttagtttctgttctctgtttgttttctaagaaacattaaggaaagagaaatttatcgatagcttcttggtgaattgttgtttgtttctaatttcttgaataatttagctttattgaagttattattaggacatgacatgctttgatgttgttctgttgtgtaattgtggttgttttatttctaatatgatgtcaccatgtttaatttttcttggatttaggtgttgaattagaattcaactttagctatgtgctttattgctacttgagattgaaatttgaagtttggcttttttatttttttgtaccctgctgctgcatctagatgcgttgtttctgtttagagcactaatcaactccattattgggcaaattccaatgtcagtgcgattaggatttcactttattgtcctagattctttgttaagaactacgttgaacaggccgtgttcctgaaaagttgactcaagtgattcatggattttaagattggttaaggtttgatttatgtacttttttcaggattagtttatgccccatgatagtttgtctgaagtcttccatttgtttcttcagctatgctatgtggtggataattacttgtagagaggcttaatggttgatggccaaaacttagttaataaagttgcatgagatataaaatccaagaaaatgtagcaagaaagtgagtatttcttggtaaaatttgcccctccactgtacagttgattgtacagtgttatatgttggattaatgccttattaattcctatgttctaattaattagcttacaatggttttctttctgatagtaaataaaatgtaatgcaggaaattctaagaactctaagaaattttgacttttgttgcagattacagagaa

SEQ ID NO: 55080 - DNA, 948 bp, Populus trichocarpa
  Intron number 1 from transcript POPTR_0014s10590.1 (locus POPTR_0014s10590) derived from phytozome v7.0 (chr-ID scaf fold_14; pos 7887389 to 7888336 reverse strand)
cttcagtttttgtttgagctgcgattctactgaaggtaaaccacgctctgtatattaaatttaagaacagcacttcgtgtttggttcgtagatgatccggtcttgtattagcgatttttatcgtacatccatttctttttcctctctcgagtagaaatattatatataaaagaattattagttatcatcaaatgctgatattacttccaatttctgtataatttagggttttgttttcctttttctgccacaaggaattgactcgcattttaatcgtctcatcttttagttatctagtgatcggattaatagacagaatcgtactttgtaggataattatactaattattgtgattatagctgtgcttagcttggattacaaaaaaggtattgtttggtgaattaaggacttgttggatttacatacaagcaagcaatcatttccatggaaatttttatatctcttctttcgtttacaatttgatgtttgtaatgctcttctttgcaatgatggctgttataagttctgttataacgcggtcgtgattgtctgtaatgagtttataagtgcaagattttgtaaaacgcgtatgttatcttctttctgcctggattcgtgtttgaatagtgtttagttgttgatcttatcagctccatatgattgatgccgtgtgatttccacatttatttatactttccaaactgttattgaaacatgccactccagcagttggctatagagaaaattacttgaaggtattattttaagtaacaaatatctcatgctactgtgtatttgttgaacagatacctgtggacattttcttcgacatcctttctgacctattttttctttttaaattttttgcatgcttatgtgtttcttccaatttaactatatatctagaactgagggaaccttatgatttttgaccagcaacaacggat

SEQ ID NO: 55081 - DNA, 979 bp, Populus trichocarpa
  Intron number 1 from transcript POPTR_0003s08050.1 (locus POPTR_0003s08050) derived from phytozome v7.0 (chr-ID scaf fold_3; pos 9502471 to 9503449)
ccccgtaaaactcccctttgccatcatagatttaggtacgtatcaatcatgtttattcttgactaattcccaacttaggcatgattttttcatggatgctatcttcactctcggcaaaacttgggaaagatccgcagtgaaatatgaacagtccattcctctgattggcaaaactggcttcttactgtgtttaaggaagctccccaacctcactgagagccaatgacatttcattgtagttttctttttcctatcatatgtagcgaccattgcccagtaatgttgttactggagcaggatctttgaatagagaaaagaaagaagtttatgtttcaacactcctttatcaagcagctgctctcaagtctcaaaccttcatgcaatcttatgactattgcaccaagctgcatgctctacgtctaacctgttatcagatgtgttttaattcatctgcatcagtgagccagatgcctggtattcaagtgatatctctcacaacacagtgaagatgattagttgttcaaggagggagggtgaggatttaaagaagaacaatttgatggaggcgcagtttaaataaaagccaagctggttctgatccacttgtctcagaacttgaaagctttgcaggcatagaagacatgcttcttccacaggaacccaacttgattaaggagatgtgcttgccaaaaataagaatgtcaaaagatagaaattaaattatattgccaacagatccatggcaaatatgtgatggcatgaagtatgaataattgacgcaaatgtttatgctaataactttaatctgaatattgtaagctgtcttcttgaaaaatccgatgccctttgaaagtgtagaaattcatgtgttataaaattttcagatttgattttattaatggagttcagtcggacatatgagaatgtgttatatgtgtaatcagttgagctggaaaagcaaagcttttgtgatcttaaa

SEQ ID NO: 55082 - DNA, 474 bp, Populus trichocarpa
  Intron number 1 from transcript POPTR_0019s01720.1 (locus POPTR_0019s01720) derived from phytozome v7.0 (chr-ID scaf fold_19; pos 1505893 to 1506366 reverse strand)
ctccttcatcgatgtaataagttgtccctctacactaattctattcttttgatcatgtctgtccatcgtttcttgaatttgaatattatatatcttctgggtgattgattagtttcctgtgcacttctcttttcctcttgtatgatttaggggatatgtaaccaatgttagtgctggagatgttcaacaagtccacgcccgagtggccaataatgggtaaactttttgaaccttaataaaataatttcttgattaattttttagtacaatttcatgcaaggatctgtactatgaatggctgtacgaatcataaaagaaattttttgtcggttcaataaagttatactgatgtataatggacagaccggattccttcatgtttatgccgacaaaacttcactctcatcaatattcgcttcctatgacgtagttctgggtgtgaattaatgccttgtcttgtgtgaaataggggcg

SEQ ID NO: 55083 - DNA, 840 bp, Populus trichocarpa
  Intron number 2 from transcript POPTR_0003s15120.2 (locus POPTR_0003s15120) derived from phytozome v7.0 (chr-ID scaf fold_3; pos 14977053 to 14977892)
gctgttgattcaaaggtaatatttggtgcatttcattttatttcttccttgttgtttccactgttaaaggtggtggatacatgcactctctatagtatccctgacataagtagctatttttattttattttttggggataaagatacttgaacctggacattccaactcctagagttttaatccttgaattcttaggtactggaccaatacctcattggatctgcttcttaccttaattggttactttggtgcattattctactctttgctggaattatatactctgctcatgtgaatagtttatgctagaaatgcaattttcttttttaagttgatacaaagttctttctgccagcctgttttgatcatccttttaagctaagctgtgatgttcaacattttgtttctttttctataatgttttgtgcaatatggtgtttatacatttaggctagtcttttctccctctaaaacctaattccgcattccttaaaactctttacatgtacttctgggaggcacctcttgaacacagaaggtttattccattgctagctagcagtttcccattatcaacttcccaattttttcaatatttggagagctgttcgttgaataaatcaatttaaaacttctgagtggcatttttggacatgctgattaagtggaataattcttatgtgctgtattggttggatttggtgaatgtgatagcatgtgatatccttctagaaccatgctgtccgtcaaaatgttacatcctccaggttgatttataaaaaaagtatttgatttttcttttgacttgcatttgattcagaggcttgtaaccattcaag

SEQ ID NO: 55084 - DNA, 957 bp, Populus trichocarpa
  Intron number 1 from transcript POPTR_0003s04890.1 (locus POPTR_0003s04890) derived from phytozome v7.0 (chr-ID scaf fold_3; pos 5930861 to 5931817)
gttcaatctaagtggtccttctctcactcatttgagtaagttactctcactataatttcgcaaatgcccttgtcccttttgttgttgttgctgcgctgcttaattggttgctgggaatccgatggaaattaaacggcagagagtggaagttttggagcttcacttaattgtttgttaatggaggttattatctatttaatcatgggtttaattaaaaagcttttgcctccctcgcatttttcaagcatgccattgtgttcattttatactcataatgaaagtaatgtccaaaatctataacttaattttctttggcctctttttttatatatttttatttgattaaaggagtcttaatttgtggtttattaaattgaatttctgggcggtgctgtgttgcccaatccaagcttaaccgacaaccgcagggtatgaccttacttgtttgtcatgttgttttttgtgtttacgaaatcgcccttggttttgtttcttcttagtgtaacaacaaatttttgggactcccacctccactttcatggcatttgaatgaacagaatcaaacccgtgactcttttttttggttactttagtattttcctatacgactcttggtcggattattattattgctattattgttgttgttgttgttttcttactaatatgtaagagaagtttaaggctgttgatgctgacatgagtgaagaataatctggtgaagtaaatttcgtgtaaaaaggagttgttaacctgagtgactgtgttaatcccttcctgcaaagcaaagcaggacaggggaaggcctcatgttgaagtcctgccttgccactttatggaggacatatattaaaaggagttgtatttgtgtaaaaaattggatgatctaacgttaatagttctgttatttggtgctgaacagatatctggttggagtctctgcagctgttgccgcac

SEQ ID NO: 55085 - DNA, 622 bp, Populus trichocarpa
  Intron number 2 from transcript POPTR_0006s09490.1 (locus POPTR_0006s09490) derived from phytozome v7.0 (chr-ID scaf fold_6; pos 6972600 to 6973221)
attggaaatacattcttggaggtttaatttttcaggtctccattcaattcaatttctctcttattattattattgttgttgttgttgtttgctatccctttaccttactctcttgtttttcttcttcaatgactttaatgtttgaattctttggtcaatttgttagttcgatttttaggactgtgaaaaagggtgaaggatctggtaaaggtttattgtcgtcgtttgccccaccttgagagaaaacttatacttttagcataagcgtgtgttaagttcaataaagaataataaacaccacaagcataagttaaattccccatctgttttcccatgttaacaatttttgtgagatttcactaatacagtgcgtgctgttttgagttgctgaattgcatattctgggcatgtgttactagtgcgttcgatggtcatcttgatcaacttgtgatgtgattttacttaataggatatcttaaattttatgcactgtcccatcagatttttaggttgagtttttgtgtttttgcacttccccatcttatttttttgcccttctgattctagtttgatgtttatctcctaacatctgtaatgcatggtttttgtccacagtacattc

SEQ ID NO: 55086 - DNA, 606 bp, Populus trichocarpa
  Intron number 1 from transcript POPTR_0018s02910.1 (locus POPTR_0018s02910) derived from phytozome v7.0 (chr-ID scaf fold_18; pos 2540052 to 2540657 reverse strand)
actgctttgtggaggtgagtctttttcacttgctgtgtgtttgtgttagcttaatgacacggcatttcactaatttcttccttcatggggaagaatacatgattaaatttaggctacaagctctttttcaccagctgtttaattgaaaaacgacttcagaatcatggccatctaattaagtattcctcattactttaatcaaaatccttacaggcattctgcaacatgattttgatgaataaacagttcttgacttcttgatgattgaaggaaaaaaaaaacttgttttagagtattttggagattgagctattacagtataaagtataaactgtcatgtgtcacttcttttaaatcatcaagggcttcttcgtagactctgcttgagttgttttacaacatgtcatggatgattagctgtaattagcaacaccatttgaggcactaggccgaagcaacaccaagaattctctgtttgtgatccaatcgtaacaattgatttatcagcacccaagaataaactgaaatcatattcttatactacggaattggtggctactcttcaattctggatagttgtcatggactcatggttacagggctgcg

SEQ ID NO: 55087 - DNA, 719 bp, Populus trichocarpa
  Intron number 2 from transcript POPTR_0018s02710.1 (locus POPTR_0018s02710) derived from phytozome v7.0 (chr-ID scaf fold_18; pos 2427655 to 2428373)
agaagtacaagactgaaggtaaactaatatttttcaaggaaaatatttagttttttggcattttggtacccgcactctgattgttgtggaaagaatatctgtttcagtaagcttaataatacctttgcaatgaggctgtcatttgaattggtgttgatctttctctctatttgatatcttcttacttgctcctggctctcaaagcctttatacatctaaacatgtggcccgatttgtgttagggagtgatagaattctggtatttgagtactattaagagtagggatttgtctgtctcatgagtgttatgtacatataatttctgctacccctttttaacgagcaatctaatgttttgtcatgcatctaaagctcttctgactttgtactcgcaaggtttccttaaaccagaggacattgaaaatttgcaagatcatgactggctccttgctttgttaagaatgtaacagtaacaatatcatcagatcaataaagcattcatggacacatatcaatacaaggaagagaatatctatagggaatagggatattcccatacctgcaccattgtgtagcctctacgtatcatttctttaatcgatttgaaaaatttaaagctcagtgaaaatatttctttttcgttgaatcgacgaagcaacatggattatattacttgcattgcaggatttgaaattctggcttttccttgcaatcagttt

SEQ ID NO: 55088 - DNA, 913 bp, Populus trichocarpa
  Intron number 1 from transcript POPTR_0006s21420.1 (locus POPTR_0006s21420) derived from phytozome v7.0 (chr-ID scaf fold_6; pos 20478237 to 20479149)
tcacatcatcaccagcacagaatattaagaaaagggtacaaatctacaatcctttcattccatttgttttaggtttctttggttttccagttccatgataataatcactgcagttctgtatcagtggaaatcgtcatttccaaaagctcttatcttttcatttattcgtttatgctgcttttagattatgcagattctttttctgggttcattttattttttttagtgtatcttgcttggattggttgcttaggtagtgtgctgaaggaaaaaaataaagaggtgaagtaacggaagatgggatttttattttcagttttttactgatgtgggatttttatttggacattgattttaatttctttcagttatattaggacctttggtaatggaaatgttttgagttgccttttcttttgattgattagtaattcatggtctctgattttctgctattttgttcatttgatgagtgtctcatgcttttgaatccagttaatgggttctctggcttttctttattttaattatttagtctttttggggggctttaccagttctgtttacaatatcttcttcttctctttattttttcatttataatatcatatatccagtctaacattaaaattacagctacaaaacaaactttactaattgctttgttagtacctgtgcaaatcttatggataggcgaaattatgaaacttttcaattcttacagtaccttcaatatccaatattagtgattcatcttataagttgatgacttctgcataattgccaaattaattttttttcttggatataataccctaggcttgaattgatagtgaagcatgtcattgatgcttgtttctctagttaaatcgaaccttttttgtacagggttaaagtttgggatagaaaagcg

SEQ ID NO: 55089 - DNA, 523 bp, Populus trichocarpa
  Intron number 2 from transcript POPTR_0013s00580.1 (locus POPTR_0013s00580) derived from phytozome v7.0 (chr-ID scaf fold_13; pos 276299 to 276821 reverse strand)
tctctggtattgatctcctgatccgctctgctcaggtacatacttacctctaacctattgatctctctttttatccttgtgttttgtttgcgtcgtgtcgagttttggaaatgatttgttctgatcatttggtattctatgcacttatcaagtttgaatttgattactttgattggaattcggatcttatctgattaaattttgcaactttagcttgattttggttggatccaaactgggtttttgacatggtttcaatcttctactgggttttttgaaggttctgttttggaggtagtgattaaagttgtcatattttaataaagttggtaactttagcttggttttgatggaaattctagttgtgtttacccataattgcagtttcttttttacttggtctgttgaaaattcaatcctggtaatgggattggtgttgctttggatttgatgttgcaagtaacaagatagtttgttattgtgtctaggtgacagaaggtacagatttcacggagttgacgaa

SEQ ID NO: 55090 - DNA, 459 bp, Populus trichocarpa
  Intron number 1 from transcript POPTR_0006s25430.1 (locus POPTR_0006s25430) derived from phytozome v7.0 (chr-ID scaf fold_6; pos 23829916 to 23830374 reverse strand)
gtgtgtcgaaaaacccatctcagctttcaaacaaggtacttgaaaacctttatccttcatagtttccttccttcatgtctcctcttttcaaattcatgctggtttagtttcaaatgcttgaaaagttcatgtcttcacgttctaaagttgttttctttgtaagctgaattgttctcttagctttatcatctgtaattaattattgttttatagagctaatactcgtttctctcaactgggtaccttctgctttcttgaaaaaatcaaaattttatcaaaatttggctaaatgatggtgctacgctcacttaagtggaagcttttttttttagcaattaactaaattcaatggtgtatgataggattgtttttttttcctttattttggtttgattaattgaatttgctaaatgtatataatcagaagcaggaaaaaggaggtttagcagagagttttag

SEQ ID NO: 55091 - DNA, 464 bp, Populus trichocarpa; identical to SEQ ID NO: 54043
  Intron number 1 from transcript POPTR_0257s00210.1 (locus POPTR_0257s00210) derived from phytozome v7.0 (chr-ID scaf fold_257; pos 14592 to 15055)

SEQ ID NO: 55092 - DNA, 737 bp, Populus trichocarpa
  Intron number 1 from transcript POPTR_0018s08280.1 (locus POPTR_0018s08280) derived from phytozome v7.0 (chr-ID scaf fold_18; pos 9180006 to 9180742 reverse strand)
gagaatcacaatacctgcccactgtgcagggcaccgttgccgacaacctcacgaagtctggcttggaccaggactgagcctagttgggccgttgagagaattctctacctcttcggggatgatttgattacgtgatcaattcattgtcgctgcgctcttttcagccgccacttcctctttatatatatatatataacttttttaattttaaattatcttctcaatatctttaaatcgtttaacatactaatattaaaaataaatcttaaaaaataaaaaatatattttaatatatttaaaaagtaacttttatcttccttccaaacaaactataatcgtgatagccaataataagcggcaactcatgaaaataattaattagtgtgagtagcagcaggacaaattttgtaatattttttttttgagttgtatatatgtactttacggtctacgtacgcctttcaaatattacgttctcttgtagttgcattttacattaatatgttttaatgaagtatttccgttcttctaacaaaaagacagataagaattctagattgtaacattctatttatttatatagggtttttggatcagtttgtgtgcatctcgactaatttttacaggctctaaaattaacgatcagataagtctcaagtgactattaatattaacaacctcagggctcgaacctaaaactagaggagaagcaaaccttttaatcccaaactccagct

SEQ ID NO: 55093 - DNA, 890 bp, Populus trichocarpa
  Intron number 1 from transcript POPTR_0013s12680.1 (locus POPTR_0013s12680) derived from phytozome v7.0 (chr-ID scaf fold_13; pos 13383510 to 13384399)
gcccaggttttcttttttcttttcttttctttttttcttttctttacatttttaagttatttgctttatgggttttgtctaaaaatttgttcttgttaatggcataccttttcttttctaatttttattgttttttttttttttgcattaatagtgttggttggttgcttgatcactgatactgtgtttctaaataatgggttggtcttgaacttggtaaatgtaacttcatcaaattaattgattggaggtttctgtctaaaaatgtgttcttgttagtggggtaccttttgttttctggtttatttcttggttttgttattaatacagggttgatggtcttgaacttggtgtatagattcattagtggtactacaaccctgttgcgtaagcaaggttatgttgttaagtgttgctctgttaagatttgattcactctaatcaatgccagatcatttgtaattgtggcctttattacattcagtaggtaatcactgtaatacatacatgctatggccattttcattgtgtactctgcctgcctgcctcctatagcatggaaaatttttatccattcaaggttgattcttctcttactttacgggctgggaatccacatgaaatatgtttacctcgcgtgtgtctcatgattaggtggaaacgtttttgttgttatgctgaagaaattatgattgtctatgtttgcaatgaaatgcgatgttaagctgaaaatcatcatctatttttgcactgcgcttcattgtgtcttttgtccccggaaacttgttttgttgtaattcatgatttctcttctcttgtttgaaataaagaatgtaagaaatatgttcattttgtgactgaatcaggcaaatcatagattcacaacaaaa

SEQ ID NO: 55094 - DNA, 930 bp, Populus trichocarpa
  Intron number 2 from transcript POPTR_0018s07100.1 (locus POPTR_0018s07100) derived from phytozome v7.0 (chr-ID scaf fold_18; pos 7304163 to 7305092)
agattgaggggattcgcgttggtgtcaatttagaggtataatttgaattttcttgcccttttttgcttgccaagatatacagtacaggttggaaaaatggattatttttgttattgctagtttttgctatgttatgtgtggaaaatgatcactgagagtgaagatgtgagggttttcttttttcttttttccttttctttttgtcctatgctggaaatgtaatattgtaaaagaaaatgtgttttttgtggtgctggttattcctttcagatgtaagatacttgtaaatatgaagattgatctattatggcaatctacttgtattcttgtgcgttgtccctgcctttttctatctactatgctgtctggtgaatagctctggctttgaccattttggaaaatcgtgcaagctttccatgtttgacaaatttcctatttctacttgaattcgttgttgtggatccttcacatggattcacatttctgtgcagagtaattgacacaaatgactggggagcatttttctgttatcaaagatagacaactaatctaatgaaagcactaagatgtgatcatgaaagttttgaacttctgagtggaaccttaagcttttgtgagattttattgcttggaaaacttgacaaggtagtgggtagcaaaaggaaataaataactgattcattgctcctgttagagtgacaaatattggtatgttgtcaaacgaaacttaaaaaaatatccatgttcctgttctcatttcagctatggttgaatggattttttttctttcaatgaatagatgtctattttggctatgcatactcaattgttttgttgtttttcctatgatgtgctgctatacatgcattaattgatctgttgtttgtctggttgtgatttttggagtccctatgttgattcagttctata

SEQ ID NO: 55095 - DNA, 500 bp, Populus trichocarpa
  Intron number 1 from transcript POPTR_0014s09140.1 (locus POPTR_0014s09140) derived from phytozome v7.0 (chr-ID scaf fold_14; pos 6775302 to 6775801)
ttatcagtgtggtggttgtggtgctgttcttcgaggtacttgattttctctctcaattttctatttgtttgatgagaaagttaattgggttaagcgatagaaagattatgtctttaattttgatttttcttacttctcataattgaaattctgggcttttgttataaaatttggtgtctagctgattgtttccttttcagttaattatggagtattagcagtaagttgtgatgcattatgtttgatttgagatttttgttttcaatgaatggaaatttgattttctctcatcttattagatgaaatgtgtggtttccccccctagctcattgtaatttctgttctattgatcatgaaaccaaggagagagaagaaattaatgaattgaatcatctctgtacttgctggagtttttttttgggatcaagtttttagagtcgtatttattgtttatgtgaaatgcagctaaaaataagaatcgggatacagacactttatca

SEQ ID NO: 55096 - DNA, 707 bp, Populus trichocarpa; identical to SEQ ID NO: 54130
  Intron number 1 from transcript POPTR_0018s13510.1 (locus POPTR_0018s13510) derived from phytozome v7.0 (chr-ID scaf fold_18; pos 13827033 to 13827739)

SEQ ID NO: 55097 - DNA, 681 bp, Populus trichocarpa
  Intron number 1 from transcript POPTR_0019s03410.1 (locus POPTR_0019s03410) derived from phytozome v7.0 (chr-ID scaf fold_19; pos 3461955 to 3462635 reverse strand)
ccattgttgtgtggtcccgcaccatgtgatggggggaccaccacattaattaagaaggcagctggctgcctctttgatttaaaatgaaactgccactgtagaggcagtagcgaagaacgagagagcagagaaaaaccgagagaaagaaagaagaggaggcagcagagcagtctgtcttctttcttcgatttccagttcgttcaccgttggatcgggctgagatttggacagcagctactagacacgttactcttcattctgaacggttggattgaagattggtggtgtggaagctggtcgttttgacagaaaacggggctgtcagtgttgtgagcttttctctaacattactctctttaatcttgttgtaatccgagaataagttgttcttgatgatatatatgttgtagtccttagttgaatctgaggaagaacgattgtgaacccattatttgtgatagtggaagtttttaggtggactccggtcccgtggtttttcccgcatcgggttttccacgtaaaaatcttggtgttgatttgtgtgattgttgcattatatttgttcattgtttgattctgttttttactgcacaaagagggaaaaaggattgggacttgtgaattgtgaattgtattccgctgaattgatccggttagttgtccctagttttcccaacagcc

SEQ ID NO: 55098 - DNA, 919 bp, Populus trichocarpa
  Intron number 3 from transcript POPTR_0014s14040.1 (locus POPTR_0014s14040) derived from phytozome v7.0 (chr-ID scaf fold_14; pos 10280170 to 10281088 reverse strand)
gctggtgcagggccggtccttggtgattggggaaggtatataagctagaatgcgccttcatttctcccccctcccctctcgtgtgaaacatagtaacatgagggtattataactaaaagaatttgagcattgaagaaaaggaagttaaaatgatatcaagaagatcacaggcattataacaatgaaaaatgttctttatttatagtgctacttagtgcctagaagcatgaaactttatcatgttttaggcagcatgaatttcctgctcccagagatgcaagaaatttttgttcttgataaaactactagtaattcagaatttaactttccctcttttatggaatctttagctaactgaacatgattggaatgtacttgtcttaattatattttccttcgaagtggatatcatatcctccttccattgacgtactctttcgctctgatacaattttattttcttatcatgaaactgttacctagaaatagagattgtaacattcaacaaacctaacagttttagctagtacaaataggaggctggaattgacatttaaataacttggtgattaaacgtcaaatgcatttggcaagagctcggtgcataaaatcaactgtctttctaaatgatctggtcatccaatgctaaattaatttcttctagttttagtcattactagatgattcacagtataccatttgagaatagttttttctctttttttttttttttccttctatttttcctattctttcccaaggtaagaattcaaattatccgcaatagttagatacaagattatttgaaggtttttaatgatagctacaataggattcataaccgtttttgtttcttcacatataattattgttcttgagtgaatttaacatgatattgttttattctcctgcagtggtt

SEQ ID NO: 55099 - DNA, 495 bp, Populus trichocarpa
  Intron number 2 from transcript POPTR_0006s00610.1 (locus POPTR_0006s00610) derived from phytozome v7.0 (chr-ID scaf fold_6; pos 323314 to 323808)
accctgtcaagaccaaagagtggttgttcatcaaggtaagctatgctggggttaatatgacagctctttaatcttgaccttagctagtttgatttgtgttaagttaatgtaactggagttagtttaagtggtgattaaagttaccaagtgtaatgctagcattgttgatttagtatgtataaagagggctgaaagttctggaattgtaagaggaaaaaacagtggtgaaagcgaataaaaaaaatctgcagtttagagaaacccttctcctgttcatgcctgattctgcagaaaattgcaggcctgtgttttgttgatttaagtgagtttctcatgtccttgatgacttgtcaatgacccaaacatccaccctaaactatgttcttgtcgacgaatgttagtcttcctggtgcttgtccaaaatgattcctttcacgttgatgtcgctttactccaatttgatcgcaaactgtttctttcaactgtagaaattat

SEQ ID NO: 55100 - DNA, 988 bp, Populus trichocarpa
  Intron number 2 from transcript POPTR_0019s08980.1 (locus POPTR_0019s08980) derived from phytozome v7.0 (chr-ID scaf fold_19; pos 10583520 to 10584507)
aagatataaaagatgtaaaattatttcatccatccatctctcacttttcttttcgagtttctttcatatacctctgaagaattcataaatgttggtgtgtgtgatatgataatggcataaggttattgtccgtcagtcccacagcccacatatatgctatccaactgtattcacaaagtatcggggtgttatccacttgatttcaccgtgacaaatctaaatattatccataattgccggctcttccaaatgaaaacaaattagcactagctgtcttattatactccaattgagagagtagaaaatctataaaaatattttgataattaaggtggatagagtcgtcaatgttgcacccctcgtcatgctgcatcagcacacccacctaacgttacaagctacctatatagcgtgaattacttaaacataagttcgatgatgcaatggcaaactagcctctctaacaggaagtcacaagtggtgggagttttccctagtcatttagcttagtttgcatatatatggaaagcaagcacatggatcgaaaatcaaaggacatatcacgtttgtgcttttaaaaatctcttaaaagtatcatttgtggccatgctaaaagatgtccattctgaaaagcgcttctctcctttttctttttctttatctcattttccttcccggggaggcaaggagcatgggggggtttagccgacaaagacgctgtgaaactactttgcctttttccgtcatcatacaatgagaactgtcttcaatgccttggagatttttggagctggagaagacacttgaacaaccagattgttttaatataatggcaactttgacactcgttcagtctacctcctagctacgaggaaaatgattgattaatttatgagctgattatcttatatgccttcaaagtcatggccatgttccttgatgtcaaattgcagggagtacctgatctatcctcgtttggggacgtgta

SEQ ID NO: 55101 - DNA, 154 bp, Populus trichocarpa
  Intron number 1 from transcript POPTR_0013s07670.1 (locus POPTR_0013s07670) derived from phytozome v7.0 (chr-ID scaf fold_13; pos 6513607 to 6513760)
ttgctaacaagtacgtacctgtacctatctgcatatagtaattttcaaacttgtttttttttcttctttttcttaacattaatgatcatcaagagctaatccggtttttatttttgttgtgttttttctttgaattgaaggcttgaaaagctat

SEQ ID NO: 55102 - DNA, 995 bp, Populus trichocarpa
  Intron number 1 from transcript POPTR_0013s00880.1 (locus POPTR_0013s00880) derived from phytozome v7.0 (chr-ID scaf fold_13; pos 448541 to 449535 reverse strand)
ctgccaatatcgaaaaaaaggtactttttgaaatacccattttgttattctttttactttcgttagtttttgtgggttcttgatttctcttttaaacttggaaagttgaatctttggtgggtttaatgtgtaatatgaaatggataatgacagccctttcgagttttctgctcgttgtgattgctttgtggggttatttttattttaaagaaaattgattttgaatggtttttgtgaagttagaaacttgaatctgaagtgggttttagtgtataatgagtaattaattacttggcttagtttttgggaattttatgaattaatgaactgaaagatctattgaataagatttttttttggagggggttaattatagtgctttgtggtcatagaattccatcgcaaaaaatgaataggagattcatttctctgtgttaaatgtttttgatggatgagaactgcagggggaataggatttagagttttggacattattttaattgaagctggaatctctccagaaataaatcttgggtcttatttgagttctcttttcaagtgagaaatgctgtaaaattaggtaactaaagatggatgatattatgaagaagagagatgggattttgctcaaaggaggacatccatgtcaccctttcttaagtaattgaattggatttatttttgttttgatttctgagatgggaatggtatttgattgatgagtttgttgaaatcataattttgaacatatagcacggtgataggtgctgccactggaaaatgtcctcctcatctccaagcctttaatttatcaatttattttatcattgtttttcttttttcttctttcttaatatagaaatctgcccattcataaaaaaataagtattaaaatttaaatttagcctttggttttccttttcatgctagccaatcaaagatttgatgttttgtgtctaattgtttgtgttgtttgacagttggagagtcttccg

SEQ ID NO: 55103 - DNA, 378 bp, Populus trichocarpa
  Intron number 1 from transcript POPTR_0018s02020.1 (locus POPTR_0018s02020) derived from phytozome v7.0 (chr-ID scaf fold_18; pos 1811977 to 1812354)
ttctcttgcttcgcttggctctacgttgctggccggtttgtttgtttccatcatttcttcatttgtttctcaatatcagatcatcaaaaaaaaaaaaataatgctgctataattattgagaatttgtggatttaattatactaattttgaattttattgatggaatttggaaaatattcgatatgagcatttattaggacgtgtttggcaaagaaaaaaaaatggatataatttgtaattgcgaatgtcttagcgataatttattgagatcgtggtgattagagttgtatagtaaataaattaattttaattaagaattatggatttaattgtaattggtgtgtttctgttttgttctgtttggctatggtttaggtt

SEQ ID NO: 55104 - DNA, 795 bp, Populus trichocarpa
  Intron number 4 from transcript POPTR_0018s02020.1 (locus POPTR_0018s02020) derived from phytozome v7.0 (chr-ID scaf fold_18; pos 1812860 to 1813654)
ccaagaggttagttgatgtttgatatataatatgatggctttgtagtattttctcttttgaataattgttaaggttgcaaattttgtttggttttgtatactgtgttggattttttttattccattgattttcatccaataaagcaacaaataatggcattatactttgactttgaaagactggaatatttacttgacgattcccttttttgtactgatttcctctgttttttacaaaccttcgttgtcatcctgttctcctttcttctgctttcttttttattgaagtttgtgggaatttagtggctgttgttccttacgttgctatcttccctcccttgtcgaatatcatagatctcacttacccttgctggcttaacatcttgattcttaatttcctacatggtgcagcaaataaagaacaagcacaagctcaaagcacataaaagaaaccatggataaaaaaattaattagactcttaaaccaagagacatgaaattggaaatatctaaaatgaatgttatataccaaatatggccaatctaaatgtaagaaattctagttagaatcttttataattaggaaggtaataaacccaataaataaaatccctattcttcttattgtgattttctgcttgcatccctgtgaccagaatgttgttacttatgacattgtcatgccacatagtatgtctatcattttttttgttggtttcacaatgtgaatgatagtcatatatactttacttcttgaaaagtaagtggccagcattattgtttcttttgtaggtg

SEQ ID NO: 55105 - DNA, 784 bp, Populus trichocarpa
  Intron number 2 from transcript POPTR_0019s02750.1 (locus POPTR_0019s02750) derived from phytozome v7.0 (chr-ID scaf fold_19; pos 2550960 to 2551743)
tcgtttcctgggggtgtgtgccgcgttattgccatgtatatctcttcacttaccacacaatgcttttattttcaattttaatttaaggtctgaaggattctgatggggctagttcagggaatgaaggaatagttgtggtgtataaagtctcgtcagaaaccccatttcgatagttgaattttatattaagaaattcggataaattcattagcagtaaaattatctaaaaacaagtatgataaggatctcaaggaaaacttaatcatgctgaaaatgtcgtgaatagcaaagaaaggatctccaacaaagaaaattgagcatttgtcagaagtttaggcttaagagtttgaagaaaagccgagcttattagaaaataatataaattatatctcgaagttttatctaacagcttaaattttagggttgatatggttatttgatatagaaacagagttttattgatcaagtaatcatgagttcaaattttatcactcctattattctatttgataaaaattaagtacaaaattgtatgggcctcgaatctcaagttttttacttaaaaaatatgttagagaataatataaacattaaattttaattcaaaaatttggttttctattccattggctgttgtagttatgtcttatattttcttcacatatgattgttgatttgcaatggttgaaagttttgaattcttaccttgtattgaggagttgatgggtccatgtgttcttgcaatgcagatatctcaaaaggcaagatcttgacggtactctcc

SEQ ID NO: 55106 - DNA, 836 bp, Populus trichocarpa
  Intron number 1 from transcript POPTR_0013s01220.1 (locus POPTR_0013s01220) derived from phytozome v7.0 (chr-ID scaf fold_13; pos 668998 to 669833)
ctgctagtctccactcttctgctgctgagaagaaggttagtttcgtgattttatggatttttcgtcttcattttcgactattttttattgtaatttgttttgagtgtttgtgtgtgtaggatttcagttgaaattagggtttttgttgaatttggttttgaatggtggctttgtggttaaatttaatgaactgctgctgttgagatggttaaggttgagtgaatttggttaataatattttggtgtgattggtggtctgattgttttggagcgttatagtgtgttagttttgttgggcttagttagaattaggtttaaaagatttaggtttcagttggtttggagctttgatgaatttttatcggaactgggtgtattagattatctgaagggcttaagttttattcattcaagggttatggtgcttttaatggtttcactgtaaggtctgtttgctaggttgagctatgcaataggaatacttgtctcaatcgtgtagagtgcaaccaatcccatcgcattggtattgggtgccactttgccaggatctcttgttggaattgattaaaccattggatattggtctttgattgcttgattgaatgggttatgtattctgttgaattgtctgaaccaataattgggggatgctagtttggctatttccaggtgtgttagttcattagctttttggaggtttggatggtggatacttgtaatttaggtgaaatttggatacttgtttgtttcacttttggtgatcttaaaagatgttcgagttttgatttattctctatgttggacttggttgcccgcagttggaacatctgccatca

SEQ ID NO: 55107 - DNA, 556 bp, Populus trichocarpa
  Intron number 5 from transcript POPTR_0013s00760.1 (locus POPTR_0013s00760) derived from phytozome v7.0 (chr-ID scaf fold_13; pos 392682 to 393237 reverse strand)
ctctaccaaagctagaacagtaagctctcaacagttttttgatgattttgtttacaattctagaagtcatgtgcatgatcatttcattgctagcttttattgagcctttaattggtcctatgtcacttgtttcgaatttcggtatgggtatgggtttgattcttggtattgataatgaaattccctaaaccttgatagcttccatgcatctcatgcaaaaccacatttgttatcttcaacacaattagttgatacagccgatctttaatattgctacataagagaaattcaacatttcagaattgcatgctgcataagcatctcagttcttcggcagaaattcaatagaaaaatgttgtttaattacatgctcaaaatcttgtcttttctatttaaatatcatgcaggtgaaatttgatgaattatggttaagttataagaaatcaggaaactttacgaactctgtagcctttccataactgctgctgtctttggaaatctgaagttctgttaattcccaggttcatatactgctcttcagctggagtttacctca

SEQ ID NO: 55108 - DNA, 665 bp, Populus trichocarpa
  Intron number 1 from transcript POPTR_0013s07460.1 (locus POPTR_0013s07460) derived from phytozome v7.0 (chr-ID scaf fold_13; pos 6256132 to 6256796 reverse strand)
gttaggtaggagtatcccgtctgtattcctttttgttcttgtcttggttggctactttctttgcatagaatagttaactgcattgataccagccaaacaagagctctttttttttaaatctttgaattaattatacttctgttatgatttgttagcattctgctataacttgttgagtatttgttgtaaataataagatttaatttcaaagatgtattccttatttcactctggcatgcacatatgctttgtgcctaaactccaagaatccttttcacttaatcgcacctaatgcttttaacaacagcaggaaatgcataatttgcacacttgctcccctactattgatcaatttttctgctttctaacttccatcaatggtttattttttaaggcgagcgatcccaagcttctgtgttataaagcatgttaaaagtttcatactagtttctttcatggtcaatcactcttacaatgtgtttcgaattccatttttttagaatttcatcataaatcccagatcatttttcaaagaaaatccacaattgtcaaatgtatggaatgcatttcttaatttttttccatttttgtagttcaaattaattacaaatgatccaatggggtttggtgtctgaattcttatctttgtgtgaatcaggaactat

SEQ ID NO: 55109 - DNA, 892 bp, Populus trichocarpa
  Intron number 3 from transcript POPTR_0018s13220.1 (locus POPTR_0018s13220) derived from phytozome v7.0 (chr-ID scaf fold_18; pos 13623334 to 13624225 reverse strand)
aactgcaaggtgatgatcggatccatgtgctgtattctatattttcaagcaagactacctctaaactttcagattgcataaggtcattttatttctgtgatactgactgtacgtatttgtcctgtttatctgatgggcttgttgtaagtcgagcatcatttaatttcatggcttcattccacctttacaatatcttagcaaataggagttgtaagttgaacaaagtcttatttacctcagcaagtgcgttgtataaatgcttatacgtacatggtgcgtttgtatgtagttaacctgaatcctacagcagtattatacattaaaaatccgagctcattcctccttaagatttcatcaatagtcgattccatattatttccatattagattttgtggatttttcaatctgactaactaacgtctttacttcagtaagctgaatatgcagaagcgtatagctagctactttccttgcgaaaaatgtcatttcggcctctttctttatttgacaccaacatggtgaagcatgtggtgaactgcttcttcttcttcttcttcaacgaaaattcagacaaaaccgagctcgagtctttttgattcgtagatcactaaagaacgcgagcttattattggcgttctgaggctcgaagaatccctcgaccaacagccctggatataatcttcgtgtggcatagagtgttaagaggctgctagagtgcttctcatgtatgattcttttcactactgagattaagtggctctattttaattttgtgtctacattttgctcatgcctaaggtgatttaacagtttgtagattgatttatttctaagctgtgatgctctttatctgcagggcgtgttagaacccaagctagctaaaagggcaga

SEQ ID NO: 55110 - DNA, 638 bp, Populus trichocarpa
  Intron number 3 from transcript POPTR_0006s10740.1 (locus POPTR_0006s10740) derived from phytozome v7.0 (chr-ID scaf fold_6; pos 8094106 to 8094743 reverse strand)
ttattcaggtactatcttcttcttcttcttcttcttcttctttaatttatggtctcgtcgggtgatataatgtcatcttttttttttaatgttatcaataaaatccacttatgtcatccatgagtccactttctttagaattttgggaccattgtcctatctgggactagcctaggttgatttttcatagtctactccgcctaattcagctgaggatatcaaaagtatagcagggaagattggaaagatggtgtttaattgcaatgttgcaatgttcgctttcactgtgtgattactgggatgaacttaaaccacaatttgttcaactgtccaaatcaatgattgccatgcttcaccattagcatgtaaaactttaaatagagaaaaatttcatcacatgtatagaaaggactggaccatcaatttgctttgtgaacgaatcaagaatgatacatgtccatgagcagatcatgtagaaacctatcagctccttcaattgaatgttttggatggctgtttttagataatattgaaaaaagtcagtactattcatgatgcactcatgagatcgaaagtaaatctggtcaccacaaattgtaattgtaaaattccattttggcaatagagtggagtccatc

SEQ ID NO: 55111 - DNA, 332 bp, Populus trichocarpa
  Intron number 3 from transcript POPTR_0018s01610.1 (locus POPTR_0018s01610) derived from phytozome v7.0 (chr-ID scaf fold_18; pos 1504793 to 1505124 reverse strand)
caagccaacagcttaaatgtcataatctatacttactgctaaatgcactcactttcctgaattctttctcagtttattgaaatgttcatcagatagaaatttatatcaactcattgttctgttaatcttcaggcccgtaagatagcctgcaaccctcccagtatagtaagtatacctcttcctattgaagttttcttttctgggaatcaaatcttcaatatttgaaaagctgaacatatttgttttcggattttttacaccgtcgaggtttcattttctgtcaaattactgaaaaagcaatcgagaacgttgcaggctctgaacttcgagaa

SEQ ID NO: 55112 - DNA, 904 bp, Populus trichocarpa
  Intron number 1 from transcript POPTR_0014s03170.1 (locus POPTR_0014s03170) derived from phytozome v7.0 (chr-ID scaf fold_14; pos 2554358 to 2555261)
agggttttgaaatcaaatcagagcataacaaattggtacggtttctttctccactttgccttctctcatgatctgtatcttttatttctacattctagggtttttcattttcccttcaatttatatttccgatcgtttaattaattgaatctcttgttttttttttttttgttaatcttaattaccgaaaaataactagaagatcgaaggttaggaattcaagcatgttgctgttttagtagtagacttgactatttttttaaaaaaaatctgcagggagcaaggtcttttgtttctgtttttgaaaccagagagtgttcaacttgaattcaatagatatataagttgaattcatatgtttagaaaaaaataaattaaattcattttatttcttatattttcatcaccaccttcatttccatcaaagatctctaaaaaatatttattttggggacactagttttaatattaatttctcctgcttagtttagtgcagtaaatcagagtgtttggcctgtgatttacttttgtattattcttagatactgaattccatttgaaattcaattcttgacattcgaaatggttgcaaacatgagatttcattaaagccgttgaattgaattgaattcagaagattcaaacaacatgttactaaccgctactttggaaactagaggattgaattcttaaagtaagatgctctattactaacagaggaggctttatttattagatccatatactgcctcccaattttttccataataatgttgagattaccaacaaatttgctaatgttatgcattttggtgttttttctttgcattggatctcaatagatgactcgggctaaatcatctttgcagcttgtagcgtttcggatcgcgtaaatagcagtatt

SEQ ID NO: 55113 - DNA, 456 bp, Populus trichocarpa
  Intron number 2 from transcript POPTR_0018s03880.1 (locus POPTR_0018s03880) derived from phytozome v7.0 (chr-ID scaf fold_18; pos 3312004 to 3312459)
gaccacacaagttaaacagcctcacctatcacgtatgcttaaattgatttttctaatttatttacgaatcacacttgtacttttgcccttcgttttctagcttcttttcttctcataaaggatggcacatttcactaaaagaaatcaggaaacggtactcatcagaaacacacaagtttctctcaagcataaaataaacaaagatgacaaaacagggtggtgaaataagtttccagcagataaaaacaagattcaaagccatggcataaaatcttctgatctagacgcaccagctttagctaaagcatcagcaacgttgaatgcttttcgaagccgagtgaaatatacattatttcttttttactttcaatggcaactttcttgatcaataagctgctaaatgataaaaactagaccattaactcctgttattaattttgttggcagacctgtcag

SEQ ID NO: 55114 - DNA, 1030 bp, Populus trichocarpa
  Intron number 1 from transcript POPTR_0014s11550.2 (locus POPTR_0014s11550) derived from phytozome v7.0 (chr-ID scaf fold_14; pos 8566621 to 8567650)
cttctctttattagtcaccctgtcattttatttaggtctcgatctatctatctattttttaatttcacgcgatttgttcttactgttcaagtttctatactgtaactttacatgtcactggaagaaatctcgctttgtctgcttcttttaattcaatcttgcacttgcaaaaaagaaaagaaaagaaatccaattttacaattttcgcaatcgggatgttgtttacagatttctattttgatattaattatttaatcgtgattttgattaataattatgcaaaacgaatagatgtgtgtgaatacacttgctggaaagtaatgaaatagacgagggttttttcacttttgaaaattctcttatgtctaagagaaattaaaagctgggtgtttgcaacttgttcactgatgggtcaaacttgaaatgagtgattggattatgaattaaaaccaagcatgagtagaagaattataatatcttatagtttacacacttactgcttcagctctctgtcaataggctggatgttttatagttatagccataagatttgtttaagtgtctatatcaaattttgcaatgtaattcgaatcaatctcccttttgttctcttagtccctctcttgcacttatatctgttacagggtagatatctgttgcttgattgaattgtttaatttaggaatcttgtttacaaattgcattacttatttttgttgtccattgttttgctcccttttttctctatattttcactcgttaaaaggagtccggtatcatatgttgtcttctagaagtagccaatcatgcttattctttttttaaggggcaatggagtagttttagtctatgctaatagatatgcgtctatagaggagcgcgccccccccccccccaaaaaaaaaaaaaaacaccccccgagacccccagattggcttattgcagtagtacatttttatacttttcgtgaattcttctttgggtgctaagaacagagaaaatgtcgcttgcagattactagtgaagtgaa

SEQ ID NO: 55115 - DNA, 722 bp, Populus trichocarpa
  Intron number 2 from transcript POPTR_0013s13090.1 (locus POPTR_0013s13090) derived from phytozome v7.0 (chr-ID scaf fold_13; pos 13671000 to 13671721)
tctttctaccaaactccaaggacaaactagctaatgtaagttgctattcctgatgctgtatttgaaatcaccttctttcaaaatgagttttgcctgacgtaaaatgtattttgttgggttctttacaggatttgtttggtttatcatatcatttttctcaatctttggaggaaaatgagttcagattgttatgataatggttatatgtttaacttcaattcagtaatcttcatggcctattaagttatatcctgaaagacaactgattcttgctaaattgaagtttttgtttttgatgctaataaaatgcacatatctatattgagtttggaaagattgaaaacctttgatgaaaattgtccaaatgtatgttatcatcattgtttgaagatgcaccatcctgaattgatgaagcagaacgtgtaccaggctgctttcattttttactcactcatggccttctacatgtctccattgtataggaagagaaaaaattacgtaacctgtttcatgacatttaatgtttgttgttcatgcttggtattttagattttcttgcccatttctcatttagtttttatttggattgaaaatgatagcattctttgcttcttcatgcacagtatttacttgcaaactgcttgcaggattgaaaacccatcctcttttctgctaattaccttgcaggaatcagataagagaagcgcaaaagaaaagaagaa

SEQ ID NO: 55116 - DNA, 642 bp, Populus trichocarpa
  Intron number 3 from transcript POPTR_0013s06530.1 (locus POPTR_0013s06530) derived from phytozome v7.0 (chr-ID scaf fold_13; pos 5131313 to 5131954)
gttaggtgtgtgatatttcttttttcactcttttttctgtcttgcttttctatgatttatggagactgtgttgagcagccttgttttaggagaatgtatagtattgtttcttctcaaattgtgaatagaactgaagttgttgctcctttgtttcatctgttcatacttggttatgtattttttgttccttatagaaacaattttttgtattactaacctagcatttatcatgaattgtttattgaattttgttgatgatcagctgttaggcatggccatgtcatgtttaggaggaagtttatttatttaaatttcaaaagtgtcagaatcttgtaaacaagaataattcggatctaaagcgtggcagggcttgcaagcttgttttggcttattgggatttcctgtgatcattgcattgtgaagtttaagctggatttttctgcttattaggctctctccatctttcttctgaaggataaattcctattcattgaaattactctgcatgacctttgagatttaaagttctttgtggtctttgattacattgcggattgttagacctgtttactgtaggtgactgacaactttatgtgggtttctgtagcaaatattgtgctaggttctggatcacttattgca

SEQ ID NO: 55117 - DNA, 957 bp, Populus trichocarpa
  Intron number 1 from transcript POPTR_0003s16160.1 (locus POPTR_0003s16160) derived from phytozome v7.0 (chr-ID scaf fold_3; pos 15765215 to 15766171 reverse strand)
aggtagagattttcccttcagtctgtcgtgtttttgttatcaattttcttgatttgctcttcttagacatcagagctacggaatttgcttgctttattttcttcccattaacaaattagtttaggcatcctagaaagttttgagaagacaaatgtgacaatgcaaaaattctggctattaaaatttcaataactggaaacagtatatctttggatttgtaggcttggcatgatactagatcgagtagattgcattgctcatgtattcattttagtagagcataaattttaggttgaaaattttggtcagattcttattttgcatagcattatttcgtgtgtgcgtgtgcgtttattgtttcttcttctttggcatggccggcgaatgatgatcgagggacactatgttattactctgtcacatgtgaagagagctcggattaggctaagaggctgattttttattttgattttgaaaaccatgatccctattaatggaatcccactgaacacactttctagtctgttcaatatttccttcttttttatcccttccaattctaagaaatacaaaagaacttctgatgctttaataaaactgtcaattctgcttcgaggtgaaacataccgtgtaggtgaatgaagaagtcagagtatcttcatatgaaacaatccctagaaagctctctaggataaccagaaggatggaaagcctttcccctagtaggagtcttaggtcatgtatcaaattcctagactgggaagtctgaaactcctgaatctattatatttagatgattatgaattgttggattgtgaaaagaagagagactagaactaattttattcctatacttcaccgtctttccttagatctacttggtttctttcttgcttagctgtgacctttaacggaggctgacatattactggtttcaactgatgcaggaggaggaag

SEQ ID NO: 55118 - DNA, 982 bp, Populus trichocarpa
  Intron number 1 from transcript POPTR_0013s02090.1 (locus POPTR_0013s02090) derived from phytozome v7.0 (chr-ID scaf fold_13; pos 1225006 to 1225987)
tggctctctcctacattgtaagggttttggcaatattttgaaaaaaaaaaatattgattttttttttgtttttgtaatgcaagtgattttgctaaaattttgatcgcagttttgagaggttttttttttttttgctttaactattgattttacagtaaatggctaattggtgttttatgaatagttttttgctctgttaactttctgagaaaatttaggagtaaaggaaaaaacaaaaacttggaattttaattttgttgtctttggtcatagaattctcagtgtgaacgttggtgttttgttttcttgtttgtctcatgcaatttgtctgggacctcgtgaaacactcgtacaaacaagtactgtgaaagagaagaacaataaggggctctgtgatttagcttttacttttaacaatgtaggtttagaacgtctctgtcaagtgctatgaaattgagtagcttcgtgatcaatgttgattgttgaactgattttgctggacctggatttgactgtttgataatgtaaaagctctagtatcttagatgttgttcctgtctccactgcaaatgaggttctcaccactgacaagttgattagtgtcttcactcttaagctaacttgatgaaactaatgaacctttgttgaatgtaataaaccttttgtataatcaacatggcaatttgatatgccttagtaaatgttgtgtatataaaaacttctggaactgtagattaggaaattttctctactgacaatgggcatgagaaggaaacaatttctcttttatatgaatgattaacattttgaaacctttatgaccagagcacgtgtgccaatttattgatgtcatgtttgtgatagcctttgtgctgtttttcactttctttttattttgtacttgtgattgctggctttcttgattgcatgtagtcattgctttatatttcgagttacattaagcagttggttcttttacagg

SEQ ID NO: 55119 - DNA, 744 bp, Populus trichocarpa
  Intron number 2 from transcript POPTR_0006s10490.2 (locus POPTR_0006s10490) derived from phytozome v7.0 (chr-ID scaf fold_6; pos 7830499 to 7831242 reverse strand)
gttggtaaacaaactcaaaggtttgttgacttgttcatttgctttatttttcctgttttgccacatggtgttttgtagttagtttgttttgtttcttatatttctttcccacattcctgatgattctgcagttctgtaatgcatttgtgctcaaacaaatgcactatagctccaagtttctctcaagattcccgtgtcaaaaatgttcccatagatttaaatccaatttccttttgggaagttctgaagttttctaactatttgggaccttgaagttggaggccaattaatgcaatgagaaaaactcatatttaatagcttgactagaagttagaagctcatcaaaatgacacatctataacttgaatgtaagtaaatttgcgactgttctgtttaatatgaattatttgctactgattgaaggctaagttaaaattctgctgtgatgttgctttaatctgctggaattcggaatgagtcagttgattaaattgagtagatgtccaggaagtttccaatctagagcccatcatcatgcagagccattgttatctaaattatgatattctgaagatcccttttgttgaaacttcttgttttgcagtaatctcctacttagaactcttaaatgcatctttatctgctactttgatcattatgccactatttatataggaaaaatgcaaaagccgttaccagatttgcttaaggagtatgacttgccaataggaatcttccctcgtg

SEQ ID NO: 55120 - DNA, 620 bp, Populus trichocarpa
  Intron number 4 from transcript POPTR_0018s02740.1 (locus POPTR_0018s02740) derived from phytozome v7.0 (chr-ID scaf fold_18; pos 2439882 to 2440501)
gggtatctgttccaaagaagggaagtaggtaaattaatgcttttgattgattaaccatgttcccatgctcatttggtaaggcatcactagaaatgagagaattgtgtggtgataaaatcctcaagtgtagttttgtatttgttagttttgtacatagaagaaaataggaaaaaaagtttaatttgtgtgcttttcatatttgatggcattaaaaatcgaaattgataatcatttgaaccaattataagtgagcatagattttgtgtcaatccctaatttacgctttttcgacacagcaaattttcaatctcttagaatagcaacctttgattgaatttttcagaagtgtgatattctaagatgtattcttaaaaggaataatactgactgataataaccacgtcgtttttatttgttgaccgccaaatttttaaaatttttggatttgaagggctaaaaagagactgcaaagtcaaataactaatacattttaatagttctaggcacttaaaaaatttgaaagggatgtggatagcacttgttagattatggctgcaacagcaaaataaacagttgtcttcgtgacatagaagtttatctgcaatattacttctgcaggt

SEQ ID NO: 55121 - DNA, 782 bp, Populus trichocarpa
  Intron number 1 from transcript POPTR_0006s19650.1 (locus POPTR_0006s19650) derived from phytozome v7.0 (chr-ID scaf fold_6; pos 18686893 to 18687674 reverse strand)
caccaacaacagtttgggaaaaaactagaaagttggtacatgtccaagtcattgacaaacaaactttatcttaagcaaaaactattttatcttaagatgtcgaagggcaaaaatttgaatcagcatatcaatgtgttcaaattgatgtaaagtttgccaacgaaaagatgtaaagttcgccaacaaaaacaaaacattgatgttactaaattccctacctgtttctcctgcgtacaaaaatttagttacaactttgatgtgtgagaaagaaacaatccaattggaggagatcagaagtaacccattaagctttaatataaggaagaaagctaatgatgaaaattcacaaggtgaagggctggttgtgaggagtaatcaaaagcgtgagagaaacaagtcccggagcaaatcgaggaacaacaaagctcagtctaaatccaggaagaggaaggacatacaatcttataagtggaaaaacaagacacataaaatgagaatattcaaagaaaaaaaaaaggagagatacagagaacaaagagagcacatcaaagtctgcgaatgtagtggaacaagactcaaagagcggtattggagatatgctttctgtttcatctagttcaggtcatctcacagattcatggttattgaattcagcatgctcttatcacatgacacccaataaagattgattagacacctacaagttagttaattcttgttctattctgataggtaacgataatccatgcaaagttgtttgaataggaaatatcaagattaaa

SEQ ID NO: 55122 - DNA, 647 bp, Populus trichocarpa
  Intron number 1 from transcript POPTR_0003s21790.1 (locus POPTR_0003s21790) derived from phytozome v7.0 (chr-ID scaf fold_3; pos 19820638 to 19821284 reverse strand)
ttctctgttgggaattgagtcaccatttacaccaggttagcataaatgtccttattgttttttatgccttctgctgtagcttgtgtttatcaaagaccattacatagaacgcgacttcaataagtctacgaatcaaaaagcttcataactttgcctttcacgctttacacacacacacacacacacacacacatacacacacacacactatttgatgtctgttggtatttcttttctatgctggacaagtaaagagtagaaaagaagtaagaaacaattttttttttttttttgtgacaggagaatgtccaatacttattgcttggaggcaagttaactgaatgtccaaccacatttttcttccctggaaggttcaaacagtagaaaaggcatatataaaattttctctaaatgaggactagccaatgctttcatggataaaatttaccaaatgcctgtcttttagttgtcgtgcttgaattaaattataggaataatgttcttaataaaagatcttcacttgattcagttttttaataatatataatgttttcttgaggaagttaaaagagcatagtagtgctaaaagtcctgggtttccaatgacgccagtacaggtttgagttttgagagcaggctttgaagcg

SEQ ID NO: 55123 - DNA, 945 bp, Populus trichocarpa
  Intron number 1 from transcript POPTR_0013s06310.1 (locus POPTR_0013s06310) derived from phytozome v7.0 (chr-ID scaf fold_13; pos 4772639 to 4773583)
atcggagacttctaatttgcattaccaaactgctggtgagtgtaaggctgcgtccgtttttctttcttcttcttttttttttttttttcaatttcttattttcccaaaatggaaggccacaattttgccccaaatattatctctatgatcagaaccctcatcctccgtgaacctgagctaaccccatatctccgaagtagctctagcggccaattcctttcttttccttccatctttgtgaagatgggtgtgattttcttcaagaaacatgtactcctgttatcccctcaaaaagttgtttaaaagtggaaatttcttttgctacaacctatttagatttcaattatggtttttaatttttgttcttgatcaagagcacaagagtgctacggaataaactagataggagcttttaatgatgtgactgtagctgtatgttttactctgtgaaagtttcgttgtacttgtccgtgaaaaacaatggtccccccttcctgattcacttacagtacctagaaaaattccacatgaaatctttaagttttgagggcctcaaaattatccagtgtccttttcagttttttttattatgaagcactaagatcgattacaaaattttgaaatttcaccgtctcagaattgagattaaggaacttatagcagaaattcaactttctttctaaacccctcttgtatttggaatgtacataatgttattccatttccctctccctccttctcaattctcaattcgctcgattttgttttcaattttaagatttggaaaaaggggtagacagaaatcaactatcgtcatgtgctcagctaattactaggagcaaatgaaagctgttggtgcatgatgagctagattttcttctaaaaatactttctctatgctgttgttcaggattcatcacagttttcatcaacgggattcccaca

SEQ ID NO: 55124 - DNA, 954 bp, Populus trichocarpa
  Intron number 2 from transcript POPTR_0023s00200.1 (locus POPTR_0023s00200) derived from phytozome v7.0 (chr-ID scaf fold_23; pos 11757 to 12710 reverse strand)
ctgagaatatcacttttgaaaactcttctcctgaggtaatgtgaactaatctttgtgcttaacaaggtcgcttccttttttgttgtcaattttgtggtggcttcttgtgatagaagaagatttttgggttcttattgtgtttgaggtgttgggaatttttgtttttatactattaagtatggtaaattctgttacgaattcgattttgtaaagttcccacacaaaaagaagccagaggtgaataacaggaatactggaatgtaggaatataaagttagctaatggatgtatttcttaaggaacagtaggcgtgatgagcaactctcataacaacctcctcattgtaattcattcatcatgatgattactcaatctgttacaataccaaactaaatacaacatccatttcttctagagggaattgctctgctttccttattggccactcttggctacataaactgaaagatagcaaaacagcttaatcaaaatgcagcgtgggaagtgattgaaacggtgtgcacaggtgattaaatgagatgcatcgtttcacacaacgttccctttgcttttaaattttccaacggtcatctcccgcaaaccctcctccatccttagctgagttaggttgtgacaaattcattggtgtgatgtgtaattttgatttttgttcattattcatttgtttcattgaaaaaatgatttttttttattctgtgcatattttgaaattgaagtttaaattgtatgagcattgggtgtgaatatggtactttagaattcttttcttctagccattggttgtgtcaaaaagtatgatttgaggtgttttctatgttgttgaaagtgaaacattttgaattgtttaataaatgatttgaagctattgatctgtgttattttatatacttgtatccagggttcaggccaagctgtggcaattagggtgactgc

SEQ ID NO: 55125 - DNA, 632 bp, Populus trichocarpa
  Intron number 6 from transcript POPTR_0006s25640.1 (locus POPTR_0006s25640) derived from phytozome v7.0 (chr-ID scaf fold_6; pos 24011515 to 24012146 reverse strand)
agggatccgacaacacaccaacatattacttacaggtagttattcttataaccaagctcatgtttgatttctagtgggttttgaacatctcttctcttaagtgtcaatgtgagaatgaaaatggtaatgcagttttcatgtgagaaagagggttgaattatttatgatttttgaaactttgtagtttagctatggacttagcttctgttgtcaggtttaatggttacaagtgtggtatttgctagataacattcaaaagtggtagtcaggacattgcgtttctcattcataaagtttatattagcaattcatcaactttagttggaaaaggcttggttttgcgtagtcgagttaggcctcttatcttcagggttttattttaagatgatgttactggcttgttgttattccggaggtgtcttttattttgtttagcatcaagatatgtgcctttgttgacgatgtgcatgcatctatatgttccttttctcagcggctttgtttttgcatatcatgtaaacccccctcccctgaatcttcatttatctaccatgattgactaaggctcctttttctcctccctttccccccctcaaaaagagagaacaaaaacttaacaggaactgctaggt

SEQ ID NO: 55126 - DNA, 831 bp, Populus trichocarpa
  Intron number 1 from transcript POPTR_0013s13150.1 (locus POPTR_0013s13150) derived from phytozome v7.0 (chr-ID scaf fold_13; pos 13722529 to 13723359 reverse strand)
ttactcaggtaaggcttggttgattcttttatgtgatttctaaagtgggctttctttaaagtctacaacttttattttgtagtttattagaatgggttttagtttgattcttagtggaggtaaatgcaagtggtttttagagtaatttaagggatctgtgaggtgggttctgttttaagtttatttaaaagagtgttgattttcttgatgtcagtggttattgaaattggttttggagtaaattaagagaattctgatctgggttcgtgtttttccttgggaattgaacttaacgatgaaaaacgattttactgtaagtggcataatcaagtgtattttgcaatggtttatgggaattggggaatttggttggctttatttgtttggaatttgaggttgaacttggttaattatggagatttgctcaatgaaatgctgttgctgtatggcccgtgggattataatctgtaatcatttcaatttgaattggagaacagctttctctccctgcattccagttaaatgtgctattcaatttaattttctcatgttgttttgtgcttcacatgtatcgcaactagagttgacctctggactttgtctatactctcttgattttaagaagaactcggttgttccttacgataaattccttattttagttctttttatatcgtattttttaattatcaagcatcatatgaattttcattactttgtttttttttaactaacttatcattgctgcttgcgaatacgggccaactaaaagctcttagtttactggtatttgtcaattgctttgtgatgcagcttattgggaaaactcct

SEQ ID NO: 55127 - DNA, 1015 bp, Populus trichocarpa
  Intron number 1 from transcript POPTR_0013s05750.1 (locus POPTR_0013s05750) derived from phytozome v7.0 (chr-ID scaf fold_13; pos 4125045 to 4126059 reverse strand)
ttgcaatcaagttcgtttctttttggcattttgaggtactttgtttcttgacccattttttattttatatgtaaatggccttattttgttttgtttttgggaaattttcttcattttggttggaaatatgaaaagggttggcgggtttattttttatctgggtgttgtggtgtagttttggcacagttttgttaattgggtgttttaattgatgttgatttcgcgtgtttcttctctttgtttcttaatggaaatttgagtttagaaagatttgcctttttgggtcaattttagttttggttataattaaatgtttggaagatttgatttatttgggggctgttgtggtgtcatcttctctgttattattactttttctgcaaatagaaggtaataattcaggcactgtttgtattgttgtgctaatgatgtaaattagtgttattttgcatatagaactgaaaacataattttgtattcgaacatatttttacttgtttgtttattgccctctttcatgttgaaaggaccttttagttatcactggaatgatggtctaggtgtccagtatttactatgattttgcatagtggcccttacaattgattatacagcagcatttgttgtcatttatcctttagaagagtatgtcaatgcacctcaaaaaaattgaaaatgtgtccgtgtcatgaaaataaggccactttcaagttgagtttacatttgttacttccaaaattaaagaaaactgaagtctttctttgttcatgtcattgagtagtgttctatcagaggtcagtctctgactgaagtataagcattttgtggtgtcctttagacttgtattcaaatgttgattaattttagatccttaatatgaatattgtttctttatcattgtggaatatgtgatgattgttttgttcttgaacgtatcatcttagttcagttgttaaactggtgcaattggataaatgcagtggagaagggcagacttcaggtggaacttggcatc

SEQ ID NO: 55128 - DNA, 880 bp, Populus trichocarpa
  Intron number 4 from transcript POPTR_0019s02250.1 (locus POPTR_0019s02250) derived from phytozome v7.0 (chr-ID scaf fold_19; pos 2093525 to 2094404 reverse strand)
atctgttgggagcccatcaagaaacttgcaaagaggtgaggcttttatgctatattcaggcattttgatcttaaatgtgagaaattatagtttttttcttttttaagttagtaaaccctaatttgtggattataagttaaatgctaagtaatcatgactcatgactgatagtcgtagagataggtttgacatgcttcaaagaccatggacactgtggacttaacagctgaatgctgttgtatttgatcctggttttgtgatgctcaaatagaagtattgctagagaacagtttgttgttcagctgtgtggcactggctttggaatatctctctcaaaatgtgtatccatttgtattatggactgatgagaaatctaaactctcaaatgatgggaaaacgccaattcgagcatgcatatgtgtaggacttgataggcacacgcccagatagagagagatacatgattgccgaattcagacagctaggtggcagtagatgcatctacatgcatatgaatcttccatgacaatttgctgtgccagtcatattatttactctatttaaaaccagaaatcaggtgaccaggtgaagagaatgagctgaaaatgcaactaatttaggtttgtctgcttaaaaatttaagtttgtcaccgtccattttcatccattctgattgcgaccaatgaatacttaattgaaagtaatcatgttaataaaatcttaaccagctatattttccaggcaagaaaccatgacaaaagtctgattgcagtaactgcatgttttcaatatgttttcccattgttacatgttccccatctgacccttattctttgttttaatggttcgttgcagttggaggaacttaagaactcacata

SEQ ID NO: 55129 - DNA, 363 bp, Populus trichocarpa
  Intron number 4 from transcript POPTR_0018s04060.1 (locus POPTR_0018s04060) derived from phytozome v7.0 (chr-ID scaf fold_18; pos 3478020 to 3478382 reverse strand)
gacgccaactgtgagtttttgtgtctccttgattaagcttggctaatcttgtacctttagcccaatggattcgttcagctgacaatctaaaacaagtgcaaggaaatgattttaaataatatggtttgtaccactgaatcttttttcctaatttctatcattttcttctggactaagccacttatttatttgtcgaaatactgatttgattgcatgttgtgtattgagtaattaagatttgcaaataatcagtatgactttattcaatttttactctgtagcaaatgctaccttgttttcaatgtaaactttttttttttggacatcatagattttgtgctttattaatataattttccagtt

SEQ ID NO: 55130 - DNA, 459 bp, Populus trichocarpa
  Intron number 1 from transcript POPTR_0014s17645.1 (locus POPTR_0014s17645) derived from phytozome v7.0 (chr-ID scaf fold_14; pos 13928615 to 13929073)
acatttcaaggtaagatatattttatttattgttggtacaatcaatcttaattgttttaatgaatgtttgtaattatttacaatctaaatgtgtttttttacatgcagaattgtgtcggtgcaattgatggcacacatgttcgtgcctgcatatcatttaaaaatcaaattccatttattgaaagaaaagatgtaccaacacaaaacattatggctgcttgtgacatgccgttcaagtttgtgtgggcaggatgagaaagcatcgcacacaatacatgtatttttcttgaggttatttacaatagcagtataaaattttctaaaccaccgaaaggtattgatatgatataaattgaagaacaactactgtaagtttaataaaatgcttttttagttattgattttttaatgaaaaacttatcatgttgttctcaattgtaggtaaatactatttaattg

SEQ ID NO: 55131 - DNA, 446 bp, Populus trichocarpa
  Intron number 1 from transcript POPTR_0018s14150.1 (locus POPTR_0018s14150) derived from phytozome v7.0 (chr-ID scaf fold_18; pos 14414863 to 14415308)
gggtaatcgtatagctggttgggttgagaagaaaggtttgctctcttaagtattacaaaatatttagattagttttatttttttagaattaatcaaataaggtgttgtttaattagtatcattaattttggttctctatggaagaaaatagaaagcatatttagtaaaaaggagtaatttgtttaattccttacattattaatataatcatctccttgcagctttacctgtaaatgcatattcataacgaacactaagccagtgatgatggaagcaatggacaagtagtaaattataatctttctttcaacctctttacatgaattcatcgtgccaattacatgcctcttcatcgataataattaagttactccaataatatcttttttttattctttacatgaagtctttatttatttattttttatttgtttatataggtggtt

SEQ ID NO: 55132 - DNA, 919 bp, Populus trichocarpa
  Intron number 1 from transcript POPTR_0019s08480.1 (locus POPTR_0019s08480) derived from phytozome v7.0 (chr-ID scaf fold_19; pos 10008942 to 10009860 reverse strand)
ttcagagtttaattaaatattattttacagttgaggtgagaatcgtccactaccttttctagatgtttctctttttggcagaaacattgaacaaagcagtctgtttttttaattttttaattttttttatcccaacatttaatgtaaaagcatagaagtataaatttgtggttccttttctggttagtttgcacagtcatgtgcctgtcagaagtttctttttgatgttttcctttcggaataggaaataaactaattttgacgtgggcatcctcattagggactactctctgcttttagtgttggaaccatgaaaatttgaactgcaatagttgattgctgggctcatctcaagttatgcatctgtatgatgaatttgctggtttctcctagatttgtttggtttctttatgaagagaaacttctgtattttcctaaaatcagagatctcttgctggttaatttgccttttcttcttcatggaaaaactagcaatgtccacacatatcatcatatagcatgctgttgtagcctgtcaggatgttgtaatgaatgtttagcccgaaaatctcagagttatttatacaagtccgccttttaatattcagtttaactagcttgcagcagtgttccatgtagaattgcttaatcttctcgtcactgccacctagttggatgtttattctttgaatctgaaagttgatgctttcatgtacacttgcttgatccttcatgtggatctgaaattttaatgcatcaacatgtgcagatatacaaaattcacgtttatgactgctttttcttgatttggactcttggcagcaatctttccctgaagttaaattaacatcaacttatcttgcattggcttgccatttttacaggtctttgcatttggttcggtccctctgaaaaccta

SEQ ID NO: 55133 - DNA, 687 bp, Populus trichocarpa
  Intron number 3 from transcript POPTR_0006s21990.1 (locus POPTR_0006s21990) derived from phytozome v7.0 (chr-ID scaf fold_6; pos 21002567 to 21003253 reverse strand)
aagaaaacgttagtcttttctttcatttttgctccatcttctatattatgtgcagaccaatctgaattgttggtagttaagtttgatcgtacaagactactatgtttgtgctatgccagcttattggtgtgtgctttttttagtgttgaaattattactagttcttgttcttactgcaagctgggatagcagtgcaaatcaaatttaaagttttcagttgtttttcatttctcattgtgatgcttgttgagcagttttttttttccttcttaatgttgatctaaaggtgaaaagtaaagtactcaagctaaccatgtgggtatttatcagctttgctgtatttccctttcagcaggggaattatattttatagctgtgtccttttagagtttttggcaaagcttttgtgtttacctttgagcgtacttctctcgctttatcctccatttttctgtttcaaaatttgttgaagttttggttggaatacatgcaaaagaaatgaattggtgtagttatatttgcttgtcaaattggttttttccatatatagtttgtggttatgtagttatgcagcattgggatgtcaacattgtctaggtactttttacacaatctcttctttatgaagcaagcagttatcgacagttttgcatgtggataattttgtattatgttaacagattggct

SEQ ID NO: 55134 - DNA, 771 bp, Populus trichocarpa
  Intron number 2 from transcript POPTR_0019s13180.1 (locus POPTR_0019s13180) derived from phytozome v7.0 (chr-ID scaf fold_19; pos 14142738 to 14143508)
ttgagaggttgcttagtagtgggtttgtcgattccttcaagggttcttcatgattaaagaaaaatggaggtaatgaatgtggttttgttgttttgaatttggaatatttttttcaacttttttttttaaaggaaatttgaataaagatgataggtttttgttgttatttcgactgatttatgatatttgtggttgtgtctctgtgagtgttaacgaggagatgtctagtggaaatttgattttgatttgaattactagatacagtgaagttgtatagattgttccttcttgttgttataacttgagaagaataaatttgcagaaatcctgatcttcatttcatacgtagtcactagcatttcggagaatatagtttgcaggattgtgctcttggcctttactagctgagcaatagtgtctttagaccaattcatactttttatccattttagtttgtagaagtggcaattgtgaaaataccaacatgtttagcatgaactttagtaagtttcttactttgtttcttctccttccataccttttgttgtcaactgggaaacctccaatagtcaatgaaaaattaagtagatgatgtcgggcaaccatgggagtattaaattgagagctatactgccttttaggctaaacgaatctggtggaaaaggtttggaataaagtcattgaagtccagaataatgactataagaaagatcaaagttggatgtgttctaactagccgcaaggaaaaattggaggtctgctagttagcct

SEQ ID NO: 55135 - DNA, 720 bp, Populus trichocarpa
  Intron number 2 from transcript POPTR_0018s08830.1 (locus POPTR_0018s08830) derived from phytozome v7.0 (chr-ID scaf fold_18; pos 9753388 to 9754107 reverse strand)
ggagtgacctcttgcttgttatttatttcaagaatgtggctagttttctcctttattcggattccacattccaatgaagccttcttttttcagatgccatttatttaggatccatcttgggattgaggcttagtggttgttgacttgttgctggccattgttgcgtttaagggatggttcactttcctttttaagtgtgaaattctgttgaattattttcaatcaaccacaatagtggctgttgacttgttggccattgttgcattcaagggatagttcactttcttgttcaagtgtgaaattatgttgcattattttgaatcaatcacattatgtaaagaaacaataactgaatgcattaacatccttaattctagtcagtgacaagagtaaatgtgtcaaaccctgatttcagatattctgatcaatatggccaaaggattgcacattaaaattgatcaaatcgagattttgattgagggaaatatgtttgatcatgattgttttgtttctaaaattctagtttttgtaccatgtatatttgaccttcttcagtatctttcggtttcaatcggtacttttgcagaattagcattatggtttctaaatttaactgaattatcatcttctctgaagctggttatatgtttgtgtgcaagtgtgcgtgtctgttgcaatcatttgtttgaactgactatattttttgtttcatgtagcaga

SEQ ID NO: 55136 - DNA, 925 bp, Populus trichocarpa
  Intron number 1 from transcript POPTR_0006s19480.1 (locus POPTR_0006s19480) derived from phytozome v7.0 (chr-ID scaf fold_6; pos 18506097 to 18507021)
ggtttgagagtatgatattcttatcatgagagagcggtcatgctctatatcaacaactcttttatacatgccgagggatgctcaaaacactctccacagcagatgcatgcatggataccaatcttccgttgggattgtatcagcttcaaagttgagtgtcaaaacttaatgcgtgaagaacagggagattcttgctatctttctttcaataataaactttaaaaaaatttcaaattaaaaaaaaaacactgtcaaaccgcaaaaacagtctaaggatgtttttttcctttttttttttttttgtgaaatcctatgtttgttaccactacgaactagaatgtccatctctctcccctcccctgattatataaattttttcctatttatcgagcatgaggcaaagctctccagtatagaatctttcattctttgagttaattataatttttattgaaataaattaattaatccctctaatgttaaaagataaatcatatggtccttgaccagcgttgatcattcttaatctgacacttttatttcaaaaaaaaaaaaatctattttttcctcaaagatcacaacagcaccgacttggaagtatttgtaaagttaataatccgagggtcgccaggatttggttcaaactctccaatccaacggaaacatatatagcgtcttactcgatctctgtctctctctcacgcccacacacacaaaaaaaaagggttattgagttttgttaacatggcagccaaaaaaatcaacaaaacatcttcgtcgtcatcgtccacagcacccgtcaagaaaccaagacgtgatgcaaaatggcgtgctatgatgaagagacgcaatgccatcatgaagagagggacttgtttcgaaatcttgaaagaagctgctgctggatgcagtttggaaacgagcc

SEQ ID NO: 55137 - DNA, 855 bp, Populus trichocarpa
  Intron number 4 from transcript POPTR_0014s16240.1 (locus POPTR_0014s16240) derived from phytozome v7.0 (chr-ID scaf fold_14; pos 12329399 to 12330253)
cttttgactactgggattcttgctttctctggaacgtaagtcattatgttttcatgtttaccagttttcgaatgaaagtttgttgagattttgaatttgcatttgcatcgtttttttctgatgctaaagctgctcttgttggtgatttgcgactgaaaaattcttttttttttttttggtggggggcgttgaccatatgcaaatgtctcatgacaatttaatcgaccaggtgactttagtaatgataagaaaccttaaaatatatcaataacaaactgacctgcaactgtcttattgttatactgagcctcagttaccaacatcaagaaccatacattacatttgatttctttgttttgttaggatatagacttactggaactcaatgcttttattgtttcagcttatgtttggaacaatgttatatttctgctgcttgggaaaaaaccaggaaccaagcatgtatttgctctcagtttagactgtagatatagccgtataaaggagttcctataccaactaagctatatgatttgtttgactggacttacagctcgggtagcatttgtctcgaaaaaggaaaacaccttatgatagctccattctcgcggctctagttaagctaaattgattgcaacgccgtatttcagtcactactttttctacaattattttaacttgcattagtggaggtttgctttcatctagattattcttttctcttttcttagtgtcctgttttgagcaagttatcttttccattcgcaacatacaccattggagattaaagtctgaaagaagttaatctggaattgtgtaggtgttatactgtggctcttcttgaggacagaaagt

SEQ ID NO: 55138 - DNA, 674 bp, Populus trichocarpa
  Intron number 1 from transcript POPTR_0014s11180.1 (locus POPTR_0014s11180) derived from phytozome v7.0 (chr-ID scaf fold_14; pos 8313972 to 8314645)
ctctctctcactcccccctcttggctccttgtcaggcaagtgctatcctcttctatgatccctcagtctggaaccctagattctgatcatttgctcaattcatgccatatttttctcaatcgaattgttaaatttctgtgattcggattttatgttgttgattttgtctgatataagatttagagcgcgatttggtttcgtaatggcttgatcttaattttgatgtgatgctgcctcgtggatcttgctttatattatgcttttgtttttgtatgacctgaaatcgtgcgatgataccttagatctggagatcactggatgcaacacatcctgtttggtacctgatctgtaggaaatcagatctaaatccatgtctaagttgtcttcagtttaatgttttatgtattgaatatctgaattctctaggtttgtggcgatttttttgactcaatgtctagataatctctgggttcatatctagtgtgttgatatgattcttttttgttaggattccgattcatgattcttttttctttaaaaatgtgcaatgttttaaatcaaggtgattgagatctattttctgataatgatgtggaattgcatttgatttagctatgggaatttacaattagtgagttgatttttggattgttgtaatcggcagacgtgagaaa

SEQ ID NO: 55139 - DNA, 271 bp, Populus trichocarpa
  Intron number 1 from transcript POPTR_0018s02940.1 (locus POPTR_0018s02940) derived from phytozome v7.0 (chr-ID scaf fold_18; pos 2548341 to 2548611)
attttggcattattaggtcagtttttatgataaaatagctgtatcaacttttctttgtgttttgttaagttttgtttggctgcttagaaaatctaggaaaagaaagcaaaaagttagttttttttttcattatttgtttagttttgattgattatgataagacttattaattaattaattttttgttttattgggggaatctaggtttggatattgtgactatgtagtttgtgctttgattatgatttgttattttactatttgggtagtg

SEQ ID NO: 55140 - DNA, 1017 bp, Populus trichocarpa
  Intron number 1 from transcript POPTR_0003s21520.1 (locus POPTR_0003s21520) derived from phytozome v7.0 (chr-ID scaf fold_3; pos 19649123 to 19650139 reverse strand)
ctaataaggtaactttctactcctttttttatcagtagctctctttgtttttgatatttttgtgtgaaaatagacaattttatgaaaaacatatgcttttttatacttttgttgaaataagtgtaaaaattgtttttttattcataggggctcttttttctttttctttttgtgtattaaaatatgaaagaaatcggctcgaggactgtgttttagtgtaattatgtagttttttttggttaattctgcttgtttataatgttttaagtggattttgcatgaaaagagaaattagcaatattctatttggttttggaatggagtttagaaggacaatttggcttgatgttgattttagtttcatgatgatggtgtttttgagtctattgttgtttaagtcgttgactaagtacagcgtgtagcacgagaacagaggatttgatttaaaagacttaatataagggtgtgtttagcgtaaattggatttgggtttatgagaataacaaagttaatttattgattctgggtatcttcaatagttttgaatgtttatagaaattggagatatttggtcctttattgagtaattaatttggaaaaacaattaatgttgattaattgggttttccgggaggggattctatgccgttcttataaatgaatgcagtaatgtgatgtgatggttttattaaatgatagcttttttgacaacaatttattaaatatatgtgtgtgtattttaattttttactgaaaactgaatgttagtttcttaaaagttatggttgaaattaccttaacttttgtgtttaccttccctttttgttctcccagatgcagaacaaagcatcaagttcgaaaagtacaaactagtaatctatgtgcttaattgtacagcttaaccgttctctcatcacttcccttttccttctatgcattgtgagttctagtttatatcttctcattttattgaaattgttgtagctcggatgattccgaagagatcgtaaaagctag

SEQ ID NO: 55141 - DNA, 951 bp, Populus trichocarpa
  Intron number 1 from transcript POPTR_0014s09630.1 (locus POPTR_0014s09630) derived from phytozome v7.0 (chr-ID scaf fold_14; pos 7184504 to 7185454 reverse strand)
tgaaggccattggaggtctttgcctaaaaaagctggtaattatatatctaattagtcgagactaattgcctcgctcttcttctttcattttcctttcgttttgattttgttcgttggctttcttttatttcttatttttttatgcgttctccttcctcttcaaattaagaagctttagtaatccttctcaaaaaaaaaaaaacacttaccgatcaaaataaacgttccctatatttgctcttaaaattaatcgtggcttgagtttttgttggtttgtttttgcaagtagagtttcgagagagttttcttgacgactttcaattctcttttctttttacaaattttcccttttcttcaactttcaaatttcaattctaaatcaaacaaaagcaatattaaattgttttcctggctattttcagtgttattaaactggtccggcttgacgggtcaacctgataatctgcaaatccaattcttagctcgggccatgtttcaaatttaacagggtgagagctaatccgatatgacccggttgattttgtgggtccatcacgacccggtcggctaagccaatacctgattttatttataaaaaaatattaaaataatatcgttttatttatataaaaaaataacacaattttaaattaaatcgagtgaatctactcaacttataacccaagttattccacttaactatagtttgggtcttaaattaaccttataaaaagtgttcaattctcttcatgattctctgttaatccagatcgatgtatttgtgatcttgatgtctcctcatgttccaatgctcgttttttttttcctttgtgcaaatatgtcatgtgccatacgtacgtttataataattggaagaaacccgactttaattaattatctgacgtatcttccgccctttgtatttccaaaattaaatgaaggtctcctcag

SEQ ID NO: 55142 - DNA, 926 bp, Populus trichocarpa
  Intron number 1 from transcript POPTR_0006s18690.1 (locus POPTR_0006s18690) derived from phytozome v7.0 (chr-ID scaf fold_6; pos 17254954 to 17255879 reverse strand)
agaagcattattagtaaggttttatattttccttgttgagctggtcatcaacaatatagctattttgttagcatattttcaagttaagtgtcaagggaattgagatttttctacacacaatgaatggctagaacacacgttgtgcttttactgatttctaaattaaggaactcgacaggatcgagatccaatcttcatcatcctaggtaagaggtacagttactatgcatttaatggcttctacatgcatggttttccacggtcagagtagaatttatttgtaataatcaattctctattttaattaaattcaattatatgatttgatttaaattcaaatgacaaataaatttaatttacatatttaaaaaagataaaattcaatttgttcaaagtgttttttttttaaaaaaattagatgagtatttaaataaaattaattttaatattatttttctgaattgtaaatcagaaggttcacaacgaaagcaccaattttgggaagaaaataaatcttggaattgggatttcatcaaattaggcatggcctcttggccttagctagcctataaaggggattttaattcaagctatttatatatgggtgcctaaaacatctcatgctagttatttatgtttttccctaaaatttagtcatggccaaaatttcattcccttttgctttttatttcctaccatgcaaggaagcaccaccttttgcattatactgaacctgatctagattagctacgaaagactttgagcgagaatggcctagacaacatcatcattgatattatcttttctcctttgttgtctgcctagcataggaatatagatgttatcctttatagtctgataacttattcattttgcataatcttattgcagagcccgaagatagaacaattgacattcttccagga

SEQ ID NO: 55143 - DNA, 1022 bp, Populus trichocarpa
  Intron number 4 from transcript POPTR_0308s00200.1 (locus POPTR_0308s00200) derived from phytozome v7.0 (chr-ID scaf fold_308; pos 9530 to 10551 reverse strand)
gaaaagagtatcagcagaataaacctactgatattgtaagtttgctctcttagtggattttttttttgaacgagtattcagaagttcagcttcgatttaccgtgtgtaatttataatcgagtcacgagcttcatatttgttggttgaagctttactttccttttgttttgggccttgcttaatgtgaaccatgtcttcctcctataatactgagaaatgtgattttaatctgagatactattggtagatatgaattgagagatcaacttagaaattggatctgcaggggagggaccaagtgggttaaacagttaactctctgttttagatccatttctgtaacttatggactctttctttatggtttagaggattctgacacatggaagagtaaaaaagtacacttttagtaatgttcccccataggaaaaagaaataaacagcaactgtaaatgtccaaaagttttattgctgaagtatcattaccagaatgaaggtggtgttgagaattgtttccttgctagttcaatacaaaggatcagggaattttaaatgtctgtactaaatttgttgcagtactttggaaagatgatcttgagtttgattatgaaggttagtgaaagtgcctcagcccatgtgtgattgattgtatttgatcaagggtggagggtagaaattggaacatgagtctctagaaaaggtagtggtcaggaaattatatcttaattttgatataatagtataatatgcacattaggtgtggtcacacacacagacacaaaagtgcccaggtgattcgatgaagcaaatgtccccaaggatttttgttggcatcaagaaaaaagacttaaaatataatttaactccgaattatgtccttaatttgggccaattgaatgagatgatttagctctagctgagcaattagcccaatgttttgtctatgtgatttacaatgagtgcggatatatatatatatatatgcaggtttgcaaatattttcttgaagcagtggagaagaa

SEQ ID NO: 55144 - DNA, 545 bp, Populus trichocarpa
  Intron number 1 from transcript POPTR_0003s07840.1 (locus POPTR_0003s07840) derived from phytozome v7.0 (chr-ID scaf fold_3; pos 9363125 to 9363669 reverse strand)
cacttgaagctattagcaaggaaactgttgatctggtacatatttatgaataatctactgataatgtgctctgaggatcctagttgaaccacaatcacattcttaatagagagtcataaaatctatttcaaatgtgcactctggaaataagcgcataatagtgttcttattttcaattgtggtctcctataattagtaagggatacaaaattggatccatatccttcatgggatgagggcaatgttatcccttccaccagctacaacatctccgtgaacatcattcttctatatgcatcctttgatttgtttttattgccatgtgatgagccagaacctgagaaggtaaacaccagaggagaaaatgtaattttctcgtatggattctgtcacagaaagaccataaactttgtcatggaataaaataacaatagtacggatacaaatcattcatctcatactcactgcctataaacaagtctagattagttgaaaggtcttttaaggatagcgttctgataatctgtgactgttctggcaggaga

SEQ ID NO: 55145 - DNA, 930 bp, Populus trichocarpa
  Intron number 2 from transcript POPTR_0018s04600.1 (locus POPTR_0018s04600) derived from phytozome v7.0 (chr-ID scaf fold_18; pos 3872903 to 3873832 reverse strand)
tttaagctggtcctcgggaaaaatctcaaatacaggtatgttcatgcatcatgattggaatggaatttgtttttcatagaagtgtcatcagtaagaaatagatctttgacatttgcggctttaaattatatagtatgtactgtgatgcatgcaacaatttgtcaattttccccggaggaaggggttgaatgaagttagtacaaactcaagcaggaatacaggtctgctacaagttcaagaattacataccaaaactaaccaaaaattaagggtgagcatctattcgaatgatctggtttgaaccaaaaagctcaatcgaattgatttctttttctcaaagttttaatccaaaccaaaatgaataaaagaataaactgattggttgggattggttcggttcagttcggttttatatttattaaaaccaaatgaactatttttaacaggtttgaatctaataactttttagttcgatttggttttttcaatttgatttgatttgtgtttttagattagttattcactttctctcattttctttttcattcttcatttttttcttctcaatttttcaatatttttcgctttcctctctcgcgcatcatcttgtctttttttatattttttcgactcgcacttgatattttgtccttttttttttatctaccttctcgaaaccaaaagtttgggaaatagctaaattttgaaaaattggagacgtttaatgaaaaatgcttttttttgtttgtatcttttgagaaatgtttgaaaaattgagggtaaaaaacaatccagtgatcaacatttctgctttagtcatttcaaattagtgtgtagaaggccatcaattttgatattttatgagctgatatggtttgtatttgaactagtgcagctgttgttatttttctgataaatcgaacaccttgg

SEQ ID NO: 55146 - DNA, 735 bp, Populus trichocarpa
  Intron number 1 from transcript POPTR_0018s04600.1 (locus POPTR_0018s04600) derived from phytozome v7.0 (chr-ID scaf fold_18; pos 3873896 to 3874630 reverse strand)
actccagctagctgaccttctccaattcgttcattgtaagtttttctaacctcatttatatgtttgcattcatcattcatgtctctacatgtcgagatagaaaaaaactacgcgaaacaaaacgtcttcaaattagaacttaaaggcaattatgagtttggggtgattcacaggcggcaacaagtcattgctaaaagccattaacgacaacggccaggctaaaacgacacatcctttggtttcagagaatttattttctcctcgttaagaatttatttttttggtggttgcaaataagaattatttttttaagttggagttggctattttcaacgtttttaatagtgctgattacttggttatgatgtgggatttggacatggtgccgtgggttgtgttgggaattgggatcaagttacctattgggacccttttagttataaattccaagaacttgaaaatttctggaatttgaataaacaagaaggaatcaaataagaaattaaatcccagtataaatagcccagtttggaattagaggtgaaaagaaaaacaataaaaggaagtcatgaactttgaagtaaaagaacaatttgttcgaagccaaggaatgaattcgtttaaaagtaatttagaaattagaaattgaattattattattattattttctctttttatctgtcctgatgtgtgaaatggttatgtttgtgcctatgtttgcagctctaaaagaa

SEQ ID NO: 55147 - DNA, 668 bp, Populus trichocarpa
  Intron number 2 from transcript POPTR_0013s11870.1 (locus POPTR_0013s11870) derived from phytozome v7.0 (chr-ID scaf fold_13; pos 12496032 to 12496699 reverse strand)
ctctttacaagaaggtaagcattgttattgagcctttttttttcttttctaatcacaatttaggatgtttgagctgggatttgtttgttggtgatgtagtgatatttggatgttgctgctgcttaagggtgataatttatgctatatatgagatgatgatctattgtgttttctatatacattgatcagcagcttaacatggctttgtgtattatacttgaaggtagcatttttgtttgattttttttttatcttgctttgcttctagattggtaaattgtttgtgatttttatagtttaggatcctgaaacagtttactgcatttgtatttatttatttatttattcattttgagaatgatgctagaggagaacataaatcgataccctgtatagagaaaggttttatggtgatctcccttcaaacatgctgttcaagtaaattcgtgtttacttgatgctttccagaggaagttatcaacatggttaaagaattgtgaagttatgagtgttaaataatttaggttctgtgattattcagcaatttaagaccgggtctatatggcatgttttgattgtcttgcactgaattcatttgtctggtgattcatcctgactgtcatgcttcctgttctgtgcatttctaggtcaagtccaagggagtgaca

SEQ ID NO: 55148 - DNA, 512 bp, Populus trichocarpa; identical to SEQ ID NO: 54111
  Intron number 1 from transcript POPTR_0014s08590.2 (locus POPTR_0014s08590) derived from phytozome v7.0 (chr-ID scaf fold_14; pos 6379111 to 6379622)

SEQ ID NO: 55149 - DNA, 597 bp, Populus trichocarpa
  Intron number 1 from transcript POPTR_0003s18550.1 (locus POPTR_0003s18550) derived from phytozome v7.0 (chr-ID scaf fold_3; pos 17595492 to 17596088)
agattctcgactttgaacgtgataacgctgatctggtaaagtttctctctttttgttgcttgaattttttttccccgtgatcttcatattatattttttgtttgttgaatttgataaggttggatttcaattcaaattccattgtcaatatcatagaacgaaatcaagtttgagaaaatatatatttggtatatgtagggctagttctccagatacctaatagcttgaaaatattaaaaaagaaaaaaagccatgtacttgaaaattttgggccatcggatcgtggggtcattagaactaggaataaaatttagttttttatggtattttgtagcaatgcttctgctaggttttgtgttgtcatgtattggatcttaactgcacagcatgattttcttaataactaaaagaagtatgattctaagcttattacaattggcttttgggcgtgttatctatgatgggccataggaatagtaccgtgttttaaattctaccatccttttcttgtttatttttttatttttttttattaattttggttttatatttgtgctgcttctctgacagcgtactatttcacgggaagtgcaaaca

SEQ ID NO: 55150 - DNA, 584 bp, Populus trichocarpa
  Intron number 1 from transcript POPTR_0003s11370.1 (locus POPTR_0003s11370) derived from phytozome v7.0 (chr-ID scaf fold_3; pos 12207050 to 12207633)
gtggcgtttctccacattaattttgtctctcacaggtgtttttctttctgactctttcttttctttatttaattttcttaatatcataattttaccttagaattgcacaatctcaaaaccctagaattaaccatgattatccaattgcctacttgtctcctgcttcaatgctgattccttaagttatataataatgaagtgtgttttgcgcattgtccattgtaattcgtaggaaggggtgtaggtgttgttagcaatggaaggggataaatttgatgggattcccttaatgtctactctgctccttatctactgttggtttctgtaatgagactcggattagatacgcgttcttctgttattccatcttctttatatatatactggattattaatatttcttaagcagtgcaattccttgtaagctgtaagaacaagcctattactaacatcaatggcatggagaaagttttttctacatgtgtacaacaagtaggctggtgctttggattattttattctaatgttgctcaaactcctattgatgtttcaggtatttctttttaggggaggggattgctgtt

SEQ ID NO: 55151 - DNA, 1036 bp, Populus trichocarpa
  Intron number 2 from transcript POPTR_0018s13560.1 (locus POPTR_0018s13560) derived from phytozome v7.0 (chr-ID scaf fold_18; pos 13849735 to 13850770 reverse strand)
cagtttttagcttgaagttcttgtctctgaagcaggtgatgcatcttttgtcagtgccaacagctggctcactgttgcaagtacttatgttacaacatagcatctcaagtaagtggcaattttacaagtatctggggtaagaataatgccactgagaaaaccgagtgctcagatgcaaactacggtaaggattttttaaaaggagatgttaatattgctggcacaaacctgagagttttctcatacgcacaattagacgctgccactaataatcttagaagggacatgatggtggctaggggagttttcagctttgtacacgagggttggcaaaagaagaaaataccattaatagggataaagaagtcagtcattgttatcaagaaatcgagtgcaggtagctggcaaggaggtaagcagtggcggaaatttgattttgaattgtctttgaaaagtattgcactaatccattatacaacaattattttgtaatcctgagtttttcagttcttaggcatactttattcattgtttggtgatatgaggtgaaattattggtagcttgtggagatgttgttgttagctcttctgttcttaattttaaaggcataataaggtgcaacaaggagagggttttaagaaagatggttgatgttggtagcttagaaaaattgacaattggccaaacttatacgaactcattgaaggggagaaattcatactttatccacatcagaaggaaagggtcgacgaagcaaggatcatctagctacttggttcatccagccttcttatattttgatcgtggtagaataatttagatttcttgatattcttgacctatagaatctgagctttctctctctatatataacacacacaccagacagaaagaagtgttctattttaacagtttcttaaatcttggttgtgattttatttaatattaagttgttttgtaagaattacatgcttaatgggttgtccacatcctggtgcaggcagaggtgaatattctgggaaagctttcccatcc

SEQ ID NO: 55152 - DNA, 831 bp, Populus trichocarpa
  Intron number 2 from transcript POPTR_0019s11280.1 (locus POPTR_0019s11280) derived from phytozome v7.0 (chr-ID scaf fold_19; pos 12621783 to 12622613)
gattagtgctgctgtacagtctaagttcaaaggaggtaaacttttatttattgcgttttgttatattgatgatggtggagacgtgtttgtttttaatttgtatactgattgagtgttttcgaccttgagtttcgacattgatgaaatgaatgaatggtgtggcttatgattaaggattttgttgtttcgagaaagatgctagaatttgcatatgtttggttagaaagacgaaaaagaatatcttttactggtgatctaacgaagctgttattgcgggtggcaatgtgatgattgtggtaagtttatgcgttgagttggtagaagagtatgttggattgtcatgttttaggatctttgaggcacttcttgttctggttgagcacttttttttagtgattttacttgtcgaggttaagagggcaatcgaaattgttattttctagtatggatgtgtctttgaatagtgcatggtcagtgctgtaatcggatgctttatgttatgttttgaatatgaaggattagctagccataagtcctaggaatataatggagtttctattattatcttagttagcagggtatgtcctataataggaagtttcagttatccaatgtggactgaaatttgctatctgcttcaaacttcctttaatgtgttgaattgttttaggactttaatgaaaaattttagttattttatctgattcttcgacttttttcatgctaaatagaagtgcaagtataggttttcaattatttcctcgtcttattttaagctgtaacttttaaacttataagtttggattttaaacttggcagaatttccttggg

SEQ ID NO: 55153 - DNA, 818 bp, Populus trichocarpa
  Intron number 1 from transcript POPTR_0006s15500.2 (locus POPTR_0006s15500) derived from phytozome v7.0 (chr-ID scaf fold_6; pos 12914756 to 12915573 reverse strand)
ttgcccttgcaaagcaagaggttgtcattgaagaggtgaattttctatctttgctagctgctgttttgtactcgtttactactcgattgctgaatttggtttctggaatttcttgaattctggattgtagttttgttattcttttggtgttctaacttcaaattcttgtaatgcaatcaaaattctacttgggtttaagcatctcgagttattgttttactttttttttccgatcaagtttcttaggttctggattcctttgcttttgattttttttttttaaatgcccaagtaaacagattcaccatgtagttattgcatagtgtatgattaccttagtattaacagccacttctatcgtagtttgggtataaggaaatctacttttgcctcttgtgatttgatggtcacgtggttcatgcaagaatgatggagtccatcttgctccttacgtagttcttctttagctgcaaaatcaattttttgttctctggaaaatgatggagtggcaatttggaatgtgaagctgctttggcacatattttatagaagctaattgatatttaattaacaaaatgggaaatcaagaaacaattcctatcttgcaaaaacaactcaactcgtttgattgagtccaagtagcctcattatttggcttgtgattgatttcgaacttctgttatctttaaagagatctggaggccctgccagagccacagatgtctatgtgactagtgtcacttcttgctttacattgttcttccttttaatactggatctttcaattttttctattcgtgtttcataggtattgaaga

SEQ ID NO: 55154 - DNA, 713 bp, Populus trichocarpa
  Intron number 3 from transcript POPTR_0013s05280.1 (locus POPTR_0013s05280) derived from phytozome v7.0 (chr-ID scaf fold_13; pos 3749976 to 3750688 reverse strand)
cctgcaggtaggtgaatctattgaaatgtaggtcataaatgatttttgttggtgtgcaaatgctctcatctcaaagagctccacttttctactcagaattatccaaataattgattgttgtctcatctatttttttcttctgggataagacctgtgcttggagaaactttagtatttggatgataactgttaattattttcttgtattctccatgcatagataggctatgctcatttcgatgataggagtatgctgttccatctagcacccattcttgtaggttgtgatgctcttattgatgaccacggtcagatcagtgtcatggttcctttctacttcccacaagctctgaccttcaatggtaggaaatggatttccctgcatcaacattgaggactttggattcatttaccatttgtttttagaatgccctatctgcatttttacccaacttaacagatacctccttgttaacttgatgggaatgttgttactgtttggtgctattttaccctttctgcctgtttgttcttgttctttgcggccaccatatttgatattcacaaagtttggcatttgcaattaaatggggctcctcactttggggcattgaatttgggtattcatggcactgttgacatctatcaattattcttgataatgctgtaatctctgttaataacgttcttctcagtcaattcttccaccgagc

SEQ ID NO: 55155 - DNA, 362 bp, Populus trichocarpa
  Intron number 1 from transcript POPTR_0006s19010.1 (locus POPTR_0006s19010) derived from phytozome v7.0 (chr-ID scaf fold_6; pos 17850469 to 17850830 reverse strand)
tgaatctcagttattcaagcattgctcatttccgggtattaaatacatggagaaaggacgatgatctctcttcttaggaaagaaaactcccggcttaaccatgaagtcagtgcttaaaatgtttacctgttaagtttttttcgttaattttcccccctttctttttctttaattcccttccatcattcctatttaatggagttgcaaattgcagttcttttatattttctttattgttgtttgattaccttgctatttaatttattcttgcttgacatgttttatctttgatcatgttaaactgaataattctttattttctcttttacccaatgatccaggtgtcagggaagagcagccca

SEQ ID NO: 55156 - DNA, 908 bp, Populus trichocarpa
  Intron number 2 from transcript POPTR_0019s04990.1 (locus POPTR_0019s04990) derived from phytozome v7.0 (chr-ID scaf fold_19; pos 5196009 to 5196916 reverse strand)
ccaagactgctggaaatcctgcacctgctacgaaggtatcttggaatcttgactcttgattttttagaatcccatatgtgacattgtttgattctatagtgaattgatggtatagccttccacttgtcactatggatcaagtgacttggcttctaatacaaccaagcactacaacggtctacaatgcctcttcatgtagacccaaatgtgtacctttttccctaatggatatttgttgattgcatataatggaggcaagatgtgtactgagtatattgccctacatcttttaaaatgggtatttaagttgattagactggtcaagctatcatcatttgtaattttcctgatcattagcaatctgtgcattcttcttcagtctatcatagctatgacaatgagtagaaaactactctagaagattaaatatggtagaaaatctaatctctcaagttcaaactcaagaacagctgcagtaatttcttgttgcttatttgtggtacatgctatatttaaggttgcatgagaaatggtttctgaatctttcatactggatgagggtttgcttattgtttgattaaatgggatttgtggttcaacctatttaatgtcttatcaaacctttccactataaataggagagagggtctcacttttgacttcaagagcatctaaatattcggcaatgaatcttcttttacttgaaatctggtgttgaattgcctctatgttaaattattttgataacttttaattgctgggtggtattatgtctgaactttataagctagattgccttttttatttgttgcatagtattgagggtataatctgtggaactgcaagcgagtaatagctatcagttatcttaggggttgaaattttgttttctattgggcaggatttct

SEQ ID NO: 55157 - DNA, 787 bp, Populus trichocarpa
  Intron number 1 from transcript POPTR_0019s04990.1 (locus POPTR_0019s04990) derived from phytozome v7.0 (chr-ID scaf fold_19; pos 5196924 to 5197710 reverse strand)
gcagctgttccttctgctactgacagtatccttgccttctcctcttatttgggatttgttttttcttttgcaagatttggagtgttctgatgctactttgtctttgaattatttgtgttttgttctttttaatgccttttctatgcttttgggttctttggaacatgggttttgttgggttttatgtatagatttggagaagtcagtaaagttgcgttcttaaatcaattttgtgctgaatttttactttcttgattttatatgtgttatttatgcatgtatggtgacttggttgattgaaatggtgttgactgagtttttttttttcccctttttttctttttccttttgtgatatttgtgcagggggggtttatatttatgtgcgggctttgaatttgaagtttctatttttctatttaatatctatctttgaagaattcttttgatgttgggttttctcatgggacgtgaatgtgaaattgtaaatgaatgagtttcacatgtcctgttaagcttttgaaccagtttataaatgtggggtttattattttttggtgcttattatgaattaaatattttcctggacaagaatggtattttatatgtattttgggatgctgttaatcatgctagatgtgccttcaaggataaagactgagactttttgttttgttctgctatttggtgatgaatgtttcttgccatgtatgaccgacctctttcgttggtcctttacatatactctcacagaagctgcaggtttgctagagaacttgtcattagat

SEQ ID NO: 55158 - DNA, 329 bp, Populus trichocarpa
  Intron number 1 from transcript POPTR_0014s07170.1 (locus POPTR_0014s07170) derived from phytozome v7.0 (chr-ID scaf fold_14; pos 5423316 to 5423644)
gcgcgtctgattcactcgcggttcgaaagttggaggtgctacattttcccgatcttccatttttactctcttgaatctacttcgtgctactcttaacctcaaaatactgttagtctgattctataatactatctataatccattgccattaattatcgtgctataatctgcaaaatctgaaataatctacgcattactttgttttttagggttttaattttgagttaattttttatttctatctaaatttgttgcaatgtgaatattcctacttagcgatcattatgattttctgttaacagatctaaatttgtttggtaagcaggaat

SEQ ID NO: 55159 - DNA, 526 bp, Populus trichocarpa
  Intron number 1 from transcript POPTR_0006s19430.1 (locus POPTR_0006s19430) derived from phytozome v7.0 (chr-ID scaf fold_6; pos 18476728 to 18477253 reverse strand)
tcaaaattagctagtcctcaggatttttgtaacaggtatttttctttcttctttgtgaaacccttctgttttcttgtatttttaacgggtcttttcggattttcaagaattttaatttaaagaaattgggtttcttttttcaagaatcagaagagatgttgtggtgcaatatcttaggataatattactgttctgcagaatttctaggtagtctttagtgtcttaagacttcaaatttgtgcagaattccaagaaaaatctgttatagatgatacggatattgataacctattacttcattatgtgattggaaatagccaatcagacaacattgttacctacctgtttgtttatagcctttgtaacatgatataatcagattttgaatcttgttagggaatgatatttcattgctgttatttttacaattcatagcatgccattttatgttttagttttggaaagcagagtgtttgagtgattaatgttgaatatatgaatgtcaacacaggattctttttctgca

SEQ ID NO: 55160 - DNA, 446 bp, Populus trichocarpa
  Intron number 1 from transcript POPTR_0003s06390.1 (locus POPTR_0003s06390) derived from phytozome v7.0 (chr-ID scaf fold_3; pos 7876294 to 7876739 reverse strand)
gtgacaaggctgttattctacaaagaactcaaactgtacgtgttcttttatttatttactgttttttggttattttttgcaacccagaatttgtagtctgctgtgggtttgatttttttctttagagggaaaaaataaaaggaaaagaaagaaattttgaggcgtaaatttaacgtttgtaagattctgtgtatatcagggaggtctagattgttattgagtcattagtagattatttggtcatgatggactaaacattttgcatttgttttagggccttcttctttttttgtaattgtttagattaacagaaactgatttgctggaactggaagcgaaagccttggatgggagtcttgttgattgtttcttgattattttccaagttgaaagaaaggctaatgtatttgtttttggtttatgtttgtctagtgtatatacaacga

SEQ ID NO: 55161 - DNA, 618 bp, Populus trichocarpa
  Intron number 1 from transcript POPTR_0019s05320.1 (locus POPTR_0019s05320) derived from phytozome v7.0 (chr-ID scaf fold_19; pos 5630626 to 5631243)
tcataatccctcaaatattagaaaagtcattagtaatttgacttaacctttagtaaccgatttttcattgtaattaatattcttttattaataatattttgatttaacattaaaacataaagtatgtctgtcatattaaatcatgtttgttctctacatagtaatcattgatcatttgaataagatttgaattttttttcaaatctcattccacctttgctaaggttttctcagtcaatagtatttgagaatacataaaatattttctctaatttacttagggtgatgaattctcttttaatcacttaagtaccttcatataattcgtattatatttgatgcatatttttttgttacctcgattaagataacatgtaacatgatcaaaataaattattttttatataaaataatttaatcatctcaaatctaataattacttatataattattatataatttttttataaaatgatttctatatatagaatttttaatataaaattctgatatggtgatgatcagtgaaataaatatgtttgacttcctcttcaaacattgccattctttgttgtggggaaagacagtgatagtattattaaagaactgaaatcctta

SEQ ID NO: 55162 - DNA, 957 bp, Populus trichocarpa
  Intron number 1 from transcript POPTR_0003s08740.1 (locus POPTR_0003s08740) derived from phytozome v7.0 (chr-ID scaf fold_3; pos 10131736 to 10132692)
agtcgttagacctataacaccgaaaaaaaggggtgagttaatatttctattttttacctttttttttcaaattaatttgtttgtctactgatcttggtggttgcgattctccgtaacttctgtttgtttctcgagaaataaggaatgaaaataataaaggagagaaatcaatttcttcgacactcgatcgagaaagaaacataatatttcttcacggtttcaatttcaatgacttgagaatcgaactttgacttatctcccgcaaatagaaatttatgttttatgaaattgaaaaggactctttagaatttatggttgatttggtatctattggtttcgttgaaaagatatgttttatgacttatctcccgcaaatagaaatttatgttttataatatatttttaattgattgtaattggaataaatttcatatttgactggattcagtttgataactttctttgaattgaatgtaaatgtattttgcgagaagaatgttcaagttgtgtttacaaaacaacaacaaaaaatattgaggaattgaaaagggtgggaagaagatgtatatagtggtggggatgaggtggtgttgtgaaaacagaaggcaaagaaattaggatagtttgatgcgctccatttgcaggattttgactcaaatcttatttgtttttgtactgtacatcttccctgccttgcttctagctcccatctatgtaactctaattttgagtttttctgctgactcctgtcagactagaggaacaatatttaccctttaattgtaaatgtaaggtgcaatgcatgtgaagtttgatttaaatttagaaacataaaaaaaagagttgattccttttctttgttctctctctgagtttcttttccttttggttcaatatttttgtcctgtgctcaaatcttcagattgaactcttggagaaaaaagtagagacatttta

SEQ ID NO: 55163 - DNA, 867 bp, Populus trichocarpa
  Intron number 2 from transcript POPTR_0013s02070.1 (locus POPTR_0013s02070) derived from phytozome v7.0 (chr-ID scaf fold_13; pos 1214320 to 1215186)
ttgttaagagcttggaagagagcatcaattcagtggtgagtttctttactagacgagttgctgttttggtccttggtagaaagagtttcatcgtgttgaattgcgttatttcatgccggagttcaagtttggttcctttcaatgtgtattcaagcgtgcagtatccattctgccaagaaaatcgaacttccataattgtccaaattttgatatacgagtgcatgcattcaatctctgcttgacataagtcgaaagctgctcaccctgtctgtcattctttctgaaaattgaccccagtcataaacatccacactttcctgtgtaaaatgaaacaactgaacctatcaattgatggactgatatgttatgccaatgaaagagagaaaagcttgtttgtttgtgctaaattatctgattttgcttccttttttttttttctttcttttttttcttgtcaaaagtaccatgagaagctctccatcaattagcagtgatgaaagtcaagtggacaaagccattgaatcaggatcatccggtaattggtctatggaatgatgcctatatcaacagattttgatctttggatcccttcatgttttctaatgatgcactataaacgttatgtgtgctgtttgaagagttaaattttttccaatctcatagttgataccttccttagcatgacttccgaaaaataaaccatttctggtgtcttccatagtgctgtcgctaatttgtcaactggtcaatcactgactaacattcatccttgttataaatggaaacaattacaactgtatattgatgctttatggatacttttgttattccactatcaggtattgccatcttttgtggacaaacgcg

SEQ ID NO: 55164 - DNA, 956 bp, Populus trichocarpa
  Intron number 1 from transcript POPTR_0006s13100.1 (locus POPTR_0006s13100) derived from phytozome v7.0 (chr-ID scaf fold_6; pos 10317664 to 10318619)
atcctccaattccaaaggcactacttttgttcctctctttgccttttgtctatttgtccatgctatgctcttgttctttatgttttcctccaaaaaacttcatagcttttttttcccccttagttttctttacttgttttattaatggcaaccttttcttttggtgggctattattaaaatcatgaatcatgcatcatcctccctctctccttgtgggttttaaatttctagacttcctatatatattttgggtgtcttttttttatgcaagggctgcaccttatatgcttattcacccatgcttttgttttgatgatcctggcatcattaaatacctatgctgaaaactgaaaatccatacttatgatgctatgctgtgtttgaccctttagaggggcaaggatcgccagactgtaagacattaggaaggtcaacaagcaaacaagttttttttttttaccaacttaagtctttcattgcaaagctcatttgcggcaatgacagtagcgtttttctcagtatcttgaaatgggtctcaacataattattttaattggatagacatgttttgtattacttttatgttgtaatttgggacatgattaacgatcatattgaatttcaacctgctcttaaagcttatctcaaccctcttaatatctggggtttcttagtcactgatagcacgttaatactgaattatctttgcaatatatcctgttttttcttttcttttcaattccgtgttctggatcaggaatatttcaagtttgtcattaatttatgatctttgaatagggagagtttgtgttggtgtattgatgtcgctggctacctatttgacttaagtgttggttttgcgaaggactatctatctgttatagagtgatactccaactttccttgttgatccttcttaggttgggagatccacagaaataactgaggataatcc

SEQ ID NO: 55165 - DNA, 419 bp, Populus trichocarpa
  Intron number 1 from transcript POPTR_0003s18490.1 (locus POPTR_0003s18490) derived from phytozome v7.0 (chr-ID scaf fold_3; pos 17554460 to 17554878)
cacaggtaactttgctaaaaagatgactaatcacatcagtcataattccatcctttttgtttttttgatcatttcaccgcatataaaaatttctttttccttttctttgtcttgattcaaaattgcttttggcattaggaaatcttgtttcaaggtcatcaacaggccttccccgatatccttttcaaatgtctgaatcaatttgagcgaccgtaccaaaagtgaatttgattcctaaaagaagtccaatttttttttccttttttttttaatggcaaaggtagatttagagtactctagtggcttcatataacacattctttatgctggtgtacatatattttcctttttctaaaaaaaaaatgtcattaaatctacggcttcatttcttgattttggcatttcttccttagatatta

SEQ ID NO: 55166 - DNA, 1000 bp, Populus trichocarpa
  Intron number 1 from transcript POPTR_0018s06900.1 (locus POPTR_0018s06900) derived from phytozome v7.0 (chr-ID scaf fold_18; pos 6991329 to 6992328 reverse strand)
tggaaaagatctacctcggtggaaaggttttttgcttttcctttggatttgtctttttttttttccttgttcaatttggagttgttttgccttctgtttcgatgggcaccattccaaattcaatattttttttatgaaggttggttttgatttcatttgggattctggttttgttttatattttaaaaagaaaataacgagacccatttggatatttgtgtttcatttttttcacaaatggaatgacaaatatgggctagaaattcttcttgttcttcttcttcttcttttttttctccctttagctgggctttttttcatatttggagatttgagtgtgtctatagatctgtgcttttattgtttctataaattcatttgtttgtttactacattcatgtactgatgggaattttgtatttttaaccactggttgtgctgcacctgttcttgacattttcttgttttctcctcctccttattgaaaatggtatcgttttctgttcttgtgcaaggttgtagctttcaatgttttccggatctgaagttctgtcgagaagttgtttttggatcgtttatatttcattggaataagtttttggaaattctgctgacgctgtcaatatgtaaaagaattaggctttcttttttcttttctttttttatactttttatattccttccttgttgtttgatgattttgatgtcaatgttcattgcttgtgttttagtcaaagtctgttgcaattcattgaagaaaccttagctatactttggcttgtcttacacttaattattattttaatgtgtagctgtcaattttataaatcagttttgtttcttcaatcattcttggtgaataacacacaagttattagaatatcatggtagtgaagcactttctaattttatcctcttgtagttaatggattgatggtcattgaaaactttctttcgtctgttcatgatttgccttgtttgaacctatttcaggaacatc

SEQ ID NO: 55167 - DNA, 490 bp, Populus trichocarpa
  Intron number 1 from transcript POPTR_0014s05580.1 (locus POPTR_0014s05580) derived from phytozome v7.0 (chr-ID scaf fold_14; pos 4168158 to 4168647 reverse strand)
atattaacgtgagtgacaatattgaccgtgaccgggaacttttttttaacactaccaacatattatttgtgtttttttcaaaacataaaaactattctttttatcaaacagactcataatatttttttaaaatatcaatttctaataaaattaactgatcaaaattaacttaataaacaaataatccaaaaatttcccaatcaatcttcaaatcaaaacctgacaactgtcatatttcattgtcctttaaacaaaaatttcacatactagagaaaagtttcctagatgcagtcaatatttggctttagcttgacacgcacgcagactcacgatccatatacacgccgcgcaaaatcccaagaataaccccacgaacttatgcttactcataaggctagaaccgtcattacgtaaccaaaccggcttttttttatttccctcgcgtccccttcaagcctgtcttcgatatacaacggctactctcaaagag

SEQ ID NO: 55168 - DNA, 769 bp, Populus trichocarpa
  Intron number 1 from transcript POPTR_0003s02230.1 (locus POPTR_0003s02230) derived from phytozome v7.0 (chr-ID scaf fold_3; pos 2338877 to 2339645)
gatccagaaggtaacaatgcagccgagcattgaatttctaaacatcttaccttttgtttttcttcttgctttgttattaaaatcttttacattttattgctgcatattgctatgtatttcgccgtgctggaaaaatctcatgatcacctccacgatgctaattctgtaatgcatgtgaagagtttcatccttaacttgttaaggaacaaggactgtgatgcattgctattttatattttatgattgagatggtaaattttaaagattttcctgtttaggaggtaagacgtcactttcttgcttttcttctgagagaaagtatttgatccttttttgtataaaataatgctgtcgtgcattgaatttctatacatcttaccttttgttttgtttgtcgcattgttatcaaactcttttacattttatttcggcatattgctatgtgtttagcatgctttaatcaaaaagttgagtaattgatgaatgttaggcaagaatattacagattgttttgttttctgcctccttttctttcccccaccctgaaaattgtcatattatttttgttttcagccacctattcttcccccaaccccaaaaattgtcaaaggacacttttatgctttgaatcaaatccatcctaattctttcgctcataactttatgtgtgaactgccgatgtttcatttgtcttccttgttcagtgccttgtttttttctttgacatggttttcccttttgccttttatcttgaacagcatcccatagt

SEQ ID NO: 55169 - DNA, 756 bp, Populus trichocarpa
  Intron number 2 from transcript POPTR_0018s11420.1 (locus POPTR_0018s11420) derived from phytozome v7.0 (chr-ID scaf fold_18; pos 12163469 to 12164224)
aaaccgaggattgctgtccgaatatctctggaaaggtcagatctttttctaaaagtttcaattttttgtagtgttgagattaaaagggggcaattctgtttggttgctgagaaaatttggtgtgagatacaagatgagaactttgacttgttgtggttagttttatttacccttttggattttttgtgtattgaaaattaaatatgtatcagtgctatcaattttattgcatgattaagctgttagaagtttatttttaatgcctaagactggagaagtttgttaaaattaaaggactgccttatctaatgccttctctcggtaaacactgaaccagcaatatcaatactgcataaagttgctagaaaatatgcctaagtttatggcgattcacttattattctcatgtccattgtctgcagactagctccattacaaaatcgaatcccggcagcatgctctcttaagtaatttttagatgtttttcgaagtaaaaactgaacagcacggcgcatttaaaaattagcctttttgttagcattgcagtgctgtccattggtcttcattcatttttcttgcatctaatcttataacaacgcatgtaaaaataagctcctttcactccttttcatcttatatttccagatattataaacaacattttttaactctttttgctgctacaactcatctatgaattgcttggctgtttaaaaatcaggttgctttttttccctcctccgtttgcatcaccaa

SEQ ID NO: 55170 - DNA, 295 bp, Populus trichocarpa
  Intron number 2 from transcript POPTR_0006s03480.2 (locus POPTR_0006s03480) derived from phytozome v7.0 (chr-ID scaf fold_6; pos 2249709 to 2250003)
agtatagttggaataaaggtgccagcccttatctgtttgcatcattgtaggagccaccaccacaagtactgtgatcatcactaagaaaataaatgatcatcagtatcaaattcaagatttatcactttaattagttgagaaactgtagtttctttgcgttgaccttgaacactggagcaaaatgtttcaaaattacttggtttaatcggcttttttctactttgaatgcctaattcataattttcttttgtggctggctaaagtttttgtgctcctctttgtttcagaagcaaat

SEQ ID NO: 55171 - DNA, 580 bp, Populus trichocarpa
  Intron number 2 from transcript POPTR_0006s08280.2 (locus POPTR_0006s08280) derived from phytozome v7.0 (chr-ID scaf fold_6; pos 6015498 to 6016077 reverse strand)
caagtatgtttttttcttgcctaataatgtatgtgactttagcggctggctgatttcttttgatttgttaaatcatgcaataagataatgcttgaattgttttctgctgaagtttgaacttcttaaacatagagtgaatcatgtttgttacttttctaaaatggttcttgtggtttgagtgcttggactggaaaagagtattataagactaaagacattgaaaagagagtgtagtaagtaaattacaatgtgcttgctctccgtttcttctatgcacgcgaaggatatgcttttatgaattgatacttacagcgaaaacaattttactattaggttatagggagagagattctattagttttattgcataatttggtacccacctggcaaggagatcttttaattattctatcttaggttactgacatggtagggactcatttcttagtgatttatgtgacagtctttccagaatcaaggtctttggatggttaaaggtgctgagtgtataaatgatggtgaaattaattacgataattcttcttctagaattgagtcaaagcgttctcaccagtggttg

SEQ ID NO: 55172 - DNA, 839 bp, Populus trichocarpa
  Intron number 1 from transcript POPTR_0014s10190.3 (locus POPTR_0014s10190) derived from phytozome v7.0 (chr-ID scaf fold_14; pos 7638799 to 7639637)
taatttacatctttctagctaacttgggtgggtctctctctctctctctctctaacccttcgtttgatttttaagttttacccatcttgaacaatccttcttgggctccatttctaattactaatactactactagctaggttagttactctctctccctctctctcttcctgtagagttagttcttcaaagcatttaatgttattattctatataagaggatcaccagctgcagaacacaaaggaatatattaatttttgtggtggtgtacatggggtctcttctgcttcttgggggttacatttattactattgttttgctagcaccacaatggaatgttggttgaggaagtgagaaagagagataaattaatttaacgctctcgctcttgcaactagctactactgctcatcgatggagaggctccaaggacccatcaactcttgtgtatgttactgctattcattttagtacttccctctctttccttgagtaccttaactagaatcaaagaaatggacttgcatttacttctccgaaggcttgcattcaatgcattgcattatttttctagaaatgctaacgtttcctgtaccgtttcttccactttaacattctattttcgttcttcttttgtttcactttctctattgaaactgaaacacctatcaaatccatgacagttaatttttctctataattcctcagaaggttaggtgtaaaaccccaaccaagaacctccctcgttacctttcttttgtttaagattcttttttaatgagtcttagttttccttttgcagttcttagaggagcatagcttggatttggggtgctt

SEQ ID NO: 55173 - DNA, 999 bp, Populus trichocarpa
  Intron number 1 from transcript POPTR_0003s12910.1 (locus POPTR_0003s12910) derived from phytozome v7.0 (chr-ID scaf fold_3; pos 13342462 to 13343460 reverse strand)
gttttgagctctatagatacatcttcacttacactgtaagtgaaagactaaaacttttgccttgctactttgagcttcaatttcttttttgtttccctcttagattaaaaagattcaatcttttaggtgaattttgatgtttcaagtgtttgtatgtttcttaccagtgaatttggagatgggtttttaattttaagcatggctattttgtttattttgctcttgagattttttgtctttaattttagttttgttagtttgtgatgttaaaaaaagttagggcatttagatctggtgttgatagattatgttttgggttgctaaggttgaggatgttttgttggtttgttttgaaaattgaggtattgaagaatggatctaattcaataacaattgttgagtgcatgccagggtctttatggtagtgtacagatggtgtagacagttacttgggtttttgttttgggttgttgaatttgtcctgaagtggactatactagcactggaattgattatttttttgacagtgtggattagacatgagttagtggataaaatgatgggtcaagctgattgtctccacttgtaaaggagcacacaaatggaattgcaagtaatgcaagtgatataaccattgtgtcgagaagagtttattgttgaccttggaatcaactcatcaaggattattgtcaagctaatagttaaatcatcaaaatctttgtaactgttaatgtataagagtgcatgaaaaagtcatcatgcccacatttttcatcatgaagtttgatgccacaaacaaatgagaaattttcaccatgctatttaggtatagtaataacggaaccctgcgcgttctgtttttctttttcaatgtgattttagttctgatgttatgcttgagtacgtactttgcttagcagcttatcatgaaacactaatacaagtttatattcacactgaccaggttgacattcccgagttgtgccattttctgtgctc

SEQ ID NO: 55174 - DNA, 749 bp, Populus trichocarpa
  Intron number 1 from transcript POPTR_0013s09150.1 (locus POPTR_0013s09150) derived from phytozome v7.0 (chr-ID scaf fold_13; pos 8705653 to 8706401 reverse strand)
gattttctcattggcaaggttttcttatcatttaagaacattataagtgatttttgggcttattttttctaacacacaattttatgctaacatgcataatttcttatctgactgttagatcaatctaaaattttaccagatgattccggtggcccaattttatatataattaaaattttatagcaatcgaaaatcagaaagaccttgtgataaggtctaaaagctaccatgcataatttgtattagtttcctagttgatgtaggatgtttccctattttttgtagaaatcttttattatttttccaaccttgtttaagacctttttacttatgataaatatgattatttagcttgtatttaggttttcttagatacaaactttgatttcaaaataatctattatgtgtgtgataggaaattcttttaattttgttcttcatggcatcttttatactacttattcacgtgtcttcataaatgatgggtggcgtttcagtttctatagtcttggtgtctcaatacatgttatcattgtgtcaaaatcaatcataggattgaatttagctttttcaggaagggtcgatttgactgtagatttctggatttctctattcatagggttccccattccattttttgattgagaatccaataccataacttttttctcaacaagcctcgaagggtactttagtcttgttaatgcttcttagttgaccaagaacaagtttgtggctattgagtttga

SEQ ID NO: 55175 - DNA, 626 bp, Populus trichocarpa
  Intron number 1 from transcript POPTR_0003s07890.1 (locus POPTR_0003s07890) derived from phytozome v7.0 (chr-ID scaf fold_3; pos 9395834 to 9396459)
aatcaggtaccctactacaccagtaacgttctatttttttatttattttgaaaataattgatttcttatatgtctgattgattggatgcttcgaatcgaagagataatatattactaattttgttttcagccactgaaattttttgaaaaagaaaagaagtaatgtttagaatctgtttgataattattattgtttcaaactaaaaaatggtcagttagggttttgtgaatgatttgattctgcttgatttatggtttgagaagagtgaaggggatatttttggtttcgagaggaatttactcaatgattggattggtttttgttgtttcatggtgattagagatgctctcttttttttttcttcctatgtgtgctgtgctgcgtttggttgctgagaaaacattgacgaaatggttgtgaaatggaatttaatggcatagaggatcagtttggtttagttgatttcttcttaagaaggaaaaataaaaataatttttcttacagattgctactgaaatgccatttccatttcagattgtctctcttttttcacattttcttcattgaatctgttctgatatttttgtcattgtgcagtttctttgggggctaggacttccactgg

SEQ ID NO: 55176 - DNA, 816 bp, Populus trichocarpa
  Intron number 1 from transcript POPTR_0003s08870.1 (locus POPTR_0003s08870) derived from phytozome v7.0 (chr-ID scaf fold_3; pos 10198994 to 10199809)
ggtactcagaaggagaaactggtttctatcagtgagtcagttgaggaaattgagaaagaaagtgtggttagtgatgaaagtttgatcaagaagagagaagatggagaatcgaagaaagatagcttcaagggtttggcgaagagctcttcctcgaaagctactttcttttcaggtaaagaaaaaaactttctttaatgtttcctttgtgtttggcttcaagagtttgtatatgcatatacttgaagattgtaggatcttggtattcaaagacaaactatattgatcactttaattcttacatgttcagatttcagaacattaaaaacgggagagaacaaaattaaacttgtctaaattcagttgtgtatttgaaagttcaagaatatcttggttgttcttgactcatatatgcaatttcagaaatgaagttttgttgtcaattcgatgtgattattgaaaagaatattgtgctggaagagaagaaggtagtttttcgtaatcgatttaggtttgtttacttatgatcttacatcctatcaataagatgtttgaattaacttctgtgctgttgagttcttctgttaaattctggttgaacatgtagttctctttattgctgattctatggatagccaaaaagagatgcctggactgctcaagtgctgcttgtagtaccaggttgagtgtgaggcttaaagtaaggatgaaaaggcaaaagaaacaaaattctaatttggaatgaaattcttattttgtttcctgtaacgatatggtattccagctccatttcagtttttcctaatctgaatatcctac

SEQ ID NO: 55177 - DNA, 581 bp, Populus trichocarpa
  Intron number 1 from transcript POPTR_0019s11470.1 (locus POPTR_0019s11470) derived from phytozome v7.0 (chr-ID scaf fold_19; pos 12732511 to 12733091 reverse strand)
ctctttacaagaaggtaagaattgctattgggccttttccttttctaatcataatttgggatgcttaagatgggatttttccggcaatatagtgatatttggatgttgctgccgcgtaagattgatactttatgctgtatacgagatgatgatgtttgattgatgatcatgcttcgcttctagattggtgaattttttgtgatttttctagtttagaatctgaaacagcttgctgaatttgcgattagctatttttttttaaaacgatcctagatgagaacataaaacggtaccctgtatggagaagtttctatcgtgatcttctttcaaacatgctgttcgagtaattagtgtttagtaatttgattgatgctttccgaaggaaggtatcatcatggctaaagaatgccaaagttatgagtgttcaataatttagattcggtgataatttagcaatttaagatggggatctgcagggcaggttttgattgtcttgtactgaattcatttgtctgttgattcatccttgccattgtgcttccttttctgtgcatgtctagatcaagtccaagggagtgacg

SEQ ID NO: 55178 - DNA, 756 bp, Populus trichocarpa
  Intron number 1 from transcript POPTR_0003s14050.1 (locus POPTR_0003s14050) derived from phytozome v7.0 (chr-ID scaf fold_3; pos 14241199 to 14241954)
ctcttcagcctctaaaagctctcgcttttactctggtaatataatccattatcttttagttcttttaccattctattattctgcttctgtttttatttacctgttgtttacattttgttattattgctgttgttcttaaatatacttgattagttttttgaattactgaaatgtttaaatctgaatgttacgatttttatttactgaaatgcttctgtttatgtgcctgtctatcttttttgagttgttaattaacatgtgtacgcaagcgtattagagatggtgtaattcttttgattgaggttaatttttctttttcttttttttcgtatttaattaggcttatgaatcagggtttaatgtattaatactgtgattttggtgagcataaggaaaagaaaaaaagaaaaatattttgatattctataatcactttggctctaatttaatttcgtggtggaaatcttttaatctctaatctgcttctgcttggtcactgtaaacatcagcaacaagaatttctattttgctcctcgctaagttgtcaaaaaggacataacgcatgtgtttatggcgttaaaggcgattcttttcttgcttttttgctgaacttttctcatcccacaaacacgaatgtatgctatatgtgtagtagaaaaatttaatgtgagcaggattggaaaagtttttttttaccccttatgagttgtcttatttgtagaagggagagctgtcgcagcagcagtttcattcagt

SEQ ID NO: 55179 - DNA, 935 bp, Populus trichocarpa
  Intron number 2 from transcript POPTR_0003s14050.1 (locus POPTR_0003s14050) derived from phytozome v7.0 (chr-ID scaf fold_3; pos 14242020 to 14242954)
gatttcaggggctcttgcatttcctgccgcaggtttggaccaaaaatactgtacattaatttggcctctttagtttgtggtttaatatggattttgcatgtcttttcgatccaattggaattttggcatgtattttggcacatcatcataaacattttctcctggagttcctgatacaaaaagaaaagaaaaaatgtttttttttatttatttgaaattttacttattttcttcgtacaaaaacattgtgttagctcttccatatttcacctgaaaaaagaaaaggagtcttcagcatagaaatgcatgaaggaagaggagacttgttccttgctcaagtttttttagcacagtgactttcaggacctcttctagaataatcactccgtgcttaggcttaagcatggtaacagttgaaatcttaggcatgggacttgattgcttccctaaatttcccccgacattccagctgacttccaaaatgcatgaatatgttagtgctatcatacattctctgcttgtcctttcaccagtttgagcttgtggtctcacgaccacccagccatccacccttctttatgacatccatttaatcttcattttcatttgggaagttgtctcttgtgaaaattgcttgtcaagcaatatggaaatgtggaagaagtaacatagagttggagacaccttattttttcgtatccttgcctatctcacacctaaaattcacctaaacaatgtaaaaaatgtctttcttagtgtgtgcttaaggctgatcatgtctatatctcttgaagatattgataattaaggatgagagtcaccatataacagtatgctctatgaattattttttgcttgcatgatattattgattagttttccctctttttaaatattgattttgactttcctttcttcaaatttttgcagtttat

SEQ ID NO: 55180 - DNA, 632 bp, Populus trichocarpa
  Intron number 4 from transcript POPTR_0003s13690.1 (locus POPTR_0003s13690) derived from phytozome v7.0 (chr-ID scaf fold_3; pos 14002079 to 14002710 reverse strand)
gtcttggaattctactatttgaggtgcgaagatgttttttgttgtcttgtctgttgggcactcttactcaacttctatgatattgctcatgtttcattatttgataaatgctattaatgaaaaatcttcttcatccgtgcgatgactctgattgttactctggtttaccatggtgcagaatttatttccataaataaatgttttcaaagagcattttatttcttataaattcatgtttcatgagtcttgaaagctggcacattgttctgtgtaataaaaaaaactcatttgtttgctgctttgtcgcttttcccaaatgctacttgtccataacaaatttgattattgggctttctaaaaggttgtgattcacaagctgagaagattttgctgtcatatgtagtagaaattacaaccataaaattgctgccattatctaagtttggcaccagtactattcttttgttggctagataagcctatcagcgatgcataatgcttatttttgtttgtcattcccttttattttgtttagatatatgagtctggattgaattttttatatatatatatgattaattaagttgtttctttcagttgcttggtcgttttgactctgacagagcacaagc

SEQ ID NO: 55181 - DNA, 982 bp, Populus trichocarpa
  Intron number 1 from transcript POPTR_0003s13690.1 (locus POPTR_0003s13690) derived from phytozome v7.0 (chr-ID scaf fold_3; pos 14004220 to 14005201 reverse strand)
gaggtaagtttttttttttattattggatttgcatttggctgtccttttcagtttagtatgattttggttgctaagaaaattaagagatatcaaagactacattttgagggttttttgtgttgtggagaagtaattatccctttaaatttatttctttcatcgccttctctgattcttagttgaggatcaaattttgccagtcattcattttgttgaaggggatgttttttggattctgggttgccgttagaatttaaaactttttagtgtttaataaaaggtttcttaatcatttgttttggtgaggaagtgaaattgtatagctaagttttgaggagaaagaattctttggttaagtttgtttcatttcttgcacttaccggttcttagctgccaaagggtttttactagcttgtttgatgactgttgctggtttccatcttttgagatttttggaccttttggattctggttgctgttaggattttgtaattttgattattttttttaatttctcgtatcttgtattttatgattcttagcttggaattagagctttgctaggctttcattttgtttaagctgggaactttttggattctgggttggtgttggaatttagtaatttttgattattttagaaattctttgcgtttagatttttagcctccagatagagagctttgctaggctttcatttagttgaagttttgaaacttttggattatgtgttgctttagaatttggtaagtattgattattctagagaaacatttcttgattatctttttttttagtgaagattatggctaaaagttttgtgggcttgaaattattgggtgatttatgctcaaagttgtgcacttttaagtgtagtgaattgatgtcattgccttttatcttgttaacttttggaggattgatgatgtgcatgtggtcacaaaatgtttgactgaaaacaagtcctgtttacattgctag

SEQ ID NO: 55182 - DNA, 1021 bp, Populus trichocarpa
  Intron number 1 from transcript POPTR_0018s05120.1 (locus POPTR_0018s05120) derived from phytozome v7.0 (chr-ID scaf fold_18; pos 4578231 to 4579251)
gaaggagaaaaaacacgaagggggtgtttgtttgctcggaaagtggtttcctggaaaccactttccaaactttcatgtgtttacttgtcattagaaatgttggtcaacagaaaacactttccaatcaaagaaaaatttggcttgatttccaggaaagtgttttccttttattttggacggaaaacacttttcagaagttgtgaaaatttagaaatatcatattatttactgattatatcaaatttgatcctcaaacttttgattgatatatattttgtttgaatctttttttttaatttcatcccttaaaatttgatttaatttgatttttatattaactttgatcctcatttttatgattgttatttgttttctcttattatttttttaattaaaattttttatctatcaaatttgattctcattcttttgattgttacttattttatttgaaataatttatgaaattgtaattattattattttaatttcatcatcttttaatttttttatttgttagatttgatttccattattttgattattatttattttatttaagataatttattaaattagatttttttcaatttcaatttcattctcattcaactttttaatttgtaagattggttcctcattattttaataagtttgaaaaaaataaaacattaataagctattttccaactcattttccataacataaccaaacactgaaaagtgttttccaacttatttttcatggcactaccaaacataaaaaaataattcatttttcaggaatttatttttcaaggaaatcacttaaaaaaaaaaactacttttcaacaaacaaacgggccgaaatgatatcaggtaacatctagaaagaagaacggtaagcttcttataatattttcacatttcttagggatcctgctagcttgtgatcgacaggcaccattgcccaatgttttttttttttttagtttaacgtgggtgtccggatcagctattattgcccaatattaattgctca

SEQ ID NO: 55183 - DNA, 836 bp, Populus trichocarpa
  Intron number 1 from transcript POPTR_0003s16780.1 (locus POPTR_0003s16780) derived from phytozome v7.0 (chr-ID scaf fold_3; pos 16309556 to 16310391)
gcctggtttttcttcaggtaccaacctctaaatttcaactcttttttctcttgagccgatcattttatgccttaattttttattcagtaatagtataatttgcatagcttaagagtgtgtgtctctctctatctctctctgttgcttgcgatgatgataattttttgtgaaagaaggtacaccctacaatagtaacttgtaaacagtaaaagttccagtgacacatgtggaataaaggggtggtggcagcttttgccaagaaaagaaattgtctgtttaaattagagaaagtttttggcatgctcctctcccgcaataattgtcccagttagatgcaatcattctggcctgtaatcagcttgtttaacgggctaacccattcaaacaaggtatttctgttcattaacgaacttaagtttacttctgttgtttgaaagcaaaaatgatgtgggaaattgttttttcatgaaaacaaatatgttcaaggccttttgtggctgggatgagagggctgactcccatgatgtgacaggtatccagtctttgaatagcatcgaagtgtgcactttattattaaagtgcaacgattgtcgtggcccattttactcattttccttccttcagatactattgctctatcctattaactgcatttatatgtggatattttgtcatgtaacttggataaagaggtgtaagctatcgctttatctacaagcaaaacaccaactaattctttgtccgggtatattaagttcaaagacaaaatgcttgacagttcttgctttctttgatctttattctggtaattatttgctgttcttgcagactgtgca

SEQ ID NO: 55184 - DNA, 813 bp, Populus trichocarpa
  Intron number 1 from transcript POPTR_0003s09330.1 (locus POPTR_0003s09330) derived from phytozome v7.0 (chr-ID scaf fold_3; pos 10646754 to 10647566 reverse strand)
tttatctgagcttgaaaggtaagttctttttatcttcttcttcttccctgtcactagagttactgtcttttctagtgtctttttgcttttacatgttgtatgccagctacttctttatgggctcaaggaggttttctccatctcccttagaagttgtgttcttcaattgatgaagtggtttatgcatttggagtgttcagttactttgatcagtcttgttgtcttgattttgttgtgttttttttttttttggagataagaggtaatcgtgtcaatattgggtgttaattttatcagattttagcatccgggtacttaaatttatagtgaaattatttttcttttatatattttctgagttggctcaatcagtgttgagtttttctttttctcttcttaaatttgatatatttatctgtgcatatcagtatgtctgtcttcattttgttggaattgttttaagtttttgcaaggcatggaatctgtctttaagaggacaacgaaaacaatgctaagtgtgattcttaatttcttattctggtggagaatatttgggattgtaatgggtgtatgatcgcttaatctattaaattcctgaactttatgtggaagaacatgcttcagtaagaagttgtaaagaaggcaaaaaattgcattttctgaaataactggtaattgcaaaaagtagaaaatttcctagcattacatttcaaagattttttttcccgtgcatttttagtgctgattctatttgttaatagaggtttcttttttgtagagtttgattctgcataactttgagtagaacaatac

SEQ ID NO: 55185 - DNA, 407 bp, Populus trichocarpa
  Intron number 2 from transcript POPTR_0018s01840.2 (locus POPTR_0018s01840) derived from phytozome v7.0 (chr-ID scaf fold_18; pos 1670954 to 1671360)
caaaaagtaaaagggtgaaagcaggatattcaaaggttagatcttttttgcctttcctttaatggaagccaaaagggtccttaagaaactgttttgattctgagaaaaaagaggtatttttttagtgatcaatttgctagcaatcatagacagcataaagtttgtgaattggtataaagtcagctactggttgcgtaatcaaagatataatttatgatcctaaatcttcttgtggtaattgtttgatgagatgtttgttgcatttagttgttttgtatgtaggaatatcaaagactctactgttttgagttcatactattgctgttcaattatttttatttgatgggtttttgtcaagttgccttcttttctaaatcaacctgatgtttttttctgtaggggataga

SEQ ID NO: 55186 - DNA, 651 bp, Populus trichocarpa
  Intron number 1 from transcript POPTR_0014s01590.1 (locus POPTR_0014s01590) derived from phytozome v7.0 (chr-ID scaf fold_14; pos 1495833 to 1496483 reverse strand)
ccatcattgcaaaggaaccctcaaggtatgctgtaagaattttgataagagatcaaaaacttggtagatccatgtattttagcaaatgttaaagttggatgcctagttgtttttactaaatacagattgagctccatgtattcccagcatttctgtagcttcttggttctagttttgtcctcccggtcttagctatccacccttcataattgcataccgacctcgacttgtcctgtatcatggatgactggattatcatgttaatgttcaaattcaaacccctgcaatattatgagcagtgcgatatcaccttttagataccaaaaccctgcagaaattaacagtgccaaaaatagatcagccaacaattctaaattcaattcactgaagcgaacatttcaggtggaggagctccttatagggtacagtgaactgatttttctactgttctgaagtgacatgatttctttcagctgttcttcttttgatgcattctcactgatctgtccactgttaagcgaagtcagcagttcttattgagagagagatggttgaagataatcaatcaagttgtagttcttatatgcaatctgttgacagatgtttctatttgcagcttggcaactacaattcctttgaaggggttctcta

SEQ ID NO: 55187 - DNA, 687 bp, Populus trichocarpa
  Intron number 1 from transcript POPTR_0013s11770.1 (locus POPTR_0013s11770) derived from phytozome v7.0 (chr-ID scaf fold_13; pos 12426366 to 12427052 reverse strand)
aggtaaatgttcttactttctgttcgattgtgaacattatcagcactcgtgattttctcccatcatatctgtttgtggatcattttcctttgattcgatagttatccatgtatagcctcacaaacaccatattaatggtcaccccagccccattttcttgagctagttcttgctttgtctaatcaaatattcttccgaaattgtactaaaaaaggaccgtcatatattcagctttaatttcattaaaaatgcggtcctgagaggaacattttaaagatatatgccacctttattgagtattttatagggcaatagatatgaatggtgctttcaggactgatcagtacctgctgctgcactcttgttattctaaaactggcctagggtccctggaccctttttcgtaccccgtgttaaggtttcttgaaatcctaacatggtgaagataaagattaaagaagtttcatgcttggtatcgtaaacaaattggaaatgttgtggcttgaacaatctcaaaagctcaccttgccctaatgtctataatgtactgttgatatgaaataggcactctataaagagaggaaaaaattgttttatttataattgtggtgattatttgtttctgaagtttttttttcacttgacatttcagcttcagatccgtactgttgaagctgggaaaataag

SEQ ID NO: 55188 - DNA, 580 bp, Populus trichocarpa
  Intron number 1 from transcript POPTR_0003s20020.1 (locus POPTR_0003s20020) derived from phytozome v7.0 (chr-ID scaf fold_3; pos 18645575 to 18646154 reverse strand)
agaaggttagtgatttatttcaggttttttgcttgtgtgtgttgcgctgcatgtgaattagtaatgaagtttagggtttttttgggggctagctgtggaaactgaaaatgagaaaggaataatgggttttttgtatttttttctgtttgtttaaatatatgagaaattggaaacggggaggtaattcttaagttgatttgaagtgttatatttggataatttaacttgatcttgagatggaatttttgagagtggaagcttgatgaattgaaaatttgagtcagctgaagtcaagaagatgtactaggttttgtcaagtgaggacttgggttcatagtgaaaccctgcattttatttatttatttttgtatctttcatttgctactgttgtgcttgatggtcgaagaacgaaagttggggaagatgtgattagaggaaattttggttttggtgtattcttttgttatagcaatcatgccatatttttttttctattttttattattaagtatgaatttaattggatgaaagaattaatgttttcatgaatattatctttgtaaattgcagtttcgagaaa

SEQ ID NO: 55189 - DNA, 235 bp, Populus trichocarpa
  Intron number 1 from transcript POPTR_0019s10810.1 (locus POPTR_0019s10810) derived from phytozome v7.0 (chr-ID scaf fold_19; pos 12306059 to 12306293)
ttagcactgcaccaaaaaaagacgagagacaaagtgttattgtcacccaagaagcacaaacaactcaagaaacctccaaaaatgaagcatcagcatcagaatctgatgttagtactgagattaaaccaccagcagagactcaggaatcaaaagttgaagaaaccccagaaaaagaatcacaagaagtggcaaaagaagagcaaaaggctgcaccttcaccagaggagatcactat

SEQ ID NO: 55190 - DNA, 1008 bp, Populus trichocarpa
  Intron number 1 from transcript POPTR_0019s01680.1 (locus POPTR_0019s01680) derived from phytozome v7.0 (chr-ID scaf fold_19; pos 1478148 to 1479155 reverse strand)
ataaactgccctctgctgcttattcaggtttgtctcctgtgtatgttgcttacttatggatcatcgattctatcttagtttacaaagcaggatcatccttctctgttttttttaacacaaaattagagtacaactcatgaaacaacaccacccaacgaaatttaactgtatttctcaagtatggacaagttaaaatggatgtagaagaaaagtacgagtagtaaaacaagcagcaaaagaagaagatttgaaagagagaatgatcccatcccaaagaagagtccaaaatgtttggaaacttacccttcaatttagtacttaatgtttgcaagaaaaggatttaatatttctctattgttaaatttggtcccactagctatattatcttaaataaataaaattatatttaattttatgaaatcgagcatcaaacaagaatccaatttgtttctcgatgatactacgagtagccaatatcaaaacaaataacaaatcacaatctcaaactaatcaaatagaaaacaaaattgatgattgaaatgaaaaaaataattaatgtccttgtgtaacctttttgtttctattcttcttgttgttttttttttcttttttttaaagggaagattacatgtatccattatatatttccactagaataatgtgtggggaaggggaggtctgcatataattgaatggcagactacagagcatctggaagagggtgttttttgttttttttaatcttcgtttgcataatgaaaagcaattaatagcatttgatataggtttacagatattcttttctaatcatagcgaagaaattcataatgtcccgacagaaccgatttttgaacatagattaactacatggatgcagcgcttgaggttgcatattatcgcagttaaaacagatcaacaagttccatgaggagttgattaaactaacagatggtttgtctgtataaaacgacaggtgacgcgtctcaagtgcggcggaattgtctttgc

SEQ ID NO: 55191 - DNA, 852 bp, Populus trichocarpa
  Intron number 2 from transcript POPTR_0003s05270.1 (locus POPTR_0003s05270) derived from phytozome v7.0 (chr-ID scaf fold_3; pos 6502141 to 6502992 reverse strand)
atctgcattcttttgacaccgagttgctacccgaggtgggttttctgtcattttctcgtgaattagtagaaacgtggttttggatgatcagtagtgatactttaatgtggcatccaacaattgggtccatccacattccgataaattgaagttctatctttgccgtattgtttgattttttttttagaaatgaaatgcattcgagcttgattttgtgcactactatcgaaatcttctgcttcgataatctacgctctagctatactttcaaatttataactgcttctaaaagatattctgatttttgtgctttgtagctagtgaagaacatcttgtcttgcaccaaaaagacgtttgagtcccaagctcttatgggttgcttgctttgctgatatgtctcatgtcattaagaactccttttttgcatgtttggatatggaacatgtttctgaataacatagaagagctttaggtctttgaaactggttccatttataaccaaacaaattgcatggcatggttttatgtggttttccaaaaatagaaaataccattctaactttctttttaaaagaataaaaaggcgtgtcttatttatttgttgacatgcacacaagcttttgagaagaaatggaaggtaggatacatgccatgccgttgcttcaagaaataatgatactatggtgtcagctctttagaagttcatcgcattgtcgtaaagcaggcattgctccttggtgttgaatatgtgatttgggatttcatattgcagttgagtgttatgactttgcatccatatttatgctaagttttctgtattttgatgatagttgcaggttccaggactctacg

SEQ ID NO: 55192 - DNA, 671 bp, Populus trichocarpa
  Intron number 1 from transcript POPTR_0003s13870.1 (locus POPTR_0003s13870) derived from phytozome v7.0 (chr-ID scaf fold_3; pos 14113921 to 14114591 reverse strand)
ggaagccttgctgacttgctcgctggtgagtttacaaacacctttacaatatatagctcaatactttatacatatatttattcctttttcttttgaaattgttttttcaatgagtaatgattgcttgatgcctaaagtgatcatgccagggtgattataagagaaaattaagccacatcatgatagtgatgaatttcatgggaattaattttcctttccttttcttttttttctttagaataatcttcatttatcttaattgatagaaattggatttttttttaaacaacatcaacagaacattatgaaatacgataattaagactatacaaaagaaaaaaaaaatcatgaagaaaaattttacagctacaagagagcatttaatttgatgcaaattaatgatattgtcccactcatacgaagagttacgatcatgtatacaacacttgccacattagttcatgtataattctgagattttatataaaaatttttttattcgaaagagataattacttcggttcaaacttcaaaagactcaggctatttttgaattgcctaggataaaaattccttctggaaaaattggacttgatgctttgaagagagaaatatctgtgaactgaatctgtttttatgccctatttgttgactaattgaggtggaaggga

SEQ ID NO: 55193 - DNA, 964 bp, Populus trichocarpa
  Intron number 2 from transcript POPTR_0013s09290.1 (locus POPTR_0013s09290) derived from phytozome v7.0 (chr-ID scaf fold_13; pos 8945346 to 8946309)
ccagccctgaaaacaatagcaaaaaggtacaagagtttttctggacaatggaagcagctatcattgaacatccgttatgagcaggtgcccctgatgatgaatttgattcctcaatgaatctcttacaattcctatgcatatgttttacttggaatggtattttaattgttttagttcaaagatacgatagaaaacatggtttgggacttggcagaaaggaagtggtaggatatggaatgcataaatttcctttgaaagaaatagaattatttgaaccagaagtggatggaaactgggaggaaaaactacttccatgagttttcccttgactactttttccctcccttcctaagttcaatctcttattaaacaagtgttgatgagaataacaccctttccttcccatatctttctgttgtttgccctcccaagcttctactgattcaagcatacaacccttgccatctgctagtaagtatgatggattgcgtacccttgctgcttgaagctctaagccaacttaagttcatcgaggtcatcgtggcttgtagcatctgactctgacattagatgaaaacttgatatgatttctactagcttttagtgtatatagatagatatgcctattattttatatctcatatcttctacttatgtattgtgtttttaatgtatatgcatattataatgtaacagttcccaaagtattggaatgctgtctgttattttacttttaagtttttgcgtcttctgtaaatctttgtagctttgtgctgcgctccgcagaatatgttaacagattgttttattttgaatttcaaatgcatgcaatttattttgcttgttggtcatctcttgcatttatataacacagggattggagaaatatgtcatgaaaaaattgttctcctgaacatttgctacttctcctgaggatttggagattgaccaagagatctcagag

SEQ ID NO: 55194 - DNA, 866 bp, Populus trichocarpa
  Intron number 1 from transcript POPTR_0014s00670.1 (locus POPTR_0014s00670) derived from phytozome v7.0 (chr-ID scaf fold_14; pos 621805 to 622670)
aagaactccatcgtgaagcactcagttcagtttcttatctcgtgttctatctttattttcgttatcgatttgtttattggaatgggattttgttttttttggttgttttagtgattaatctgactgtgaaaccctaataggcttaagttttggctggtcttttttgggggctttggtttataaagttttttttattggttttttgtggttattgaggtgaatcaaagatgggtttttggtcacgtgttgagagttttgtgcgtggagtgaagtgggactgtgtgactttgagatttgaaggaagtgttttgggtttgtgacattttgtggattctgatgttttagtgtcttgaaattgtcattcttgctatgatgttgtggttagttttgtcaaaagtggaaaagaaattaagtttttgatttggattttggatttggattttattaaaaaaaagtgtttgattcaggttattatgattgaatttggtacgaagtagattactgttaataacgagaatgatggttagttcttggtgctaacgagagtttgtcttttgaatcttttacattcatggtgcttcatgggtcaactgctagccaaacctttgtggaagggtgacatgccttgagctttagacactaatttcttaagaatgtggcatatcatcttgtgtggattttgaatgctatataataaattattgtcattgaaaagatctagttggtgagtcttattgtgtaagtggtggtaacgcatttcattttagaagtttagggtggaaaatgctctcctttttaatatgtttgatttctaatttccaaaaaatgtttatgcagtgtctttgaagcctgagtattttgagggg

SEQ ID NO: 55195 - DNA, 880 bp, Populus trichocarpa
  Intron number 2 from transcript POPTR_0019s14580.1 (locus POPTR_0019s14580) derived from phytozome v7.0 (chr-ID scaf fold_19; pos 15319922 to 15320801 reverse strand)
gctttcaacccgggtattcaagaagtgaaagtcctgcaacaacaacagaggaagaaaaattcacaaattagcatacgatttccctaagatgaacaaaaccctaaccattaatagaaatcaaagagcacgaatgagctgatcacagtaaatgctatcctaactcatagtgaaaatggtctacaaacaatcttttcaagttaaaatttcatacaaactgatgtctcaactcacaagtggcctccgaatggcatctcgggaaaaaaaaggaacagccacatgtgtttgtatgataattttgtatagaaagtttgtttgcataaacatattgatgcaagttctaatgatcagagttaaaggaaagaaacaaagtaactgtcattgttaaaaaaactatttaagataggaacgtaactctagaagaaaggttgttgtgataaagttaatttggcggaaaaacatccgtagatgctccgacgccacagattcgaaactgtcctttctctttagttacacagtcaaccaaaaaatcataagagccaggttcaataactcgaatcacatggttaaaattgtcaagatatcatgctgccacctgttaagagaatagagaatataataattagaaagtttgttaatattgttagacagttaacaaagtctattactattgattagattacgtaaacaagcttctcacctttagttcatataaaataaatgtaacagtgctagcaaacataataactgaatatacatagaaatattttcttcttcctttgcattgcagtatctccctctaattctgttcacttctctgttcatctctgtgacgattcttgctaacttatcatggtatcagagctgttactggtccgattgg

SEQ ID NO: 55196 - DNA, 798 bp, Populus trichocarpa
  Intron number 1 from transcript POPTR_0019s04170.1 (locus POPTR_0019s04170) derived from phytozome v7.0 (chr-ID scaf fold_19; pos 4264387 to 4265184)
gtcccacggtatgttcttgtgaaattgaacttaactcactttaagaatgaaaaattgtttatgtactataaaaatatatgtttccatcaaaagaataacaattatagcaattgtataataatgtaatttattaagtctctattcattatttgcattgtgttttcatcaatcaaaccctattgttattactttggttaatttattatagaaaatattaccatgaaaattttatactttagttattattacacttatcttctgtgttttataaattacagtttatatcattggtgagtgtagaataaactaaactatagaatagtccaagatataaattgttatgtgcataacaagatttagaatgtaaactataatttttaaaaacacggatggtaagtttaaaaatgactaaactaaagaatgataaggataatttctcatttattatatttataaatacatattcaatttcaacaaattaaacacaatttaattattaaaatcaaaaaggatttttcaatgagaaaagtggggttggtgataataattcaagtagtgaaatgtaagtttttaattttaatagtttgtgatcacttgaccaaattgaaaatagaaaatcagtttttattaaataaaaaatatgcaaatgaggagtttttaaatcaatttattttgattattcatataagtaaactcaattatgattatattatatatgctttttgtttatttatttagtacttagtttaatgatttacaaaccaccatgtataataggcgacaagggagcttcgagca

SEQ ID NO: 55197 - DNA, 275 bp, Populus trichocarpa
  Intron number 1 from transcript POPTR_0013s03860.1 (locus POPTR_0013s03860) derived from phytozome v7.0 (chr-ID scaf fold_13; pos 2517878 to 2518152 reverse strand)
accaagaaactgctccacccatcaagtaagtttgccagcttcttctcttcacaatgagaaaaccctagctagaggcctcgatgaattgagtcaaaacatgttaaatatatatattcttgtttatgccttctagtgatctgggttttttagtaatttgttgatgattagatgtttgagggttatgcatgcatggttttgattaatgagctaattatagggtggattggtgtgattttatagggcacaagtggtagggtggccaccaatcagatctt

SEQ ID NO: 55198 - DNA, 561 bp, Populus trichocarpa
  Intron number 1 from transcript POPTR_0006s04560.2 (locus POPTR_0006s04560) derived from phytozome v7.0 (chr-ID scaf fold_6; pos 3107439 to 3107999)
tccctccatccccttccccttcccacaaattcccagtatgtcatcttcctttcctttttttacttatttcaatacagatcagaacacccatctcccattttgacttgtttttcattttcagttatcatttgctaggttttttaacagtcgaagttgtttcttttgaatactttatattcttgtatataccaaagtttcttgttttttgtgtgtatccaactgggagacttgttttgttgattaatgataataaacccttttattatattcccaaaatcttatcaaagtagtaaactttactgaatcggaacttcctttgatatgtttttatccaatttctctgatttttggatgaaaatggactaattttggcaagtcatactattgttgttagcttccaaataatgaaatgatcaactttgcgtatgaatgtgcggtcttttgacgttagactgatggttcttgatgagttgcagtatttatagcaagatcaaggtctaacttatgtgctttcattgttgaataggtgctgtattggctctctggtcttagctgcaccga

SEQ ID NO: 55199 - DNA, 734 bp, Populus trichocarpa
  Intron number 1 from transcript POPTR_0006s15030.1 (locus POPTR_0006s15030) derived from phytozome v7.0 (chr-ID scaf fold_6; pos 12505136 to 12505869)
cttgaatactgtagacgccgtccgccatcaagtacgtatgttgaacacactagcctattttctttacatgtttatctcagtccaaatacttgttttatttttaattttggtctcttaacacgtaattattttatattagctaaattttgttttattttccaaaacggagcttcaactacgcaccaagaacgtcttttaatatacaaactgctaagttaaattttaaataaattaaagtaaagggatcaaattaaaaaaaaaagttgatggatcgaaataaaaaaaataacatgaatttctctcttgaccttgaaaaaaaaacatgagtgaatatttcttttagttttaaatttggttacgaagaacaaattattttaaattaattaaataaaaatttattttataaaataaaaaattaatcgaggaacaaaacatttttttcgatgcctcaaaagttttgtatacacacgtgaaaaacaaatcatcaagaaatcgtagaaaatcctaggaaaaagaaaagaaagccggtgttcgaacagtggattccctcacagatgtagggcagggcccaaatttacttggagtacaaactgttagatcagataaggaaaaaaatttaaaaggttctctgattctctctgtcccatgtaacatattattctgcatctgcctgcgtacgcgggtttctgataatcagagtgagaaaaagaaaaaaagaaagtatttctcaccaa

SEQ ID NO: 55200 - DNA, 123 bp, Populus trichocarpa
  Intron number 6 from transcript POPTR_0006s12360.1 (locus POPTR_0006s12360) derived from phytozome v7.0 (chr-ID scaf fold_6; pos 9523249 to 9523371)
ttctttgtgtgacacagaacaagaagtgagtctctgactgacaaactgatgggagtgacaataatatgaagatttatcaatgggttttgatttttcttgaatatcttgccaggttcaacaaca

SEQ ID NO: 55201 - DNA, 870 bp, Populus trichocarpa
  Intron number 1 from transcript POPTR_0018s02050.1 (locus POPTR_0018s02050) derived from phytozome v7.0 (chr-ID scaf fold_18; pos 1831579 to 1832448 reverse strand)
cttgtagctggggcaaagcttcttttcttaacctggtaagcttgtcaagtagtttgtgagaattgcagcatagcttgagtttttactattcctttctttctttcttttgtcaaatattctctttgttctctgttccatgtcaacttgtctgctttctagatatacttcagacaattataactaagaatccaactagcagataaactgtggtccatcaattaattctttcctaaatccatttctaagttcataatccatcacagtaatcaagtttaacgcccacataggtgtgctagctgtgctttacttgtagcttgcatgagaggttcgtggttgcagctatgcaaccacaacatcattgaaaagcgaatgcttgtgtgaaactgtgtatatatatttatcattaatatatggttcttctcagtttttttgttggcaattactgtcctataaatccttcacacatacaatcacctttcgggaagctgcatattctcaaatctgccatggcaagctgaaagtaaagcacaatagcaccactattttacataaaaatttgactctctaagccttccaaagagaaccagacaaatagaagttgacatttattagaagaggctaaatattcatagtgacagtaaaatatgaaagaatgtgataaagaaagcaattgttaataaagagtaaggtaggctatggactttctctctgtctgcgtgtgtgtgttattttccttgtctcttttacttttctttttgttttttttttttcaagtaagatcatcagatatggacttaatatatttctttttggttctctttctttctttttccaatttttttcaggatcttaccaacccaatattgttga

SEQ ID NO: 55202 - DNA, 516 bp, Populus trichocarpa
  Intron number 2 from transcript POPTR_0013s03000.1 (locus POPTR_0013s03000) derived from phytozome v7.0 (chr-ID scaf fold_13; pos 1819073 to 1819588)
ccttggggttgttgtttttgtggactttggactctgtaagttcctcatgcttatctaaatttgtctcaaaacctatctccttatttattatgttactgcaggcagcctttggatactgaattttcaccttaacaatgcatgcataaatataatcatggttttggtcctacttgcatgcatttggtcgtaattgtgatttatttgtcggtttaatttcttgtccactcgctttcaaagataaggttgtttccaaattcgttatgtttctctattgcagaaggtgtgcctggctgcctgcacctttatgtactgtcaaagatcacttcctcgctattttcttgtataaaattttgaatgttcttcctgagcaagtagtgagaacttgaaccagaatccccgagacccctagtctactgtctattgctgctataaatttacttgtcttgaacaaatataagttggcaccctctatgttattttagtgtctaatccagtggattttgtaggtgtctttta

SEQ ID NO: 55203 - DNA, 805 bp, Populus trichocarpa
  Intron number 1 from transcript POPTR_0013s06100.1 (locus POPTR_0013s06100) derived from phytozome v7.0 (chr-ID scaf fold_13; pos 4512263 to 4513067)
cctctcacgtgccactcacgagaccactctcaaaggtactactggcttctgatgtctcctccattttattttgctcgcttcttgattgattgctgtgatctgtcgtggtgtagtgctctttttggttttggacaaacaccgtttggaaataaaactgcatgtaattgtggggtcttttttttttttaaaaaagaaagttttcggagctaaggtgctggcaattgaaatctatacagtatattaatttcttttttcttcggagttgatgggtttgttagggctttattttttggttgtgtagtgtagtgaagtgaaaataattattctaacaaaaatctgtagattatttatggggttttgttaaaatcgctactggtaggcactcttggtattatatgttgggtttgatgtatataaaatcgtttgcctttgataaggaatgttgcttgttgtagctgaataggcgtcttttttttgtgccttttgagttttggaaggtttaatggagattcgaagtttcttgatatcgtaaacttgaaacaaatcttttcttggggttgttttcttcctttctactcttgaatcttagacatggtttgaaatcgagggtctgtttaggtagttatagtatgccttagtgctgcttggttgatttatgtttttcttcatgtgattgagagcatttgtttgaagtcttaaatcttctcatgtactttgagtgattcgtttttttctactttgaatgattgataattaataatgccttctacaattacaggcattgactccgagaatccagctgtag

SEQ ID NO: 55204 - DNA, 787 bp, Populus trichocarpa
  Intron number 2 from transcript POPTR_0003s07100.1 (locus POPTR_0003s07100) derived from phytozome v7.0 (chr-ID scaf fold_3; pos 8703768 to 8704554)
caggatcctaaggtgatgtcatgtaagaataatttatatattcccttggcatgacgtgataagtttacaatctactctataattggatccagttttcagatgaaaaactttgatacaagcttaagcaaaggaattgatgaagttttctaggacattcaatccctttgtctctcgattattgccttaaaaatgcaggcctctgtagctagccagcagctgaaactcttcctaaaaaccgtaaagaacccaaaataatgcttattctcccatatctggctggtcctcaccaagtgccaagaaggtccttctttgactgtaaattgttcagttacactagtctatgatattgtggtggaattaattgagtagccaggaggatttactgcaatgaccaatgatcaacgttggccttggcacctgacttgttggtgtgcacaatgttaagaaaaactgtagttagcaactgattgtatcttttgacctttaattgatttgacatttgtttctctgttcttttgagttcgcactttgtctcaatcgctttacttatggttcatccaggatgaacctgtccttttcctgaccattcataagttaaatgatcttcttcatccgactcaccttcatggacaattttacttttacattattgttttagctaatgtattggatacaacattaatgtatgcatgatatggcttcacagatttcgcatatgatgactctatgaataggattgacatgttaaattgtataattcactcaaaatttggctgtgcagatcaag

SEQ ID NO: 55205 - DNA, 661 bp, Populus trichocarpa
  Intron number 2 from transcript POPTR_0003s06550.1 (locus POPTR_0003s06550) derived from phytozome v7.0 (chr-ID scaf fold_3; pos 8039817 to 8040477)
gtggctggatccaacccctctcgatcgttcatcatgtagaaggtgtttttcttttttaatttctgatcttaagatcaatttcagttatgttagattaattgccattcttttctttctttcttaatttgcctctaaatattttcgtttttttttaatatatattttccttctttttgtttcaagccgtaagaaattaagtttaaataaaatgtaatatatattttcttttcttttttccttttcttctatacaatctgatctcagacttaaatcggaatacgttagtgaatgcaagaaaagtatagctcgtcttgtttttttctttatttttcttttatttattatgaatattcaagcctttcttgtgagatatatgtgatgtttaagaatggagctgtgaaattagttctttaaatgaaccacttgtacaatctctccgatgggtatattggggttagattccaaggaacccattttcccgtccaacaaattatttgcatagatataaaacttagagataatctaaaatcctagctgaatttcgcatcgaaccgatatcttattaacaaaatcaatatgattttgatatatttttttaaaaatcaaacaatactatatattttcagtattttttttaattcaaaacataccatatcttttt

SEQ ID NO: 55206 - DNA, 546 bp, Populus trichocarpa
  Intron number 1 from transcript POPTR_0006s25960.1 (locus POPTR_0006s25960) derived from phytozome v7.0 (chr-ID scaf fold_6; pos 24261018 to 24261563 reverse strand)
atctcagatcttcctctcctgagaaagcacacttggtgattactctcactttctcttttcattttttttcttgtcttcttgtaaaatgtaagaaatgacaggtgagaaagaaaaacagtggaaatgggaatatgggtttttcttgttttttttttggtagagaaaaatgagtgattggttctgttcttgggtcgtatagcaagctcaagaagaattaaagactaaagagtagagaaatacaaaaaagtttggttatttcttttatataaagtcaaagaatttgagcttgattaaatggttaagtatcataatattcaatttgtcgttgaaattttgactgatggttttaaagaaattcatttttggaagagtttggaatttcttttagaattatttttcgtaaagttcagcttattacagaactgaaagtttggttgaattgagttgttaagagttataaagttatgatttttgctcaatttctttagtagataaaggagaggttgcttatttttttcttttttgtttgattaatcaggttttaga

SEQ ID NO: 55207 - DNA, 596 bp, Populus trichocarpa
  Intron number 3 from transcript POPTR_0003s19370.1 (locus POPTR_0003s19370) derived from phytozome v7.0 (chr-ID scaf fold_3; pos 18118157 to 18118752 reverse strand)
tctgcaaggatctgactggtatccagcaaatccaggttagtttggaattcctttactttttagaaaagagtactgtgtatgtgtttcttggaatgtctatcaacagtgttcgatttacgttgtactaggttaggtaggtcgactgtccctttaaaagaccagatagtgcgtgactagaaatttatattaccctgggagtgattaccaacatttactttatgaggagagagagacaaatggaagagagagaaacattggcatgaaagaggttttttcactttctccatctgctttttgtctcttccttgtaactctctatctcctcatggagtattgttagttaatcctgtaggaatataaaatttctcgttaaacactatctcttaggttttgcgacgtgaattattttattactttgaattgcaagctggccacactttttaaactgttgcttacttcaactagtttcttagaattttctttacgttaatctctcttctaaactttttgatgaacatcatgttgcctctatcttattcttgtatttctgtgtggctccaggtggacagaggtgttactcttagtgaagcactcct

SEQ ID NO: 55208 - DNA, 366 bp, Populus trichocarpa
  Intron number 3 from transcript POPTR_0003s05440.1 (locus POPTR_0003s05440) derived from phytozome v7.0 (chr-ID scaf fold_3; pos 6710954 to 6711319 reverse strand)
agcttcggcaagtgattcaagaggatcagctacaggttggagttcattttttcgattgatttcttttgcagtcaaaataattaatagtggatggaattgaatttggtttcttgacgtgttgcttttgtctatcatgtcaactgtactagtctaatttgatgaaagccaatgtctttacagtgagtacttgcatattcttttcgaataatagtaagggcatttggcttctttttcaacagatgtcggggtaggagtctttatattatgacaagctcaatgaagtggtctggttatcgggtttcaactagctaaaatttaaagaatatgaaggcctaaaatggtgatattcggatctcgggagcagtt

SEQ ID NO: 55209 - DNA, 916 bp, Populus trichocarpa
  Intron number 1 from transcript POPTR_0013s00630.1 (locus POPTR_0013s00630) derived from phytozome v7.0 (chr-ID scaf fold_13; pos 306565 to 307480 reverse strand)
gcaaagattacaccccctatcccccaacaggtaattagttttctctatatatcccttatcttgtagggtggctccaggattatcagaaaggtaccagatgacgctaagaatcctagctagctcttgagtctaaccatatctcacagtgatttctaaaaagtctaaccatatctcactgtgatttataagaagttaatgaaataacaagtagcaacattcttcattttcctcggaagaatcagaaggaaacttgtgtgtactaacaagggtcagttttgctctgcagtctgatgaaaatcacaaggactgaaatgtagtttcaaaggttgcaggcctgtgaacatgaagcattcatttgcctcatttcagatcatgtttccatccatggtctgacagactcttagactttatgttaatgtccttgaatgcactagcattacatttttgtagatgaatgatctgctaataaggtgaacaaccacatcagttatttttcttgttattgctagaagtagacaagaatgtgaaacattagattagaatcttcattttggatgtcctggagcttctagttttgtctctttcagttcatgatgatcttacaatttttctaaagatgcctcagaatttgactatgtttaacagttgaactttgttaattaattaattaatcaaaaacttgatgacttatgagttgattctacccttgttatttagatgtcttttatttaagagacagacaaaaaaaatcataaaaagatttaaaagaaaactcctataccgttttcctaatgtaacagtgtcaggcctgtacaacctgaccattgacacacacctggtcaataagcatgtagtttaacagaaactgggatgtgttgcaggcagtccggttttccaatataaagttgacaaggaa

SEQ ID NO: 55210 - DNA, 773 bp, Populus trichocarpa
  Intron number 1 from transcript POPTR_0003s05450.1 (locus POPTR_0003s05450) derived from phytozome v7.0 (chr-ID scaf fold_3; pos 6718832 to 6719604)
ccctctctctctcaccttccatctgcttttcaaaggtacgacgccttctcaataaccctatatttatttccttctaaacacgccttgaacagcgtttcgtcaattagctatcaaatctctgattttgtgttctctctctcttcaaccttctttatagatctgtgagtttctatttctaggtttagctcaaaagatttataattttttcattgatcgtagtgttttgtttttgatcgagcctctctctgttagattcagttgattattttttcaattattttcctattgttttcagttactgaataataattaatagcaacaaactattatgatgtctttaggcttatttgtggtataattcatgaattagtaattgaatttatttattttgaaggatttatttattcaaaatgggtttaagggttttgcaggtagtgcctcatgctaatggtaggaagttgtagttttctttctacttgttgaggctgtgtgcttgccttttatgttttctatctaatgtaaaataaagaaaagtaggaatctttttgataatgtgcgtgttctggttctagtcttgggttcattgggactttataatgttgtgttttactctgattctaagattgttgggattattggtactgattcatgcattgctcgatgatcttctgtgatgattatgttattttttcttattttttagtggcattgtttttgatttattgttgttttctgcaggttgccacataacttatagggataactgatttata

SEQ ID NO: 55211 - DNA, 794 bp, Populus trichocarpa
  Intron number 1 from transcript POPTR_0006s01810.1 (locus POPTR_0006s01810) derived from phytozome v7.0 (chr-ID scaf fold_6; pos 1090377 to 1091170)
acacctgcatctcacacagagagaccaaaacagtaatgaaatctcttctcttttgtttgtttttctgttgtgctttatgaagataaatgtttgtggggtttttctgttctggttttttcattgaacaattatcggttttttttttagttttgttttattttattgttgtttgctctaaattgtacaagtcttaaatttgcatccatgatcttgttgcgtgttcttggtttgatcatctcttgcatgtttttgatggatcagttgttctgtttcagtttaattgatacattgggtctaaaagaatgtgaaaggaggctccttttgttgaatcttgaataaagggtttggttttagtggatctttttgctaaaactgatcaagtttttatttttacatgttctctctttaataaaactttctgcttgttaaataggaaaatgaaagtttcaaattggagaaaagaaataaaataaaaggcatgtaaaggaaaaattagaaatggatattgctcatatcagttgtgtcacagaatggatattttgattttagtttcaccatttcactgaagaagcttgtgatagcactatagcagcaaaaaaattcatctcttgttgtgattttggagtagttttgcagttttgtttgtcgtggtttgaaggttgatatgatgtcaagctttgttagtctagcatttatgttcttttcctggttagataggatatatagaaacttgttttgattatcatttggatttgacagacaacttcgaagcgcctttccgagaggaaagtggc

SEQ ID NO: 55212 - DNA, 922 bp, Populus trichocarpa
  Intron number 1 from transcript POPTR_0019s02460.1 (locus POPTR_0019s02460) derived from phytozome v7.0 (chr-ID scaf fold_19; pos 2250906 to 2251827)
taggtatgttttcttccttgtttttgtagtttttgccttggttttgcttgtttctggttagttcttgttatgggtttggcttgttgggctcctgttgaatttcatcatggcttccatgatgtaggttggagtagctagtatcctctctttggtattaacttgataaaaatgtactgttttagtataattttcctctttttggctggtggcccaggttagcttcaagatttctttctttagagcctgattaccagaatgcttagaggatggcaatggtgtctgtccacattttgactgtttatccaaacttacagtttcaagcaatgtccctagctaactctctgtgtttttgccttttggtttttctagatttcccatgtcccaagcccatataagcatttttaatctagttttatgtgtttcaagataccagctaccaaggaaacacactttcttgagagccacaggggagacatcaaacaaaaaagagtgtgcagaaacactttgcttcctaagcgtgccttagttgatgctgtaggaacctatttgcgaggctgcttatggtaaagagcatattacagcagctttgtttccttcttcttgcccttttccccccctctctgttggcctggttatgatccaatcaattaatctcaaacggttggtcctgtggttaaggagacatgctcatttctttgatgttttaggtttggatttcagggtcgacgtttagaagaatttattaaatttttatgaacgtaggagattgacgtgaagaatttgtactgtgtgtttagatttcattcccttcaggatttttgatagaaatcttgaattgcatcattaatgtttctgagatcatccctttttaaatatttctttgtccctttgattttctctgtccaaacatttagtcctgaca

SEQ ID NO: 55213 - DNA, 472 bp, Populus trichocarpa
  Intron number 3 from transcript POPTR_0006s19320.1 (locus POPTR_0006s19320) derived from phytozome v7.0 (chr-ID scaf fold_6; pos 18359732 to 18360203)
ggagccataggaaatctcactaatcttcgccaagtgtaagaactttgatcttctcttctttagtctttctttctctttcaattttctttagctcacattttgataattaaaccctattctagtttctctgagtttttggtttttcttgtcatagaaaaggaaggtgagagaaagcatgtgaatctctgggtcttgaatttgctttttagtttggttttctagatccaaatatttggctttgggctaaactccaaaagtaaaacggaatttcaagtggctcgaaactctgcttctgcaacaaaatagagagcaggagtatccttgttcatttgttcaagtatagaaatgtaaaatagcgagtagtattttacaacctcatatatcgccttatgattgatactgaattctttatgtttcaacttcttggtgatgtgaaggttgttgcaaaacaataacatctctggccaaatcc

SEQ ID NO: 55214 - DNA, 427 bp, Populus trichocarpa
  Intron number 2 from transcript POPTR_0014s07510.1 (locus POPTR_0014s07510) derived from phytozome v7.0 (chr-ID scaf fold_14; pos 5647331 to 5647757 reverse strand)
gtgttgtctacaaagccattgatactcaggtaattaatcttacctggattttgtcccttagaactgggaattttgaatctttaggttctgttgtgtttgatttatgacaaatgtataaaaactgaagaaattttcaactttttagggtttgttttgtttgcttatagagaaattaaaggggaaaaaagaaaagaaagaaagaaagctgcttttgattttggttttcagggagttattttagttagtaaaaatactaatttagttttacttaatttgatcagattttaagttggtatgtatagggtaattgtctgaaataaataaaaaatgggggcttaggttccataaggttgtttttgtatttttaattgatagtgttgggcatgttgcagactgggaagactgttgcaatcaagaaaattcggct

SEQ ID NO: 55215 - DNA, 533 bp, Populus trichocarpa
  Intron number 2 from transcript POPTR_0018s03330.1 (locus POPTR_0018s03330) derived from phytozome v7.0 (chr-ID scaf fold_18; pos 2944776 to 2945308)
aaaacgtgttctcgttgcaaatctgtgagatattggtaagtatttgctattttcttgggctcttgattgttgggttttctgttttggattcttttgatgttggaaaataatgggtttttgttgttttttggtaattttgtatggttttgtagctaaattagtgatttgtagggtaattaattgtgtggtacattctgtttctttatgtttcatggttacttttttagggtgtctgaggtttcttgtttcctgggttttggtcaagttgcaatcttgttttggttcttatgattttgggaattaatgggttcatgttgttttttgggtggtgtaactaaaatagtgattttaagggtaaataattgcatggtatgatttgtttctttatgatttcttgttgctgaattagcttgcaatcttaaagttaatttaatatgtaggttttaggtgcagattttctttcttttcttttcttttttccagcagcataaagtatatggttgttcttgttttcttttccccagctcacaggg

SEQ ID NO: 55216 - DNA, 730 bp, Populus trichocarpa
  Intron number 1 from transcript POPTR_0013s00280.1 (locus POPTR_0013s00280) derived from phytozome v7.0 (chr-ID scaf fold_13; pos 64010 to 64739)
cactctcatcaaatcagctgctgctaaaggagcaggtaatttaacttttaaagattgcttcttttcattttcagaaaccgaagtttgcttcttcttctttattttttttaaaggaaaactaaatgccgcttttcattttcctatgtcttactgatattgatatgattcaactttcagtatattgtcagattctattttttttggtttctgagttcttcaatgatttagatttgtttcctccttatttattttctccttttctacctatttttgcgaggaaaaaagtaaagaggaaagagaagaaaaaggaatttaaatattacttctatctttgcgaggaaaaaaataaataaaggaccccattttgttttaattttgatatgatatacatataggcagagatgcattttctatgttttctttgttatttgacagttctgtgggcacagagagacatttttgttccatcctctgttgttttactccaatttctttacttattatcacagcaatagcaatgtggttggtattgttgataatcaagattcaaattttcacatttttttttgttgatattccctcaaatctcttacattcaaatttattaaaacaaatgttgttgttagtttttaagagctgtgacatgaaagatattttaatgtattttgcaatgatgttttgtctcatatcttgtcctaattatcatctgtcaatcttgcagtctgtttgg

SEQ ID NO: 55217 - DNA, 736 bp, Populus trichocarpa
  Intron number 3 from transcript POPTR_0013s05000.1 (locus POPTR_0013s05000) derived from phytozome v7.0 (chr-ID scaf fold_13; pos 3536618 to 3537353)
ctcaaaacttgtacctgcttattgaaggagtgcaggtaatccaaatcggttaaaagattttttggaattggtaattaggatcatatcatgtaatttcttgctgagttaatttcaatggtaaccaatgggtccactgcactgctggccaacatatcaatgtagctaactctactaatttagaatgtttacctcaagctattttcctatgtgcttgggatttcccttactgttattttgttggtcaaatcagagcttctaacttaagaaacagaactagtggtaaaaaaacttcttttgagtagtttggattgcagagtaggtcaaatatcagacaccatgaagtggtagagaacagtgcatagcataaatctaatagaagttaatttctttctaacttttcattgtaaaaatatccttaaaacctgatttaacattttatgtaggatatatttctgtaatctgtctgtatgttgtttatgatggcctagtgttatgcaatttagaagatacactagcataataatgggtttaggttagcattttatgctggaaaaagagtgagatttgatatggagatggtgtggtattggtgggaattagttgctgaaagttttggtagtatagagatttccttccatttaacctacaatttcatttggatccttcatcattgacttctactaccggcttgttattgtcaggctagaattggcaaagtgtattgcaaacccatctt

SEQ ID NO: 55218 - DNA, 516 bp, Populus trichocarpa
  Intron number 1 from transcript POPTR_0019s11730.1 (locus POPTR_0019s11730) derived from phytozome v7.0 (chr-ID scaf fold_19; pos 12960630 to 12961145)
tccttcttcgacaaaggctttaaagctgccaagtaattcattctatccttctctattttgtttttgggtttttgttttcttgctttaatcatggttcaatttggatttggaattctgggttttgtttggtttctgagaaaatgttaacttcagtaaggaaattcagaacttaacgtttcattaaaatcaagtgacttaactcaatgtgcaatcttttctttttttaatttgttcttctttgcataaattaaagaaataagagactataaaaagttgagaattaagaatctgggtacttatctcgtgtgttgtagatatttggttaatgtaaaaagtaaatagaattcattgaggatttgaagggttcatacttgtttttgagtgcttatgttttgattaaatgctatcattgactatttttttggggtttaaagatttgatgaggactattgttgatttaatttgttcttcttgtatacagtaaaaccttactgaagttgacaataccccggataa

SEQ ID NO: 55219 - DNA, 422 bp, Populus trichocarpa
  Intron number 3 from transcript POPTR_0013s05120.1 (locus POPTR_0013s05120) derived from phytozome v7.0 (chr-ID scaf fold_13; pos 3634810 to 3635231)
cttggtgttgactatccatttcctcctcacttggagtatgtctacctttctgttcttcctaaagtttcttatttgattaatatttttgtgtcaacgttggaaagcagtgccctctctgtgaatgccatggattttcttgtgatggtagacattgatggcacattatttgaggcatgcttcttccttttttggtgtccattgtccacatgcttaatgttaaatttcagttcaatgcgccaggtcataggaactggcccttgatagcactggctggtctctaattaagtaagactgtacattttggaaactgattatagcgtcaaacaattaactatagagcaacaaaacatcctcgttatcctttgttatcatggtatgctgctagaattgcctagatttgatcatgttttgtttgtacaggt

SEQ ID NO: 55220 - DNA, 710 bp, Populus trichocarpa
  Intron number 1 from transcript POPTR_0003s11390.1 (locus POPTR_0003s11390) derived from phytozome v7.0 (chr-ID scaf fold_3; pos 12216289 to 12216998)
cttttttagtagactctttctccatctctagcttcgtatcttcctcttctgcgttctctatttcaacgaactttctttattgatgtaaaaatgatttagttattttaatttgatgtaaaaaccatagataaaactttgatcaagataaatgagttttgattaggtttttaaatttcttaatcaaatagcgtgagattcaaagctcaattatggatataaaggaagttcgtattttttttttcaattttttttttttgaaaaaaaaaatggattgaaagggtttatgtaaggagagattgtcggtgtatctattttattcggatcaagctgtaacttataatatttatttaattaccatttaagtatcataaattttttttctggaaaaaaaaattagactagagcatattcatcgtgggcacaatcggtgaccacctaattttttattttaattctgatatatatattagttaaaaaggttttttttttaccagaagttagttaaaaaaaccgatatatgaatatattataaaaaatatcatattaaattatcatatacatggaggtggatacataatactcccaagacggacgtttatttttcttcctttcttttccaagtatctccaataatgctttcttttcttttcttttatgatgatatgacaacgacaggacatcgttgtcggtggcaccgacacaacctcaac

SEQ ID NO: 55221 - DNA, 466 bp, Populus trichocarpa
  Intron number 1 from transcript POPTR_0013s10490.1 (locus POPTR_0013s10490) derived from phytozome v7.0 (chr-ID scaf fold_13; pos 10787814 to 10788279)
gtggtatttctgtaaggtgcctttggcagagagtgagttttaggcttttagcttttttttagtcagtttattcacgttttgttgtttgctagtacttgctttgtttgatgttaattaatttgccttggtttatgataacagcagaaaatttcctttttcagagcattttaacttttaagattctacttattatgtagaaaaaaaagtacttgtgattatggtttgcttgattttttttttaatttccttgccttgcttggttccaaaatgcttcgtttggcctaaacacatggaatttgatgcttggcttaatgttccttcatccctattagtttgtgctaatttatgagaagaaagaactaacttgctaatttatgaagggaaaggaaaaagaaaaaaagccctcatttttctttttggtgtttctgcagagttagctgcctcagtcccgctcactgagatagtg

SEQ ID NO: 55222 - DNA, 654 bp, Populus trichocarpa
  Intron number 1 from transcript POPTR_0014s17980.1 (locus POPTR_0014s17980) derived from phytozome v7.0 (chr-ID scaf fold_14; pos 14568542 to 14569195)
agccactcactcgtcctctcaaagattgttccattgtatgtatgactctttcattttcctcttcaagattcttttctggcttaatctgagcatgaaaatggaaggtacctaattaagggatatgacaatttaaggggaaaaaaagaggagtaaatgaaattcattgctggactatatatatattcgtatgatttgagagattatctgaaaatcttgccgtgctataatggcgtgcatgttttgttattttgaaaaccttccctgcaaatgtaaaggtcctattcagcgtggcagaggaatagctgaaaactgttgaaatttggtggatgaaattgagaacattgggatttttttgcttgttattaattcacctgtaggctatggcgataaggctatttgcttgcttcgcatttcacatttgatatggaagagaaagaaacaatcaaaagggcaaaaccctcagcattttttattttatgcttcatgcttaactcagaacattaattcttcattctactttttattgatcagtgaggctgatgaggacgtatctcagctctttcaactagaactggaaatgtgagtcctggttaataacagtatcttatttcatgaacagggagcttctaccgcaaaatatatagtacaacaata

SEQ ID NO: 55223 - DNA, 794 bp, Populus trichocarpa
  Intron number 1 from transcript POPTR_0019s08940.1 (locus POPTR_0019s08940) derived from phytozome v7.0 (chr-ID scaf fold_19; pos 10504858 to 10505651)
aagttgtttctctcaggggttccaatcttattgaggtatggttttcttagaactgtaatgaggagccctcataacaccggagaaatttttcaggcaaaatctataatgactgttaaaagttgagcaaatctgaatacttaaaacaaaattagtattagggtttccaactttattaacctttttaattaagcatcaattcctgatgtaaagattttaggtttttgtcaaactatgtaccttgatttcacaatggatttttgtttttgagatttttagactgttaactatagactttttaaatgcgaaccctgtgtgttcacagcttgttgaaatttctttaggcgtagctaagctaacaacaaccaaaactatttatgtaatttaccttagtttacttaaccttcttctcccttgcctcttttagacaaccaaatgggcttttgccacgctcttgcattgccaagccatctctgtagcggccattgctggtcaactcatttttagttaagagcaattgtacaaggtcaataaaattacaataatgtggaatgtgtttgtaaatctatggagtggagcagcaatatcaggtgccatacttggagtggtgatgggtttttctttttaattactattatgcaggggagatgatggattgctgctactatgtgaatacaacttagaatttgcttaacatttgctcttttttctttttttaattccctcttcaaaatggcgttctttttatttcataggatgaggagggtttagtgacaatttgtgtttgttttaaggta

SEQ ID NO: 55224 - DNA, 592 bp, Populus trichocarpa
  Intron number 1 from transcript POPTR_0003s21120.1 (locus POPTR_0003s21120) derived from phytozome v7.0 (chr-ID scaf fold_3; pos 19402020 to 19402611)
ctcattctccgcctccatcgcctcctaggcaataggtacacacacactgatccactcagaaaaaaaaaatatggtcagttagtgttctttcaatacaatctctatctgggtttcttttaaattcttcgtttctgagtttggtctctctctctctctctcattttggtttagttgatcagtatagctagctaggtttagggtttcactgtaaatatgcagtagcttttgctctcgtttagggttaggttaattaacatcctagctaggttttgatctacgtatagtttacattaagtctctcttcaattgatttgttcttctttagatatctctcgctctctctctctctctctctctatatatatatatatatatatatgaatcttgtatcatcactgatctagggtttaaattgcaacttttttgtttgaagatttctaataattcagctcgaaaggaaagttttatgacttcaatttgaaaaagaaattgagctagatcttagcttggatcaccagctacttatgttgatttgatcaatggattgttttctttaggtggtcattgatagctgggagaatcccagggcgta

SEQ ID NO: 55225 - DNA, 297 bp, Populus trichocarpa
  Intron number 1 from transcript POPTR_0019s05040.1 (locus POPTR_0019s05040) derived from phytozome v7.0 (chr-ID scaf fold_19; pos 5267482 to 5267778)
aaggccctccttctgaagtagtaggtgtgttccttttcattcttttcctttagtgaatttgttttttttttttctgtatttgatttcttgtttgtgtcagcaaaaatgatgcataaatgtgttttaaagttttgaattttgaaagctaatggttggaatttatctgtaaatgtacgggatggtagttggtgagtgagtaaaagattacaacttttgatagtatcacattaaggagggattggttgttgttgattgattgatgggttttgtgttttgtagaggtctcatcgtttcttc

SEQ ID NO: 55226 - DNA, 677 bp, Populus trichocarpa
  Intron number 2 from transcript POPTR_0003s09760.1 (locus POPTR_0003s09760) derived from phytozome v7.0 (chr-ID scaf fold_3; pos 11001216 to 11001892 reverse strand)
ttgtgcttgctcctacaagagaattagctgatcaagtatgtattttatttccataagctgtaattttaaatttgtatcccataaaaagctggcatatgcatgctgaagtttcttcctttgagcatgaattgtaagaggtacacaatcttctactatgcaagtgaagatcatttgagaatctgcagttgaatgatttcagcaacatgggtgttgctacaatttttctgggctcatttttcgcagaagctacagcagaggttttaaaacttcgacaaatgcttttatttttccatcaaaagaaaaccgactgtctgcttacgaattgagaccctttgtgggtgccagcaggcaatcacacctcatttgattgttgaaagaggacgatggcatgtgggaaaaatatataaagccagtgctttaccttgaaaagaagatcaactcgtttgtcattgacaacatggaaacaaatatgttggtttgggtagaaagaatttgtattgattttctcattgtagtccaatttgtttccctctttttttgttttgccaacttcactatacactatacaaatgatcttttaaagttaaaacttttgttttaatttgattgttgaaactcattggtagaaaatgggatgattctttatcttttgtgacagatttcagttgttttacgtg

SEQ ID NO: 55227 - DNA, 615 bp, Populus trichocarpa
  Intron number 1 from transcript POPTR_0006s04760.1 (locus POPTR_0006s04760) derived from phytozome v7.0 (chr-ID scaf fold_6; pos 3295058 to 3295672 reverse strand)
caaagcttcctctgctgagccctctccttctccaggtcccctcctttctttctctgtgtacatggttttttagtgtgtgagagatgggagtgattttgatatatcttgttgattggtggatttttagatgttgatgtgttgctttagcttgtatttattaatttctgtgctggttgaagaccctttttgtgtttgatacttcgaaaattgtagtgtgagaatcttgttcattttatatggttttcaagaagatgcctttagtaccattaaagatatggactttgaatgatttagacaaagaagtcaaacttttcttaagtgatgcccgtattgttaatttgggtagaagtatctatgttaacttaaatctaatatggctgttttgtatgttagtttttactttcagtttggggtctcatctttaatttggaagcaactgattttgatacaatgtatttagaaccttttatctctagcaatctctttctctggaaatgattatatgactgattttcaagttttgattttggtatataattgtgttttgcttcctcaaaacaaccatgccatggttgttaatttggtgtttgtttcctgcaggcaaaggtattgaga

SEQ ID NO: 55228 - DNA, 689 bp, Populus trichocarpa
  Intron number 3 from transcript POPTR_0003s17930.1 (locus POPTR_0003s17930) derived from phytozome v7.0 (chr-ID scaf fold_3; pos 17165546 to 17166234 reverse strand)
tcgttgtcactgctgtagccaccgacacaagagctgtaagtactttcctttccttgcttcaaaccttctcaactgagcattaagaatgccttttggttcttaataaatggcaaaagctggattgaaacttgatttctaatacccttgtttaaattgtttatgtataaaagaaagcattacatttacatatcccttctccttttcaactcttcttttcccccaaattttccaaaagggaagagaaaacgacaagagtcaatcaagatggttggcaccctttaataaaatcaatagccctagaatggatcacgagtaatttcacatttacaatccagatagttcaactagtcaaattttaagtttgttttttaataattacgagtttgaattttttttaaatttttctaaaatcactaaaaacttacatgttcattaactttagggtccattaatcgagatatacataaattagtccggacaccacgttaatatatatatatatatatatatatatatatatgcagtggccaaatttattactctctcccttctgccaggttttaggtaatcacatgcacacaatacattgaaatagatgcataaattaagctgtcaagcttggcaattgtaacaaaaatttgtggccatgcacaggtgggtgagctggcgggaatcgcggtaggggctac

SEQ ID NO: 55229 - DNA, 587 bp, Populus trichocarpa
  Intron number 1 from transcript POPTR_0003s03190.1 (locus POPTR_0003s03190) derived from phytozome v7.0 (chr-ID scaf fold_3; pos 3618585 to 3619171)
aagatttcttccttttctttttcctccttgctgtggtaagtctctcttctaccatgcccaattgcttctcttattttctatcattgtaattttatattttgttctctctgttcgatttatgtaggtcgatttatgtaggtttcttgtgcttatggtttcttttgatacgaaaaattatttcttgcgacgttaattgtgttttgtaggtgtttaattgcagccagtgaaagctagcgcttaacttcacacacccacacacacacacacacacccacacacacacacacacacatatattcaatcaaacagttttgttgattgttagtaaaatctagaagtttttcctttttatttaatattcaatcaagcggttgtaatgatatgttggttggaagtaattgaaaaacagaatttatcgcgctgagttcgtcgtcgtcttcttcttttcatgttattgtttatcaagtaaaatgaaaaatgggatttttttttgctgagggagttatttgcattgctatttttgttttgttttgtgtgggtgttgatcttttgggttttgaaattggcaaggttaaagaaaaaagaag

SEQ ID NO: 55230 - DNA, 744 bp, Populus trichocarpa
  Intron number 2 from transcript POPTR_0006s12120.1 (locus POPTR_0006s12120) derived from phytozome v7.0 (chr-ID scaf fold_6; pos 9269288 to 9270031)
tgcaaattgtgagtttcattttgtgatagttggtagtcaataatttcttttttatttgggttaattggaattggctcaggttaattcttagctgagctgttcactaataaaccttattacttagggcttgtatatttgtttttataatggtagaagaaccaacaaacggggacataaaaaatgataaaattttaagtattgatagtgaaaattttgaaaacagcttttacaaaagaaaacaaaaacagaaaatggaagacggcaacgttactaaatgggccctttgtagctgctaataatgtttattagtaagaattttaaattccttgcaaatatttcattcagcaaggaatttaaaattcttactaataaacatgtttagcagctcctaagtacctaaaattagaagctaatgtgcaatggcttatctgatgtgtatttgaggaattaagccaatatgatgcacgtgaatactatgggactttatgcttatttgtattcataatcttgtaatgtttaatgcatgacttatcactgaataaagttattcactgtcaaggttggttattcatgcctcactagtttttacgatttgaaaacctagtattcttagtccttatttatttcaggtcttctaatatattgttgtttctctctcaccagtttttaagtctattttttcttttcttacgtaatgcttgatcttttgtgcttatgtttgattgtaggcattgaaattgagtg

SEQ ID NO: 55231 - DNA, 538 bp, Populus trichocarpa
  Intron number 1 from transcript POPTR_0019s01440.1 (locus POPTR_0019s01440) derived from phytozome v7.0 (chr-ID scaf fold_19; pos 1256220 to 1256757 reverse strand)
gttgtagcttcgcttcattttccttcccacaaacggtaaattacttctcttctatatatgtctagcagtattaagaaaaattatgtttcaaaactatatacaagctattagagccattagatttgtgggatctatcatccaattctgccctaagattagaatatgatgtttcataatttgtttttaattttttaattatatattacctgtctgtgtgttttttaatgataaaatcatatatatcctatgtctccactcctctcaggtcaaagttgatgttaaagtagttacacttttgtctagccgttgattgcttttattttaaacaaagaattcatcttttgatagagtaaaattcttttttttttctaaggattaagcatatagtttccaaaactttaataattgtttaattagttcagataaactagagattaagttataactaactctttgtttttttgtatgaagtaatcattttaaaatctaataattgattcttactgaatatttcactgcaggaattcattaatcagtt

SEQ ID NO: 55232 - DNA, 566 bp, Populus trichocarpa
  Intron number 1 from transcript POPTR_0019s13560.2 (locus POPTR_0019s13560) derived from phytozome v7.0 (chr-ID scaf fold_19; pos 14463724 to 14464289)
tcatctctctcttaactacaaactcttcaaacatagtaagtgtttcttcttttatttcctcttttttgtagttctcttgtgtttgaagtttcaaaaacttgtactccaagcatctcttctagtctccccatgcctatctctttctactaactttttgtgagtgataattagatctggaacagttttaagcaaaaccccactttttatttattgcatttcttaaatctaactgcttcttggtcattaaagtttgaatttttaagttgaaagttaacatttttattgattgcttttatcaactgtaaatgcctttcttttattggaattattaggtgtgctcagctttttccctgtaactgttagtgccatggagatttctttttgattttgctaatttggaaatttgagttcttaatctgggaatcttgttgaggttttgttattaaacatgctagtgcaactttgcttcaaagtcttgataggttagatgctgttcatttatctgaaaaggaggctttggctctattacagaacctccctgcttctgtttggctctttgctgttca

SEQ ID NO: 55233 - DNA, 274 bp, Populus trichocarpa
  Intron number 2 from transcript POPTR_0019s11710.1 (locus POPTR_0019s11710) derived from phytozome v7.0 (chr-ID scaf fold_19; pos 12956524 to 12956797 reverse strand)
cacatatttaccggccataccggtaaattttttctttttggaattctccatcttttgattatgcaattagttaattaattaattttataattaaatcaatagttgtgaattaatggctaaaaaacgtatttataaaactttattttgttttaatttgttggactaatgaaatggagcatttgcatttgctcaggaagagaagtaatggagtatttattattattattatttgcatataggtgagctctatacagtatcctgcagtccaacagat

SEQ ID NO: 55234 - DNA, 260 bp, Populus trichocarpa
  Intron number 1 from transcript POPTR_0014s04270.1 (locus POPTR_0014s04270) derived from phytozome v7.0 (chr-ID scaf fold_14; pos 3344965 to 3345224 reverse strand)
agtctcattccacttgtcctctctgtcgaaatcaggttcttcttcgccatgatcatcaacatcaaaatgaaaaacgttgtctcttttttcattttctttcgtttttgcaacaaaaccagctttgagttagttaatagctatataatcaatatataattctgtaattttccgatattttcttccaagtctatatatattgatcttgtcggttttattttattttaattaatgaaattaattaggctacagtattatttttc

SEQ ID NO: 55235 - DNA, 892 bp, Populus trichocarpa
  Intron number 1 from transcript POPTR_0089s00220.1 (locus POPTR_0089s00220) derived from phytozome v7.0 (chr-ID scaf fold_89; pos 75893 to 76784)
tacccattcgaacggttagatattacagttgcaatgtaattcatatataaaagtatttatatgtttttcttaattgaaaatacttgattaatatttcaatgcaggtacttgtttaatctcaagaaaaaggttaagaacaaggcgcatgttgaggcttcgatatgtgaggcctatattgttgaggagatctcaacatttatctcgtactattttaaacctcatctgagaacgagaatcaatcgcgttccacagcatgatggtggcggtgaagtgccttccagtgggaacttgtcaatattctccaatactggacgacccacacctaaaaatgtcgtaagaggaagatatttgttggaaatagagttcaaacaagcacacaactatgttctatttaactgtgatgagctgagaccttttattcagtaagtttatactaattaaactttgttagtgttgctacccaatttttgacccatgttttgataaattttcagaaaaattcaaaaatagcgaaaaacattgaaaatccaaaaaaatacgtttttaatacatttgcatcgtttttagcatttttagcatcgtctcaaaagaatttaaatttccaaagacatttggaacgcgttcaacttttaacgcgttatttttaaaatcattgattttcttcattgagtcgacgttgatattgctcgttttcaaaaaatacaaaaaaatcaaaaaaatcaaaatttacaaaaaaaagaggaaaagagaaggaaaggaaaagttgagggactagtttgaaaacctagcaaaacttttcctataaataccaagctacactgattttttaaagggggggaattttgcaattaaaaaaggcaaccaaaaaaccctaaggggaaacatttttttg

SEQ ID NO: 55236 - DNA, 634 bp, Populus trichocarpa
  Intron number 1 from transcript POPTR_0021s00380.1 (locus POPTR_0021s00380) derived from phytozome v7.0 (chr-ID scaf fold_21; pos 117763 to 118396 reverse strand)
tttgaacaacactcaccaccaccacgaacaaccatgtaagcttctctatttattgttctgttttcatgttcatgacatttgctatgcaattatgctgtaaagattgcatcttctctttttatatgtgatttatttacaagggtttgagattgaatgatggtgcttcttgtgagtaatgagtatttgaaggagatctagaaaacccattttcaattttgcatttggcttctttttagattgttgattgtgttttgagatattgtttggaaatgggaagtgaaagatttgtcatttttgttttgattgctagtgtgttgcctggattgcatgttttggttcgtcttgtgaatcatgtcctagtttccttgtgttctcctctctcagacactaacatatttgtgagcccttttgctctgattttaagttgctggcatcgtttgtctctttgtggtttgattatatgtaaacatatatatgatcaaaatccaatctttatgtttatacacatgataaaaatccaacctttattctgtatttggcctgcgctgattatggtatgttcatttcggtgtcaccagttgtatcaaagagttcatatgattgttgttttgattagatttactctgttaagaag

SEQ ID NO: 55237 - DNA, 853 bp, Populus trichocarpa
  Intron number 1 from transcript POPTR_0003s11880.1 (locus POPTR_0003s11880) derived from phytozome v7.0 (chr-ID scaf fold_3; pos 12614466 to 12615318 reverse strand)
tccgtctcaacatcatccgcaagctcaaagacaatgtacgatcgaatctctctctctcctccctaggtttttcttcgttgcttttaatttaatcactgacgttagaattgatatgccaacccaatgaaagaatgatttatcataaagcagtagtgattaaggaatctgttgattaaattttttaaagggagttttcttatttcattaataaattttaatgcaaaagcagtgtaattgtttagtaatttgggaaaggatggaggattggaagggagaaaggatagatactaacccacccacccactcatccaattagttttttgattagaagggaagggaagagaaggaaaccaatcctccccacttcccttcctacaaagcgagtgtaaatatttagtagttggtttgtgtaattatactcctttacaatatgaaaacactgaactttgtttaactttagggacactggctccggaaaaacattggagagtgggattgcaggggatattttggtttgaatcttgacattatgcattttgcttgatctgtagcgctttggcatggggagtgtttttatttggatttgcatagattctcatcattaacgtataagacctctatcggtatccccaccaaactgaacttttgtataaggtgaaaagctggatagtcttttatcctcgttgccactaactactctgaagcattgacaactgacttggaatttgattaagaaaggtctgtttgaagcatttggtgtggtcttgtgctttcttgttacttcatcagtatatctaaacaaaagttttgactggcaggaagagttgcgcaacaacattatttccattgtgag

SEQ ID NO: 55238 - DNA, 458 bp, Populus trichocarpa
  Intron number 1 from transcript POPTR_0019s02650.1 (locus POPTR_0019s02650) derived from phytozome v7.0 (chr-ID scaf fold_19; pos 2457492 to 2457949)
gttgttaaagctcctctttgggaagaggtttcgaggtgagttttttagcttcttctggagagtttgatagaaaatgacgtaaagttttgagctttatgtttttttgtcattttacgtttggttgctgagaaaatggtggagaagaccttgtttttagcaaattattgcataataatcaatctcgaggtacccatctgagcagaattgcaaaattaccgttctttttgtctattgtgttcattttttatagtctaagttaattagcattaaattttgtgtatagtgtcaaaagggtctaataaggatggctttttagctcaaattactgcgtgtgttaatatttttagttattgaatcatgtttgatattttttattggtttattcaaagtttaagccgttagtgagaccatggaatttattttttttcctattggtactgttgctatcaggaaattga

SEQ ID NO: 55239 - DNA, 672 bp, Populus trichocarpa
  Intron number 4 from transcript POPTR_0003s13370.1 (locus POPTR_0003s13370) derived from phytozome v7.0 (chr-ID scaf fold_3; pos 13770161 to 13770832 reverse strand)
agggctgcaggttcgagccaagaatttgcatcgtgagtttaactatctgactaaaggaaacaaataagcttttttctgttaattttcagttgtcatgacatttgagggttaattctcatcaggtcaaggattaagtgtctggtgagacctcaaagtgaaccttgtaagaactgaaaccttcaaaaaaagccactttcatatgctctttttcagatgcatgatatagcttagcttagtgaaagatagcatcttggttgatgagatcctctgatttcatgactgattaaccattttcatgatcattaggtgtgaaatatgatgtgggttaaaatgatgaatggcctgcttaccttggatgcccccctaaaatagactcaagattcaaaatgtagttctgtagtttttagctccatttatctggtccatttgtctttattgaacagagaaccatttgtctaagttcagttgtattgctattccttaatgataaagaaaagaaggcataagtagcattcaatttaactgtctccactagatccttttagctgaaatagttgaggagagaataattgggagtgtggttagccagaatttcttctattataaaacattcttcgacctccatggcgcattcaccattcaagtttctaacacttttatgtacacacaggt

SEQ ID NO: 55240 - DNA, 984 bp, Populus trichocarpa
  Intron number 1 from transcript POPTR_0022s00480.1 (locus POPTR_0022s00480) derived from phytozome v7.0 (chr-ID scaf fold_22; pos 180915 to 181898)
tcagaatcaggaggaagaagaagaggttattgaacatggtcaggtgactgtaaaaaaaataattccaaaacccagaaaacaaaagcattaattaattaatttgagtagaaaacctttattgtactagtaagaatttgaataaaaaaacaattgttttttttttaattcccacttgaaccctgcaaggcaagaaatgccctctctcttgaaacgtttccaggttagtttgattatcatctattgattctttacttcatgatctggtttgaatttatggaaaagatgcttaattaagctttaatcaaatgttcttttttttctggagttacaattttgggcttagatctgatcagtcttgtctcagttagtttcagtgtttaatgattttccttttcttttcccttttcatctcatttaaattgtgggttttgttttttatttctagatcatgataagaagcattggttttcagttgaagtttcaatcttgaactttttgttggaacattgttttgatagaagcacagtaagtctaagcatctgggcagattttgtttgtggtgctatgtataattctgggctgtttttatcatgtaagcagttgtatcctggatattgagcatttgtttgaaggaattcatgcagtttccaagttcacgttacaagccttgatagcttttattgattatgttaacttttcaagttgtttgtggattgtatgatgtgaaatctagcatgaaaaattatttgtgttgatcaataaatgatgttatgtgaaattaactcttccttggcctggcatctctctctttctctgtttttttttttccctgaatgtttagtttctgtgtctgacttggaattttgtaattctattaggaagataggtgggtggactgcagaactacaaagtgtcatgagggtagggaatactagcaagtgcaatacttgtcacgtgtactcatgtcgtctgccagcttaggaa

SEQ ID NO: 55241 - DNA, 624 bp, Populus trichocarpa
  Intron number 3 from transcript POPTR_0006s09370.1 (locus POPTR_0006s09370) derived from phytozome v7.0 (chr-ID scaf fold_6; pos 6885203 to 6885826 reverse strand)
gaagcaagctcgaggtataaatgtgcatgcgtgtgattttatttttatttttcagaatagacacgcttcatagttctatttcaatcgttacagaccctgattaatgcggccggccattgctttcctcttctattgtggaatgctacaagtctttgcaaatctaacaaactcgaatgtcgggtgtcttttttgaatttgactgttggtttaactaattgattattgttgtgaaccaaaataataataataataataatctttatttccacgagaatggaatttcattatggttagttgggaaactatgagcttatataacaaatagaaccaaacttctataaaatagatttgagtactttaaggctataccattaattgctgtaatggtctaattatgacttctcttaaagattaatcaacttgtaacttgaatcctattgtaaaacatggaaacatttcctttcatggatgttcagaagtccttgtgacaatagaatgagtgccagcatttttttataactgcgggcaaaaagctatggaaaaaatggatgagtgatttctggatttgttctttgtttgtttttgtttttgttttttcaatgccgtgaacttgtgatccaggtt

SEQ ID NO: 55242 - DNA, 703 bp, Populus trichocarpa
  Intron number 4 from transcript POPTR_0013s08240.1 (locus POPTR_0013s08240) derived from phytozome v7.0 (chr-ID scaf fold_13; pos 7285771 to 7286473)
gattaaggagaagctgaaagaagctgacaaatgtgagatttatgagaactagttctttaaattcttgtattttaagaatcctttgttaatgattctatgaaatatgttcgattcttgtccttctgttaatgttagaatgcagtaacattttccaggaaaacttggcactttgggtttacatcggaatgctaattatcttgaaggttcctgttgtgagctagtttatgtgctgaattaacttgctagaatgaagtatagtcctttgtagacgataatcgcttctgagtatttatctttagtggattatttttactagatatcatgagaatattggagtgtttattcatgtccccaatgttgatgaaaagtctaccaattagcaattatttagaacattgttgttgtacatattgaaggagtatgaaatagttttaagtttgtcaaagttattgggatagcttgttgagtgttatacagttgtcctaactgttacctttttgtttgatttagaatgtaagctgtctttgttgtagcatgtatacaaactaatgtggatagtgtgcgcatggattttacctttgttatttcttgaaaaattaagtgtatttgggtgtgaattggcttgtgttggttttgtactgacataaaatcttgctataaatctgcagatcttgaaggcacaacagattttaagattcaagct

SEQ ID NO: 55243 - DNA, 802 bp, Populus trichocarpa
  Intron number 1 from transcript POPTR_0204s00230.1 (locus POPTR_0204s00230) derived from phytozome v7.0 (chr-ID scaf fold_204; pos 15079 to 15880 reverse strand)
cagtatctgcacaccacgccctgccgctgtttccggtgttttttccgcgttcctccaggaataaaaaaatgttattttttcttgtttaattatttaaatatttattcatgtagttttcatgtttaaagtgtttttttggattgcacaatataatttatgtatttgcacaatcgttgtgtgatctacatatattttatttatgttgaataatatttttccatcctacattaaccataattctataagtagaatcaccttcgaagtgactaaatctgcttcaatatatttaagagtcaaataatgccactcatcagtattctaaatgcgaagagaagagtagaagcaacgtgatagctatgcaggtgagactcaataataatgataataattattttttaaaatattttttatttaaaaatatattaaaataatattttttattttttaaaaattatttttaatattaatacattaaagctatccaaaaatataaaaaaataattaatttaaagtaaaaaaataaataaaaaataatttttttttaaaaaatgtaaagacaaatgggatattcaacctcttggtgtcactattaataattgatgtcgattgatgcaaatgctgacactagcgaagaattaagaggccaataagccaaagaaagaagactcaaatgtatgtggaaaattatgccatttgatgtgatattgcaattcaactgccaacacaccacggctgatagatgctgacatcccattaactgtcttacttctcatactgatatgtcgtttaagttttactagct

SEQ ID NO: 55244 - DNA, 486 bp, Populus trichocarpa
  Intron number 1 from transcript POPTR_0006s01630.1 (locus POPTR_0006s01630) derived from phytozome v7.0 (chr-ID scaf fold_6; pos 1001786 to 1002271 reverse strand)
gtttagaagaagaagataaacagtctatagtgaaggtagtaacaggtttcattttgttttttctctttttgggttgttttgaatgtactctgcgtggttataattaagataatcaaagcataatttgaaagaatctttgtgtttaatttttttcccagagacaaggaagtaagacagagagagtgtaaatatatgaaggattcttgatttacatttgtttattagatagatttgatctgttgtttgatgtaggattaatagtctgcttggcattatagatagtgaagattcttaatttgatctattcgaggttttatcttattttttcataggaatttgatgctttgtgtcaatagttgtcagcgtcgattgactttactgtaaagaggtgtttatgaggttctgataattttcagggctgtgaatttgcagattgtatctcaatttatcagttagctcctctgaaatttacttccatcagcaaaa

SEQ ID NO: 55245 - DNA, 648 bp, Populus trichocarpa
  Intron number 3 from transcript POPTR_0018s03720.1 (locus POPTR_0018s03720) derived from phytozome v7.0 (chr-ID scaf fold_18; pos 3165093 to 3165740)
tagaagtatgttctttctttaatttgtttgtttttcttttgattgatttggtgattattgagtttctttgctcttatatttgattttgttttgttatgagttgatgattttagtgtttagttttagcacatctttcggttgaatgatcatggaaaatgacggataaactatagggtgctattgcttcctagttcccggtcataagaatgcggggcccactgttcctccatgtgggacccgctttaatgtgtaacgaggagcagtgctggtggagtgctgatagttcttcaaaaggaacaatgagggtgatttggtgaatattgtttcaacacactttagcagtcaaaagccctgctgtaggaactttagtgagcatttgatttagaaagaagtgtgtgagttgattctttaataaggtgatttagctttttatttaccttaaagtagagaagtaattctttaccttaaaggtggacattgtccgtgacaaagttctcttttgctttgattatatcccaaattttatcctttcttcattccagtgtacttgagttgaacatcatggtctcttttctactcctgtgaactgatatatcttcaatgcattgttcagggagagccaattccaattgtccatcgagtagttga

SEQ ID NO: 55246 - DNA, 408 bp, Populus trichocarpa
  Intron number 1 from transcript POPTR_0003s18370.1 (locus POPTR_0003s18370) derived from phytozome v7.0 (chr-ID scaf fold_3; pos 17472381 to 17472788)
gagcggtactgatacctgattatacgttactttgctgcttttatgaaaatggttatataacaatttgtttttgtttttagttttgttgattgaattatgctattctatgttctaattgaattgagtgctatataggagggtactcatttttctatgttttatttggggttaatgtttaattggaagatataggtgtctgtaatgtattggttacccctcgtgttgcttaactttttaggatagtttagtgtcaaaatgaacacagttgagtgataaaacttcagtgcattcttcattaatgctgttggattatgttattatggaattatttgatctgaaagtttgggttttttaatctttgctatgcattttatggcttctgataaatggtgatgattgattgagtgg

SEQ ID NO: 55247 - DNA, 260 bp, Populus trichocarpa
  Intron number 2 from transcript POPTR_0013s14050.1 (locus POPTR_0013s14050) derived from phytozome v7.0 (chr-ID scaf fold_13; pos 14381075 to 14381334)
caaattttcagcttggcagcagcttatagatcaaggtttgaccaatctctctccctgttggtcacacataatccaaatttgtatggtatctaagaagacaattaagttaagaaaagatggataactacactttaaatatattgtattgaacagttgaaaaaaaaactgtacaaagtaatcatttgatttcttgtactctctctttattttatgtggtggatgtagggtttatccaacaagggaaggaggaaggatccttg

SEQ ID NO: 55248 - DNA, 730 bp, Populus trichocarpa
  Intron number 1 from transcript POPTR_0019s04580.1 (locus POPTR_0019s04580) derived from phytozome v7.0 (chr-ID scaf fold_19; pos 4772659 to 4773388)
aagctttctttctcttatcttttattgctttcacggtactgtctctctgtttttccccttttattagttttattagcctaatttggtattatttctttgtcccatttcttgacaaattaacttagtttttgtgtttaggatgtttaacggcttattgggtattgaattcttttttctgcaaagtatgtcttttgcgtcttcttgggatttggggcttactggctataaattctttgatgggtcgtttttatttttgtggtttgtgttagaaagttgggtccttttcaggtttggatctgaagtgcattagaggcttatgaaggtgttgttagattgtttagagtttggatttgtatacggcttttacttatctattgctattcattgataccatgctatggttttatgtgtcttcattgttgactgagaaatctagaggcgctgaattgtttgcgtagaagaactacttgactgtgtgatgttggtgcaaatcaatctatttgttaggtatttagattgtttttttgttcaactttgatagtgcaggttcagttgaatcatccaatcaaaatgattgccgtgttggtaaatattgcagctggactgtgttgtgaaactagaatttctttgatttgcaaaactcacatttgttgccaatgagtgaaattagctttttgatcactgaaaatatggcttactttgattgcttgcagacttctatagcatttac

SEQ ID NO: 55249 - DNA, 562 bp, Populus trichocarpa
  Intron number 2 from transcript POPTR_0003s07260.1 (locus POPTR_0003s07260) derived from phytozome v7.0 (chr-ID scaf fold_3; pos 8838899 to 8839460)
gatcaagaacgctacgagtctcttcgccattgcaggtaggttttgctttcaatttttgaatctccatttctctggtttgaaaaaaaaaaaaaaaataaaaataaaaagggtaacaaaatgttcccaaatgatttaaactgctatgtatgttcttttcatggcgtcctagatatcaattttcatggatatagattgccgtcgtacttcagatgtgcttaatctctcattgctggcatcaatgattttttgacaaactaaattgtatagactgcacacaagatagtatgccatgccatgcgaaaaaaaattcccattgtctctgtttggtattcctgattcatagtgatcaatgaaaaacagggctgattgatcaggttaatttttcacaagttttattttcacagttttaatttgttgacttgtttcgtaccaggaacttgtctgctggcaaaacctagttgtctacttttatcttagatatcaaatttggacaagtgaaatttctatattgggaatagagtgcatgtggcgttgactgactgtaaattttgcaggtgggttg

SEQ ID NO: 55250 - DNA, 591 bp, Populus trichocarpa
  Intron number 3 from transcript POPTR_0003s07260.1 (locus POPTR_0003s07260) derived from phytozome v7.0 (chr-ID scaf fold_3; pos 8839539 to 8840129)
actctcttccgtaaggttaatcagtccaaatggacttgtctgcttgtcttccaacaattaaaaaaaagaagaaaaattcatggaaactgcatgcttacattgttttggcctttctatttgaagaagaaaatcattgctgaattagatgagatgttaacttttagttgaaccatttgtgaaatgcctggaaactaaatttatccgcatgtgtatacgttttttgtatgtgcaggctgtgtttaatgcttctatttcttgttgtgcaacaaatgttcaagacctacttcaaattaatttactgaccctatttgtagtggttgcttctttgattccttccattttatctaagttgcaacaagtgcattgttgattctgttacgtaaaattgttcatttaacttccctatgttctttgctattttaatttttcttgttttccctcatttgacatgttattttggtagtgctttcattttgcattttgtaccataatatatgcattcatgtgctcttgagttttttttgttcttgtttaagttccttttgctttttaatatgttaattgttttttgtttgccctaaaattgtagtt

SEQ ID NO: 55251 - DNA, 520 bp, Populus trichocarpa
  Intron number 1 from transcript POPTR_0003s02150.1 (locus POPTR_0003s02150) derived from phytozome v7.0 (chr-ID scaf fold_3; pos 2273847 to 2274366)
aatactgtagagtatatattgcagtgtgagataaggttaactcattgcattttcataaattgaaaggatttctcttcttttctttgtcaattacaacacatctatagaagtgctcttgctcagagtaaatgctattgtaatgttttcacatagactcccctggtttgccattaattcacttatatatcttggaacatagccataaatgaaaggttcttccagttcaacaaaattaaccatgaagctcttagctagaatttttagacagaagggtggccaagtaaactcctatactctgtacctctggaggaagtaaaaatagatgtttatgtattttgatgccatacattacttgaccgacacttgcttatgccattatttgtttttactttttgctaatgattccatacattttttatattggtgtggtttatgaggtcagggttcttgctcgctactactaacttctctatactttcctggtcattaaaaatgaaacgtaatgatttacatgtgcaga

SEQ ID NO: 55252 - DNA, 916 bp, Populus trichocarpa
  Intron number 3 from transcript POPTR_0006s23100.1 (locus POPTR_0006s23100) derived from phytozome v7.0 (chr-ID scaf fold_6; pos 21951826 to 21952741)
gtcaccaaggtagtataattattcatttcttttgtccatagttttatattagtctgcaattggtacacactcaattatcagtctttaagattgaaattttttagaaaatatgtagcaattttaaaaagaagcttcaataattgtataaggattgagagtggagaatgttgtcactatctaaatctattggcagactattgtttaatacttaatttgtccagatttgaaaattcaaatccttgacaagttgcatactctatattatttcttgtcattgggatgcttcaaagtttagtacgttgaaggatctcaagaagcctttgaatcagttgagatgagagttgaaagtccatgactatgaagcattaacagtggcatatgacaatatgttgttggacgtttcctttctttcatgcactgtgaagacagaatcatatttgaacatgtgctcctctatcagtatatggtaaatgtacttttcagaaatttttttgatcaaggacaaaataatcatcaaacaatcttctaagatttatgccatcattgtatttattttttaattatttttcgacatacctaattcatataatgtgtaagcaatcatgcatgataaagatgagatacatgaatggagtaattaataactaatagagctggagacttgtgtcaaaatggagtttctcctccttatgattgattcatgctgtttggttctcaatatgtgttactgatgctaagtttcttttgatccatgatgttttttttgtgttgaatacatggtttgcttgttctgagtttcttgcatttctgttcttgagtaatacatagattgaacaaaacttggcactgggaaatgcagttgaaaaataatctttatgcagctattgtccagctactgttagagcacgatcccaca

SEQ ID NO: 55253 - DNA, 839 bp, Populus trichocarpa
  Intron number 1 from transcript POPTR_0003s00890.1 (locus POPTR_0003s00890) derived from phytozome v7.0 (chr-ID scaf fold_3; pos 728731 to 729569)
tgcctacccacagctttcccctcctcaagagcaaggtactgtgatttccatgttttcttttcttttcttcttttttactgggttttagttgccgagaaattaatagaggggttttagtgaattgtaagtgaagaaagtaggtgttgttataacttgtttatcatcagatccctggtcagttctagtgtacttcccctcttgttttctcacagttcctctctgtcccagcatcaggtttctttctttctttttctattttttttgcaatcaagctttttatgtacatttttgtgtatgttggtagatgggttttttgaatcatgctgttttaggatgtgatcgtggattcatttttattttcctgtaagattttttttttcattttgtagtggctaaaatatatgctgtgcaaaagtaaatgcggatttgggttgtgaaaagtgtggaggggattttaaaatcttgaaagatctatgttttttttttttttgtaaaattcgtagttaaagttgaagaaaaaataaatgccaagtcttgttgcttcatttaagacaaaaagaagagatagatatatttagcactgacaaatggttagtaattaagtcagactttgtctcctttcaagtaggcaacactgaatcaatctgcatgatcaataagtgatagtaaatggaatatctttaaagggtttgtttttgtttggtgagataaatgattgctactagtttcttttattccctttctgttgttgatggagcagcttttattgaagggtttctatagattggtttcgctgctcattcagggtttgtgtggttttttttatggtatctgcagct

SEQ ID NO: 55254 - DNA, 1033 bp, Populus trichocarpa
  Intron number 2 from transcript POPTR_0003s00890.1 (locus POPTR_0003s00890) derived from phytozome v7.0 (chr-ID scaf fold_3; pos 729573 to 730605)
aatcatacctccggaggaaacccccatccaggtttgagttttctacagttttgtttttttatggtttctataacttgtgttttttttttgtttccaaatttgtgtttacaagacaggatacgtactgagtttccaattggtgatggaattattgcaacatcagcttgtgtcaactattttttagtgtggaattcatgaatttgcaatggttgcttgatccatttacattgacctaacaacaatttatgctatccattttctcccaacatccttgaatgaactgaattgacttgcacatttgttttgatgaaggctggcaaatgactttgttaaagctatgttaacaagatttggtgtctttatataggatttagtggtatgattcacctctttaaatttgactcttacatctacccctccctccctccctccctccctcccattcacaactggacagtttcagacaattagggttgctgacactagaattttaatttgcctgcagctgcacatgtgatgattcttattttgaatttcaaattctttgaaactcggtattctattcactgattttccagttgcagttcagcataaattttttgtcaaattgtaaataataacttgaggttttgttgttttaaatttaatattttactgaacttgttaaatctaaacctgtactgggctgattggaggtgggaactattgattcagatgtaattggctggatttgtctgataacatcgggctaggagatgacaattcatgcttatcaatcccatgcaatgtcaattttttcctgtagggcaaagttttgctttgaaatggtggttttttaattgtgccctagcaatgtgatcttttgtaacggcctattttgcctgctcctctcttcaattcgtttacctatttcacatggctagctataatttaacttgctcctgatatctgtggtgttggctttcttttgtatgtcgtctttttgtttgtcacctcatgaaatttaacccggtgaccttccataaataggggg

SEQ ID NO: 55255 - DNA, 382 bp, Populus trichocarpa
  Intron number 4 from transcript POPTR_0006s08350.1 (locus POPTR_0006s08350) derived from phytozome v7.0 (chr-ID scaf fold_6; pos 6075055 to 6075436 reverse strand)
taaaccctgctgccgaggcaaatgtaagttctggtgttggattgtgatctctttgatttttgcttctgtttttttcctactcgtgccataattagaaacatatttccttgtctatctgccccttcaggcataatataacagtccaacttgtttgccagtaaatagcctatatggaatagctagtgttattatgttgatggaatagtattctcattgcagaagaaaggagattcgaaagcatttgaggtctttatttcactaaaatatttttgctttagctgcaactagcgagttgcagagcaaggaaactagttttcaattagttgaaaaacccttttacctattaaatgtcatccaggcaaatattttgatttgcagatcc

SEQ ID NO: 55256 - DNA, 888 bp, Populus trichocarpa
  Intron number 1 from transcript POPTR_0014s05350.2 (locus POPTR_0014s05350) derived from phytozome v7.0 (chr-ID scaf fold_14; pos 4026405 to 4027292 reverse strand)
cacaaagaagtgcacttggtaattcagccactagggtaaatatttgtcttttttcctttttagtttctgctttgtacctttgagacactgcgacttgccttcggagttgaagttggttatttacagcttttgttgtggtttgagttcaaatttagtttgtgcctcgtgtgttttatggttgtttgaagaaaattgttgttttatattgaatgcaattgaacttgaatgtcaatgtaatggtaatgcatgttgcctcaaagtgttgccactttgaggtatattaacgagacctggatcctattgaactcattgtgccaaagtattgcaatgaatgaatttaacctcccgaatgaaaattttatcttagcttcatttaagatatgctgacctttcttttcggagcttagcctaaataatgtaatgaaaatgacatccttgagttgtagatttctccaggttctggccttctaaaatgaggaggcaagattagtttcagtgatattagaaaaattcacctgtcagaaacgagattgaatccccagtcatactctttctagttataattttcctgttacccttttttttcttctaaaaatcacttctcttcctttccccttcctggctttaaatgaagcaactaattcaaccagttatttgttctttgtcattactacctttgttctgtttgttggctcctgttgttaccttaatgcttctggaaatgtctgtcaataagtaactgtttttaccataaacttacggtacaattgggtaattttctttttatagttgaaatcctgtttgtttcaagcatattagttaaatgtgatgtattggtatttgatctaagttacattctgatgttgactcagctgccaaagtcagatt

SEQ ID NO: 55257 - DNA, 414 bp, Populus trichocarpa
  Intron number 2 from transcript POPTR_0019s03900.1 (locus POPTR_0019s03900) derived from phytozome v7.0 (chr-ID scaf fold_19; pos 3978296 to 3978709)
ttcattcctcttacagcctacactggctttctaaggttatgttactgtctttttttcataattactatctctaagtttaataatgatttatcccagtaactggaatgcctagttaagatagcgaaatatcaaagacaaacaaaaattggtagagaagaagagaaacaagatgtttataaccattactgagttaatataaaacctgaaacctcgtttatcacagcttaaaataactacagaatcaaatacaaaatacatataaataatagcaattgcttgaatcaatactatagaatgtgctgttgcctgttgtggtttaaattagtcacgcgtgaacataaacatggcaaagcctgaccatatattttcatgacattaggtgccagaaggtatatcaaataacaaggggaacat

SEQ ID NO: 55258 - DNA, 425 bp, Populus trichocarpa
  Intron number 2 from transcript POPTR_0006s24390.1 (locus POPTR_0006s24390) derived from phytozome v7.0 (chr-ID scaf fold_6; pos 23011518 to 23011942 reverse strand)
ttgtaattgggaattttgcactgcagaccccagtaagctctcttgttaccctcatcctactgttttcccttatgattaaaatcctttttccccagtatactcttttgaattagattcatgctttaattatcaaacaatgtaataggatagatatatcaaagacaaattgccaatgttttttgtcacaatgtgcattcttgacctgattattccttgggaagctctcttgttaagtaagagcatgcctgatacgttttcttctccagatttttcctcttctttgtgttttccttgcgggttatttcctctgtggtttgttgtgtggcatagcacagtgatagagaactgacattatgagttccagccgaacattgtagacaaaatatacatcatggtctaattaagatttatcgctcacaggacca

SEQ ID NO: 55259 - DNA, 845 bp, Populus trichocarpa
  Intron number 1 from transcript POPTR_0162s00200.1 (locus POPTR_0162s00200) derived from phytozome v7.0 (chr-ID scaf fold_162; pos 1598 to 2442 reverse strand)
catctgataaatcagagagagacaatacagtaagctaatttaccttgtttaccctaaatttttgcaataagttatctattgctattattttctgctgatcatttttttttggtttcttcaattaatttagaaaattattcatctctaccatcgttttgtatatttattaacgttgtgtttttcgttttgtgattttcagcacgcttttgttttcaatcatgaatgaaaaacctattttaaatctctgaaataaattatcaccttctgatctcaaaagttatactttaggtttttttctggcgaagaggagggatttttgcggtgttaattgtttttgaagaggatggattctcaaattgcatctgataagtcagaaacaggatgtggctaatttcttttcttttcctcttggtttccctttgcttgtcaaattgattaagtgcaatgagttatctattgttttctgctgatcaagttttggtttccttaattaatttaaaaaactatttatctctaccatcgttttgtatatttaattaattctgctgttttattttccatgttaggtaatgttagtgtttttaattttgtgattttcagcattttttgttttcaatcatgaaaaccctaatttaaatctctgaaacaagttactatatatatatatatatatatatatatatatatatatatatatattttttttttggcaaagaggaggactatgttaattatttctgaagaggatggattcccaaattgcatctgataagtcagaaacggtaagagtagtcacggggctaatttcttcttcttttttgttttccctttgcagagggggactg

SEQ ID NO: 55260 - DNA, 568 bp, Populus trichocarpa
  Intron number 1 from transcript POPTR_0019s03480.1 (locus POPTR_0019s03480) derived from phytozome v7.0 (chr-ID scaf fold_19; pos 3562305 to 3562872 reverse strand)
cgtttctaggagattttcagctgagcaagctctgagtaagttccttcgattttttttgaaatttttgggttaagtcttagacttttggtgatctttttgaggacttgaagtgggtttcttttgattaatgagttcatgagttagaatactgaaatgaattttctttattttcacaattttcttgttaaccaaacagggttttagaactttttttttttttttttacttttggtgatcttcttgaggattcgaagtggggtttcttttgattaatgagttcatgagttaggtttccaaaatgggctttctttattttcacaattttcttgttaaccaaacaggtttttgaaccgttagagcacaatcctctgtttttgataatttaagatgggttttcttccgatctcagaatttaccagttaaaatgctgaaaaggcttttctttttcaacaaatctctcatcaaccaaacataaattttatcctttctctggctttgaatcactctttcgatgctcctaaatcagtagtctcactctgtttcgtgctttgtggaatgcagggcaccc

SEQ ID NO: 55261 - DNA, 835 bp, Populus trichocarpa
  Intron number 1 from transcript POPTR_0013s14850.1 (locus POPTR_0013s14850) derived from phytozome v7.0 (chr-ID scaf fold_13; pos 14941781 to 14942615 reverse strand)
gtgatcaaggtgaaaagtaatgtaatggggttcaaaatctggtgattcctgtggttttcttgaggcattttttggttctgattgttagagtgtagaaaatcaaaagagtgcttgataggaagcggtgatcttgataaaaaacaacacatcttgtattaatatactctcttagtagcaatctatatactgtgaatatagattaagtttttctaaacattctggtgtttctggtgtggatctttggcttgatttgccaattaaaaaagctgataattagttcttacaggagaaatcgaaggaattgagaaatcctgtacacttttcttggaagagagaaatgcaactttatcatcaaaagaattctttgatcatgccttttgtatttctctgagagacgaaggtaatctgatgcccttcaggcctcagcttttgtcccaggcgatcctctgacatatggcatctggtgggtagcttggctcatcaaaattcttgggaaacctcaaaaaagtccctaaactatttatatctgttgatgattccattcagattgttggggggacttgatgagatttgggttattgcttggggactaatttgaggtttgcccattattcttttcactctcgatcacttcaagtcaatgttgatccaatatgcagatctaagcgcaaagattctacttgctgcagattttgttataagatgtatcaggtgatccacttttttaatttgattaaaaagctacagaacagtgtgaacgtgtgatgttcccatgaggaggactggtttggtactttgccagtttagaagtattccaaatgtgtgggaacagaac

SEQ ID NO: 55262 - DNA, 125 bp, Populus trichocarpa
  Intron number 1 from transcript POPTR_0018s06490.1 (locus POPTR_0018s06490) derived from phytozome v7.0 (chr-ID scaf fold_18; pos 6408136 to 6408260)
cgaaaccgactgcgaaccaggcacgtttctttcttgtaaattattaattatgaattcatgacttttaagaaaagaaaaaaggaaaaggaattcatgaatcatgtttgtttttgattttataggtg

SEQ ID NO: 55263 - DNA, 681 bp, Populus trichocarpa
  Intron number 2 from transcript POPTR_0006s24200.1 (locus POPTR_0006s24200) derived from phytozome v7.0 (chr-ID scaf fold_6; pos 22847557 to 22848237)
aagtttcttctattgataaccaccttgaatctctggtacttctcttgattttagttaattgattgatgcattgcaattgtaaaatccgaagtgatcagcgattaatttgtgatttggaaggaattaaacattataaatacatgatttgattagtactacttcacggatcaataaataatttgctggttctaaatgcatgtgtgataatgagaagagagaggtgttaagagtattttcgttgccagtcaatagtgaagcattttttactcggcacgagaacgctagcttattctgaatttattttgagaaagttctaaaatttgattgcaatgccaaggaggattcattcggtatcaggaaggttggacagtttcttttaaactgtgaaagagttaactggatgtgtttcttttaaactgtgaaagagttaactggatgtggtaccttggtattactggagttttttacaaattaagagtaaggtttatgtatgattctagaaaattcttttttcgttataggtatttaatatgaagtaattactgaatattgtcacagtaacctttatatatgtatttttcaagtgcttttaagaatatggattctttataaatcgatgtttagtttgtttgttttttcatggcagataactgagatcccaaagctgacatctggttgcac

SEQ ID NO: 55264 - DNA, 864 bp, Populus trichocarpa
  Intron number 3 from transcript POPTR_0013s15090.1 (locus POPTR_0013s15090) derived from phytozome v7.0 (chr-ID scaf fold_13; pos 15138893 to 15139756)
taaggctcttattagcacacttggcttcacttttggtgagtgtttatatttacgtactctttccttttgatataatgtattttgtgtgcttacattagatttggctcttttgaagttaatgttgtttgtttgttgaatctcatttgctgttgtcggtattcacaatcgatttgatattgatggggtacctaatggtaatattggatgtcagaattcatgttaaaaaggataagttctttgaatatgcatgaatggtgattgtgagagctcaacacggttggagcttgataggagaccatatactcatttgttagaaatcatggaatggatcaaaagggtgttgttctttttgaaagtagaagtttaaaaccacacgatcctaatcttttactataagtaacttgctagttatttgccaccttttattatttttgatacatggccgtaagattttatgatcatggatgcatagtgcctaagaggtcaatctgattatttattgatctttatgatctttaatagtgtgtggttccatatggtgactgtattatctaatgtgttccaactgcaacatgatgcaaagaaatgatgatttcatatattcttgcaatgctactttacttcacttaaatgcgggcatgtaatctataattactggcagtttttggtgatggtagtaaatgggctgaaactctgtaagcagtcatttttctgtagatgtgcctaatttgaatcatcatcatcatcaatattgttgttgcttaacttttgttccccccccccctaatttttccatcatatatactaacttttgtttggtcgaatgcagctacaactttgacaagctggcatcttctggtcacc

SEQ ID NO: 55265 - DNA, 789 bp, Populus trichocarpa
  Intron number 1 from transcript POPTR_0014s02580.1 (locus POPTR_0014s02580) derived from phytozome v7.0 (chr-ID scaf fold_14; pos 2151467 to 2152255)
ctaaggtaaattttaatttccgggcctgcttgttaatttttgctgagtaattagttgtcttattttgattaagagtatggattttatgattttattggagagtttatggagggtgaaatttcagggctttaattataggtctaggatcttgtgaatgcctgtaattctatgcctgcatcgtgaaatgaatcttgtttttatgctttgggaatacttggaagtgttggcattgcgagctgtcgcatattagagcttatcgttgtaattagtaatctttaatgaagtaacatggtcctgtatgatgctttcttagggtcaagtaatgtaattttgcttatagtccatatgttaatctggatattgcagatgtacatgtgtgaattcaactatcaattaaggaattacctctgcaaagttgttttctttgatcaattatgcaactgatagatggaccttgcttcacatttgttggttacctggtttccacagctgacaaacaatcctgaaaaactgaagtgagattaaggaattaacatgtcaagttgttgtgtgttataccactcatctgttttttgcattttgaaaaattgaagtggtgtgttatgatctatttaatatgttttattgtattgagttaatttattatttatcttctctattgagatttttctatttcgattaagtttcaaaaaatttggcaatctggacacaggattatttaattcaattgcctcttgttactattaggaaacctcattatgtgatccacctgcaggcttcatttgttct

SEQ ID NO: 55266 - DNA, 627 bp, Populus trichocarpa
  Intron number 1 from transcript POPTR_0003s09610.1 (locus POPTR_0003s09610) derived from phytozome v7.0 (chr-ID scaf fold_3; pos 10896437 to 10897063)
gcaagaatttcagccatgtacaagtgcaaaataacgatcctgactttttctttttaaatgatgagaggatcaacaagatttccactaacttataaaaaagtcataacagccctgaaaaatccatgaaaccgagatagatagaagaagtgcacatcctttttatgcaagaacagacagaaaaagcgcacatcccttttatgcaaaaaaagaggtatatctcttcatctattgtttaaaaataataatggtgaagtgttcacatgtcaaagacaaatagagtatgaatgagggaaagattgaaaatttagggtcaaatgatgatgccggcgttgaaagttctggttataatttttttaaggcttgagttttgattcagagaatcaaagaacaatgagagaattagagaattagaggagagtggtgagagagaacaatgttggttgaaccggttcggttcggtccagttcaatcggtttaaaattttagaaatcaaaaccgaaccaaaccgattttttttaggctttttaatcgatgtgttcggttttttttcttgttttggtttttttggttaatgttttttttgttttttcagtttaatcggtttttctgtttttttgtccaccccta

SEQ ID NO: 55267 - DNA, 1018 bp, Populus trichocarpa
  Intron number 1 from transcript POPTR_0006s27020.1 (locus POPTR_0006s27020) derived from phytozome v7.0 (chr-ID scaf fold_6; pos 25046874 to 25047891)
tctaaggtctttggatttgctggtaaagactctgaatttttcttttatgttctcaaattccatgcttttttttgttttgtcttctctgctgaattatatgtctagttagctttgatataatctttgcttttgatcatatggaattgttgatgtctgatacataagagtttcttttttgggatttttttttcctgttgaccgtatgggttttaatgaattttgttattggagaggttatttttagagcttattttggagttttttttaaaagttataggttttttagactcggttttataggataggtgctatgtttgaagatagatcttgaagatgaaggcttgttgtttgccttcaaatatatttattggggtttgttttggtttttggtctatagctgtaaatcaggtatgttaggattgacctgagggtttgttgtgagagaaattgttctttgagatttgatgaagctgtctgtttatggatctagagggtttgatattgtctaagaaaatcagatattgcttaaactgtatgttgttgttttgggcacataataagcagatgaaatctgtaatcttattattcagattcgaattcactacggcttgttgacttgtataaacaatttactggtggaaaaagatgaagcctttcagatcttaatcaatgaataattgttgatcggaatttgcacataagatcaaaattggaaagtttcgtttgagatatgtgcttgttgttgtttgaccaataatcattttgatagttattggtagtaatctgttttaacttgcgtttcttgtaagtttattagttacttgtagtctctttagtcttagaactcataaagaatctgttttgtagttgttaaaggaattaattatcaacttaaaacattcttgcttttggattttggaggatactgattgcagtaaatttattgtatttgtttgataagtgctagctggatttactttattaatggaggatattggttttggttttgtaggtgaaa

SEQ ID NO: 55268 - DNA, 522 bp, Populus trichocarpa
  Intron number 1 from transcript POPTR_0022s00330.1 (locus POPTR_0022s00330) derived from phytozome v7.0 (chr-ID scaf fold_22; pos 74226 to 74747 reverse strand)
aatttgtttctgcgatctgtcttgaagcaaaacaggtactcactgtttttttctttctttctattttgtcgtgcatgcttgtcttggatgatcaaagctgaaccgggtttcctttatttcttctaaagttgtaatttttatcgctttaaggtataattaatcatttatattttgtgggctaattccgttggaagcttggcttcttcttttttattttttttcgttttctttgatatgtgtataatgagctctggctattttccaagttcatgatggagccatgaaaatatattgccggcgttgtgttttctttcttaatgtttttggtcttttacgtgcttgtaatttaagttttgaaagggaatgaatatatgtagtttttgagaaattttgggatttgacttcatgtgttaaattaagtttatatcaatttgatattcattcatggggtttgattttaggtgtttgactgaggtgttgtatttattttttccttcgtgcagtacttgtcgattttgtgtg

SEQ ID NO: 55269 - DNA, 811 bp, Populus trichocarpa
  Intron number 1 from transcript POPTR_0003s13380.1 (locus POPTR_0003s13380) derived from phytozome v7.0 (chr-ID scaf fold_3; pos 13778746 to 13779556 reverse strand)
catcaccttactggtcacaggtcaacactgatccaaaacgactcattccggtttattaatttgattaactcaaaatgcagaatcaagcttaattaacttaaattgcaggtttgaacgacgtttctatttgccgtttcgattgattggagtagcttaattgagctgtttagttattatttggttaattaaaatgaaatttttttttagcaatttagttcctttggttaattaaaaatgcaaaattgagctctttagctgtctgtctctggttaatgggggaaaaaaaatcttgagcttttaaggacttagtttaactttttttttttaaaagcaaaatttgtgatccttattgttggtcaaatcataatgcgaatatgtgcttattatgaatttgatttattaaaaatctgcaaaatttaaactctttgagtttctatgtagtaggaatatggtaaaattgaaggggggcttgcaaggatagacattcttaagttctcatattgattgattagaaatttcagctctttggttctttgattagttaaagatgcgaattttttgctttttaggtttttggttgattagggaaatgcaacgttttgtgcttttagttattttggtcaatcaaaatatccaaatttgatctttagttcggttgattcagtaaaacggaaaatttgggttttctatctcttcggttaatcaaagatacaaatctgagctgtttaaattttcttgattagttaaaaatacgaatctgaaatcttttagtttccttgcaataggaatatagtggaattgaagggagctt

SEQ ID NO: 55270 - DNA, 1037 bp, Populus trichocarpa
  Intron number 1 from transcript POPTR_0003s04150.1 (locus POPTR_0003s04150) derived from phytozome v7.0 (chr-ID scaf fold_3; pos 4840747 to 4841783)
atctcactcctgttctttcttgctatcaatcactcgctcactcccaggtctctctctcgctctctctatgcaaaaatgtagttacttttgttgtgtgcgtgcgcctaagatgctgctattgcttgctgtcatggatctctggattggttgatttcttgatttttttatagctgggctatctgatttttacttattgagatctggggctgatcggttttttccttttgttggtaaagttttcatttttttggttttccttatcgtttcttatgagctgttagggttaggttctggaaattgcaggtgttttttcttttcaacttggtctggttggagataagtttaacacaaaaagatctttttatgagattgtttgataatcttttgatgctgcttatgtcatattattgcggcttattttgtcagaacgctttaatttaatttaatttaatttgatggatatgtaactcgttgcgcaagtcccacactgctgtaataacacatatatgatttatgagggatggtgtcttaaaagagcaacaaaagtttaagtctttctggactatttcttgcccttgatcagaatttttggaggggtgggtgaagcagcgtctgatggttaaggatttatgtccgaaatatcagttttctgtttgccccttttgtatcttctccagacactgaaacagaagtttaatgcttgtacttcactcttagcttggtttgcaagtttggctcttctgtgacattttattctttcatttcggttggctataatgaaatattcactatcttttgtgcttatggtaatgaatatttctgctttatttttattcttgtccccccacaaacagaattatgtgatagcttgaacgcattctatgtgttccttttttctcatttgtcaattattggcatatgatagatgctgaaagcagaatatgttttacctgttcagttttgaaacatgcatgctatgaaccttaatccattagagtaataaatcttccctctgcatatatttccttaatgcagtc

SEQ ID NO: 55271 - DNA, 772 bp, Populus trichocarpa
  Intron number 1 from transcript POPTR_0018s11430.1 (locus POPTR_0018s11430) derived from phytozome v7.0 (chr-ID scaf fold_18; pos 12168418 to 12169189 reverse strand)
caggactacgaggaattatacaaggtaatagcttttctggggtttcaaagaattcttatttctttgtgggtttctagatctggtgttttgttagatctcctttgttgggctttgctcatatgctttttgggtttctggggaaaacaagaacaccaagagacaggaacttacttcgttgattctttgatttgttccagtgtttatgtgaaatttgtcttacctaagctagaaattgggaagtcttaaaaccttctctttcctttggtttatactctctgtttggctatagaggataagtaggcagctcaatgaagccaaatacttgtttaaggcctccctgagggtggatttgtggcattttgggatcttttcatgatctcgaatgcttcttgccatttatcagcttccatacagatcagttgacttattatgcggcaactgttcctgagtttaattcatgaattcttggtgtctgtggttttatctcttttctttgcttgtatgcgttttggctttcacactgataatttgtgtggtttattggaacatgcttttaccccagtttatgtctggtaggataattcccatcttatgggttccttacctttccttttgatgttgaatagaaaaacctttttggatccctttgtttctcttttagttacttcatgtgttgaaacccttaggtttcaacatagaactgttaatgatagatggattcatacttttaagcatttctcaggaaacagaagcgaagaaaaggaaattgcag

SEQ ID NO: 55272 - DNA, 294 bp, Populus trichocarpa
  Intron number 1 from transcript POPTR_0014s00330.1 (locus POPTR_0014s00330) derived from phytozome v7.0 (chr-ID scaf fold_14; pos 136810 to 137103)
gcttctgctactgatattgcctcctctaattccaggtacttagcttttcttattcgatatggcccctgttttttaagagaaaataattattttgtccttttcttctacgtggatgctttctttttggttatttttcatttttgttattgatgtggtgtttgtgttgaattggggttggtttaattgaatcaaagtttcaatcttgggtggatttttttcactgacatgcaagttctgttattttctgctgcttatgcagggtttcagagattgtttcagtagctgacttgaagt

SEQ ID NO: 55273 - DNA, 239 bp, Populus trichocarpa
  Intron number 1 from transcript POPTR_0014s18460.1 (locus POPTR_0014s18460) derived from phytozome v7.0 (chr-ID scaf fold_14; pos 15684887 to 15685125)
gccggaaaggtaattataaagtttgaagtatatattttgttttttcaaattttattcttagcacataaagaatatataacttaaactattaaaataaattgacaaaaggatgcaattgagtacatgtatacaggtttgggactgatacatatatatacacaagaatttgattttcttttgtttttatcttctttgattttgtagggaataaagcgcctttgtgcggaattattggagat

SEQ ID NO: 55274 - DNA, 244 bp, Populus trichocarpa
  Intron number 1 from transcript POPTR_0003s07690.1 (locus POPTR_0003s07690) derived from phytozome v7.0 (chr-ID scaf fold_3; pos 9204924 to 9205167)
gctcgtcttgtggcctccgatccggtattcttctttccttttttctatggaattggagggctaattgcttctttagactaagtttatgttttgttaatttagctcaatttttgtcatctattattattattattattattattattattattacccattgatgagagtaattgttttcatctaattcaattggtttgagtttgttgcaggcatttcaaaaggataacaggagtcggttagggag

SEQ ID NO: 55275 - DNA, 628 bp, Populus trichocarpa
  Intron number 1 from transcript POPTR_0019s12020.1 (locus POPTR_0019s12020) derived from phytozome v7.0 (chr-ID scaf fold_19; pos 13187012 to 13187639 reverse strand)
atctccgctgttggcgttgtcatttggattgtcgggtttgttctctcttcctttataataattcttgctgtatcttagtttcttgatgtctttgatttcttgatttttcacagtttttgccattgtatgtaggagtcttaattgcatttcaatttctggacgaccttctctgagatttcttgaatctgtgatagtctttgtctcctttttgacaaatcttggctgttcttttcttctatgttggtttccgggcatcatagttatgttatctgacagttttttccccattttgtacagggtttggcttattgcatttcaaatttgcagtatttgagaatttctttttgatagtttttcttgtactttaaatcctgatgaacatacttaattttaacatttatttatggctttaaatttgtagttgcatctcaatctctgtttatttgagatttcttgattctatttcagaatttggcagttttgatacaatatgtgatctgggtttggtctaaattattttatataaagatgttacatttgtacttgagaatttatacctcctgactgattttccaatcttgggggttgtgcaggttgttattatcctgtgtttgtccttgttgtttat

SEQ ID NO: 55276 - DNA, 942 bp, Populus trichocarpa
  Intron number 1 from transcript POPTR_0003s20600.1 (locus POPTR_0003s20600) derived from phytozome v7.0 (chr-ID scaf fold_3; pos 19090242 to 19091183)
accacaaagagacagagccaaagcttttgctttgtgtaaataatcttccagtgaagtggtaccttttgtcagagactgtagttcacctttgatttgttggatgcgatctcgagtgtgagtgccataaagggtctctaacacttgccatgcatcatgcgaagattcactattgatgacttgagaaagaggtccatcagagagtgaactgttgatccatccaaggatcaattgatccgtgcgcagccacactgctgcagcaggatttgtttgcaactcaccattctcaccaatgatagttgattctgggcagggaacttcatccttcacatatccaaggagtccatagccacgtaaaacaggaataacctgtgctttccacagaagataattgtttgaagccagcttgatggagatatcaggcagatgtgattttgggagtgtaatctcaagagaagaagcagggaacattgtttgaactgaagaagaagatgccatagtgatagaaggctctgataccatgtaggaaagctgaacttgtgtttatgtatattgttcgtgcctttaaataggcatttcatacattactacattacaggtcattgattcttactatatatatatatacatgatttgatgcaggaattatggaaatcatgaagtaaatggaatgaagaattatagcaggggatctctcaacagagtgatgtatgcagaagatccatgcaggatttctgcacttgaatcctgcatgtaatctctgcatatatttccatatctcttcagtttgagctatcctgtgaagccaatcctacgaattgtaccatcattgaacttacctgtgagttattaaaagaaatctgggctaattgggtaaaagaggacagttggaaaaaaatcgattcctcaggggtcctacatttcactgacttcctaagaaagtgt

SEQ ID NO: 55277 - DNA, 548 bp, Populus trichocarpa
  Intron number 1 from transcript POPTR_0006s26160.1 (locus POPTR_0006s26160) derived from phytozome v7.0 (chr-ID scaf fold_6; pos 24444056 to 24444603)
tctctggtttatagaggaagaaaaggagagctcaggtgtgctttctcttcagggctttgaacatgatgctgatgcgttgtgttttccttttcttgtttaagttttaatgttcatttggacaaagttgatttcttgatcatgtccttatgcactgctgggaggtttttaacgcgttaatgaggttttttccatctgggttcccgttttttgagtgattctgatcgtgggagcagagttttgcttagaatatgctgtataatcttcaatgtgggattttgttattcttagtcttctgttttggcaattgttgatgtggttattttgggatttttgaggtttcatttactagaaagatctttcctttgatgtccaagaaagttttttttttttttccctttccaccctcaatgcagcttattcttgttgattcaattgcataataaatttcatgttgattgtaatttggttgtgaatatagtcgtaattgctagaaatctgtttttcttggtgcagataaagtggggatttcggtgtttccaagaagggtt

SEQ ID NO: 55278 - DNA, 919 bp, Populus trichocarpa
  Intron number 1 from transcript POPTR_0014s15650.1 (locus POPTR_0014s15650) derived from phytozome v7.0 (chr-ID scaf fold_14; pos 11664276 to 11665194 reverse strand)
agtctgctcacatcaacctaaaagtgaaaggccaggtatcttgttgtgattggttgatgttgtgatttttctttgttatgggggtttgtttccttttaatctttacatatttgtggtttagtttttctctcgcaatgtttttatcgatctgttaggttttagctttgcgcttaggttgtttgacagtgttttgtttggggtttctgttatttatttattgttttggaatttgttttgcggctttttgctactgcaaaactcatatgggtttattggtttgtgaatgtgtctattgtgtccatgaaaataaaggggttgtgggttttcagtacttgtgtagtgtttggagaatgatagtgatcttcacaatctctttgaggtataaattgtttcagtttttattaagtgatctgcttctttgcaatattttgagttcttgattaaaaatgggttatgtttagggaaaactcccatgaaactgcacgtcttcgtgccactgttattttggcttctttaggacagtttggcaggggttaaaacggtttggataagaataagaatgcaattagtcttatgtgaacagaaattgtgttggagaaaatccatgcgagtgtcagacgagtggaagaatttgagaaagttatgcttttagtagttgctcatcttgtgtatcttggtcattgcccctgtgaatcgtggttgttttcgtagattggggaactttgttgctgaacccttcaaaatgctgaattacaagtttcaagttgcgtctttaattgaattttcatcctggggtcgttcatacttgtctttttttttatgatatgagttgttagaagtttgttatctgtatggatgttataagagtcctattttcaagaacatgctggttaaagtctttttttactatgattgtagg

SEQ ID NO: 55279 - DNA, 478 bp, Populus trichocarpa
  Intron number 1 from transcript POPTR_0014s12000.1 (locus POPTR_0014s12000) derived from phytozome v7.0 (chr-ID scaf fold_14; pos 8884832 to 8885309 reverse strand)
gttggggtttctgctgcaattctcagcccttacaggtaaaaaaaaacccatacacttgaatctatgattttggctatatggcttgatataaaccggaaagaaagaaaaacttaatcattaatgctactcgccatttgattttcatggtttagtatttggttatatgttttagatcacatatgtgctggtttgatattctcaatttattgggttacttacggtttcagaagatgggttttatgctaattgtcgtttggaagtgggagtttatcactctgtttgtaatctgtatagattatgtgattattagtgaattttttatgtgtaaataatgtgattttaagtggtactggatgatgaacaactcaatttgtgttgttaaatcaatttcaatacgaattttttaggcgctgcaccgcctgtgttttgattagtgtctaaaatgtgaagttttttattactatgcagactactcatc

SEQ ID NO: 55280 - DNA, 286 bp, Populus trichocarpa
  Intron number 1 from transcript POPTR_0021s00270.1 (locus POPTR_0021s00270) derived from phytozome v7.0 (chr-ID scaf fold_21; pos 60630 to 60915 reverse strand)
tcacaacatattgcagtatgttagtatccaagccttttcatcccactatttcaaaaccaaatgtcataaatcaaaatttatgttggctctgttttacagatcacagcagcagtagccatagcaaggcaggaataattgcaggtgaagcattgaaatttcatttatggtttcaaaattttcttggcatatttcagacattatattgaaagaccaggcttacttaatttgatgtttcttattttggtttgcagggactgtaactggagtttcagctgctggggcatta

SEQ ID NO: 55281 - DNA, 619 bp, Populus trichocarpa
  Intron number 1 from transcript POPTR_0013s04310.1 (locus POPTR_0013s04310) derived from phytozome v7.0 (chr-ID scaf fold_13; pos 2916682 to 2917300)
tgcaaggctaaaagttgaaggggaaattttgcaaagtaattgttgagagtggaaagattagttttttaagatgtttggtgtgttaataaattgaagggtaaattgttagtggaaagagagggataatttggtgtcttttgagacaaaaggaaagagagagaatgaaaagaaaaaatattccttaagagattaaattttactttccaaaaacacaaatttgggggttaatgtttctccacttaataattcacctctttcccaatgggaactttaacctcattacgcttgtaccacacatatccttaagaacattttactatggtttatgtgcttgatgaatgatcaaatctcccatttatttttgctggacgatgatgcattggtgttggatttttgcatattgtactcttttgtggtttctaagtcgttgatttgaaatatgttatatgcttgcatgagacaatggacttgatgagtcagctggttggctgagaacaatcaggataattaatattaacggaggaaagaattatgatcttaatgtgtcactgaatttccccccttattaaggaactttcaattgttgatgaactctgcttgtgacatgcaggtgatatcc

SEQ ID NO: 55282 - DNA, 746 bp, Populus trichocarpa
  Intron number 1 from transcript POPTR_0021s00390.1 (locus POPTR_0021s00390) derived from phytozome v7.0 (chr-ID scaf fold_21; pos 122514 to 123259)
agcttatctgaatctagataaggtaaagttcatttcttttgatatgttgcttctttatttttatttttaaagtttgttgtgttttaatggcgttggagttcaaagattggatttttatggccataatccttagagaagaaaaacccatgtctttgtttgcttgatttttatggttgtaatcttattggaactgaaacccatgtctttgtttgcttgatttttatggttgtaatcttattggaactgaaacccatgtttttgtttgctaaacttctggttggttgcctagaaacatgagggtactagagaaggaaagtgatatggaagtggcacttgatgtgtttgtaggttatgaatgttcataatgagaatttgtttatagttattagctaatgaaaaactactaagcataagcatgaagtctatagcttcaattttcttatagttgatgaagcacagaggattatggaaatcaattagaagcttcttttgtctaaatgagaactcaaacttcaacaacagggctaaaacttgaatgtttttaccagactttttgtttgtagggggggggggggggtgagatagtattgttttcagtgtgtttcagctaaatagtatcctgaaaccaattttgggacacaaagactaagtgttgatttaatatcatctaagcaaggattatgattatatctgaatttcgttgtcttcttaaacaatatgagtgtttgtcttctgttttgaaggta

SEQ ID NO: 55283 - DNA, 462 bp, Populus trichocarpa
  Intron number 1 from transcript POPTR_0003s05000.1 (locus POPTR_0003s05000) derived from phytozome v7.0 (chr-ID scaf fold_3; pos 6151853 to 6152314)
gaaacctcttgctctttctcaccaggtaccttcctcttaataacaattacgtcttttttttctcccattcatttctcttgtttcttggagttccatgcagaattcaagttttattaatctagtttttgttgcaagatgaagaatatgaatctttctttctttccttttgttaatttattttgctttttgggttctaaatattgtgaattttcagttgtcaagacgtaagtttgctatagctaaattcaaatttagaacatttctcaatttcttacaagaagttcatcctgggaatcacgataaggggtatttccgtgtcccaatgtaaattatagagtgcaagtttgaatttttccatctgggttcagttcactgaagattttcggctacttcagtgcatgaatgattgccgtttatatcatttttattttacttctgatgttttaatttccttggcagtca

SEQ ID NO: 55284 - DNA, 769 bp, Populus trichocarpa
  Intron number 3 from transcript POPTR_0018s02700.1 (locus POPTR_0018s02700) derived from phytozome v7.0 (chr-ID scaf fold_18; pos 2422890 to 2423658 reverse strand)
cttggcggggcactttagtttttgtgttacctgctgtaaatatggacacacagcaatgtttatgtgggatttaggtgggttttcaaggagtttagtgatgcccataaagaacctacattacatgaaaacaccccttagaggatgcagtatggttgtgttcgcctttttttagtcttttctttatcagtgtaaatgattttagggaaaggaatggaaaagagtaatacagatgaaattaaaccactttcctttcctttagatggaaaagaaaggaagggaggcattgactttcctttttgacacacaatagttttccaccgtagatgggaggaaatgaaaaaattgactggattttgctcattgtatcctttaaacaaattttcccctttcttttccatcaatacacaaagaaaacttaattactctcagctctcttgatccaaacgaaataaatttgatttccctttttttccttagtttagtttctttcctcttccctgttttttagtcgtctgtctgcatgtgattggcatgttggtttcctggtatctgttttttctgatataggatttgtgattgggttggtagatagtttagtttgttgattaggctttggggtttttatttttatgcatttaattccaatgaattggcttcctttttggacatgttttctaattatttccattgaaggctatatgaaacatgctttgattttgctgattgattgctattttggagtagactggtgaattgcggtttgaagacc

SEQ ID NO: 55285 - DNA, 762 bp, Populus trichocarpa
  Intron number 2 from transcript POPTR_0003s02480.1 (locus POPTR_0003s02480) derived from phytozome v7.0 (chr-ID scaf fold_3; pos 2565865 to 2566626)
tcctgcaactcttccgctcgaattcgttgtgattggtgagcattttgctagattatttcatgaccatatattaattacgatgcccataatcttatttgatgaagcttagaaggttgctgatcggttggattgtaggttagtgcttcgagtataagcaacaactagctaattagagggcaaagagtgagaagaatattacacataggattttctatatatacacctttaagcgaattaaaagggtctttaagcacttgcaagtcaaaaacaaattgcctaatttctcaaatgtctctctcaaaagatagatagacgtgtaaggcataaaaggaatatatcctaggcatcttgaagcaaagtctttgggtgagcaggcttggaaaaatactttcaacctcaagccaggaaggtggatcgactggtcagtcgggtttatccaaatcaatttttaattcggttcgaaataaatggtcgagattaaattttacatgggtgaactattgagtcgacttggtttaataactatggttaaaatgtttgcatacagtagcacaagaaattaatagttaaaaacatattagcatatgtcgaatatagaatcctttaaatagaaaaaatatccggaaataaattacattatatatacatcgtaacaaatatgacaatagttatgaactaattatcacaagaattgttttccctggaaaaattgttagacaagcttgtttcaacttaatttacaggtgatctcgggcaaacagg

SEQ ID NO: 55286 - DNA, 538 bp, Populus trichocarpa; identical to SEQ ID NO: 53795
  Intron number 1 from transcript POPTR_0006s07550.2 (locus POPTR_0006s07550) derived from phytozome v7.0 (chr-ID scaf fold_6; pos 5472554 to 5473091)

SEQ ID NO: 55287 - DNA, 661 bp, Populus trichocarpa
  Intron number 3 from transcript POPTR_0019s04560.1 (locus POPTR_0019s04560) derived from phytozome v7.0 (chr-ID scaf fold_19; pos 4758721 to 4759381)
ggtgagcaatccaagttctctgtatagttattgcaaattgagtaaatgttaattggaacatcatcttttttccaacttatggaatctattatgcaactgaaaattgattatgttgtgaagttgcccggaattgtctcagtttgttctctttgtaattattcctgttgcattccagcaggaagcttcctgaaataggcatagaattctctaactttttgaagcactgtaggcatagaattcatgaattttgaaccgttatagtccttttggtgttcctccatattggacctggactggagttaattggtgttcttccttatgaacttggaccgtatgattgtatctcagttaatattttgatttggtttgtttcgacacttttctaaaccacttcttaagctattaattttctgccacacctgagtgtatcatacgacttgttttgctctagtgattactttgatcgctgccaaacaagttttgctggtgctcctagtagcgtagatattgttgacatgcttatattagaagcgataactgcttatgttaaatgaaattcatattctccatcagtgcataagaagcatgttttatatttcagttatacaaggataagcaagcaagaattgttatactatttctgtgatgcaggagccattca

SEQ ID NO: 55288 - DNA, 601 bp, Populus trichocarpa
  Intron number 1 from transcript POPTR_0013s09990.2 (locus POPTR_0013s09990) derived from phytozome v7.0 (chr-ID scaf fold_13; pos 9971151 to 9971751 reverse strand)
cttgtgggttctcttcgtttggtttggttgcagaggtaacagtgtataagaaaaaaggaaaagactttacctttttcttgtttgaatcttttattatctgggttttattttttatgaaatcaaaaatgagatttgaaatttcctaaccaggtttacttggttctttggtttattttgggtttgtgggctatattgatggagatctcactctctttgtgattatgcatttttggtcattaatatttcatttatcggaagagcttatgaatttgatgtgtaacaaaccacggttcgagcactgtttatgtcacctggggtttggattgatagccttagtggcatgctaaagcgaagaaaatttgtactactgcagattaatttaagcactgttcttgtctctgtgtaattgtggagcagcttttgtagtataattactttatggatatagatagtcctataagttttgcttggtaatggaatataagaagcttgttttaagaataagctttgtatgattagttgcgttgttactttaaaaaagcatgaaattccccaaccagaccgtgtaaacatttatatgttgtaggtaatctgatctggc

SEQ ID NO: 55289 - DNA, 1010 bp, Populus trichocarpa
  Intron number 1 from transcript POPTR_0003s10120.1 (locus POPTR_0003s10120) derived from phytozome v7.0 (chr-ID scaf fold_3; pos 11224743 to 11225752 reverse strand)
tcgctgaagaaagatcgactgtgaacaaggctcaggtatgtgatttatttttatttttaccaaaggtcaatattgctttggatgaaagaattaggggtcccggataagtcttgaagcccagaatgtgctcgacactttctctagcctgtacatgcatgaagttctttgacttctcaatcgatcttagatcggagaaatgattagatatatggaagaagaagattatactctatttttcgcataaatatatgtgaaaccggttataaaagaaattgttcgtgaatccaaacctttatgaaagagaatacatcccctaagatagtgtagggatgcataacccaagcacttaatattagatgaagtctaattaatgattttatattattctttctaaacactaatccataccttttatagttcacatatcaattttctctaaattaattataattgttctgaaattgaagttcttttataattcaaacacttgttcttaatttacaaaactctttacatcaatcatatttctgtagaaatacatttctaaattaccaagttccatcattgttcattaaaaaaaaaaaaacaatcacattaactaccgtacgttattcctatcttcttctagctagcttcttctcccttgtcttttgagcttgtgggattcctgcaattactttaattcatttatttattggtcgattaaactgctccagccgtccatgtcctctttttataatttctcatggcatgtataatgtttagtggatggtgatcgcacactaatatggactctttacattttctttctcatacgaatctctttatctattttgacggaaagaaatgtcgattatcggtgcaatattctgtctatgcttacaacaaaagtctcgaatgaaccattaaaggttcaactttctttttaacctcatttgtatttagttcttaccttctttttttcttggcgtgcagaaaaggaaaagaactggcaaaaaacaagcaaacat

SEQ ID NO: 55290 - DNA, 607 bp, Populus trichocarpa
  Intron number 1 from transcript POPTR_0003s01380.1 (locus POPTR_0003s01380) derived from phytozome v7.0 (chr-ID scaf fold_3; pos 1213276 to 1213882 reverse strand)
tccgctttggcttccttgtgcactcttccttcaaggtacccccaccatgcccccttctctctcttttatgcattctagcatctgttgtttgtggtttagactttgatgggtgtctagtgaaatgttattcttcctggcaaattcttgtacaacttgtacttagtgaatttggggttaactttttgaagcactcttgttctgtgaatgattggggagcttttttatgttgatatagacagattcttcttggtagaaaaagacatgatccatgctcatcctacactactacacatgtaacatttatcaccatgcctttctgggtgattgttgccttgcctgagagattgtaactttcgcttttgattttggtcaattgaatatggttcaagactatgtcttcccttttgttttcttttacttggtcgaagctatacaagtgctgtgaaatcacaggtttcctaagctgcaacaaaaatattactgttgaacatttttgggtactcgcttgtttgtgaactggtatgcaaaacatagcggtcttgtcgtttccaaaagttattaatgccatttgatttctcgtttgaacagaatatctctcatctctatc

SEQ ID NO: 55291 - DNA, 604 bp, Populus trichocarpa
  Intron number 2 from transcript POPTR_0014s07810.1 (locus POPTR_0014s07810) derived from phytozome v7.0 (chr-ID scaf fold_14; pos 5833120 to 5833723)
ctcgacaatttttggtgcctaacttctatcccatctgctgatttacttgaattatatgtttgcagttttgatttcagtttgtagtgtgcccttttataaaacattaacaaattggcatcaaatctgtctacacatacactttgttcgagcagctgttacaaatttatgttgtctggtgttcatcctcaatgattgttttgctttcattcagtatagtaccatggttttgaattatactaagaagcatggactaccttcaatggggattagtatgactaggatcgacccccgcccttctctttctctgcaaggaattcccatttgttttggtgcatgatgcttaccctttactttacatccttccttcagtcagcaataagccaacttctgccgtatctttgttcaatttgaggtcatctattcatgaaacaaaccttgtatatctaatgtgcaatttcaaaatctgcttatgtatccccattgagttcataaagacttgcttgaagaaataccatggtttgagtttaccgtggtcttaacttgaagacaattttctgttacattaataggaggaagcaagatctgttggccagctacggaacaa

SEQ ID NO: 55292 - DNA, 602 bp, Populus trichocarpa
  Intron number 2 from transcript POPTR_0003s20050.1 (locus POPTR_0003s20050) derived from phytozome v7.0 (chr-ID scaf fold_3; pos 18660799 to 18661400 reverse strand)
cccattgggagtaagtagagtcattgttatgggttttgatctacttatttattcttgattttggttaatttattttgctttgttggctttatatgctcttctgtttagctgactcaataagtttgtgcttggttgatataaatatatagccttattgttatcttctgcttggaaaatggtgatcttggttgaatttaccaagttttggcactagctgggaatgagtaatgaaagaaaaggttgcatatggatactctttttttcctgtatttgtgtgtatacgtgtacaatttgtgcatgtgatgaaagaagaacaaatgtagatgactttcaattgcatcctgttctgtaagtgctccaacttttggttcgttttccaatgttttcgtaattgctccagttttttgttcattttctcgcatgtctgaaacttctaatttctgcaaatgaataatggcatttttatttggtggtacttaaatacatccagtttcttgtgtgagcactgcttatctttttgaggctggtgggttgaatttagttattcttctagagcaacatgcgttacttagttttggattgttgtgaaggtgacttgcagg

SEQ ID NO: 55293 - DNA, 243 bp, Populus trichocarpa
  Intron number 1 from transcript POPTR_0003s20050.1 (locus POPTR_0003s20050) derived from phytozome v7.0 (chr-ID scaf fold_3; pos 18661476 to 18661718 reverse strand)
tcggattctctttttaattcaaccacaaatcaacggtaaagaccaaatcttttcttaaatttgaacaaatcaatcaaaacttaataaagtctttaccttttttgagtgaaaagagtaaagtttcaatcttttcttatcattagttgttttcgttgtggctgaattttgcttttgtagatagatatttattgttgttttgatgttttctgaaatgggttttttgtgtttcttgtgttgtaatag

SEQ ID NO: 55294 - DNA, 810 bp, Populus trichocarpa
  Intron number 4 from transcript POPTR_0013s06850.1 (locus POPTR_0013s06850) derived from phytozome v7.0 (chr-ID scaf fold_13; pos 5538866 to 5539675)
tagaggctgccttggctgacctgaaagcaattttggtatcgtttcttttcatttttgatttgccacatttgttgtgcccatgtttatgacatcttaaaattctgtgactcggcagaatagtaagctcaccacttttgtggttgtctttgagggtttaggagttttagctacaaaattaaatgaataattgttttttacttcaatttttaatctgggtggctggtcctagatagggtggaatgagtgaggcagactgtaattaatttggaattaagtttaattgagtgtgtgtgtacatataacctggcagcattgtcagggtgatatcatgggttgaattaggcctggatccattcactcgaaaactcgtctttttatttcttcttattattcctatacaggggtctcccactgggtagttatatctcactaccctatcatttgaaagatgtgggaatggagattttgacttgcacttaggaaccttgaaagaataaaatgatcacgagtgagactctaatgtaattggatttcatcgccaaaacattattaaattttccaatccagagttgcttctggcctcgacccttgggagatgctgaatcttgtttgtattttaggtacaatatccaaatggaagctgttcttgttaaatgataggttatttatggtcacataaattctatagaaacctgtcatttgttttccttcatagcttgctggatattattttttttctccatatatatattgttaaaaagaatttaattttcaggctgaattagaagaatctgatcagaaggaaggccc

SEQ ID NO: 55295 - DNA, 965 bp, Populus trichocarpa
  Intron number 1 from transcript POPTR_0014s15610.1 (locus POPTR_0014s15610) derived from phytozome v7.0 (chr-ID scaf fold_14; pos 11631374 to 11632338)
ccttgaatactgcatagactctaaccctccttggggtacgtgccctccccccctctgtttttcgtgctcttagcttttttctgtttcaggagtttgttggagtagcatgaagttatggcttagctacaaatacaaacgagttgagataactctctgccgcattacgaacttgagtaaaacacgtgggagtggagaaaacggatttttttttttaatgctaacgatgatgaaactatatacatgagacgacgtttcaaagcttccttctttctgtatttttttttaaaatttccaatgattttcgtagctatcaaacaaccgcgcttttctctttcaatgggattgttatggcttttccttggcattgatgatgtaccaaaaaaaaagccaatatgggaagagctgcatttggttgcttaagtgaagctgtgaacaagtttctttgcaattagccagaaactccttagattgaatagttaattagcaagcaaagctactatttaatattttggtcccatgaaaacaagtgattaatattggtagctgctgctggtttttaatggaaagaaaaaacgcagtagtgggaccctttttggtttttgttaggaaaagaactcggaaacctggagttgcatatccatcttgaaataatactttgttctgaatgggatatttttgcagccatctaaaacgttggttggccggaattcaatctcatttttcaatgttggatgtacttcagtttcatttgggttgcaatggaaccaggtcccgcagcaaaacccaatggcacacttgctgaaaattgtgcagtgtgtttaaatgttgactgaagcatgaaacattgaaactgatgttgaatctctgtttttgaatggaaactcttgatgttcatgtgctaagctgtcttctttactttctcatttgcagctgaaaccatcatattagcatttcaaaactacatt

SEQ ID NO: 55296 - DNA, 882 bp, Populus trichocarpa
  Intron number 1 from transcript POPTR_0018s02030.1 (locus POPTR_0018s02030) derived from phytozome v7.0 (chr-ID scaf fold_18; pos 1821418 to 1822299 reverse strand)
ggaagacttgtcatcaagtaacgagtgattcttttgatacaattttagattataataagtgaacctttgttttctttgtttggttgatgagagcatgctagaaagtagaacatgaaagaaacctaagctccaagtttcagttcttgattgtctttttttttgttgggttgattcgaagagaacccatgaatctactttgtatgatttctccgttgatagaattttagataatacgtaaaccctttgtgtttttctgtctggctgactggaagatgcaagaaaatgaaagaaacctaagtttcgagttttagctccatttgaagagaagccatgaatttactctcacgattttttgttgatagaattctagacaacaagtaaaccctaccatggttttctttttggttaatgtgaagatgtaggaaagctaaagaaatctaagtttcaagtcccttatttagttttcggctcatttaaaaatgacccataattgcttttgtgatttattcatctcttagttagtatattcatgatttatttgtctcgtagttagtgtatacgctcaattatgctcttttttgtcttgtatctccttacgattctgttggttgatgatagaatgtgggaaggtaaaatgaaagtggaattcgggatcttttcttagtaatgttaagagcacttgttttggtcagttgcattaattttgttgtttcacacgaaagcgaatcaagaaagtggtttggtaatgttattatctctaaattggaggtggtagtacaattgacgggctcattgatcttttttccatgtctgttctctttgtgattgatatctttctttgtccttgtttgtttgaaatcatcgaagtgccgccaaaaaaca

SEQ ID NO: 55297 - DNA, 334 bp, Populus trichocarpa
  Intron number 1 from transcript POPTR_0019s10630.1 (locus POPTR_0019s10630) derived from phytozome v7.0 (chr-ID scaf fold_19; pos 12163363 to 12163696 reverse strand)
ggctctctttttcttggatttgacagctccacccagtaaggcttgtcctctctttttctttctgaaatttgtttctttaatgctgtaacactgaattaaattggcccagatagcttaatttggtttttgatctatgttttcttgaagaatttgggttttgcgtgttaatgtactgaaattgtaatgatctgtttattaatcaatccaattagatgtttttttgtgaccttttttcatgtttttttgggaattatatatgggattggaattttctaaattaactgtgatttgtttcacaggtcattgaaagcaactgtcttagattccaatctca

SEQ ID NO: 55298 - DNA, 630 bp, Populus trichocarpa
  Intron number 1 from transcript POPTR_0162s00280.1 (locus POPTR_0162s00280) derived from phytozome v7.0 (chr-ID scaf fold_162; pos 42684 to 43313 reverse strand)
ttgagcactcgtttctcaaattaagaaccgccaaggtaacatttttttcttctttttccaagataggttttccttgttttgcttttattctccatatattgtctcagttaacttgaagccaatgatcttgattgattctgaaattgattttgtttaaagttcatttttaaacaaatattagtggtagctctaatacacatttccttgaagatggctgaggttttgtttttttaactttgaagcagatattttgatggattctggactgttgtttaaagatcacttctttttcacacatgtgtgctcctacatggttttctgctattcaaatttgatgttggaagcgaattggtagcttccattggaagtttttcacttggatattaagttttgatggtgggttcttgtatgttagagcttgttggtctaataggtcctaaacattctaattagtgcattttgtggccgttttcacatgtcttaaacagggttttgatggatataggttaacttaacgcaatgttgtttttgcatggatatatagatagacaatgtcaaaagggtgatgactttggtttgtgtatctgaataagggttacttaactggtttttgcagtttgcaatagtaag

SEQ ID NO: 55299 - DNA, 591 bp, Populus trichocarpa
  Intron number 4 from transcript POPTR_0013s09160.1 (locus POPTR_0013s09160) derived from phytozome v7.0 (chr-ID scaf fold_13; pos 8737612 to 8738202)
agagggagcctccacagcgtttcattagacgcagggtactttttttccacctcatcttttatttcttgctttcaatgtgtaattaatcatgattctgtttattatacagtattcaattacttgcgttattttgttggatttaatgttagatttttgatgttttagctcttattgatgcttgataatgtcgtgttttatttattacactggtgaaaatgcttgtttacacattttgatataattattgtctgtccttgttgaacttgggtgtttccgatgccattgttctgtttttcatgtgcatctgtattgatagatagtttataactaggaattggatatgccattgtatagatgaccccatgttctatgttaatgtatttgcaaattcttttcatttttaagataatgaaccttgcttgtgcattcaagtctttttgttttttggagttgtaatttctggaaatgaattttcgaagtcatttggtctgagttggtcttgtgaataattatcctatggctactttctagtcataatttctgtctgcttgaagtttaactcattggcattcttgtcttccacgtttcagg

SEQ ID NO: 55300 - DNA, 946 bp, Populus trichocarpa
  Intron number 2 from transcript POPTR_0006s09570.1 (locus POPTR_0006s09570) derived from phytozome v7.0 (chr-ID scaf fold_6; pos 7034722 to 7035667 reverse strand)
ggtcctcgagcagatccatttcgtggatccccttcagctgcaggtgagctcgataaaccctttgcatgattatgttgatatgattatttgaatgttttatgttaacgtgctacagtttttttattttggccaacctgaatttggtggttcgaatttgggatcccaacttttaagcctatataaatggcggatatagtttatttgcttgatttcatctggtctgtgaattgtatgtttaactgtactattaactgtagattgataaaataatttgtttgtttgccaggatcttgtaaatgtttttttttttgtggagaaatcagtgctcaaattgggaattttaagaagaaaaaggatcacgttttagtggctaatgccctagatggattccattgttgtatgctacttaaaatgaagcttgctaaatgatgacaaacctttgataataaataattatggaataatcatatcaatcactccaacaccaatactttcaacatatgttaatctcgccattgtcacacattgagcctttccagtctccacggaccatggtagtgagtttttatgagttagtgctgaatttggataattgatcattctctttatgagagattacaagtaccctgcatttgttaaagacatgtttttgaaggatttctttgtaggctattggttttctgtagtgttactatcaatattcaaaagaagtttccttctccaaaacaatgaaagaaaagggattctcttactctaaaaggttcggggtttctcctcttaggaatttccttgcatcttcttccctctatgcttggagaaggcagaacaaagatacgaagacaatctctaggaaaacattcagaaattaggaatttatttactcatgtgctttattgatcatctcttgctaggttgtccagtgtacaaatcaccaaattgctttcca

SEQ ID NO: 55301 - DNA, 355 bp, Populus trichocarpa
  Intron number 2 from transcript POPTR_0003s15150.1 (locus POPTR_0003s15150) derived from phytozome v7.0 (chr-ID scaf fold_3; pos 15012355 to 15012709 reverse strand)
cgtccaaaattgctcagattacctttcaacccaaggtaaagtagcttatcatttccgtgtttcatctctctttgaaaaaaaaagaattttttttattttgtttttactctctctctctctctctctctgtatcgttgttagcaaaagaggaaatcaatttactttcttcttttgatcaaaataagaagagaagaagattcttccgattccattttcagcgcagcttattatcgtcccctgaacaattccatggatgaattcttaaatctagaaacaatctaactcggcttaatcctttcacctctccttacatttgatgggtttttgttttgttttttcaaaattatgaatgaag

SEQ ID NO: 55302 - DNA, 333 bp, Populus trichocarpa
  Intron number 1 from transcript POPTR_0003s15150.1 (locus POPTR_0003s15150) derived from phytozome v7.0 (chr-ID scaf fold_3; pos 15012744 to 15013076 reverse strand)
aggaagaagcttctgtttctaaaacacgcaagcaggcattttttaatattttgttttaagcatggcccaggcactcctctattgttactcgcaactagtggcttcgctaaacaatcgtttaaccattaagcctttgaattttcactatacaactctttcttctcttctcctccccccctaaaaaaaataaaaataaacaattaacaagaacaaaaaccaacaacatagaaagatcaagctgagatttttttttacaaaaaaaaattcctcagttttgttcttgttcttgttttgtcagttttctttctctcttccaacgataaaaacaaacaa

SEQ ID NO: 55303 - DNA, 600 bp, Populus trichocarpa
  Intron number 1 from transcript POPTR_0014s02900.1 (locus POPTR_0014s02900) derived from phytozome v7.0 (chr-ID scaf fold_14; pos 2383384 to 2383983)
taactggttacgagtcaggcgagttggctcaacaggtactctcttctgagaccctgagtctgagccttcttggatatgttgttgcagattttgtttttatggattttaatcacggttggatgccgttttgatttaccttttgaagggtgtatgatttttttattttttcttagcttgtaaactgtaaagcaagatattttttttttcaaacatctaaagcactaaagcataattgctttgttatttaatagttttccattataatttgtgattttctgatatctgcgtctggtgtctttgatttttatgatcatggatatcctaaaaataaaaaaaataaaatcttttttggattgttttttaatgaaattgtgctaattaagaaagtaggtttcttgatctgttgattttcattaaatttatcgttgcttgttctgttgttgaatctaagaaggaataatgtgttgccgacttgtgaggattttgcttacctcaagaatttttattttttttaacaagatgggtatatatgaataatttttcaagaattctgatcgtaatgttaactatacatgtcaggattcaccggtgatagcatct

SEQ ID NO: 55304 - DNA, 593 bp, Populus trichocarpa
  Intron number 2 from transcript POPTR_0013s02570.1 (locus POPTR_0013s02570) derived from phytozome v7.0 (chr-ID scaf fold_13; pos 1524865 to 1525457)
ccgggtgtctcttcctggagtgagacaagacgatagtaagtatcattagtatgattaaatgcttgcttcttactgaatttcctttttctttccatgatgctgtagtttacttctagtagatatattgtaagcataaagttctcatgaatctcataattttccttttatatcttatcagcttgttatgctcaaaattgtctgtgaaatggaaaaatcaaatgatgttatagcttgccatgtgcgtaccatgcagtgatgacattcaattgatctgatcatatttccaattccatagaaaacatctcagctttcacatgggaagacaacattaactgtgtaacttaaacttattgccaccaagattcataataattgaagggaacatctttaatttacgctggccactcttgttaaaatttctgtgatggttgcttgtttgtttgcttgaaaatgccaaacaggtaggggtgattgaaccctattaattttaggttgcatcacctcatgtttccactatattaacaaatcttgataccttttcttttcctttaccctttgctcagtgtctatttaaactatccttctttctgcag

SEQ ID NO: 55305 - DNA, 842 bp, Populus trichocarpa
  Intron number 2 from transcript POPTR_0013s13600.1 (locus POPTR_0013s13600) derived from phytozome v7.0 (chr-ID scaf fold_13; pos 14059102 to 14059943 reverse strand)
cccttcaggtctttcaatatttaacaatacatttgcatttttctattgtgtagaccataaagattgaaattctgggtcttaatgaaaatggtaaatttcttctttttttattttctttttctgttttgatttagtacttgtctaggagattttgtaaaaggctttctttttctttgctgttttaaattgaattgttggatgttatgatttgttggctaataatattgatggttcttgatatttgttgtaattaaacaactatgcttatcttgactgtaatttgaggtagtaggagccaagcttgataactgtgcttagcttgagttagataaagctcaactcacttagggacatgagttggttcctttgaagctcgtggatatacctgtataagggctcactgataggctaatatgagagcttgtggaaggtttggtatagcttcatgaattacttgttttaggtatatatgaagattataacttccaaatttcactaataatttggaatcgaaaagtcactcattaggggtgcataaaataatgagttaatatggtcgaatataaacacaattatcagttgtggaaaaagtagaataaagagatgcgattttgttgtaaatgaggttaatgatatcgatttgtttaccttcgattgcatgcttttcatgcatgtacagtatattgagttctgaaaaatttcatatgccaaatggagccaaaataaagtttagcaagactgattatcgatttaattggtctttggtttgtctttgataagtgagataagcttgtataatctttattttttaatcttcattctattttgtgttagatttcaca

SEQ ID NO: 55306 - DNA, 1045 bp, Populus trichocarpa
  Intron number 1 from transcript POPTR_0003s19940.1 (locus POPTR_0003s19940) derived from phytozome v7.0 (chr-ID scaf fold_3; pos 18580934 to 18581978 reverse strand)
aattagcaaacaaggtaccttttttttttcttccttttgatattttcaaaatcttgatactgaaccagacatgttactgatttttacccttttcatccaggataacttttagactcaataagcaccaaatacaatctttgttttttagaatcctgctatgatcttttgatgttctaagttcttttgtccaggattcaagaaaagttatatcagtgaattgaagttggaaaatcttgatattgtgatcctttcactaatacagtgtggtttcctcatattagatcttaaattagattggagggacagcgaaacctaattagagctgggaagggtaaaagttaccttacacttgaacttattaagacttcccgagtacttctctggaatggaaaatggcgacagaaaagagaaattatattatttaaattcctcttcgtctcttcatatttcttgctattatttttagttttattttttggaatgagaataaacttggatgttgggtgaatatggatttacatgatttagtcatcacttctataattatcaagatgggaatcgatatcatggttaagtcatgggaagctgaaatgcctgacagagatgtcatttcagcttcccatgacttaaccatgatatcgattgcctaaagtaaagccattgtgtggttttctgtgagtaggaaggagaaaggaataacatgtgaaaattcaggaggcatcagttatttatatttctagcatgacatccactcttcccagggacatgcaaattctgtttgctttgcctagtttagctaatacctcaatatattctgaacaatagaagccctttggatcataagttacagttaaaaaaaaaaaataacattgaatttatccttacaaaccatgtacttaattaaaatactaactgtgccttagtcactctcccctgcaggtctagatggttaaaacgttgatctattctaagtaatttgtctattcatatgtttatagttctgtgatcagactcacaggcaaaagaagatcttgaaaggtcggga

SEQ ID NO: 55307 - DNA, 767 bp, Populus trichocarpa
  Intron number 1 from transcript POPTR_0003s09740.1 (locus POPTR_0003s09740) derived from phytozome v7.0 (chr-ID scaf fold_3; pos 10980485 to 10981251 reverse strand)
gaattgaagtaacagtgtagtttaagccagttgagcatccaattgagtctctcaacaatgatcaaccaattcagtgcccgcttcctgaaccttgaattcttaatgtaagcatgattattgttttgtttctcaattttgtgttgtatttccaactttgttagttttctttttcctcttgtttgaattgctttaggtgcgaagtgtggtgcaaaatcaggcccgaattcggattcaatcccgaatgcctttaccaacaactgggatttgatcgagttggattaggactaaggaattaagttttctttctgagttggggaaaggttttgttactgagttttgttaggtcatactgcaagttcctaatgtatggaggccatccattgtggttcggtcgcaatgtttttgagcactaatttctgaagaagattaaatcattgtaacgaaaaacacatggcttgtatgagaattaacggctattaggaaattacatgtcaaaggtgaatatggcctggtttcgagctatggaagtgggctctgcatgctttttctttctttcttttgggattcagatttttgtggatgaatttgcggcagctttagaagttctccactgttttatttcacaaatttattttatttttggccacgctaagggtttgagactctaatttcaagtttctttatataggatggaagattatggaaggagtgagtatctgcaactgtgcatagaagaggtgacttgcctgtcgtgaaagaaggcgggg

SEQ ID NO: 55308 - DNA, 582 bp, Populus trichocarpa
  Intron number 1 from transcript POPTR_0013s10170.1 (locus POPTR_0013s10170) derived from phytozome v7.0 (chr-ID scaf fold_13; pos 10165341 to 10165922)
ggcaagtttaatctttctcacaggtacctgattactcacgctatctcccttttctttaatgtacagtatggtttcgtgtatatccatttccttgaatttgcatggttcgatgtagatgacttgctgtgatctcagttagcttttctgttttcagcagcaaaatgctgcttctgtgttcagaattcttctgtgaagtcttgttgatcattaaaaatcgatatgtatgactcgaagaagaaattagtagatgacctttcctttttctttcttcttgatttttctgtttcctttgatatgttgggtaatgaatttgttataagatcatccaaaacttttttactattgttgggtaatgctttaggtaatttacccgtatcgtagttgtttgttctttgatttcctggttttcatcacccactcatgcccgggaaatataatcatgtaaattcccaggtttaataaatagttaatgcgatggatatactgctttctttgactatcatttttattataattacttcagtgattaattacatgtttttttcagaattgtcctggcaccattgactagacagagatctt

SEQ ID NO: 55309 - DNA, 873 bp, Populus trichocarpa
  Intron number 1 from transcript POPTR_0013s11730.1 (locus POPTR_0013s11730) derived from phytozome v7.0 (chr-ID scaf fold_13; pos 12386395 to 12387267 reverse strand)
ttgcctcgttctatttcagatcttcgcttgctcaagtatgccgccctctttttctacttttttttaatttcaattttctgggttctttttttaatgctcaaattttgatgggttttaatttgtttggtttttgggttattgggtagcgtgtatggatagattatttgaaatggcttaggatgttttcgggttctattgattggtgtttgtgaatcataaggatttgatgctaaaaagtcagctaaatattgatggaagcagttttcctaattaaaataccttggctttgttggttaatttattgaggtacgggggttgttgaattctggaagttgtttctaagtgtaaggagatgttgcattgatagatttaatttgcttcttcatgtgtaattgttatcaagcttgaaaacctaaaagtgaaagggttttgatgtttgtttgtggtgaaactcagaaatgggatttaagttctttcatgctagattacggttgtgagcattggaatgggatgaacattctttgttcaagagattgatgaaaattttatggcagattaagtgtttttgtagattatttgactgtctcagaaatggagcggcgagttagattatcaatttcagccttattagtctatataaattgcttagatttgtaatgtacaatctgtgtatgtgttggttttgatcttctaattgtttgccatgcatgtttggaagtcagttcctcgtgctaagttgtgttaaaaaccaaaatgactgtttagtggctaagcattcctgtcaattactttctatatatccttattctgactgtgtaatattttcactaaatacattgctctttatttgcttcagagacaatcttgcaacat

SEQ ID NO: 55310 - DNA, 338 bp, Populus trichocarpa
  Intron number 1 from transcript POPTR_0006s19420.1 (locus POPTR_0006s19420) derived from phytozome v7.0 (chr-ID scaf fold_6; pos 18470856 to 18471193)
ataagcgttccaaggcttcacaaactattcaacaggtaatcttcaaaaaaaattgaacatattattgttttttctttttggttcctgagaaaatcaagaaaacatgggaaatagtttcttcacttaattttattgtatcggtcaaggtagaaagattgggacttcgggatttttagttcataggtttttaagatttgggaaattatggggtttctttgtttgattttggttttaattatggtgttagtgttgattttgcatgtttttattgttatagggattgtgatttttttgtaattgggtttgttggtaatttgatcagtggggtgcgggtgcta

SEQ ID NO: 55311 - DNA, 626 bp, Populus trichocarpa
  Intron number 4 from transcript POPTR_0021s01030.1 (locus POPTR_0021s01030) derived from phytozome v7.0 (chr-ID scaf fold_21; pos 614109 to 614734 reverse strand)
atccagtgaaggttgaacctctcctcaaaagtaaggtatggatcataatttttctatttgattatcttaaacaagggtttagggtttagaatgaagaatattttaaagcaaaagatatggtaaagaatgaagtatcgtgattctgttgtcctgttaagaaacctagaggtagttgcaatgtataggaaatgtgtggagctcttgaaagcttgaaggaaactggatgctataggggtggaaattaagtctgcctgctacgataattacctttcatttatgttagaatacttatgttcataattgatgaattaacgtgttttatgttatttttttctagaattcatgttcgataaaagaatcaaagaaaacatttaacaattactagttatagtcatgttggactatcagacactagatatcggctactagtcactttgattagaggaaaaataatagattgcttaaatcaaaagattaatcaattattcaacatataaaccttaattttaagctccttgaattttgggacttcattaattggcgttgtctgtgggaaacaaatcaaaaggccattaattattcttccttaactggttttttatatccctaatcatcatcaaaggtgt

SEQ ID NO: 55312 - DNA, 771 bp, Populus trichocarpa
  Intron number 3 from transcript POPTR_0019s05340.1 (locus POPTR_0019s05340) derived from phytozome v7.0 (chr-ID scaf fold_19; pos 5644068 to 5644838 reverse strand)
ttgggcttggagctaccaggcaagtgaagattattcctcactcatactaaccatcagtttatgaactgaagtttttttcttctttttgcttcatgcaatcagtatagatatatttaagttctgtccaaattaatttgatatttcatctagaaagaaaatcttctatcagttaccatagggtatccagatcctgaaattttatctgaaagaagttcatgtggtcatatttgtctgccaagtaaccaagaaagaggacgggtcatctttgagataggatgattaaattctcagtttgagacagcaatcattatcgcgagtgtcatccattgaaaacttggaccccttttcatctccttggagatttcacaaggaaagtagtgatatgatgacatctgcatccatccacaataggctatgatgatgtgcatctctatcagcagatagaattatatattcacttgtccttgcagttttacggctggcttttagtctgctattgatgcctatttaggtttatagttttgatcaattctgtgatgtaatgctaatttagatgtttgacatgtaactaataattgaattttcttcttcttattattcccatctgctgaaactgtagcaagacattagggaccaagggaagaaaaggaaaatgtaatggattttatttttgatgtaacgatatgtctcagcatatatctggcattcatgactaaacctgcatgtcatcgagcagggaccctaacctagttaagaggattggagctgcaa

SEQ ID NO: 55313 - DNA, 917 bp, Populus trichocarpa
  Intron number 1 from transcript POPTR_0014s16220.5 (locus POPTR_0014s16220) derived from phytozome v7.0 (chr-ID scaf fold_14; pos 12313006 to 12313922)
tggagccaaaagctactgctgctggtcttagcgtaaaattataaatttttactgtgggctgtcagtttgatttttattctattatcagaattgaaagaattaatttttggagaaaaagaaactgattaaatcacatattttggatcatttttcttggcaacttaacaagggatatatagatgttttttttcttgtctttcttattaattattgttggaatttatttatttacatgaattatttatttaccatggaagaagagtacaggaactataaattggttatatgttcgaaaatgctgtgtgagtatccgcaaaataaatggtttccgaattgtttgatgtggggtatagctttgaaacgttgtaatccattacgttatatgtgaaaggaattaattgtcttgcttgttggttgattgaatatgtgcatcatttggcttgtttactgcaaagggagtgttggcgtatctctgcacaagatcgttgatttgttagatgggagtgttattttacaaataaaatgtcgatgcacatccatttgtgtataatatgtgagtatgctttaccttttatcccaactgcgcacacttgagttcatcagtgcgcgcggttgggataaaacactcaaaataaaacaacaactagaagaacaatggttaaagtgcttgctatttttatttctactagtgattgatactggtacaaaatctgtatcgatatcatgccttaattctaaatcaagcatacatgattttgattaccagccttcttttatatatttagattttcttaattttcccatatcactatgaagaactttaaaatattttttgtttgaattttgaattagttggtctcgactgtcaatttgcaaattctcgctattattaactttattttgatgcctcttcaggt

SEQ ID NO: 55314 - DNA, 411 bp, Populus trichocarpa
  Intron number 1 from transcript POPTR_0003s03400.1 (locus POPTR_0003s03400) derived from phytozome v7.0 (chr-ID scaf fold_3; pos 3784309 to 3784719 reverse strand)
tacaggttagatatttctccttttttcagttgttactgctgattttcttttattttctcacttccaatttgattggaacggagttctttatcaaccaaatgaaacttagaagatcaatctgtcaattgttgtgtaagaacagctttcttcattggggtccaagaatatttaagaccttatattaatagtaatatcttccgtaaaacttttgaaaaaaaaaaacctaagtgagccaaaggaatggaagtaacttttatttttatccgtgagatcgtttaggaaattagagttcgctagttttgatcttggtttttctttttaatctgtggtgctagaacgtatgggttggattctgatgtaaaacttgtttttgcagaggggacacgccattctgcagtgaagagtgcagac

SEQ ID NO: 55315 - DNA, 747 bp, Populus trichocarpa
  Intron number 2 from transcript POPTR_0006s00590.1 (locus POPTR_0006s00590) derived from phytozome v7.0 (chr-ID scaf fold_6; pos 314662 to 315408)
tggcagttgaggagccattgaagagagcttatcaggtttgcatttttctgctctttatctatgtttctacttgatgggatctgtttctgcaacttggagtcaagagttttcaagtctttttgatgttgaaaataggtgaattatgtaaagaacagtgaatcatgtaattctgttaacaccagctgcataatggcactaatttcttatcaggccttctttcctagatgttcatttgtcattatttttaaatggcactatgatgttggaaatcttggatgttgttattaaggtgatagattcaaaagaaattgagggaaaaaaatgtggtgtgcagtcctagtaaggtttgatctaggtataaaggctgcatattgggcttctgggtgtgttgaatatggcatttcatagcttgatatcatcttggattgatgggaagctctgatctgaaccttaagtttgaagttccataaaaaatctgggtttggtagaaacaaatctatctgtactgacaactacctgcaaactcattttctgggttcggttatgatttctcttttgttttacttaaccaagtctataaatggcataagaatatcaaacttttctgttgccattatgtagtgtcagtagaggttcgtgtcacagcccgttttctttagatagttatgcacctcccttgccagtatatctgtttctgtttcttgctgtatcattatcggctaaactaccttttctttattttgtaga

SEQ ID NO: 55316 - DNA, 791 bp, Populus trichocarpa
  Intron number 1 from transcript POPTR_0003s05720.1 (locus POPTR_0003s05720) derived from phytozome v7.0 (chr-ID scaf fold_3; pos 7100622 to 7101412)
cctacccatttctctaaatcaggttcatttcctggcttcctttcatttttcatttctgcatttaatactttaatactgtacattaccatgctaagaaatacagggcttccgtttttgttttttatttttatttttggtttaagctgggaaactgaagaattatacgtgtaaagaaaatgatcttgtagtcactgtgttaatggcgtttcagagaattgtgcgacaattacttttcaaatgaccaacattcttactttgggttccgttggtatttgctttccataatattattatttgtttaaataagccagctcggttgataatttattatttattattattattcactgattgaggagaggaatatatcggtgtctaaagaagtgactggttttgcctggtttacctcaatatttgcagaattttactatttttgatccaatctagtttgcgtgtcagaaggtaaaggtcgcaaatagatagtgtcactgcattttctggtcttgggtcttttttaagattcgcaacgatttatattcccagtagcattctcaaaaatgaaaaagaaaatgaaaaaggaaaggaaatagaacatgaaattattgcttatagtatacgatgctgttggcttgctaattatctatgcatttgaatggtcagattatagtgctgtttggacaaaagtgctttctttcttgggtgtcgacattttgctcgaagaatatcataaaaatgtgatctttctaatgccgtgtgcaggcagtgaacattcgtggattcaagacggctcc

SEQ ID NO: 55317 - DNA, 598 bp, Populus trichocarpa
  Intron number 3 from transcript POPTR_0003s06100.1 (locus POPTR_0003s06100) derived from phytozome v7.0 (chr-ID scaf fold_3; pos 7523520 to 7524117)
gacctcgcatcggtatgtctcttctctgcatctgatttttgcgtgggctcttttgtttctggtttcttttctttttcctcttttactgaattatgcacttaaagggtgttggtaataaatccaaactctctatatagctttagtgatatttaattttttttttatagcagatacgagataaagttcatttacttggctttgaatagaaagagaacagaatttggaaacttagaatggcagtgagtttgagttatgggaagcaagttcttttcttactgtgttgtcaattaaaatttttactgcttcaaggtttgtaaatggcttggattttggtgaagatttgtttatgcacaagttttttcgttatttacttaatattgaaatctgggataaatctgctgtttcgggagggattcaggtgtttttttctaaccatcatctatgctgctcggaatatggtttgagtcaaagtaaaggaattctcctgcatttttcttttttttttttttttccctgagtcaattttaattggttttcattgcagaaaattgcattggttttttttgttgaaatcatgcagccctactagcagagagta

SEQ ID NO: 55318 - DNA, 974 bp, Populus trichocarpa
  Intron number 1 from transcript POPTR_0003s09830.1 (locus POPTR_0003s09830) derived from phytozome v7.0 (chr-ID scaf fold_3; pos 11042962 to 11043935)
cctaagattcttgtcattgaaggtttgcatccaatgtaagtaagactacagcttcgaatttcctttctttacttgtattttttatgataatgcatatgcttaactgtctttctttctgtctgcctgtctgtctctgtctttctttctttccctcactccctctttaccacacacgtgttggtgaaatctcggaatcatctttcactttccccccccagtttttaatgaagccgaggattccatcaactgaatttgttattttctgcatctgtaattaattaatcatttttttccagaaaacttaatgtatcgtataatatttatacatgaaggcataaagacacaatgtatcacatattaaatacggatcaatttttcaagcaaaaaagcatacctggagaaaataagaataccacatgttttgaggatatttttgttttttcaacaaagtgatctgaggataaatggatcgttgatcctgagatagtatatgttttatcatttatgtttgttcatttcgatatagtatatgttaagtgatcctctatcttaattacaacgctgaggaattggaactctatactgcccaagctagcttgggcctgcaccatagccccactccttgtatgcagactattgtagagagattgaattcaaggggagaatggtgaaataaatttttagatgaatgaatcaagttgtacgtgaatgacttgcttaagattcaattgaagagggatttaatcttatgaaaaatgatccaaaagatacctaaccttaaagaaaacaaatactattaacctttctgtctttgtcgatgaagggctcatccgtccaaaacaatatagggctattataccagacaaaaccagaatgtgcacaggaaagagtgatgcaatatattacaatctattgagtaagatctgtttgcaagagcttggactgattgtcaccatctatacaaacttgtaggt

SEQ ID NO: 55319 - DNA, 996 bp, Populus trichocarpa
  Intron number 1 from transcript POPTR_0006s21470.1 (locus POPTR_0006s21470) derived from phytozome v7.0 (chr-ID scaf fold_6; pos 20541884 to 20542879 reverse strand)
aagttcaaacttcactcctctgctagtgtctaaaggtctgcttttgttttctaattttgcttttgcgtggtatttatgttcttgtaatgttcctttggaatctggacaacttttcttgattttttttgggtaaggttttgttttttgttttgttttttggtttaaatcttgattggtgttttagcgtctagtcacattggatttattttttcttggattgatctctcgttttcaatcttttctgtttgaaagtttgtgagagtttgcagtgttgtgtagttgctgtgacatggaggaaaaacgaaggtcttgaagcttgcattctttagaaactactgtagttaaacctccatcgtgttcctagtttccataaatgaagcgggttttcctttaaatgatatgtagttgttgcgtgaagttttgcagtttcagatttgatttgtcctttgtttaattgcagaggaagtgtagggaagatagaatttggtttgtctgaattttacatttaaaaggaggaacgttttctttaaatgtgaacttctagctttggtaattttgagtttcaacatcgaagggtatatttcaatttcctgaaaccagcctggctaaaccttttatttgttgtattttgatttggtaggctttcatttcatttatttatttatgttaatctgtactaaatcttgaagtttaagtcctttttctttgttttagtgatcaattatatgggatctgaattatttgattttatttctggcctttcattttattggtgtagcttattcaattgtattgtgatttcagtttttgtattcgttcaatttctgttcatttttgttacgaagaataaggttttcattttcaacaatctctctggctattagctcagtaagatcattttgcttggtcaaaatgcatatcatagagtagcatgaagttcgggtcttcatatctattgtaattttgcagttccttgcaataagattcagtgaagga

SEQ ID NO: 55320 - DNA, 979 bp, Populus trichocarpa
  Intron number 2 from transcript POPTR_0019s10760.1 (locus POPTR_0019s10760) derived from phytozome v7.0 (chr-ID scaf fold_19; pos 12273760 to 12274738 reverse strand)
atctttttggtggaaataccagtggtctcattcaggcatgtagatttaagtgtctcagtgtcttgtatataataaattgttccttgcaactaatattaccttaaacaaggcaaccttagtctgatcagaatcaaaaggcaacagccaaaacaaaggacagatattgatttttgttatggaatgcatgtctttcttgtggaagtttaagaggatttttttttcccaacagttattccgaatttggtctatagattctgtgttattaccttttcactgcgccttccaaattcttgtttgtcctcccttctttcttccatgcagcaatctcagctgccaccctgtttctctgttgatagtagttgctctacttcctagctttagagaaagaatatgagaagaagaatagttgctttactttgtggcctatatggttgtgctactttgtcacagttttttctcattttccactggtaggatacctttttcttctcatagatgcatttaggtgttttcttccttatgtcacataatgtgatatcttatgatttctgatttctcagctaaaatcacagaaaactatacagttttaggagatctacttgtatatagaacttaaaacgtgagatagagttctctaaaaaattacttggtaatgttagtaagattaaagcagttattctgttgatggggaacagtaaggtctgatacctatgcctcaggtgtagttattgcttaattgatttactaagaagttccgctgggttctatagatttgaaggtgccaactaaatgaacaacagcctcttttgttctgatcttcatatgaagctttcactcatttttcttaatcgtaagaaagctagatatgatgattaaaaagtattagttgatgacatgcactataatttttatctgtttcagtatttataatcatatctgctatgagttttaaaaagatggattctcttatcttcagaga

SEQ ID NO: 55321 - DNA, 755 bp, Populus trichocarpa
  Intron number 1 from transcript POPTR_0019s10760.1 (locus POPTR_0019s10760) derived from phytozome v7.0 (chr-ID scaf fold_19; pos 12274893 to 12275647 reverse strand)
tgcttgccaggccaattgctctcattggttttgtggtcagtttcttctccattttctcatctacacttccgttttctttccgaattagcttaaaaacaagaatccaatgtgagtttttttttcgttctttttttaacaaggaagaagattttgatggtattcatgaatgataaatgattatctttcatggggtttcttgtgtttgctaaattatcatttaataatagcaatttgtgtctatgatggcttttgagcttaaggagttgaaccaggaaaaggaattgattgaaaagtttatcttaacattagttatcaattattagtacccatttaatttaaattaacgttgaggtatttggtttattgtaataatgcttaattttgagtttatgatttgcacaagttgttcataggaacatatttagttcgatgacattggttttctgttaaatcttgtgcttataataggaattgcattcaatcatttacattttcttatgtttcatttttgcaagaaccagatgttttacaactcaggattccttgacaataatgttatcatataaaagcataaaattataattgaagaacaaatctttgtccagttatgtggtcaaaatgcatatttttatctattttcttttgttgaaatgatatatgggttttctctttctaatctctggtttctagattgttaagattaaacatgcaggtaatgcaattttttttcccttggtattttaggtgattgtatt

SEQ ID NO: 55322 - DNA, 464 bp, Populus trichocarpa; identical to SEQ ID NO: 54043
  Intron number 1 from transcript POPTR_0019s04390.1 (locus POPTR_0019s04390) derived from phytozome v7.0 (chr-ID scaf fold_19; pos 4556029 to 4556492)

SEQ ID NO: 55323 - DNA, 1044 bp, Populus trichocarpa
  Intron number 1 from transcript POPTR_0018s06550.1 (locus POPTR_0018s06550) derived from phytozome v7.0 (chr-ID scaf fold_18; pos 6495353 to 6496396 reverse strand)
tctctccttttaccatcactggaagaaaatctacggtacagtatatccgttcctttactttttcggtcattgcttcaacattttaaaatgactggttttgaattttctttagcaatttgtcctcttcgatcttttgtgttcttgatcgatgatgaactaaaatgtttcctcttattttttgactttttgtgattgtgcctggtgatacaaatgtacagttgtttgagaacataattaaatgtgtagtaaaacaacgtggcttttcaaccttatctttgtcaaaaccacatattcgcaagagtttgccttgaaaatatcactaaagctattgatgttgggtgcttctgctatgatgtgtttctttagcttggcctgtgatccatcctccaaattttgtgacttttaaaaggctttttaccccttagttcaggtacttcttttaacaacttttcagcatctttctgtgcctggatgctggatgttgaacttctgagttttggactgttgcacttcttgttttctttcccttcttttctctctctttcctttttcttgcaacttcctctttctagagtttaaaaccaggttatatttttttaattaaaagtgatttccttttgcttatgacttttctgttttattgggaacttgttcactgatgatgaagctgttggtgttagcaatcagaatagtttcagttgtcttcttgcctcctttcttttgtatctgctctctttcatgtagggtctacactatccatgctctctgaattaatggtggtcatgtttccatcttatttctttttgcgaatttgccacttaattgctactcgaccatgtatatattcaagttcctgcttgctgcaaacacttctttccgctttacttcttccattttacacctcgattattttgtgtacagaattattaacctgtctcgcctgacaattaatttccctgcttacgtgagtaacaggatttgaattgatatgaccgggtgtttattgcaggtgcaacgtttcttgtgtggttcggacccacggtt

SEQ ID NO: 55324 - DNA, 822 bp, Populus trichocarpa
  Intron number 1 from transcript POPTR_0003s07990.1 (locus POPTR_0003s07990) derived from phytozome v7.0 (chr-ID scaf fold_3; pos 9466645 to 9467466 reverse strand)
gaagggagtagcgttctttcagattcaaagttgaagatgagaggtattgactttggtaaaaaaaaaagaaaaaaaaagcatggattttcccttttctattagactaaaaaaggaagtgttcttttttgttttttcgtaacttatttgtgatatgatctcacggccaagaagctcgtgccgtagagaggagaatccttctagagactcttgccagtgagcttccatcagaagcagttcgtttctcttcagagaagagagaatggcaaaatgcttcttgaacttgtggacgggacaaggctacttgcaacggttaatcaattttagtattatcttgaagtagttctctttttttttttttttttttttatattagcatatcaaaaataatagaaaaaatgaaaaaaaaatgaaaaatacagctgggctacaaaaacaaacggtgccgaattcatctaagatggaaacatgatttagtctaagaaaatagacacttctggttatcgccatcaaagttccttctgccaccaggttcttttttctctcaactcttccatgatgtcattcagatgatgtgtccatggggtttgtgtccatggggttttttgttctatgtatcacttcaagaattgcaaaattcatattcatgaaaggttgcttcatttcgtgtatgatttggcattttcaatgattttccctacaggtccaaagaccagcaatccgtctgtgttgaagaagcaggctagagcactagtcaagaactggccatctgagctactaaatttaatagagatctaacaccaggcgaaacaatcagtaaacctc

SEQ ID NO: 55325 - DNA, 657 bp, Populus trichocarpa
  Intron number 1 from transcript POPTR_0013s11910.1 (locus POPTR_0013s11910) derived from phytozome v7.0 (chr-ID scaf fold_13; pos 12536483 to 12537139 reverse strand)
ttcacagaagctctttgtcacagatttatcttctggtaatttcagttttcttcctttatattagtttcattgtagattttagtgggctttccttgttttttatgatctattgatgtcattcgttcctttcttgacttttttttaattctttgaaaattgcgttattatatgttgttaggctaaatttgtttctgtcctatgacatttttgtgtgatcattgaactgggttcttgattcttgatgttttcttgcgttattatgtacttttagggtggatgtcactgaatttgctttttacgggtttcttcttcttgatgggttgctttattgcttttcttatttttttagtcaattctcttgctcttagattatcactgaatcaggtttttgatggattcttggttgatgttttcttgtattactacgccttaataggatatctgctcttggtttatatttagctctatttgggttgtcactggatttggtttttatagtttcttttttctttcttgaattactgtttagtatgtgacaattgagttgttatttgatttatttgattctttttatatatgtttttctcattaattttgtgcaccttcaaattgggttttaatttgtttttgatggggttcctgtttcttgtatagtcc

SEQ ID NO: 55326 - DNA, 526 bp, Populus trichocarpa
  Intron number 1 from transcript POPTR_0019s14230.1 (locus POPTR_0019s14230) derived from phytozome v7.0 (chr-ID scaf fold_19; pos 14978464 to 14978989)
attggaatttgtcgtcaaaatgtcaaggaggagtgttagacaattgacattttaactctagtgtttcagtttgtctaattgttattcaatcaagtattgtctattttcttttctttcatttctgttttgatttggtcaaagtaaatcccttgtttttctgaagttgttgcagagttggtggcagcacattgtccactacagagttagtggcagataactaggaaagtttgttaagttttctcatgtatttaaagacatgaagttaaggaaatactcactgagacattttatcaaacaccttgtgtgtagttcgtgttcttcaatactcagcattgttgttcttgattgtgcatcccttcacctgcacaaaacacagcaacataattattaacagacctgtttacaaagtaatatttacgttaatcattggaatttttgtgtctgacaagttttctggctgaattttacctgcatggcaactttggtttcagggaaaatttccaggaggccaagaaattgcaataaa

SEQ ID NO: 55327 - DNA, 840 bp, Populus trichocarpa
  Intron number 2 from transcript POPTR_0013s05450.1 (locus POPTR_0013s05450) derived from phytozome v7.0 (chr-ID scaf fold_13; pos 3894865 to 3895704 reverse strand)
tgctgaagatcgaactgaaaatataaggagggttggtaagtatgattacacacaaaagcttataattggagtttgagttaacgaccatgggagttaattttttatcatagatgttttgtcttcttcaagataacaaacaaacatgtacaatgggattggacatggtatgtataatctcgcatccaacagaagttggacaaggcttttcatggctctgaactacaatttcttgaaagtgtctgataaacgagtcatcttattccagtcctggagtaatttggaagatgttaattgctagtagtaaattagtcaaacatcagcatttgatatgaccttgtttggcattcttgttctttggtctcccattaaagcagtttgattgccatatgctctgtgggttcttttgggaagtctttgaggaagcttttactagctccaactctttgttttgttagttattgtgtcccaacttccagtagtgggagaactgtaagagataagctagatttaaaacatgctaaaaaaccgaaagcaatttctcaacttttgcaggtttgcagctcactatttgaatgtcataattccttgtaagctgaagtatgaggtcatggtcaagtttcagctccaagactcattcataaacaaacttttagtgtctcttgcatatttgagctattgttaaacattgtatcagtaacaaaaagaaagatatcatactcaaggttgtgataattagaaggttgtaatatgctgtgcttgtttacatgattttttgttttgtttatctctaagttattttgcatctatttcatctaggggaggtggcaaagctctttgcag

SEQ ID NO: 55328 - DNA, 826 bp, Populus trichocarpa
  Intron number 1 from transcript POPTR_0019s01880.1 (locus POPTR_0019s01880) derived from phytozome v7.0 (chr-ID scaf fold_19; pos 1630350 to 1631175)
agcaattgacgctagaaaagatctgtggaagtaagaatccagctgacatgttaaccaaaggagttacgcttgataaactgaagttgtgtaaaacttcagttggtcttcaaggataaaagataatctcattgtttgtctccaagtgggagattgttagtaaagtggagacaaacaatgcccactcccactttatgctagtgggaacaactcatctcccacttagcataaagtggaagcacatggtgggaacaactcatcccactagcacaaagaaggagttcatgatggccatgacttcttgccccctgctctgtctataattagacacattgaagagctgaggatgtgtgcagagaatagagagaacaagagcagaagaatagagagagcttgagtgagtagagttgagttgagttgagttgagaatagttttctcctcctctttgtttgtattgtttctttgattgattaatacaggccagtagctctgtggagtagacaaattgccgaatcacgtaaatttgtgtgtgtttgatttctggaatttcctaacagtttattcatgatatgatggttttttgtcacatgcttgtccttttcaacttggaatatggctcatgttaagctgtcaaggatgagaagttggcacatctaagatccgaactgtatcattttagtctctcatcgtcataaaaatgtggaaggctgaggtcttatcaccatatgtgacatgttttttttcttatgaatcatttgtgtggcacaacttatcctccttgttccttgggcagaacttgttgggctagatctggtaactggtatcttt

SEQ ID NO: 55329 - DNA, 393 bp, Populus trichocarpa
  Intron number 3 from transcript POPTR_0003s17250.1 (locus POPTR_0003s17250) derived from phytozome v7.0 (chr-ID scaf fold_3; pos 16664544 to 16664936)
ggccctaaggtattgtgactgattgtctgttcgatcatgttatattcatgtttgatgcccgtggatgaaatctccaataaagaaaagaagtcaaatttgaatatttcttgtagctgaatatggtgtcattagattcttgttatcaattgaaaccatattcagttcgcaattggaatattgcatcaacagtaaggcttgtctctatgatatcctagataattgtgggttttttctctgtagcagcatctgattgagtatgatggatcttaatgcatttgacatcatttggtgaaacttggttttttttgcttaaccttttctctgaaggaatcgttgggttaatcggtaaattaatgatattatccttgatgattttttatttgcagggtcgca

SEQ ID NO: 55330 - DNA, 725 bp, Populus trichocarpa
  Intron number 2 from transcript POPTR_0006s27320.1 (locus POPTR_0006s27320) derived from phytozome v7.0 (chr-ID scaf fold_6; pos 25263411 to 25264135)
gtagagtgaagatcccaggtatttttgtttatacaagcatacggttttctcatatgttaaggtttttcttgttatgttccttaaattcagtacttaagtcaataatcttatgttaaagataatgtttttttgttggtttgtttggtaaatccttttgctctttgttttgagaaacatgtaaatcaagggtagagaaaaattgtttgttgttttgtgagaacattaatggatgatggatttgattgttggatcttggccggggattcgtgtgaatggaatggttatagattttgtccattcttggtgagtttttaatcttaactcaattgtgagaaacggtttttttatgctgggaaaggtgagaaaagtgatgcatagcataaggtcatggtggcaatttctttagaagtagaagtctatcctctgcctgcttagtgcattttgcaaaataagttatatcaccatgattttgttactaatgttagtagtgtatattacttgaaattatgacacagattagcttgcaagttcaatctcaaataatattttaccttaatgaatatggtatctagatgattgattcttggcttattttgttaatgatagcatggatgattacttcttacatttgtgttttcttatttgcggcccttttcctttttagttcatctaaggtcattcatgaatttgtttagcaggtatcggcacgaaaggacttggaggtc

SEQ ID NO: 55331 - DNA, 418 bp, Populus trichocarpa
  Intron number 1 from transcript POPTR_0003s06710.1 (locus POPTR_0003s06710) derived from phytozome v7.0 (chr-ID scaf fold_3; pos 8257213 to 8257630 reverse strand)
cttctctttttccccggagctttctactaccgtaggtatgtttttcctatagttttctttgttttttttaggcggggcatcagcacaacctgttcttcttgcagttaagcttcttgattatcctgtgatcttgaatggaaacaatttgttattttcgtgtatagtatttgtaattttgtatagtacaacgttgtaactacaagagctaaatttacagtttatatataccctgtgttaggaaaaatagaattgctttgagatagttgactcgatctttcacatctaaactcatttacatggttggggagtcatttgggttgtgcacatatagggattagttaatgatgatatacacaatgaattcaaaggtgaaaggaaaagctagaacatttgactgttatccaagtttccaggttaa

SEQ ID NO: 55332 - DNA, 953 bp, Populus trichocarpa
  Intron number 1 from transcript POPTR_0003s17510.1 (locus POPTR_0003s17510) derived from phytozome v7.0 (chr-ID scaf fold_3; pos 16857156 to 16858108 reverse strand)
attttcgattcttagttttttaatagcatcatcaggtaattaataaattaatcaattgttttgattgatcgtttaatgcaagtcttattttcccttttggtttaaagtttcgattattattatttttaaatatttgcaagattaataattcacgtcttcaattaatcgctcattatgtgttgtctgatttcgattctttgagtttttttctttcgatgaaaaaattaaccttatttttctttctttttggattgatgatttatttttcttatattggaaaatatattggaaatttttgtatgtaatttttcaattgaattagttctttatgtagttttgattataaatatttttttttgttaatttatacataggttttggtgtcaataattttagctgggtatttgttatttagtgaattgaatatgaaagtttgaatcttttatcatttatagctatagtttctttcaggtcattcttttctactttgagtaatttccttgtgtactgctatattataatttttatgctttgatgattgcatctcattatgtgctaattcgggaattctaaattctaaaccctaaaatataaaagctcatgtaaaggagttccctttgtggtagtgttgaagtttggcatcacgtatgtttggcaagtctacctgtaacctgctagcttctgttttacttctgctggatgctgcagctaatcattcattagtttacctcctacatgtcaggatattttatgccttcagtgactttctagtcatttaattgttgaatttctttttttaggtattttgaagtgcatttgtctatgttcttttgttgcttcagtatttgggtgatgacaaagttgattgttactggaaattgctctttgatgaattgatattgacagactggattgcttgcattttttttgtggtctcttttaggtgatagagt

SEQ ID NO: 55333 - DNA, 267 bp, Populus trichocarpa
  Intron number 2 from transcript POPTR_0006s11590.1 (locus POPTR_0006s11590) derived from phytozome v7.0 (chr-ID scaf fold_6; pos 8798864 to 8799130)
cagtagaggtgcttcttcctcttcctcttcttctttttaactgattataaaaggagggtggtgaatttattttttcttgaagctttgttctcattttgaattgattatgattaaatttgttaatgattattgacatgagctatatagttgttttgtgtatgctattttgatcaagtgaaatatggatgattacttattctgtgtttctgttctaatttcttgtgtacattagagtattcttggattggttgggcttgctccatcaaa

SEQ ID NO: 55334 - DNA, 935 bp, Populus trichocarpa
  Intron number 1 from transcript POPTR_0006s04190.1 (locus POPTR_0006s04190) derived from phytozome v7.0 (chr-ID scaf fold_6; pos 2846494 to 2847428 reverse strand)
ctcactcaggtctttcttccttgtagtcagtcatatatagcaactagttatgatcatttcaagatttcttttcctttcttttgtgctcctctctttgtctctctctcttttctctcaaaatcttgatgagtgtgtagagtatagtactcgtatgttttttggttgtggtttttgggaagtgggaaggtatttttgtggtgggtttttagatttttttcatttccttttttctttttttgttacatgggaaattttattatcccatgatgaagtggatgagaggttgtttcatgtttcatattctaagtatctttatgttcaattggcctgtacctggcttcctagctcatttcaagctgttgagtttgatcccacactcatttatagtactttcttttcttgtactaggtcactctacactttcttttgtagatggtgattcaattattgtttcaattttctcataacagtgtttgtgagcttttcttcttcttttcctcttactagcttctgttctttctgcttttaatagttatcaagcactgtagcactagtcttgtacaagtcaaatataatgttgattgcgtccatgtaagataagaggtttttttcttgatttcatgtatcatttttggtttcttgagttgggatcttccatctttatgctgtacatattaaccaagactttctaaatttagctcttcatctccagtcttttcttccacagtgtgctaattgaatttatgtgaaacaagcactttcctcatttgggtaaaagattgtgaaaagagatggacaagatgaacaatttttttgcataaaacatcccatcacacactaatgcaataaaagggaattctatttgcaactaattccatttaccaatgctaatatatattcccttgttttctgttcctcagaagcaattggctaac

SEQ ID NO: 55335 - DNA, 745 bp, Populus trichocarpa
  Intron number 5 from transcript POPTR_0006s00320.1 (locus POPTR_0006s00320) derived from phytozome v7.0 (chr-ID scaf fold_6; pos 92733 to 93477 reverse strand)
ggacagacaggggagctgatcaggaaagccaccaggtacatttgatttaacaaatttcctttctcttttgttgtttctatgttatttttcttaatgctatgagatcatgggcgtatacaagaagtcttcgtcaactcctttttttaggattttaaatgtaatttgaggactgactcatttttggtgacgttttgctgagtttgatattctcttaccatgttcattatttgtttttaaagcttagtctactctaaatgtcaattacttcctgtcattggaaatcgtcataatcttctcaaaaggctctcagttcctctccgattctaataactacaaagtagaagattcttttattgggtcacattccctcgcaatagaagctaaaagtagaatttatcgctagaaagaagaaatttcacttttcaaggctcaaaagcacacccacttggaatttggatggaaatttgaataaaaagtgaacatgctgattgtcaactcaatctgttacttgttctttataatttgaacaatgttactctgtggcagccgtgtagttcccaggatgaatgaatgcctgcctgctgaagtcctttgaggcttgaaatacaattacggaaagaaaaagaataaagaaagttttctatagcgaaagtgattttgaatctacaggtggactaaacttttttatccttccggttcttttttgcaagcttaagcaacaatctgctttaaactcagacaaagt

SEQ ID NO: 55336 - DNA, 522 bp, Populus trichocarpa
  Intron number 5 from transcript POPTR_0014s15020.1 (locus POPTR_0014s15020) derived from phytozome v7.0 (chr-ID scaf fold_14; pos 11123179 to 11123700 reverse strand)
gacaattgcaagccaggtaacattccaaagttttgataagattttactcaaacttttcatgttagtagtggaggcataaacaatctaataattaagtagcctgaacggaaattgaaagaaaaaaaaaaggtcaaataatcctggatcgcatgctcctgtttaaatgcttgtttatttttatatatatttaaattaaaacgattaatcacctcagatttcataagagaattatttgataaattatttatgtttctcaaggaagatgaagtttacaccattgaagaaagcattaatttcttattcttagttttaagatgcaaggacttgattgataaatagataaaataacatcaatcaatcgatattttaatagaaatttattaaccataaaaacttaactggaaaatatgaaatggacccttttgccttttcgttttttttcttttttttacatatatgtaattttttttttgatagtacatatttgtaatttgaattcttatttatgacaggcaagagcat

SEQ ID NO: 55337 - DNA, 596 bp, Populus trichocarpa
  Intron number 1 from transcript POPTR_0006s21640.2 (locus POPTR_0006s21640) derived from phytozome v7.0 (chr-ID scaf fold_6; pos 20673380 to 20673975)
cttgcttctgcttctgcttctgttctgtgagtatgcatgtcatcttcttagtctcacaaaattttgtcttttaatcagaatttctcagttttgactctgtcttgagtacctgcttcttctctgttttattttcttggtttcttcacagtgtatctccggtttatatggtcgcgatctttgtactctaagatgggctcattttatgtcttgtttatttattaataaagaaactgtcttccatgtctgtattttcacctcattttcttgtattttccattttatttggttggtgtttaattgctctttatagtaacatggtgatgctcttttctagaatttgattcttttcttaaattaaaaaaaaacatttctgcctcttctatctttctttacttcggctaacaaagcagattttttttttcttgggggttgtgttttacaatggaaaagtctttggtgatataagttataggaattctgtccttatttctcatattcttatgaggttgaattcagcagaaaaattggtgagaattttttattaaatcgttgaacctccaggaattagtttgaactcttgagataaagacggtcaa

SEQ ID NO: 55338 - DNA, 810 bp, Populus trichocarpa
  Intron number 1 from transcript POPTR_0018s02990.1 (locus POPTR_0018s02990) derived from phytozome v7.0 (chr-ID scaf fold_18; pos 2629273 to 2630082)
tctgccaacaactgcctgcaaccactcttctaaaggtttaatcaccattcgagcaatcttttcttgattcatgtttattaattatatatatttaactttgttgatcctatgttggtttaatcacgattctttatttagattctatgcccatgcaaaataattctttgaataatagacatgaatatctaaattcgtactttggttaacgtttgtcaacttcgatttcatttgataatgtaatttaacatgttttttaaagtattttttatctgaaaatatatcaaattgatatttttataattttttaatgattttaatgtgttgctgtcaaaaataaaaataaaatattatttttaatatattttcaattaaaaaatatattttcaaaagcactgtacattacacactcttggtttaaaaagataaaaagaacaattgaaaatcatgtctaattgtcgtttgtttgtttaagtacaatccctctaaaaaaatcactccaaaagctttatccttttttattttataaaaaccctctaaacaaatacaaaagtcatgcataaaatcttacaaactgatatattcttggactctctccaatctcaatttcttagctctgcccagccccgccctattttatatctaaaactttaaaattcttttcaataaaatgaattcatggatggttcaacttattcctaattaagaccacctcaggtaataaactcagtcatgtgcctacatgtaatcacactaattcaaggtttatgcatttcagtttcaaacagtttatccctggaagtggtgcacagg

SEQ ID NO: 55339 - DNA, 591 bp, Populus trichocarpa
  Intron number 2 from transcript POPTR_0013s06920.1 (locus POPTR_0013s06920) derived from phytozome v7.0 (chr-ID scaf fold_13; pos 5616132 to 5616722)
cgcaggtaatcctcttctctctgttttggtttttggttatcactctgacatgtttggtgctgggaatgacttagatactctgtattcttatgtttcttctacatgcttgcattttattcctccactgtatttgtcttggtttattattagtactaacaacataatttttttttttcactttcttttcaaagccattgacaattacctggttttcaaaaagtacaagtcatgtgctgttattacaaccaacctgtaatgatggaatagcgaccttgaaagtttgttagttgatttgcatgatgtgaacttgtctactagttttctagacaaaatcaaagttctattgctattaggtcactaaaacaaattggggctgatacaatgatctgaggctatgtgttagggcaggatctcagcaataacatacttgaacaatgtagtagaaacaaatttacattatgttagtgatgtttgtttatttgtttcttttaatattgcgatcttacaaatcatttctattaatgctgcctacttgctgtatcccatcctcttacagggtaagcaaccatccaaagaagacaagtttgagta

SEQ ID NO: 55340 - DNA, 886 bp, Populus trichocarpa
  Intron number 1 from transcript POPTR_0018s14310.1 (locus POPTR_0018s14310) derived from phytozome v7.0 (chr-ID scaf fold_18; pos 14560198 to 14561083 reverse strand)
ccactcgtgttgttgaggtacatgtataatttgcttcgttttgctcatcttcggtgagattcttgatttcttttcttagatcttttgtctcgttttttgttttcggaaatatctcaatgccctttgttgttttttccctaaaactttcctgaatgttcttcctcaacgtcccggctattcacggaaggtgcaagggagatgaatagtcatcttcctctgcaagatatcgaagaatctcttaggaggaggttggagaaaggatcttagagtgtttaaggtggagcccggaggttaccttctcttttcacgtgtgtctcttccattgagtctcattgaaccagaacctttgattgatccctcctgaatatatatgttacgggagcggaatttaatcttggatcagcttatatcattctgattaagtgattttgtagttaaggtatctctagattatatgttgtagtaatgctattcatcctgcttgagttttccggataataccagctgtttgatggttcgagtcgtatgagatatgtcctcggtcgagcccacccgtcaatgataggatggatattttggaatgaacagcattgcttaaagaaacttgtaacatcacatcacgattccacgagtagggttttaaattttgtaattcacatttttttagttatttattgatgttttgcagtgttacaaagcaatgatatatatatttggtcgaatatgcaatttgtatgtcagattatagttcacagaattcaaagattattattctgtctacttatgtaattagttttctgatatcaatatttaagagcaaattttaatatttgatgtgttgtgatttgcaggtggttcgtcatttaattctagagggacatattgt

SEQ ID NO: 55341 - DNA, 287 bp, Populus trichocarpa
  Intron number 2 from transcript POPTR_0006s20980.1 (locus POPTR_0006s20980) derived from phytozome v7.0 (chr-ID scaf fold_6; pos 20104422 to 20104708 reverse strand)
acgcaaccgctgtggtcagttaatttattttttttgaatttctgtttcatccaattttcaattttttgctcgatttctgtttaattaaactccatttttagttgttttcatgctcgtttaattttcttttctgttttttacttttcgagataagttgagtttgaggattttatataggaaaacttcgaatccttaatgtattttctagaattattatagctgatgatttaatttaaatctctttttctcgtcattgaattgaataggctggctcgggtattggtgga

SEQ ID NO: 55342 - DNA, 982 bp, Populus trichocarpa
  Intron number 2 from transcript POPTR_0003s04200.1 (locus POPTR_0003s04200) derived from phytozome v7.0 (chr-ID scaf fold_3; pos 4919057 to 4920038 reverse strand)
ctcgtacggaaggtttgcataaatttgttaagctatttgaaaagcaaagtttgaggaattatgcagctttattgtttgttgattatcattcttgtttaatggcatgcatttacgatgattgggtagttttgactcccttcaaaaatagtttcttgggtgccttttcttatgggggcaaatcacaatgcttgtttatcatgaaaaaaaaaacttttttgtattgtgtgagaaatgcaaatacagatatgcatacaggcactgatctgtgttccataatatatgggcgtctttagttatatgagcttactatgacacttcttactcttgagagacaagatcttgcacaaaatccatcctttagttatatgagctacaggtcaaaatcctctttagttgaattgaaaagtagttgccgctctacatggccccaactgcatgagcaaacacatatttttctcacaccataaaaatcattatatatgttttccaaaagttattttgaagaatcatttggagatgaagggtgttggttaattggctgaattttctgcatgtggaaaatattggtctcgtcttagttgtgagggctgctttgaatgagattaaatttctgctttgtctttgttctcattttgcaatccatcctttttatctttaatagtctgctcttactagttagttgataatccttagtaacagttcatactcttacaacttactttgaagtttgtttattggggttcttgacatttaaaaaatttccagattatgtattaggactgatagggttctttatgtctgcattgtcatctaatcttctcaggcttggcttctggcatgttgttttggaaatgtgtcccagtgaaacttaaaatagaaaagttaattatgagcctttaattctgttcaattgagcgtggaagttatgagatacaatgtcacatgcattcctgatgtgttgttgtatgcagcggagattaca

SEQ ID NO: 55343 - DNA, 814 bp, Populus trichocarpa
  Intron number 1 from transcript POPTR_0003s16080.1 (locus POPTR_0003s16080) derived from phytozome v7.0 (chr-ID scaf fold_3; pos 15688853 to 15689666)
cttgatagaccggttacagtatgtgaaatctgttcacaaatttaaaatcttataattgctcgcttgatttttatttttatagacatgtttttgttttttttttgttttggtataccggttactgtatgtgaaatctgttcacaaattaaaaatcttataactgctcatttgatttttattttcagacatgttcttgattttactttcttttaaaaaatttccatctgtatgtttgtttgcttgtcttagcaaaggttttgagggatttttgaaaagaagatgatggtggtgtccttggatgttgctggttgtgttattgaaataaagtttttacctcttttggatgttaaaaaggtgaaaacagagtcgttttcaacggtgatcaaataaagaaaaaagattgctatgaatatctataaagtatctgtctctagctttaacttttttttggccttttggattaagttcaattgctgtgaatagtctctagatattaactaaggagtctaatgttttttggatttgaagtggcaggcgactaactatggagccttagttgttttcatgggaaaaaaaacttggattttaaatattgttagtattaattatccaggagaagctgaagattcaatttagattgttagaaaccagtaagaaaaacccaaaatgggaaattttttcttgtgggttttcaataccattttcttgaaggctggtgcttggtatatttttggtttagttgctctagtcattgcgcttggattggcaaatgttcatgatttcttatatttttttttctcgtgtttcagactcc

SEQ ID NO: 55344 - DNA, 862 bp, Populus trichocarpa
  Intron number 1 from transcript POPTR_0003s00840.1 (locus POPTR_0003s00840) derived from phytozome v7.0 (chr-ID scaf fold_3; pos 689992 to 690853)
cctttgcattcttaattttgttttctctggaggtagtggatgtttgcaaagtggtttgctcagcatcactctcttcattgcctgatccatctgctacctcaggtgattgtttagattgtaatccatctttatcacgtcccatagatcaaatgctatgaggattgtctccatttttacagcccaaaaatcataatttgtgccattgaactgtggagttcttagatctcctccagcagagcttgatcctaccatttttgagtaagcaacagtttaatcaagttgttttcacagtttacgcccctcttaggaatcagttttgaagctctgataccatgtttgattttcagatttctaaagaagagtttgtagaagagttttatagagaagatgagaagaaattcttgtagttcggtttctctcttaattttccaatgcaggaatcctgcttttatacacattacatgtaattaataacagaatcctagattttaggaatcaattcatctcaacctttcatcaattgagggctacgattcttacacatgtaagaatcggtttgtaacagaaattaacagaaaaaactgctataactgctttaactgttttctttaactgctgtaactgcttttaacagaaactttttccattacttcattcttcattcttctcgttataacttcaggatttacttctgaagctttaaagataagtaaccagcttaactttcaacacatcactcgttcatttttgtgccttgctgaccagctcgtccactgcatccaattatgatgtctctctcttcttctcttaatcggatagtggatcatgactgacagttgctaaacccaggtggatcctgaca

SEQ ID NO: 55345 - DNA, 552 bp, Populus trichocarpa
  Intron number 3 from transcript POPTR_0013s04940.1 (locus POPTR_0013s04940) derived from phytozome v7.0 (chr-ID scaf fold_13; pos 3455794 to 3456345 reverse strand)
aaatcccaccagagctcctccgctctgccaagcgggtaagttttctcgtgtaatttcctccttgtatatattgaacaaaataaagatgcaacactacatataatcactgggcattgttacatggaaataaccttttcctcctcggtttcaaaaatgaaagcattggtgttggtgcaaattttgttttttcaatgcctcaatgattattaaagggtatatttatttaaaaaaaataaacaggaaaatatttacaagccagtctcaaatgttggcaattctttgtggaaacgtgctaaagaacaagccagtcattgcccagaaaggtcatcattttgacaactaagtctcaaatgccactaaaattaaaacaagtttctttgttgttgaataaatttgccagacaccgtatgaggccatatggctgcaagaagcttgcctcaaattaagcaattgtgcgtcttcatttattatattttttttctggcaagaaaacatcaataataagtgatttattaattattatattcctcttttttctttcatgcagaagaa

SEQ ID NO: 55346 - DNA, 675 bp, Populus trichocarpa
  Intron number 1 from transcript POPTR_0006s00850.1 (locus POPTR_0006s00850) derived from phytozome v7.0 (chr-ID scaf fold_6; pos 471733 to 472407)
ggccacgctcgctcccttgaacaagctaaaaaagcgtacgttttctttaattgtatgtgttttttgtgctaaagtttttgtctttttttgtttgttttgtgttttgatctgtttcgttttctggggttttcttgttttgtgggaatttgattggatgctgaattttgtgaatttttggaacttttatgagattttcttttctgggtttcgattgtttttactggtttttctgtgctgtaaatcatgtttttgaaacttgtttcgccactgataggtatttttctgctgttttttctcttttttaattttttttctctcgtaattgaagtgtttttgtgattttttagagctgtttattctgtatattaatctagactgattaatctgttcaactatggatgaagtttacttaagtaccatttttccttttgcttttgaatgttaattcgtattgttagattgttgaaattgtcatacttgcgtttagatgttgagttcattaaggtggttttgattggtccatgttatttactattaaaatatttgatgttatttgcagtatatgattatattttcccttttagttgataattttgcttgaaaaaggattttggctcagctttttaattgattgctttgtgaatttaggtttccgaacacctacttgcttgtcgg

SEQ ID NO: 55347 - DNA, 610 bp, Populus trichocarpa
  Intron number 1 from transcript POPTR_0006s02620.1 (locus POPTR_0006s02620) derived from phytozome v7.0 (chr-ID scaf fold_6; pos 1677714 to 1678323)
tcgcgttgaataaagcagaacttgttgatcaacaggttaattgttgttagtgcttatgcttgtttttttcatttcaatggtttttttttttcgaaatgtggttggcttagttgaattgtggaatgtgaatttagtttggcaacgggtgatttgatgattttgggtctgttcattgttttggaatgctgttggtgttgggttgttgatggttctttagttggtgtttgactgaattgtggagagtggatttggtttggtttttgttgatgctggatttgtttggttttattggaatgtggtagatgttgtgttgttatatagcatttggttactatctcgatacagaatagatggggaaaattaccttgaaactcttttatgttttcgtcaccgtccccccagctaaacacgttcttgtttcttttgtattttggctggtttaattgcttttgttaaatgtgaaatttgaattttgtgatttattttggaatatggtgaatttgttagtgattatttcaggttgttggctttaatggtttgtgattttcttttctttttttcggggatttgtgcaggtgttgagtgattgggatactagattgagaagttg

SEQ ID NO: 55348 - DNA, 751 bp, Populus trichocarpa
  Intron number 1 from transcript POPTR_0003s04060.1 (locus POPTR_0003s04060) derived from phytozome v7.0 (chr-ID scaf fold_3; pos 4696192 to 4696942 reverse strand)
gtcgagttaagtgagttgtcttcaagtatatcggggttggattgtatatatttgcgaatacagttaggcttccttttaagtgtgattctgcatgaacttgttttccagatgcatcattgatctagctatttggaacaccttaactttaaaagcaaatatttttttttataggtttttttttttggttgacccgagtcaacccatctgacccgtgacccgatcacttgaccgagtcgatgaccgggtcgggtttcaaaactatgctactaccataaagagaaggttggaatgtgtagaaattcagcagtgcaaaccaaaaataaaataagatttgaattctctagtaacagctacgcatacgtttggtttcaattaaaaatattagatgaattacacaatgtttttatttttatattaaaaaaactgaaaaaaaactattttaatatttctcaatttcttaaaaaatatatgagtttttaataaaaagaaaaacatgatccaatggaattagcaatgaaagagacaaagtaataaaaaaaaaaggaaaaaaagagagaattgaggcttgaactcaggggcgtgtttgttttcatgtttaaaaaggtatgtttaaaattttaatttttttaaaattttaaattgttttaatgtaatattaaaaataaaaaatattattttaatatatttaaaatgtttttagaaaaatactaccatagctttccattgatacgcgttttactttctttctatt

SEQ ID NO: 55349 - DNA, 1054 bp, Populus trichocarpa
  Intron number 1 from transcript POPTR_0014s08960.1 (locus POPTR_0014s08960) derived from phytozome v7.0 (chr-ID scaf fold_14; pos 6622906 to 6623959 reverse strand)
ctttcccatcaaacaagtctcactcacagcctcaggtatatcattattctttactcaagttgaatgcatgaatacacacaaggaagacaaagcaaagcaaagaaaatcccacttacaaacaaatgtaaaacaaacgcggtgcctagtaatcatagaaagtttttaatgattaattgcgcgttactctttggtcatttttggcccgcaagtttcacaattttctattaggaaatgtctcctggtagagttaaactagtacattatttatttcccatatgtctataaagtggtaggtttgagcttacttaagtggggtttctttctcatttgcgaaacaagtcctgagaggaagcaatttagcatgaagtattaattattgctccaagcagagtattttgtcgtggaatttccaggtagagcaatgtccctgtagattattatcataatattttgttacgtaaagggaaaacaagtattttattttgaaagggatgcagttggttccctgaaataaaagcatcaacaagttgaaataggaatgattatatctttggtggcttaatcatggtaactctagtattgcttttgatttccccactgtgattcgtggcattttttcggagagttgggtagaaggaaaaataggaggttatgtatagtgctgataactagtgaatgataatggcagcatgaaaaaaaaaattataaagtggatctaattcaatttacctttcatagctggtgttcatcaatggggctcaagttagggacggagcgagatatgcacctggaaaacatatgtggctttcctttttgtttctcttcttttctaggatatacggcatcttggattatttggatgttaaaaatacatttcaggaatatgcgagggttagaaacacattcgcaaaccatgtttgggtggcttttcagtgtcttgcattgttcctcatcttgactacttgttcctgttttgattttgaaattatataccaaggtttcttattcctttcaaacagagtcccgcaggtttgctcctttccagaccagagcc

SEQ ID NO: 55350 - DNA, 981 bp, Populus trichocarpa
  Intron number 2 from transcript POPTR_0003s17910.1 (locus POPTR_0003s17910) derived from phytozome v7.0 (chr-ID scaf fold_3; pos 17155265 to 17156245 reverse strand)
ggcctgaacagcttgtcagggagtttagggacagggtaaaatattctacttgctgtgaattggtgctctttcaaaatttactttttctttaatgtttgttgttgcatttttctgtacctttctgtgtaatgcatggtaatataagtgaaatttgaaacattttgatgaatttgattctattattttatcccagcatgaaatggtttaactttaggtcaattgttttatgctctagttattttcatacgaacttttgctttctgctggtttccatttacttactgtacgtgcaaatatgcctgttgattccatttttttttaatttcttatattcaagcatttccatcttgaaattagtaagattgctagggaaactatcagatgacaaaagttcattctcatgctctggatgatgattttcttgttttgcactagagactgaaatctgatgccagtaattcttggattatcataagcaaatgtgttttgacagcttgttaagtgccgtcttgtctagatcttttatcgtgtatgcgcaattttctggtaactcagaagttaggaccaagacttgttgcaactaccttacccttaaccatttgaccagaggactgagtggcatgcttattgtggtatgtgtatgttttgtgaaattactatcctgtgtgttggcagaactattttatgttttggggcatacatataactgtatatcatagtttgccatctaaagatttcatgtaaagtcttcgaaaactagcatgtgaattcagtgagttttctggcttgtcaatcttgtaagaatccttgattgttaaattgtaaatcttcttaagctaatggtgctgaaaatactataaggtgacccttctcttctgtgcatttcacagaatatacactagtttacacgaaacctgattgtatgattctgtaataattataaacctgatgctttccatctaggaattggacctcatccga

SEQ ID NO: 55351 - DNA, 540 bp, Populus trichocarpa
  Intron number 1 from transcript POPTR_0003s16190.1 (locus POPTR_0003s16190) derived from phytozome v7.0 (chr-ID scaf fold_3; pos 15794071 to 15794610)
tcgtctggtttcaatgatggcacggggctcttcttcttcttttcttttctttttaaaattaattattttgattaatttttaaataaaaaataataactactataatgctaaatattagcattatatgttatcatagtaagggtgttttgtttggtttgatttttaatttatgatttttcataaacttgggttaaagatacgagcttaaaatatcaaattctcttttcgttttttttggatttcaatatttgctagcaaataaatcgaactaaatttaaaatcaaattatcaaatcaaacaaaccagaactaaatgaattaatttatagtagaatggttctccatgaacacaaaaagaagatagaattacaacggctaggtgcttgttggcaacgcggtgctctgttgaaagttttatattttgatgcttttaatgaggtctgtattaccaaacttagtggcttcaagctctaattccacacacggttcatagaaaatgcaggcagccatatttcttgcaccaccacttgtccctcctgta

SEQ ID NO: 55352 - DNA, 656 bp, Populus trichocarpa
  Intron number 1 from transcript POPTR_0013s04370.1 (locus POPTR_0013s04370) derived from phytozome v7.0 (chr-ID scaf fold_13; pos 3002975 to 3003630 reverse strand)
tgaattgggaattacaaattctggatcaagatcatgtaagccctgatttgattttttttactaattatttataaatatcttgcttgaattctaagatttttctatgaattgaatatctcaggagtttatttttagtatttttttgtgtttggcaattcagttagattttattaatgattttatggattaagtattacagattttcgtatagaaaattgtgatttaggattttttcagtatcataaatttgatcctgtgtaaaccttttgttttaattgtaaaattaagttaatattttttttgaagtagaattgtggaattgatgaggggaagttgaggcttccgtgtttaagatagttcatacattagtctggatatgtgatgcttgagaaatataaatttgctcgtgtcaagaagttatgatcctttgagaatatgagttggtgtttgaacggcaaggagtgataacataatctgcgctgtgttttctgataagaaactataaatgaatctgttacaggctatagtaattttctggaagcccaggaaaatttaatgcaatgaaatgaggctattgttgaattggactttcggttgttggctgttagtaacatcctttgtaattaatctgttgattatttttgtttacagtcata

SEQ ID NO: 55353 - DNA, 777 bp, Populus trichocarpa
  Intron number 6 from transcript POPTR_0014s04380.1 (locus POPTR_0014s04380) derived from phytozome v7.0 (chr-ID scaf fold_14; pos 3418761 to 3419537 reverse strand)
aggtaagtggcattatcgtttggaagacttgcatgtcacatgtgaattcactgagtgtgcttctgtagctacctgtttgtatgggatcaaatcccccttgaatgtctggaagacagcatattgaatttgtcggatcattatgttgaaagagtttgctataaaataaatatcaaaccatacacacacaaacaggtcccatatgagcatatgctggccatgaggccttttgtcctgaaatcctgaattttatgacctgattattgtggcttggtgaatgaaaatgcttgctttcttgcaacttttagaatacctatacgtcttggagttaatgtcatacaaatttctcttgtcattgagtgaatatgatgtgcatagtatgccatcatgtagacagtggagcatggcaaatactctttttgtgacatgttcttccatgtaatctggtaatacaaattctttcttcactccagattgaaacattgtatgtttgtagaatccagttaggcgcatgcctttattctatgtgattattcgaagttcgctgatattttttcatatctgcctggggtatgaccatctcctcccagagttgttaaccttagcatgtgcatgcagactttgacctttgtaggtgtaaaattgattctgctgtaattgacatgtctgaccattgagataatggtcattatgcccactgtattgttaattgtgcatttttattgtacctggatgtgtttataagacttcctgaaactgtgcagattgatttgggaacag

SEQ ID NO: 55354 - DNA, 453 bp, Populus trichocarpa
  Intron number 1 from transcript POPTR_0013s11040.1 (locus POPTR_0013s11040) derived from phytozome v7.0 (chr-ID scaf fold_13; pos 11704931 to 11705383)
gaactgggatattgctcgtctgatatttttaggtttgaagattcatctacaagagatttccatatcgtgttgcttgtaatggctccaagtaagctagttaaccttgaattgatgggcaatttcataataatgttcattttcctgatgtttttcctctgatacacaggcatgatattggtttggtgttcgtaattgccgcacttatgttcgtttcattcattcttcgatccattttccccgcaagttgaaattgactctttgagcttccataactttattgtgtaaggggacaatggatcacaaaacaggaaccacagagggtcagaaaagacattgatgcatcaacaaaatggatggttgacgaattcttagctgcaggaatatcaaagaagcatggcataattctatggtacaaggatggaccctgctttagcctccaccaaaaaggttcct

SEQ ID NO: 55355 - DNA, 469 bp, Populus trichocarpa
  Intron number 1 from transcript POPTR_0018s01530.1 (locus POPTR_0018s01530) derived from phytozome v7.0 (chr-ID scaf fold_18; pos 1445184 to 1445652)
ttcaagttctgctcctcaacttgaagtcaaagaaggtcttatctctctctctctctctctctctctctctctcttgttaatattattttgactttaaaatggaaataaagtagtttctttattcaatttatttaatttttcaatatttgattgtttttcttctttatttcaattgaagtttcagacttcccatctgggttttttgaaataaaagcttttctattacaggtagagcatacttgtacaaagttataatctttattcatttatttatttcttcaggatcttcaagtatctcaaaagttgccaatctgggttctgtagagtcattgattttctcaactgggtctccaatcttacttcaattttcttattagaatctcttaaaattcaaacttcatgttttcatattacattgtttgtgtttagatttttgaatttattgtgtatttctttgttgattttaggt

SEQ ID NO: 55356 - DNA, 796 bp, Populus trichocarpa
  Intron number 3 from transcript POPTR_0003s09310.1 (locus POPTR_0003s09310) derived from phytozome v7.0 (chr-ID scaf fold_3; pos 10617696 to 10618491 reverse strand)
gaaatcaagctttccatttgtacttggacaagctggtaattgaagcatacactttacaatattatcatgctgtttctttaaatttctgcagtgggttgtttttagtttcagctagctggcctttttattgaagcaaaaattttagtaggagaaaacatatatagaagcttaaagctagaaaatggttgctccggcccttgctagagggcattaacatgcatttgtgggagactgtgttcagttaatgaagatggtatttggtttatagccactataggattggtggagattttgaactcatatcttgcgtgatgaataaattagcagtacaacttagaatacgggtttgctttttaggctaatccatttgatgatcaaccaaattaggtgatgaattttatgcctaggcttggcgaggaagcaagcttgcatcacaaatgaatgatactttgataggattgaattcaactattcctcaatatgtttaccccccccccccccccccatgttcttcaactcttaccctgccatcaatgtttagtaaaagacaaatggtgatgatctaaaaaatttcagtttgcagctcattagcaccttgggaaggtcattaagctcatcctgcaaacaaatgtgaattgtgaaaccttagtggtgttaaccacctgaaggtcctaaaagttgataaatttattgccttattggattttacagaagattaagaggtttatcgtattttgtttctttctaatcttaatttgcagtactcgcagcagccctttgctggaacaactttcgg

SEQ ID NO: 55357 - DNA, 807 bp, Populus trichocarpa
  Intron number 1 from transcript POPTR_0003s17530.1 (locus POPTR_0003s17530) derived from phytozome v7.0 (chr-ID scaf fold_3; pos 16871984 to 16872790)
tgtaagacttgcttctgattaattcatttccatggtatttcatgctcattcatgtgttcgtttgaagattttcctttcataaatttcaagatattccctgatacgatagaacgtacatattttcttgcttctagctactagatttcgtctaatctctatttgcatatgagcaggttcttttatatatatatagtagttgaatatcatagaatttactatctagagtcttataaattaatgctctaacctttaataaaaaaataatcccaattgactaataggtaaaggagcttgtcaattataacgtattatcaaattttataccataaagtgtttaaattaatctgttaaaaataattcgtatcttgttcttaagggaacatttaaaacttctatatttggttaaaggataaaataccttgcctatttaattaactaatttgaagttattgatcatcatttatgtacatgttattttatatcccgtttgtgtttttatattttaaaaatatttttgaaaaaatttaattttttttttattttaaattaatttttttagtattttcaaatcattttaatgtaaaaaagtttttttaaaaaatataaaataactaatatttcataaggatattgaagagaaaacaagatttttggcattgttttacactgattattgtccattgatgttccaccctttaatttaaataaaataaaacaccattaaataatcgatgttccaattatgtgtattgaagtatgcaccgactgatcaattttgattttgccaatatttcaggcgagaagtcc

SEQ ID NO: 55358 - DNA, 615 bp, Populus trichocarpa
  Intron number 1 from transcript POPTR_0003s09180.1 (locus POPTR_0003s09180) derived from phytozome v7.0 (chr-ID scaf fold_3; pos 10514622 to 10515236 reverse strand)
ctcatattagccccttgcaggttattaaagttattttcttgcttagattatctatttttgattatgtaccagacgatttagaagaaattaagatgcctttcaaacatggacccgatctttctatggggtgcatgcaggcaacttcctactttcttagggaaatcaaagaagaagaagaagaaaaacccagttataattaataaatggaaatgatcctttatcttttttgtttttctagatagtcattgtttttgctaccaaaaaatacattatttttcttagcctctaactagaattattaggagatatgatcatatcttcttcgaatatattaaaaaaacaaaaacgtaacatatataattttgttcttggtgaaaacttaatcatgaagttattaagtgttatacttttttaaagtgtatatatttcttaataattagcttttgtttcgatgaccctaacatatataggaataacttttatctacggctagcgataatttctaatattgaagaaaagaataataaagttgattatattctctcatcgatcatgtgattatcttcaactttatgcctttttttttcttttgcttttttatccttgacagtcagg

SEQ ID NO: 55359 - DNA, 325 bp, Populus trichocarpa
  Intron number 2 from transcript POPTR_0003s02820.1 (locus POPTR_0003s02820) derived from phytozome v7.0 (chr-ID scaf fold_3; pos 2927036 to 2927360)
cttgtcattcttctgctgcttctgcttgtagtaatgtgcagtttttttagacggtaagaggtatttttaaactaatttacgtgtcgatttaagtcttatcttctagcgatcttgcaccccttcataggcttgctgcattaagaggaatttaataaattcctttggtgttgactccaaggtttgaaccttaaaagtccataaaaggaacatgccttctttaactaccaagacaatcccttcaggttttttttggtaccatgtagtttgcttttgttgttttgattaatgtttatttgttaggtttgataggcgttgctctacgccg

SEQ ID NO: 55360 - DNA, 475 bp, Populus trichocarpa
  Intron number 3 from transcript POPTR_0003s02820.1 (locus POPTR_0003s02820) derived from phytozome v7.0 (chr-ID scaf fold_3; pos 2927421 to 2927895)
ggattgggtatatctcaataaaatcattttgtccaaatatggatgacattttgatgttcatcctaaaggttggaggcttggtggggacaccaacaccaaacccacgccgcaaattacacgggtatatggatgtagacaacgtaggatgacccgacctgtcactctttggttgggagactgagctcatttgagcccatctcattgtttattttatttatttggaattatttatgttaaacagtttaatttgatgggttgagcccaatagtgagatgttttagggtttttctatttatatgtttctctgtcattttgtgagatagttttgatgattaattaaaaatatttcagattttgcatatcttcaatccccattcttctcttcctttgctttcaattcttagcttttttcttttatgctttaagtctttttgttcgttgttccctttgctttcaattcttagccttttctttt

SEQ ID NO: 55361 - DNA, 367 bp, Populus trichocarpa
  Intron number 1 from transcript POPTR_0003s18500.1 (locus POPTR_0003s18500) derived from phytozome v7.0 (chr-ID scaf fold_3; pos 17563075 to 17563441)
tgagggcaacccttaccttgaacttggttgtacgggtaaaaattcctctctgaaaaagaaaatttgctacttttattatcctaacttaattttttttcttgggtttattttattatttttattcgagcgattattttaatttaatttcttctatgttttgtaatcaaagttaaacgatgttaagtgtcggataatgatggtaaatgcacaattagcttagaattaggaagtaatttagtgcttcaattttggtatgttcattggaaaaaagaaaaatagatttgctctagtttgaattaattacttttaagctctataacaaatctcatataaatatttgttgattttcgccttcttattttattag

SEQ ID NO: 55362 - DNA, 355 bp, Populus trichocarpa
  Intron number 1 from transcript POPTR_0013s01690.1 (locus POPTR_0013s01690) derived from phytozome v7.0 (chr-ID scaf fold_13; pos 955979 to 956333 reverse strand)
ggttgttgaccacaagcttagagctgtcggtaattcattgccatttgtctttccttcttattgtttcttttttgattttttgtgatatgggttttttatttgattaattgttttagagaaaaaggggtttctttttaaatttgttttggtgccttactttatattgaatcgaagttgtttcctctgtgcttcaaaattttgtgatatggttttttgatttgatggtgtttttcgaaaagggtttctctctaaatttcttttagttctttactttatgttggatcagagttccgttcttttcttggttttgtgatgtgggttttttgactcgattgttttgcgacgaagggtgtct

SEQ ID NO: 55363 - DNA, 826 bp, Populus trichocarpa
  Intron number 1 from transcript POPTR_0013s02940.1 (locus POPTR_0013s02940) derived from phytozome v7.0 (chr-ID scaf fold_13; pos 1777047 to 1777872)
ctatcgccggtgaccaccaggaccgcaaagaccaggttcagttccttccttgtttttttttcttggatttttagtttattttatttaacgaggtgaattagtattttatgatgatttatgtttttttgattattttttaatgttagtgtttgttcgttgctaaaaaaaagttgaataaataatgattgtagcataggttttcagctattaaccaaacagacactataatttatttatttgaaaaaaaattaactgtttttttttttttgaagtagcctgagggtttactgatgaattatttgggcaatttaagaattttttattattttttgaggtcaatagatttaatttgcttggcattactgtaattgccgggttttattagaaaagtcgataggtcgcgttgtttaccaattggcgagtggatttgctggtgcttgcttgttagctttgctggcgatctcagtaaattgtcatggaattaagcgacacggggttgaatgggagggctctgatgaccaggttgcttatagaatgtagatgtttaaaaattgtgtggggaggtagagaaagaagactatatcactaggttgtgatattttaaatgtattttcgacgtgtaatgatgctaatctattgttccagcaattttaaagagttgctatgtcaatgagaatctgtttattgtcttgcaattttgttttacttccttttgttacgttttctgtgttttgcatttccattgttaagcttatgtttagtggcttggtttccatggtttggtgaaacaggtgctttgggcttcatttgacaaactagagcttgg

SEQ ID NO: 55364 - DNA, 918 bp, Populus trichocarpa
  Intron number 1 from transcript POPTR_0006s02970.1 (locus POPTR_0006s02970) derived from phytozome v7.0 (chr-ID scaf fold_6; pos 1875229 to 1876146)
actcctgaagttagacagaaagttgtcaacaaaatgtatgtttttttcttttctttttccttttcttcttaattttattgattaagatatatatgtatgtatgtatgtatgtatgtatgtatgtaaagggcaagtcttgttttgatatcttgttattttccatctgcagtggggtttttattaagtgtttttgggattatgctgtttggttgattggttactagttgagactgtcagtatctcaagctatatgttcggaaaaaaatttattccgtgctattgatttgttaaaacaccggtcaaacatccagtcaatgtcaaaacatccggttgtggccgtgatcagatgctgaagcatccggttgtgacagacggcgtaaatcaaaacagttggtcactagttgactagatgtttcagcatccgatcaatcgtttatagaaaactaaaccttgatatgtaaatatctgttgagttatcaaatcaccaaagagattttacacaattccttaagaatccatatacgaaaggtattttgagaacaatgaatttggtttaaaccccaggcatcgtaaaaaaaagccttcgcttttctttgcgattcttgtccattgttttttataaaatatcaatatttgttgatctattttaaacttgaattgctaattctttgttataaggatacgttgtcttaatcttaatgtagtatcatgtcaactatgattttcttgtatgtcatgcatttagaattacatatcaacagttgttgttacttgttggcttgacaagctttttgtttcctcattttagatgatactaactttcatgatatgttggatatgaaagggaggagatttttattgagtttgcgtttgttgctatgatatgatagactggcaaacttgagcaaccactaccag

SEQ ID NO: 55365 - DNA, 560 bp, Populus trichocarpa
  Intron number 1 from transcript POPTR_0018s07150.1 (locus POPTR_0018s07150) derived from phytozome v7.0 (chr-ID scaf fold_18; pos 7336352 to 7336911)
atcgattacatttgcagccaagttcaaaagcgcaagtcagtctgtttccctaaattgaatctcctcatttcttccaaattataaataattgaatctcatcgattacatttgcagagccaagttcaaacgtggattggaattcttgaggaaattctaagtttattttgaattgaaatttaagatgattggttgattaaaattgaagttgtagaaggagctagtacctggacaatctctatacatgaagaaatgtatttattaactcttttttaagtgtaggggggggggggattatattaattatcaatatatacttgaaattaattaagagttcattacgtgctattaaataaaatagatcatactttgaagagtatcacataaatttaaataagctgatcagactttaaatggtgataaactgaaagaattaatgataaaatgtgtgttctgggacttgtgtaagtgtttagctcttctttgactgacactggctgtttttctttttggtcactcttaatacaggattattgttgtgctcaacttggaaactataatac

SEQ ID NO: 55366 - DNA, 464 bp, Populus trichocarpa; identical to SEQ ID NO: 54043
  Intron number 1 from transcript POPTR_0019s04400.1 (locus POPTR_0019s04400) derived from phytozome v7.0 (chr-ID scaf fold_19; pos 4573185 to 4573648)

SEQ ID NO: 55367 - DNA, 798 bp, Populus trichocarpa
  Intron number 1 from transcript POPTR_1881s00010.1 (locus POPTR_1881s00010) derived from phytozome v7.0 (chr-ID scaf fold_1881; pos 389 to 1186)
acctgctacttacttgctggaaggtagtgtttggtttggtatatagaaaagaaaagatggttacaagacaaaaaacatcatgtgtaattggaagagatggagataagattcaaagacaaaattaatcaaaatttatgtgcataggacatatatagatgaaaatgaaaatttactatatattttatattaagattgaaagttattgttttagattttttttttatttttcttgttattttcagattcttttactatatattttttaataattttatttaacttgaattttattatttatttactatttaaatagttttgtatgtcatcttaaaaaaataaaaaaattactcattatttaaggattgaaaatttgctttttctttctctttaccgtatgctatattagtatgcaaacaacaacgatattgtttgaaaaaacggtaatttttatttttaaaggcattttaaacatgtgttttatttaagaaaatatcaaattaatatttttttaatgatttttgataattttgatattttaatataaaaaataaaataaaattaaaaaataaatattttaatacatttttaaataaaaaaaacttttaaaaaatagttagttagagagaattttgtagttttttaagttgacatgctaacaggcttaagtgcaactgatatgaatcgtcgaaagctggcgcaggtttattggattaaaccatatatatgacaaataaaatgaagttaaaacatatgatggtttcagctctcggttggagggaaaatatcctgctaaagagg

SEQ ID NO: 55368 - DNA, 793 bp, Populus trichocarpa
  Intron number 1 from transcript POPTR_0006s00570.2 (locus POPTR_0006s00570) derived from phytozome v7.0 (chr-ID scaf fold_6; pos 300105 to 300897)
gtttccctacgtttgagctgtgtgattatgtgatgaataacgggttggtggtctttttttatctgactttgtgatgcagtgtttaggcaaaatgaaattagagtcaattatgctatcacttttatattggtattgttccattttacttggattccataccatattgtcttttgagtgtcttctgtattgatatgcacctaaatcagtgtcttttaggtgttatgaagccatatagagtgcatttttgtgcattatgttccatgtgaattgtaacttaccataatgtctttgacagattatttgctgctgttggcaaaattggataacaacatttttagggctgccagtggcagagatgtgattctgagttttgggcgccttaaagtggattcattcaatctgatgtagttttgttgtctgatggcctcaataacttctagcaaaccttccttgaaacagcaccagaaaacagctggtgttcaaaaattggaggccgaccttaggcatttgtcttcgcagggatcaaaaccatgcaagccccagctgattaatcgtgagcaggtacagctgttggtagaaaatatgccaaagcaggttttgttagaagcttttgaaaatataaagctcctgaattctaatcaagaaggggcttctgattctttgagtattaagttggaatcaaattcttcctttccctgttttgaacaaacatcaactgaggtggattctagtgtcaatgagactagaggcttacaggatgtttctgttgatcaagagaagaaaacatcagaat

SEQ ID NO: 55369 - DNA, 698 bp, Populus trichocarpa
  Intron number 3 from transcript POPTR_0013s02430.1 (locus POPTR_0013s02430) derived from phytozome v7.0 (chr-ID scaf fold_13; pos 1446938 to 1447635)
ctggtatgctattatattacttaattctccgctataattagcaaaatgagcttatatattgagtggtttaggaaatgtgccagttcagttaggcttgaagtgttcaatggagtcaatgcaatgcaatatcgtgttgaacaccaaaaaatggaatcaggcttaggctataagttgtcaaaggtttccagtttatcagctgacaagttttaaccaggttgtgtgccttgcgcatgtgtgttgaaagaaggcataggtctcgttcttaagtttgaggataagatagcatgaatggtagttgaagaagcatggtatgtgaagtaaaggatcaatagttttaacgaagcaaattttctgtcaatttgactgactgcaacttgatgaaagttgtagttagaaaaggtttcttggaaacggcttggcaaactggattttctactgtgaccaatccctgaggaactaagtgatggccagggttaatggtgactcatgttaattttcatttttttggtatttttttctggtttggtctggtgaaatcttggaaatagtgttgttacaagttgttaagactgtttaaaatgtcatataatattcactgttttgaagcaagttttaatggtgtagcgtttgatatgttaaatggctaaatttctcttcgttcagatacattttcaaaacctgtttctggttctgaggaa

SEQ ID NO: 55370 - DNA, 174 bp, Populus trichocarpa
  Intron number 1 from transcript POPTR_0006s14680.1 (locus POPTR_0006s14680) derived from phytozome v7.0 (chr-ID scaf fold_6; pos 12048442 to 12048615)
ctggctcaatacactacccaagaagcactcctgaggtaccgttgattccaatgtggctcattcatgggttcttcttccttttatttcttcctgattttactttccatgtttttgaataatgttttttttttttttcaattcttatgtgggtttttgattttgtggtggctgcag

SEQ ID NO: 55371 - DNA, 894 bp, Populus trichocarpa
  Intron number 1 from transcript POPTR_0003s12310.1 (locus POPTR_0003s12310) derived from phytozome v7.0 (chr-ID scaf fold_3; pos 12933567 to 12934460 reverse strand)
aaggaaaaccccctgtttggcccatctgctgctacgtaagtttgttctttctttgcttaattttgtccaaatttgtgagcttttatacgcgttttcatgtggatttggatttgtttcttggctgggtgttgtgtttgatttgggtgtgaagttttgttaattttggattcagactttgagatactgggtattggtttcttataatttgattttaggtgatcttttcttttgcttagttactggttctgattttggtattttttctttatgcttgccactagttttatttaatactgttatttaatacctgggcttaattgcttttatgacaacacatagtactaggtgttcataagaagtatttgatttgcagttatgtttttttatcttgctattattgagaatcttcttctccactttatctatcatgaaaatttgttcttgcgtttatgtattaaggcagtgtggaaatttagggtgatccacaaaagttttattactttgttatggagttgaatttatccaccaaagggctctggaagaacattaaactatttataaattcactgtatatggttatttcctgaatatggtttatagatcaaaagctacaggattaaattttaatatgtaattcaatgaaacttactatgcatatgatctcttaagtgctgtagattcgtgtcttcatgggtttgatttaggggtgtgatgacataaatagtgttgcatgtcattaagttcttacctgaccaattatttgtcgcaatttgttcaaatcgatgtgcctttactgctagtaatatggtatctgcaagcagccttctaattcatgtggcagaagaattttgttcgctgatctttacatgccaatgattgtgcagattggaaaaa

SEQ ID NO: 55372 - DNA, 617 bp, Populus trichocarpa
  Intron number 3 from transcript POPTR_0006s22570.1 (locus POPTR_0006s22570) derived from phytozome v7.0 (chr-ID scaf fold_6; pos 21550601 to 21551217)
gtggggggtgagtactaaacaaaaccctgtataacattctttagttacttattttagaactcctaatattgctggttggtgttcatatcttttatgtggtttctttctttctttctttcttttaggcctcatgaaatatttgttttgcaaatgttcccattataatcaggaccaaattattgattagtatatttcatgcatcatgataacattcattgcatgtggttggttaacaattctggtcaaaaaacttattgacttccacccccgcaagtcgcttttacaggaatttggtagaagtttagtaggaatcttgctttgaaggaagacaaagaagagagaaaagagggatgcccctttttacaattgatcatctttcttacctaccaaacaaatcaaacttttttatttgatagatcgaacactttcatgacttgctggcacttctatcatttgcatatatctagctttgcatgcaatgcatggtcactccattaaattttctagaatgtcttggttagctagtcacatcaacatttttccttgctcttgttatggctccacctctcacagcattttgttcatttgctgtaaaatctcgtgttgcagttggatag

SEQ ID NO: 55373 - DNA, 797 bp, Populus trichocarpa
  Intron number 1 from transcript POPTR_0013s06930.1 (locus POPTR_0013s06930) derived from phytozome v7.0 (chr-ID scaf fold_13; pos 5618787 to 5619583 reverse strand)
agatctagtggaaatcggcccagttcaagtgggtatgattcttcctaatcttgatcttgttttttccttgctttgcatttgattgtttctattttcttgtcatgtttgcttatgttatgtggtttctgatttatatgtttagtgatacatgtgtttttgggttgttttactcgtggataagtttaacaagcgcgatcacatttttgtaaggtaaattagggtttagctgtaaaataaatagtatttaaagtttagcttgatcacatgtgatgtgcataggttgtatttgtcggataattctgggtttgaactatccgagatgatgtattttcttgacgtgcagttattgcgtttgctttgtgcatatggtgatatgcagatgatgtatttgtcggataaattcatgttgaaattatttgaggttaacatatttataccagctcttgcttcttcttttttgcacttacctgctgtaacacaagcagtaataattgcaatgatctgacatgctatacgcgggggaccaaaacacctttggaacataatatatgactaaaaccagaattaatgccacacaattgaaggagattataggctaggttttagtgaacaagttttagcttctttgaaagcctgtattcatgggaatagcatgccattgcaaaccttaatctcagttctggtcatatattgaatcgtcttttctaatctggagttttgagctgaaagtacaactcactttgactgattgtggttttgcagagctcttacgacattgaagtcttctacttgcacaa

SEQ ID NO: 55374 - DNA, 785 bp, Populus trichocarpa
  Intron number 1 from transcript POPTR_0006s05180.1 (locus POPTR_0006s05180) derived from phytozome v7.0 (chr-ID scaf fold_6; pos 3624725 to 3625509 reverse strand)
aagaaggttgaggtacgtataggacaaattaatattgattaatttgtgattatttgcatggtggtttgttagttaatttgcttcttgtaaacattttacattttcatgcagaaaggcagtgaattagtcttgttgtgatgcttatgattatgatgatacttaagactaattgatcattactttaagagatcaaagacgaaattcagacataattggctatgcaaaggcttgatgatgtggtcaaagtgcctcttatagtcttttacttcactaatgcctgtatttaccaagttacaatgtatgaaccactggttgatggtcaaatgagcgggtggatttcttgatttatatatatttcagcaattattgtggtctaaataattgctgacactatctagtttgtggtctaaaggggttttttttctggattaagactttctatattttgcaattattgcccccagaaaagcacaatcactaacctttttacaaagaaaagtgtttttgaagcttcaagcgccaagttaaggagataagcgtgcgtgacttttacatgtgttctcatgtgctgaggaattctatattagctcataaatcaccatgttcattcattcattattttggttgattttcagtcaactctcagttgatttgattacggggatgatcttttttttttgcttaaagtagctgatgtaaaacaattaacacgccattcattatttaacaacaaatcttcaatctgtgtagaggaagttagaggagaaaagagcaagagccttaga

SEQ ID NO: 55375 - DNA, 443 bp, Populus trichocarpa
  Intron number 1 from transcript POPTR_0260s00200.1 (locus POPTR_0260s00200) derived from phytozome v7.0 (chr-ID scaf fold_260; pos 10524 to 10966)
gggtctctctgcaacgccaagcgcaagaccgttgggtctggttgcaacgccggattcatgagtaatttttataatattaattataatagtaatagtaatacttataatacaaataataaaatttttaatattattaataatattaaacttgcttgacccaagttcttgtagtttttaatcccttcaaatcaaatttatggtttttcttcaatattaataatattttatttcaaatttattaatgatgatgatgataattattattatttttaattttacacttcaaatcaaatctataattgtttttcaatattaataatatttgtttttaaattcattagttatcatattaataacattaattataataaaaataataatatttttaatacaaatagtaataagtaggagctttccaaagaaatagcttagtagccacatta

SEQ ID NO: 55376 - DNA, 702 bp, Populus trichocarpa
  Intron number 3 from transcript POPTR_0006s18330.2 (locus POPTR_0006s18330) derived from phytozome v7.0 (chr-ID scaf fold_6; pos 16697062 to 16697763)
cagaagggaagggcagagtagaaaaggaagacaaggtaatgaaaagcttttctctattttattcttgaatacccttaacatgtagtatgcgagatctgggatcgaggttcagtgtgaagtcctttggtacagtggggcagaaataaatggtgaaagaaagaatattgtcaatgaaatggactgcaaaatccaagagaaaataaaccattaaactgtataactcaaaggcttagatcttctgggattttgaagaccatgtagattttgttacagcgtgtgcatttataaaagattctgatctgctttcgtttctttatgtggcatgtacatggcgaatgatttctgcttcatggaatggaaaattgatcatcattgtccttgcagtttatttgggtgaattccttttcctcttattttctttcagccttatgatattaagtatgattaaaatcatcattatgttttacttgactcgaagtatttttccttcatgagtgtatgtatcatcatcatcattatctgctacttcagattggacactagattttgttcactgtaacttaagattctttattttcccatgaatatgtgatcaagttcagaatcatctatatatctagattcttattagagtagtattgctattttcttttaatactaaatgcttctgtttttgtttttaataatattttttaggtggct

SEQ ID NO: 55377 - DNA, 420 bp, Populus trichocarpa
  Intron number 1 from transcript POPTR_0003s14400.1 (locus POPTR_0003s14400) derived from phytozome v7.0 (chr-ID scaf fold_3; pos 14479062 to 14479481)
gaggtttattattgggattcttattgggtaattcggtaagttattgtttttgcacttcgtttttttttttttttttgtgcttgtcttgtcttgttttcctttgtcattattgctgtctgctatatagctttggatggttgtttagttagaagcatttacttctcttcattgaactattttcataagttagtcaataattttatgcaaaactgagaatagtgtcacttgttagttatgttttcttttatccaaatatccatcctgaatgagtttcacacgaataatgtcatcctcttagtttgagttatcggggaacttactcgggatagataacattactcttggacaacaaaattttggttaggtgcatccaaattatggtgagaataataatcggggaacttatcatgcagtggcttg

SEQ ID NO: 55378 - DNA, 669 bp, Populus trichocarpa
  Intron number 2 from transcript POPTR_0003s08830.1 (locus POPTR_0003s08830) derived from phytozome v7.0 (chr-ID scaf fold_3; pos 10180864 to 10181532)
ggagttgccaggtaacttctcttctagtagcccatctactgttatgtttataagatgtaaagagaaaaattgttatcgatgatttgtaatgcttcgtcaaagtttccttattcctatccaagaaatgattggcatgagaatgtgaatagtcaatgccccttggtttgagagaggtaaatatgacgcatgcaacgctacttgccatttagatatctttgggatatggattagtttttttcgtgggcaagttatgacctaagctcaataaattcatacgttgttgctttagatttaaattgttatggttcgaaagaagcttcagtattgctgtctgaagtctgaacacagatattttttagtattggaaaagcacttttttgttttgttttctttatgcttgatatcttttttgttttttgattaatctgatctcaagaatacttttatcggtggagccttcaacaacttttttcttgcaaagtccggttcggccggaaactttcatttttcagtaacagtttattcaaaggaaagcactacaagaaacagttccgccctttaattttcatatcactcttttcctgtcgatcacattgttctaagaacttggaaatctaacttaatttcaatatgtgatacgcagagaagtcattcctgccgaaacgagat

SEQ ID NO: 55379 - DNA, 484 bp, Populus trichocarpa
  Intron number 3 from transcript POPTR_0003s01850.1 (locus POPTR_0003s01850) derived from phytozome v7.0 (chr-ID scaf fold_3; pos 1714857 to 1715340 reverse strand)
gcagggaagctccagtacaacggttggctgacaaggtttcttttctgcatcataagttactcttgttatattttgctatgatggcattcactgtttctgggtaagctgacactcacgcttatgcatacatggtttgcaaattttggagggaagttcatctttatggccaactgatgtcagaaacaaacttggtttttgatacatgcatgcacatgtcggattaattaatatgattatttttaagcttgataccaggtcccatgtgttctttttattaatcatcctctattatccaattctaagattattgttggtagtgatgctttttctttacccccgcccccctttcccctaatccttgccttagtttttgtaccaaaagcatacaggagtttgagatgtgtttgtgtgcatgtaggcattcacgggaacttcactctccttttattttcttcatttcatcaggtgtctggccactttactt

SEQ ID NO: 55380 - DNA, 305 bp, Populus trichocarpa
  Intron number 5 from transcript POPTR_0013s03720.1 (locus POPTR_0013s03720) derived from phytozome v7.0 (chr-ID scaf fold_13; pos 2372229 to 2372533 reverse strand)
agaaaatacggccctatatcagtcaagtacaagtaatttcaattttgaggtttatcttttttgtttttcttcatttgtttggttactgaaaaagagatttgagtttcaaaatgtttcattttgttcttctcaataaaattaaaaaaggtgttttcttcaatctgttcattcaacaggaaaataatgtgcaatctgttttattttttttgttttgtttatgatcgattgttaaatcactcgcacactagatagggataatttgcaagagagtatttatttagtacttggcctgttgttgatatagt

SEQ ID NO: 55381 - DNA, 556 bp, Populus trichocarpa
  Intron number 1 from transcript POPTR_0014s16260.1 (locus POPTR_0014s16260) derived from phytozome v7.0 (chr-ID scaf fold_14; pos 12340706 to 12341261 reverse strand)
ctttgggttctttgttctctgattcagatcaggttctttgtttatagctctttcactatatatatacacttttgtttttggttttaatcgtgtgctagaattagtgtctgttgattgctcctgttaattagtctaaaagctcgtttccttgttatttttgaatttgaaatttattcttctttgattaacttgatgaacatacgagtaaattgtgcattctggaattaaattaggacgcagaaggacttgttactatacaaattgttagatatgtatttgtagagattacatgcatacagatatcacgagtcttgtaccttttcatgcatggacggaaatatatggctatcatatgctgggatagggaaaccaaatgacaatttaaacacatctttttaagtatgaaattagcagaaaaaattgaaggaatactttttggaaaagttgctggagaagtctcttgcatttcagaaatagaatgcttggttaaaaacttattttcactggtctgtgtattgcaggtagcatcccttgattgtaccaaggaaccaggacc

SEQ ID NO: 55382 - DNA, 513 bp, Populus trichocarpa
  Intron number 2 from transcript POPTR_0013s12140.1 (locus POPTR_0013s12140) derived from phytozome v7.0 (chr-ID scaf fold_13; pos 12779355 to 12779867)
tccttcttcaacaaaggctttaaagccgctaagtaattgatttctatcttcctctactttgtttttctcttttttggatttggaattctgggttttgtttggtttctgagaaaatgacgatattagtaataaaaaaattcaaaatttaaccgtgatgaaattcaatgtacaatctattttgaatttgttgttctttggataaattaaagaaatatggactgcacaaaatttttcttttttcatattttactggttattagcaaaaaaaaaaaagttatcaattaaggatttgggtatttgtctcttgtgctgtagatattttgtttattaaaaagtaaatagaattcatcgagaatttggagtgttcgtactttttttgagttatgttttgattaaatgctatcattacttattgtttttggggtttaaagttttgatgaggattgttgttttttcaacttgttttgcttgtacacagtaaaaccctgttgaagttgacgatacctaggataa

SEQ ID NO: 55383 - DNA, 762 bp, Populus trichocarpa
  Intron number 2 from transcript POPTR_0019s05540.1 (locus POPTR_0019s05540) derived from phytozome v7.0 (chr-ID scaf fold_19; pos 5915786 to 5916547 reverse strand)
gaggtgggtaattctgattcttcccttttcttcagtatatctaatcttttttatattaccccttttttgttttgttttgtttcgtgttattgggacgatgggttatggttgtatattgattgattacatttattatatttattgttggacatatttaagtcctgcaattttaagagtctcgatcatgattaagatagggtagatactgaacaaggacacacaccctggacactatgactactactcctaatcttcaaatattttgatgtggaatatcggaaagtaatagattttggaagttatgtaaatatgtttcgctgtgtttagtttggagataaaaaaattagtggaaggaagctgaaaggtacccatccttctggttggttagcaagtggagtaatggaatgaaggggaaggagaaagatttggatgagtgatgaaatataaaggcacccacttgattcatgtgtatcaacaaatattttaatgtaatcgcatgatcaagcaagtgggaataggctgtcgtcgatgtctttttctcatgtttttttgttaaacagtgatgtgtttattacaattaatcacttctgggatgtgggctcttttgacctttggatatatacataccccagtaactgggtgtgtgttcagccacacattttatgtgcataccgtttggcttatagcattctcttatggtgtctaacttcttctcaatcttcttcagggacgtttaagttgactcttcaattcacggaggat

SEQ ID NO: 55384 - DNA, 321 bp, Populus trichocarpa
  Intron number 2 from transcript POPTR_0022s00900.1 (locus POPTR_0022s00900) derived from phytozome v7.0 (chr-ID scaf fold_22; pos 486785 to 487105)
ggttgcaggtaaattatgcaagtctgaatctttttttttcttgttataattaaaatctgatatgtttctttgtacaaatctattgagaaatcatcaataatatgcttgtctcttgagttaatagcagttcaatgtaaacaatgtaagacttggcaattgatttgctttgctgaggttttgttttgtagagccttcttgcagtcatggaagataaactttttgagagctttttcagtcgaatgaaattttatttattagtttgattatgctaattttacttaactatcttctttgatctgttacttacagagaatcaattga

SEQ ID NO: 55385 - DNA, 386 bp, Populus trichocarpa
  Intron number 1 from transcript POPTR_0019s03600.1 (locus POPTR_0019s03600) derived from phytozome v7.0 (chr-ID scaf fold_19; pos 3700705 to 3701090 reverse strand)
tgcacgccattgagctcgcctgctcttctatccaggtcctctccttttttcattctcctgttcactgagaatctgcaagaaaatagcacctcaaatcaaaacaacgctgtcgtttcaaaaacttaacacaaggatttttttaagaagaaatagaaataggtataatcaggtttttgtttaatatctgactgaacgccgtcgtttttagtaatatgtatcaacaacttaaccggcgattaacactagttgttgttgatgtcaatcagtgatttcaatctaatagtaacggtttctgtttgaatcatttgttgttaggcatttgcataaacacgtgaatcgtgtggatggcgtttgttaactatttaccttgtatgtatgtatggcag

SEQ ID NO: 55386 - DNA, 717 bp, Populus trichocarpa
  Intron number 2 from transcript POPTR_0018s05410.1 (locus POPTR_0018s05410) derived from phytozome v7.0 (chr-ID scaf fold_18; pos 4946198 to 4946914 reverse strand)
caacatctaagggtactcttcttattcagacttgattttatggttctttatatatatatgttaatgagcaaaatgtcaatataacaacttatcatgtaaatcccaatggtttgcttgtttctgtcatgcaccatgtttctctataacgttgatgagcaagtctctgccctcccctctccagatgggacggagctagaatgacacaaatttcctcccatatgctaagaaatactcatggttgagcgtcaatgttgatcagagcattaatgtccctttgtttttattatatatatatatatatatatatttttttttttttggagattcaaatccttgactatgaatctgaagcactctgatatttttggaattcacttctttgtcattaaatagtattctcgcattttttaaacacaaattattttaggaaccaatttttatctaccaactatatcagggttattgaatcctgctgccttttcgttttccatctcctgattgatttatttttgtagtagccttcaaatttctttttgttttttctttcgtttattggagcactgttgcatgtttgattgtgcactttatggaattatttacctcatcatatgacttaatgtttgattctgccattttgatttattttttacatcaaactgatgtttgcactattaattgcttatccaaactgctgagagacattgtgcagaactgctg

SEQ ID NO: 55387 - DNA, 325 bp, Populus trichocarpa
  Intron number 1 from transcript POPTR_0018s05410.1 (locus POPTR_0018s05410) derived from phytozome v7.0 (chr-ID scaf fold_18; pos 4947020 to 4947344 reverse strand)
gatccaagtacagttttacttcctgtctctgttctacttgcttcatacaacgagagtagaatcaatctctctctctctctctctctctctaaaactacacaactgggtgggggtttgcttataattatgaattgagatggatggaagatgggtattgttgtgtactatgaatgatttgaaaaaaaaacttaggaataataggaatgggaatgatgttgtgataaaatcaaaggattttgtatatctcatacttaaactaatatgttaatgtgcttgtatgaaacgtcagattttaactgctgacttcctcctcctgctgttgcag

SEQ ID NO: 55388 - DNA, 387 bp, Populus trichocarpa
  Intron number 2 from transcript POPTR_0006s26200.1 (locus POPTR_0006s26200) derived from phytozome v7.0 (chr-ID scaf fold_6; pos 24474485 to 24474871 reverse strand)
aaccaaaggtgattttgactacacctttgatttttctgtatttgttttcactctaattctcatttgttgatttgtattttgtttattcaatgaaaatagtgtacttaactccatgcacgtgtaatcttaatccttcattagactgcttatgtaatctgataatgattcttgcttttgtagtggggttaggtccttcttgttgcttttgatcaatacaataacttcttttatagaaaaaagaagaaaaataaatatttttcattgcaaagtgtttgtgagaatgtgaaagaaaagggctgtacagtgtgtaatgatccttgaattggatttactgcaacgtaatgtgttttttttttttttctttttttgggggtcttaaattgacag

SEQ ID NO: 55389 - DNA, 534 bp, Populus trichocarpa
  Intron number 2 from transcript POPTR_0006s14880.1 (locus POPTR_0006s14880) derived from phytozome v7.0 (chr-ID scaf fold_6; pos 12359864 to 12360397 reverse strand)
gtctctgcttcattcttcatgtaagttaagctatgctgaaatgaattattgttgttcgtttcctccactagatcagatctacatgtaatgtaatttgctaaaaaaaaaatcaatcaccagtcaatgatttgtgattttaatttaatttgatttgctcctcaagttttaatcttctatttaggtcttccatgagatattatcactccaccagaatttgctgcagattaattattacaaacatcctcggtcggtcctcgtaaatacttaacatactgttataatgaagattaacatgctatgtagcaggcattctgttttcttgttttcttttttagaacaaagagtattttatttgaaaatgttgttgttgatgaatttatgacaagatctgctgttttgtttgaacatgttgttgttgttgatgaactatgaaaagatctgtttgtgtgcaaatatgtgccatctcgtttctgatgttatacaagcgtggtttatgcagctacgaagcgacctcttctaggagaagccgcagtt

SEQ ID NO: 55390 - DNA, 520 bp, Populus trichocarpa
  Intron number 1 from transcript POPTR_0018s11880.1 (locus POPTR_0018s11880) derived from phytozome v7.0 (chr-ID scaf fold_18; pos 12530577 to 12531096)
gaccccttaaacagcaaaaccttcttctcaaacaggtggtcaatttccactcgtttcttcattgaagattgaagcacgcttctttatatctaagatttgatcataattattaattcctaatgttactaactgaggctggaaatccaaccacctcattttttctgttatatttccctgttctacaagttaacgatctggtttcatgtttgtggcttcattttccaaatattttgaaatcgaatttatagtttcaactaatcaagttaatttcttcaaagggtttctttgcatttttctcagttgtctcatttgtgttggcattgctggtttggtcctgtttgtggtaaagagattcggtgtgtatccatatttgttgtgataggaagtactcggtgttaatgcttttgagtttacatctcattaacttcacccaggattagtcaaatcaccacagtgtatttccatttgatgtttcattttatgttcctaattttgattggagatactgttattgatgaag

SEQ ID NO: 55391 - DNA, 474 bp, Populus trichocarpa
  Intron number 1 from transcript POPTR_0003s04900.1 (locus POPTR_0003s04900) derived from phytozome v7.0 (chr-ID scaf fold_3; pos 5949356 to 5949829 reverse strand)
tactaggaacagattccaagttggagattctctctgtgagttcattacagttagctagatcttgactatacagtttgctttctacttctacacctaagttttttgaatgctgttaagattgtatgattttctctggttatcaaatatcttacttggtatgtaaccgtcgttcggttactgatgtttacatggtagaaacgtaaacttttctttcaccaggaaatttctttttgatgttcttctacttgcttatgagaaagtaaagaaggaaatatgtgctgtcctgtgtaaacatcataattctgaaaccagataagaatgatttatgaccaaagagtagtactgttcttgcaagagaatgagtacaagcttaaaacagtgttttcttttttgtgcagccagtagtagcatttacgttctcagatttatgattcgttctgttgttttcgttctttgcagcctttgattataaga

SEQ ID NO: 55392 - DNA, 755 bp, Populus trichocarpa
  Intron number 4 from transcript POPTR_0019s08410.1 (locus POPTR_0019s08410) derived from phytozome v7.0 (chr-ID scaf fold_19; pos 9938273 to 9939027 reverse strand)
ctatatttaccagcaaaactttcacctgattcaaggtaggtgatcttttaatttatgtgttttcttgcattcattattttttaatctttttttattaagttaaaattaaaattatagcagtaagttgtctttgtttataagaacttcattttcccatacatgcattaacatgatggtagccttcgtgtactaaagattctattaagttcttattatatgtggatggaagtaatgatcctactggggccagaagttcattatgtgtgtgtcgccctcaatctgttttgattcagtatggcatgtaaaacccacttccaattggatgtgttacaacagtgttgtagttttgattaccgtatgttttttctttgataacttgtctagatacaactactgaggcatgtttcttaagttacagagtactgactttgacttccatttattccctgctcacgaatgcttgtgatggaatatgctcagtagacaccctccagtggaaaaaccttgttagaaacaaaaaatttgtttgtggcttttatatactttgaagttttattcattctaagcctgtattcttgggttatcaacgtctcttgtgtgcacaatctcatcatatataataaatattgaagcagaaataattcttgttaaaagaaagaaataaagaaacagaaaatcaaaattgaaattaattcttcctgctttctgcattcctattgaaacaataactttctgcatcatgatttgtagggata

SEQ ID NO: 55393 - DNA, 450 bp, Populus trichocarpa
  Intron number 1 from transcript POPTR_0014s11320.1 (locus POPTR_0014s11320) derived from phytozome v7.0 (chr-ID scaf fold_14; pos 8423823 to 8424272 reverse strand)
ttgttggtgagactggtagtggtaaaactactcaggtttattcccttttctttttcccttttttataccttgttttttgattaattatagttttgtgtgctgtttgtgctgtcatttgtttgtcttttttttaatcgaccagctctcttgcacgcaaatactttagtagaaaactagcgagcttaggttatcgtagattaaaaaaaaatagaattcttcagctcctctatgttacttctttgatatattttcagtttgatatattctcactttaaaaataataataagaaaagcatttcctttcggtttcccatatatgaattatgctatgcttaattgtgggtatacaatgtaatgaaaactagacaaaaaaaagaagcaatacttaactaactagaaatttgtgatggtacagattcctcagtttgttttggaagctgtcgaattaga

SEQ ID NO: 55394 - DNA, 806 bp, Populus trichocarpa
  Intron number 1 from transcript POPTR_0003s14650.1 (locus POPTR_0003s14650) derived from phytozome v7.0 (chr-ID scaf fold_3; pos 14665288 to 14666093)
tcttgccaccaaattctcctgttctcattttactggtctgtatgaatttattataaagcttcttaaactttgtttttaatttttctgtggataaattttctggatagattctgtttatgtatactagcagttgtcttgtttagcttataattgataacgaggtgagaagttcgtgatttcttttttgaccttttgatataatcatcaaaaccatctgaaaacattcgaacaaaaagctgaaaagtcacatcaaaaatcactttgaaatgcagttcaaaaacattatcaaacgcaatcctagtgtattcaaagacaccgagaaattaaagcattgataatttccgaacggatgtttcaaacattgtcaaccggtaccttttcaacagtcttactaaaaatattgataaaggcaccgactagaacaatcaaatttatttatttttgttggcatgactctgtcatttggtcactatctcggaacaaaaaagatagatatagaagagaaagaagggacatgtctgcatgtctataaattcactccaaaattgtctcaagcatagatttgtttttatgtctttgtctccgtctctccacccaacacacatctcttttgcatctttcttttctgttatgggatattaaccagacgcaacctaagtctacgtagtaagggcgttatgcacattattgattggtagcaaaaggaaataaaggttttttttttttatatatatatatatattaagagagttgtttggatttggttataatgcagccaggattaacaggagggagtggggattcat

SEQ ID NO: 55395 - DNA, 1010 bp, Populus trichocarpa
  Intron number 1 from transcript POPTR_0006s21300.1 (locus POPTR_0006s21300) derived from phytozome v7.0 (chr-ID scaf fold_6; pos 20365721 to 20366730)
gttgtctcaattctgccattgtgaatcttgcccttgtaagttttcttttttcctctaatgtttttgttagaaagctgtaaacttgatatgggatttccgtccaatttgaaaacttttggatggcagttgtcggctgattttttttttctgctcagctttggtgcaccgagattaaggctgattatggttctcgtaaatattagattagctgatgtagtgggtgattgttagttgcctagttttgtttgtaaagttatttgattttgtcccagaagtgaagagttggactgaaatattcttgctcatcttgaggataggatttatgagaagggtaggtgaaaaagaaattatggcaatgaaatgaactgtgacaatggtcgggaagtaattaattgtttataaattgattttgcgtttctaagatggatgtaataatgttttgaattggttttgtggtagttcaaagtgtcagctgcggtagttgactgaaagtagttggagtattttcaagagatttcatatgcgtttttatcctgttttgaactgttgttgtattttcaaaattgctataacaacttatgacagacacttcctatttgctaaactctcaaaagtttactgatttttttttctttaatttgtcaccattactgattcaagaacctgaatgtatctaacatacaaaggagggtaaaaatgtagtttgattgccttctacggaaaatgtagtttgatttgacgtgcttttggttagctattcatgtcttatgatttatgataaatgtaatgatccatattggcttctggcaagtttttgtatataaaatattttagtttgaatatttgtgacaattcacaatataggttattaaatcaacttacttttacagcctcaatttagaacagaataatttgagggctgaatgtttgtaatggggtttatatctttgttataattaaatttcttttttaattttgtagtgtgcgatcaaattttcttttcagaattg

SEQ ID NO: 55396 - DNA, 969 bp, Populus trichocarpa
  Intron number 2 from transcript POPTR_0003s18900.2 (locus POPTR_0003s18900) derived from phytozome v7.0 (chr-ID scaf fold_3; pos 17809170 to 17810138)
tcaaagctttgtgtttggcatcttgtctgattcaggtatttaatgttcttgttagattcttttggtttgtgctttatttattaatttttttgttgctagatttgtgtcaaccaaggaaaaagtttcaatttttactgttcctattgatagtctgggagattagtatactctgttaaatacagtatggcatggttcaatttttagttaattttatcgttatagaaattaatggagtactattgcaataaacgacaataggatttccttttatggacttctatagttggtgagcagaaatgagttgtatgcaacaagtttgtttactttttcatgattttggaaatgggtttcgtcttggtattagttcaagtgtatggctgagccattgttcgtttgctggcttccagatttggttaaaaacatttaatgaaatagagagatcagggaagattataaagcgtttcccccttcactttatggttctatgatccggctattttttttttttgttttaaaaaaagtttatcatcactagatactcaaatattgttagctaagcctttttattctttgcatgagttcttagtgctactgtttgacctttctttgcattgtctgcattcccttttgaggagtatctggatgttaattctcatgcctgtatacccttttgttttgcttctataatagctttaaataattttgttaatcttcatgctttgacttggtttagattttatttgggtgaagcatgctattttcaccccactggttgtttgttgcaataaccagattgtattggaaaaataatgagttttttgggagatggagtgcaaatataaaagactagagagcaaaaggcggcctttttcatcatctgtgttaattttgtttccacatcttttttggttcaggttgtttctcattatgctgattgaatggttctgagctgtttaatagggattgtct

SEQ ID NO: 55397 - DNA, 692 bp, Populus trichocarpa
  Intron number 2 from transcript POPTR_0018s06590.1 (locus POPTR_0018s06590) derived from phytozome v7.0 (chr-ID scaf fold_18; pos 6624451 to 6625142 reverse strand)
ggtgaatcggcttgctcggctaggtatggagaattcttccatcaagtttttaattcttctttgccgcaggagctttcttaacaatttatttcatttgatttctgatactaggttatttaattgatctactgtttaaggtaattccttagaggttaactaggggactgagattgagaacccttttcctaaggatgcaaggcttgagctaatataaataggctgctaaggttatattatacttgtttttcattattatatttatctattcagattccagaggtttcttatgaaccctaagttctattttcttgttctaacttcggttttatcctaattttagccattattcagctgtaatttatgttttcccccacccactctatggcattcctttcctgaatttccaccgtgactggcagagagccagctgcagtggacttcatcgctacactttgcaaatatacatttagctcggtgtttacttctaagttatctagttggtcaagcatactaagtggtgttcgtgcaaaagatattctcaaattaagttgctttgcttgtttgctttactggagtctcgcctgttgagttttacttgcaagtgaaacaccattttttcagaaagaaaactaatttagctattggtcgagatgtcaggtgttctctgtagttgtctgcttcctgagagcctc

SEQ ID NO: 55398 - DNA, 459 bp, Populus trichocarpa
  Intron number 1 from transcript POPTR_0018s06590.1 (locus POPTR_0018s06590) derived from phytozome v7.0 (chr-ID scaf fold_18; pos 6625405 to 6625863 reverse strand)
gttcggttttgggatttttcattcaggcattgaaggtgtgtgcgcgtgtcttctctcccttttattttggtgatttggtttcttgatttgatgattttgaatagtgaagtttactgtgttaatcccatccaatataatctatacgggctttgattttatcaatattttaataacaagattctcatggcccgcctgaagtatgaaatttttgtggcctggagctcgtcgctcatggtatcaatgttctaaaagccgtagaggctcagatttggtgagagtacccgtagcctgtgaaaacctgttatgttcttgggagtgagactagctttggccaagtcataatgcatctatagtctgttttaaaagacgtggatttaacattagaatctcaatgtccatagccattcccttaaaaatctaatgaactgcattgactttctctacgtgtatgaacagtcc

SEQ ID NO: 55399 - DNA, 651 bp, Populus trichocarpa
  Intron number 1 from transcript POPTR_0003s05280.1 (locus POPTR_0003s05280) derived from phytozome v7.0 (chr-ID scaf fold_3; pos 6514506 to 6515156 reverse strand)
ggtgcacccctggcatctgtcaccttccaggtaatggcaaaacattggtttcttctatagaatacaagtctatctttccacttttgttttatgttacttaattttagtttgaatacaattttgtcataatcttctggtttttatttttgttttattgttgtgatatcttggaatgttcaagttcttgcggtgaattttaagtgatcacaaataggattagcaccttatcatgattaggtcatattttcaatcttgtttggtcctatgagagttgggtttcgattttcaaataggataatgaagttgatatctggtgaaaaaccttggtgagatacgcaaggactagaatatggcaatgatgaaattcttggattgctttttgtcaatcgttctgtaacttccaagtggtggaaagcgactagttttaatacttgaagaaatgtcattctcaagaatccgcctgcttatgtgatattgttgctgatagcttattgcatctcctccatctccagtctcatataaatcatggatcttatttcctgattttcatttccatcaaaagaaaggaagctttatgactttccgtttctgatacagaagaaaaattactatatcgactcagggacactgacaatgtgtgtggattgcaga

SEQ ID NO: 55400 - DNA, 130 bp, Populus trichocarpa
  Intron number 1 from transcript POPTR_0003s20380.1 (locus POPTR_0003s20380) derived from phytozome v7.0 (chr-ID scaf fold_3; pos 18885600 to 18885729 reverse strand)
ctttgcacaccagtgcagcttatttttggccaaaggtaaatacattagttctgtttttcctttccaaaatttactattattggaactgatagggttatgttttcttcttttgattactttgacaggtttt

SEQ ID NO: 55401 - DNA, 540 bp, Populus trichocarpa
  Intron number 1 from transcript POPTR_0006s08660.1 (locus POPTR_0006s08660) derived from phytozome v7.0 (chr-ID scaf fold_6; pos 6345568 to 6346107)
accagatcagtcaacgggtatccagatccgtttcttcttcttcttttttttttttcctccagttcttgatacatgttgctcatggatttggatttggttacaaacgattcatcgcccgatgtaattatgttctagtttagtgccttggatgtaaacaggatttattgatgatctgtttgtttccttatttgttttgctcgaattgaaatcaatttttttactagtatttatcaatgattttattataatatagctttatgaatgatccatatcagcgtgatttatatctttgagatgcgtttcgaattttgatcgtgaaatgatgagcgggcttgggttaattttagttgtgttaagcacctgtcatgctcaagctggcaggattaatattgaataggttctgggaatcacacttttttgcatttgtcaatatgtttggtaagccaggcggaggatatttttgacaattttaacagtttcgtggttttgattggttgttgacaagctgtgtcggttttcttttctgcagtttagtgccat

SEQ ID NO: 55402 - DNA, 753 bp, Populus trichocarpa
  Intron number 2 from transcript POPTR_0006s08660.1 (locus POPTR_0006s08660) derived from phytozome v7.0 (chr-ID scaf fold_6; pos 6346181 to 6346933)
gaaacaagaggtacactgctgttcttctgtgttttgtgtgtggtgacgagctaaagttagtgcaggaagctggttcaatcgaatgaatacggttgatggatttgaaacacgatactgggtctttccggaacatgttctggacagcagtgcatctaatcagctttgtagtgcatatgttcatgcaattctgtgcatctgtaggatgagttctgacttcaaattagtttgggacatcatgatgttggcaaggaaagaataaaagacacatcagatcaagacctgtttagcatagtttacaattcttgattagctttacaggggcgcatgttcatattaaatattatcttaaatatcagctgcaccaactgacactctgcatgcttccatcaggggcaaggctttgatgttttaaaattgaatataattttgaactgtagtccgccacaatatattagatcagtttagcttgcatgaagtcaaagctctattggctatatcctatggctcctcatgcaaagttatatgcaatgcgtgtctgacatagtaagatagaaatgatattcttttagaaactcaatttctagtttcattgatgcttaaatgaaccctcctgtagcaagaagatgccttttgtatttggtggaataaaatgatttagtattctcatacaataaatcagggaaacatgtgcatgtgattatattcatctgttgttttcttgcttttctccaggatcgggacagttattggaag

SEQ ID NO: 55403 - DNA, 733 bp, Populus trichocarpa
  Intron number 1 from transcript POPTR_0018s08460.1 (locus POPTR_0018s08460) derived from phytozome v7.0 (chr-ID scaf fold_18; pos 9396764 to 9397496 reverse strand)
aactttgaccttgtttcttctttgcatttgctaaagtatgtctttctagatctttgctttcttgggttcaatttatgttgtgggatcttcgtattctattctattctattgctctaacagttgcagatgaacaattgttttcttttaaaaaaaatcctttgtttttttcatttttgggtttgatttagaacattcttgggttttttgtttctcattatctttatctgtgtatgtataattctcattttgttcctttttcgttctcataaaaatgataataataattcctgttggatgcaattaaatataattattttggaagttgttttatgataatgaaaaatttcataattaaaacattgattgttattatgcaatgggaggtaggagataagttggctgaagggtgtgttgatgctatgtactgccgtgaagtggtaaatgccaagacctgtgtaaacttatactgggaatattaattgtacatataaatggctgataagttcttgtcattaatgtacgtgtgtctcttatggtgttttctagttttttgttttttgaacttggagtcacgagaaatgacatgtaattttgggtactggttattttgtacaactcatttatgtgagttggactggtgattgaacttaagtatttttacaaggaagatgaatctaatctttaatggcccctgcaggtttcttcactctgatcaggtcaaattgaccacatt

SEQ ID NO: 55404 - DNA, 534 bp, Populus trichocarpa
  Intron number 1 from transcript POPTR_0003s16010.1 (locus POPTR_0003s16010) derived from phytozome v7.0 (chr-ID scaf fold_3; pos 15644768 to 15645301)
ctctgtcagtcctctccttttcaatctgaaatcaggtactacttcttcactccattttccaacctctctcttgaaaaaaggtttaatttattaatcttggagtttctgattttgttgatattattgcattttcttgttttctccgcctgcatgtgctagcagttgtttttggagtttttcttttcttttcatgaactgaatactgggttttctctgatttgagatttccagtttgggactgtcattttttttgaaattctgaagctttgctattcgaagttatttccgttttttagttgcattctcagcttccaagcactgcatagtgtggtgttgtgaaatgaactgattgcgaatttttttcttactgttatttgattccaatgttaactaaaaatggaacctttagatctgcttttaatttaacttttagaaattcatattgtgtttaagctgttttatgtgatgtgggtactatttgactgatatttctgtttcctgtttggattttcagctaaatctactgactttaca

SEQ ID NO: 55405 - DNA, 372 bp, Populus trichocarpa
  Intron number 3 from transcript POPTR_0013s10230.1 (locus POPTR_0013s10230) derived from phytozome v7.0 (chr-ID scaf fold_13; pos 10247981 to 10248352)
tggtcaaagagtaataactgaaatagtaatttgtttatttatctatttgctgcacattgctgacagttagctaagtagatgtgaatggcatgcttcatatattttgtttgtaactggtttcaaaaggcatggagattttccttttcatttgctgggaagttgagttgtatacttttttctttgattaggataaaacatacaaagctaagggcaattttttgtttcttgaactattttaactgctgattgaccattcactatgaaaatgtgtgttgaaaacttggatggttgttgtggttctacaatactggcccatttactcgaagaaattttatggcaggggtgaaacattaacttcaatttccaagcagt

SEQ ID NO: 55406 - DNA, 1034 bp, Populus trichocarpa
  Intron number 1 from transcript POPTR_0003s08010.1 (locus POPTR_0003s08010) derived from phytozome v7.0 (chr-ID scaf fold_3; pos 9474737 to 9475770)
ttcaggtatgttcaggcaagggagcgtttgtttgcctagaaaatggtttcgaaaaaattacttttcaaatttttatatgtttgcttgtcattagaaaaattgatcaacaaaaaatacttttcagttaaaaaaaatttggcttgattttcaggaaagtattttctttttattttgaacggaaaacacttttcaaaagttatgaaaaatttagaaatatcatattatttactgattatatcaaatttggtcctcaaacttttgattgatatatattttgtttgaatccttcttcttctttttttcaatttcatcccttaaaatttgatttgatttgatttttatattaactttggtcctcatttttatgattgttatttgcttttctcttatcatttttttaattgaaattttttatctatcaaatttggtcattattttttttattgttacttattttatttgaaataatttatgaaattttaattattattattttaatttcatcatcttttaatttttttatttgttaaatttgatcttcattattttgattattattttttttgagataatttatgaaattatatttttctcaatttcattctcattcaactttttaatttgtaagatttgttcctcattattttaataaacttgaaaataaaataaaatattaataagctatttttcagcttatttttcataacataaccaaatactgaaaagtattttccaatttattttttataacaatactaaacatcgaaaaattatttacttttcaaaaatttcctttccaaataaatcacttttcaaacaaaaaaatacttttcaataaatatacgtagctttttaagttgtaatttgtagttaactacccagattgaatatagtgatgtccgaggatacaagtagtaatttaatgtgaatataagtgagcactggtgtcagaaaatggcgtgtaacagtacttaaggtcttcttttttacttcttacaggtcaccaacttccagtgtggtgggtactcaattgg

SEQ ID NO: 55407 - DNA, 507 bp, Populus trichocarpa
  Intron number 2 from transcript POPTR_0006s12760.1 (locus POPTR_0006s12760) derived from phytozome v7.0 (chr-ID scaf fold_6; pos 9929636 to 9930142 reverse strand)
aagaacccacctcaagaactctctcacttcttcaggtaacctctgaattactgcaactttgcagctttgttaaagtctattcctgttctctagttctctttcttcggttgctaaagaatattaattttcatgatattgtaaaatttattttttttcatttattttctacattttgttaagcaactgataggacggaccttcctttctataataactcatatattatacatatcatgaaacgtttattactttaggatcatagaaaagcccgtcattggctctcatgggtgcaagtcaacatcagtgggattgttgcctaggctattgttgttttgctttgaattaacttgcatgttgagtgaggttttattgtatatctactggaaattatgcttgttttcctcggtgtattagaaattagttaatgggtttatgagaatattacctcttgtttacgctcttaattttgcagttctgatacttcgggaacaagcaactcctgctgtt

SEQ ID NO: 55408 - DNA, 820 bp, Populus trichocarpa
  Intron number 1 from transcript POPTR_0014s14400.1 (locus POPTR_0014s14400) derived from phytozome v7.0 (chr-ID scaf fold_14; pos 10563857 to 10564676 reverse strand)
tcagtgctgtttcgagtctctcagaaagccctgaggtgggttttatttatttattttttgttttattgctgaatcgagcatatggaattctcacgcacagaaatctgtcactaaaatggttcgagcaggcctaccttatgaattatactctttatcctagccgtttaagttgcttatgtatcacttcgtttatatatgtatatctattccactgacatagctagctatcaacgtttaaggtgagcgaaattttttcttagacaagtgcaattttggacgtaaaatatggatgtgagagaccttttcgcttatctttcggtctggtcaggtgtgatcagcaagaagtctacgattctgctttggtggctattttttgcgtgcaaactggtcattttaagtttttgaataatggataaattaatctctatgagatgctaaccccttttgcttgactgacgtgggacgacctgctttagtgctttaacctgggaatgcctatggagctgcctgaaatgatatgtttgaggtcgcaaggaacatgctgaatgaaaagttccaaccccttgcagttatgcgtccaggctaaaagaatagaaaataaatggattttgcagaattcttcacgaatggatatatggatattgatgatttataggtttatgaaacaaatatcagatgacttaccttgttgattgtatgtaagagatttggcatcgtaaatattcatttgttattttggttcctttgttatgtgagatctagacatcactttgcttttttacatgtaattgaagcctacttgaaatgtttgcaggtggtt

SEQ ID NO: 55409 - DNA, 397 bp, Populus trichocarpa
  Intron number 2 from transcript POPTR_1677s00210.1 (locus POPTR_1677s00210) derived from phytozome v7.0 (chr-ID scaf fold_1677; pos 4053 to 4449)
gtcgattaattccagattttatttgtaagtacaatacttagcaatttttcttctccctttttaatttctgctcttttctttctgttttgaaatatatatatataattgaatttccatatgaagcccatttgtatttttaactgaagttttgggtgccctttttgtatttttaatttaaagactcccaagtctaagactcaaattcagctttatgaaaaatttggagggccaaggttccttcaaagcaagtctacatgccacgcccaattcctaccgcatccttaaaatctagttcgttttcaaacttaatattactgacacaatatgtttttgacaaaatgattcttgtaactttgttgcagctgaatttgcaaagctaccattaattccactatat

SEQ ID NO: 55410 - DNA, 893 bp, Populus trichocarpa
  Intron number 1 from transcript POPTR_0013s12730.1 (locus POPTR_0013s12730) derived from phytozome v7.0 (chr-ID scaf fold_13; pos 13407011 to 13407903 reverse strand)
cttgctattaagattggtgttcatttcttcttgtactgtattgatttctgttttggattaatgggttgctattagattaatagttttcatttctatttttttgtggttatattgtttctttctgcaatatcttttttccattttgctattatttttgggtattgggttaatgggttagtgttagtttttctgttagtttctcattgatttacggggctttaatggagtggtaaatatggagctgttatgttgtctatttggtttctgagaaaatctgagggaaagagtgaaatttctacttttaaatctaaagaattttgttcttgacattcttttggttgtttggaattaagaagtagaaaattgttttttttttttttcaaattaatttttaggatgtttttagattgttttgatatatagatattaaaaaaaattttcaaacaaaaaatatttttaaaaacaaccaaaacaaacgctaccacaatttccagagtataaaaatgctgatcgcaaaggtatcatgaatcatgaaaacagaaactgaggtttactttattgctttctaggacatgtcttttttggactgaatgcaggtagttcaaaatggaggaaatgtattttggtattctgtggaaatcctttgaaacaagactttttttgaaatataccaggaatattgaagaaaaaatggtaaaactggctgttagttctgaagtcttgtaatggattcaattcagcaggaatatggaagaaaaaaaactgtagtgttgaatttttgtatctgttcaatttagcaaggcttgttttagggttcaggaggaaaattttgtcagctgaatttgaatatcttttttttgttaattaatttcaggggtggtgctatccaattt

SEQ ID NO: 55411 - DNA, 328 bp, Populus trichocarpa
  Intron number 2 from transcript POPTR_0014s11390.1 (locus POPTR_0014s11390) derived from phytozome v7.0 (chr-ID scaf fold_14; pos 8483308 to 8483635)
cttatacaaaagggtaatttttggattgatttgttgcattatttatctattggatatggaattaatttttctggttgctttagagctgatttttttttattatctatattcacatcaaattcttgtctctactttccttttgttaccttttatataatctttttttcctgctgggtttcttccgtttcgggaatggttaagagagtgcatgttttggttaactcaaattgctgatgctttgacttctcaattttgaaggcttttttctcctttttttccccttttcgttggattgaattggatttttatgctgcagtgataacaagaa

SEQ ID NO: 55412 - DNA, 885 bp, Populus trichocarpa
  Intron number 1 from transcript POPTR_0006s23550.2 (locus POPTR_0006s23550) derived from phytozome v7.0 (chr-ID scaf fold_6; pos 22267151 to 22268035 reverse strand)
gatccatttgatttggttcgcaaaggtataggtttttctttgtttctgttctgtctttgacttttatagatctttcgttgtttcttgtcaattttgagttttttttcgaggttgttttttggttagttcaatattgtgtttttgagatctttaaggattaactgtgtggaaaatgtaagaatctggtgctcgatttgtgtttttttttttttttataaaaaaaattcttttgtaacggttgcttttatttaattttgtggaatctttttgcaagggttttgatttaatgagctccgtgtttaattattccatgtgggttttttttttaattttttttgggttttaacttttgatttaaatggatgtaatttatcttttttttagctatagcttactaattagtcaattgtggggtttgaagcgttgttttgtgcaattgggtcctatttaatgcaattgattcgatgtttcacttaaaagatttcttttttattagcatgttatgcattctgtgctgacggtcatagttcacagtattcaattaaccttcacctggttttgttcaaccaggttttggggagaaaatgatttgatatagcggtgaagttccggttccatgtatactgtattttgcgtgttttaaaagctgagtttggaaatgggtatgccaaagttgtttcttttaggatgatttcaatttagataagccagttgcaaatatcagtgtcgttttagataagggttgttgaggtcattccggccaggactggattttatgattgtggggctgtcatggattatgtagttctttttgcacgtttgactgatgagtaaatgaaaatgtttgcaggttttggataaagcctactacaagtcaggggtgtt

SEQ ID NO: 55413 - DNA, 267 bp, Populus trichocarpa
  Intron number 1 from transcript POPTR_0003s21590.1 (locus POPTR_0003s21590) derived from phytozome v7.0 (chr-ID scaf fold_3; pos 19688597 to 19688863)
gaaaatacaaggccaaggtgatttctttttcctttcttgtaatgggatttatattattttttcataccccaattcattttattatcaagtgactgttttcttgctgtcttgtggtagttttgtgttgattattttgatggttttagattttttctttgaaagattcaatatttgtttttgaaggttattagattttcgtgtttttatagaagaagccaaggaaattgatttgttgggttgttttataggtactgttgtctgtgcttg

SEQ ID NO: 55414 - DNA, 426 bp, Populus trichocarpa
  Intron number 2 from transcript POPTR_0013s11570.1 (locus POPTR_0013s11570) derived from phytozome v7.0 (chr-ID scaf fold_13; pos 12212658 to 12213083)
gagttggggttattccacggtataagtatttatttattttcttcattttagggataattattttctgttcaaagttaaatatacttttggtttcatttcaaaaccagatttttaaaaaagattttcttttgactttgatgactttgccggtttcttgttctgttctttaagatgttttcccctttatcttgtcttattggaaaaattcatgttggtgaatctaaatattacatttcaattgctacccttgcacatctccttttcatgtggtggtttgaacttcttaatagattaatagtggtcattattttacaaattttagccttttggtcttcatagtgttttatgatattacatgttaccttaatgttatctgattctacttttgcagcaatcctgaccagtctaaacacttggaaactgcaa

SEQ ID NO: 55415 - DNA, 577 bp, Populus trichocarpa
  Intron number 2 from transcript POPTR_0006s19160.1 (locus POPTR_0006s19160) derived from phytozome v7.0 (chr-ID scaf fold_6; pos 18145866 to 18146442)
gcagccatttccgggtaacttataattgctagataaaaaaacaaatacaattatggtgccaggcccttgctgtagtgcaacgcaggggcaatgcccgtaatattgtccaatagcaacctacaatgatgggctcttccctttaaaatattaagctaataccatgtggacctaagtccaagtatcagatattaaaatgataagaacagatactgcacttgatcttagccaaaaagccgagaaaggtatgccgatgaacgttgcttgagctgctttttgtaatcccttatttctcttctagacaatgtgggaataagctccaagctatagctctgctgatttcctcctcttattgtattggaaatttggtacagaaaatcttgaccaatttctatcaggctaacactcttttgaatcgaacaataacctagtagaaatttgaacttgtttaaggcctggtgatctttgctattaagaaattactagttttctttctttatttttcagtggatgtctattttctaaattctacatgtttcccgaatctctaattataaatgaatcagattggagaaagtta

SEQ ID NO: 55416 - DNA, 876 bp, Populus trichocarpa
  Intron number 4 from transcript POPTR_0018s13620.1 (locus POPTR_0018s13620) derived from phytozome v7.0 (chr-ID scaf fold_18; pos 13892893 to 13893768 reverse strand)
gtttaaaaagagagtttctttttccaaggtaagttttggctcatgtatgtctatggtgcacttccatatgaaaataagctttctattttgttgtgatgacagaacagtctgaattagaaggcattgctatttttcttttcattttcaactgattgattcatgagagaaaggccattcatgtgagaactaggtgttttataattttgatctgcacactaagcgtctggtaaagtatgaacatggacttctatatggatagcattttgagtttcactgtattcaggacaagggtttatcaatgagcattaattttgtatatgtatcttgggcctcgaaagtggactcactcataaatgctttggtcatatatcattgttacctttatgagactgaaatctactttaatagttgatttgaatggaagggatttggaagagtgaatgctgaaagttgtgttttcctcttgtaaaaatcttccacttaagccctgtattttgagacgtggaacctcaaacaacatatttggacatgaattgatctttatacccattccattacttctaaaatacccattgaaggactacacttgcatcctctaggaggaaaaagacttgaagtgttaattacttattttgtttattttttcaagtcacgcaacatcttttattgagccaaatacaaaagttttcagtgcctataaatgtctttgtaagttgattctggaagtttccttgcacatggcatttttatcaagtgggacctgatgtgcgtgtagaatgactagtttctgcaaataacttaagttgacactggccctgggttcttatatgaaatctttcaggtggttgcacttacagttgtgtctattggtgttgc

SEQ ID NO: 55417 - DNA, 686 bp, Populus trichocarpa
  Intron number 1 from transcript POPTR_0018s13620.1 (locus POPTR_0018s13620) derived from phytozome v7.0 (chr-ID scaf fold_18; pos 13894357 to 13895042 reverse strand)
ctggtgaaagaggtaagcttttttgaagaatttcttgagaccccatttctttattttgtttaaatttctcaaagttcagttctttctttcatctgcattgctgcgtgttactaggtttatcagtctagcttgcgtcagtaacagtctagctagaattctctagtcttttctttgtttggatgtaaattttactttattttgttgctgcaattgttgccttttggagtaccaggttgatttttcttgggttctctcttatgggttatagctctttaactctgataaagtagtggttaattttgttttttatttaattaatttcagaaagataagcaatttttttttgccgttgaatgaaaggagagttggctgcccagttgctcaaaaatgggatttttttcattacatatttgcctttcactggcaactttaaatattattgatttttttctttgttattgagagggattaatcaaaccattattctactcaaacatgctagttagtttgttatcttgttaacaagaggtgattgctttgctcattggctagtggctttctgtgtaaaccgtggaggctttttttcaattgcctgtcttctttgatgtggctgattgacctgcatttttatttgtgtacttatcaatgcaggaagagctttagaagaattgcggtcttctttattt

SEQ ID NO: 55418 - DNA, 621 bp, Populus trichocarpa
  Intron number 1 from transcript POPTR_0006s20580.1 (locus POPTR_0006s20580) derived from phytozome v7.0 (chr-ID scaf fold_6; pos 19602550 to 19603170)
aagtttcagacagtagtggtatgttcttttgtttccttctctcagttttgttttatttttctttccctgaattgcttttgtcaccttgtgtgcaacatgaagtttgttgttttattagttttattcaatctctcttcttgtttcttttcaaagaattatgtgggtttgctttttgtgatctagggttttaaatttcataaatttaatgggggtattggttttatggtgagtctgtgatatggagggagtttgggacgtgggttttggaggaattagggtttagagtttgaatgtggaatagtgttttcattttggagatttagttgaattttgactctgattattttttggaaggcaattagcatcagaatttgattctggtttttgtttcacttgatttagattgtgccagttttacttgctgccaaatgtcattgaatatgtaataatgtgcttgtagaattttaagtgaaagaaacaaattcgtatttacatcacacaatgttttgagcttcaatgtgattctgtgcatgtgaagctgatatgttgcatgaagattggattaggaattatagaattatggatgtttagtggaagaatttgcggaaaatgcaggtactg

SEQ ID NO: 55419 - DNA, 828 bp, Populus trichocarpa
  Intron number 1 from transcript POPTR_0003s16430.1 (locus POPTR_0003s16430) derived from phytozome v7.0 (chr-ID scaf fold_3; pos 16009425 to 16010252)
gtttactgtggtaattcgggcgttaccttcgttaggtaatcacttaatcctctctctgccacttctaggtttttgattttcttacatgccaatatattaaattttcagtggttatttatgcaaaattgagctgctgttttttctaagtgcaaaatcacaactactaggaatattttacaattaattgcgaaatcttcgaagttttattcctacatgttggctttcctgtctttcttttagaggatacgatttccaaaaaataatcaactgttctgctaacttagtaatgaagaatagggtttttaatggtgaagacgatttttctccattcgaattcagtgaatgctgttgtgtgtaacccagattagtgaaaccatcactcatagccgttgttattgaaccagcaatgttgttgggaattatgtttgttggcatttgtctcttcctttgaattctgaatttctgctttggaataaagggattgagaactgacggagcaactctgctgtgttttgttgtctatagaaacataaaaaatggtactaacacaaattagcatttttttaatgaaatggtcttccataacaccattacctacttaataagatttggttgtatagatttttctcttttcctttgttgttgaagagtagactgtcgaaacagaaaaggaacaaacaattatctcactgttgcaatagttttccaagttctggcactctatgttctcttcgtttcttgtccttgtcttgtcttttctttcatggattgatcctccctctcctgaatacagatcaaagcctagtttggcagctgttgttggttgca

SEQ ID NO: 55420 - DNA, 234 bp, Populus trichocarpa
  Intron number 2 from transcript POPTR_0013s14480.1 (locus POPTR_0013s14480) derived from phytozome v7.0 (chr-ID scaf fold_13; pos 14655730 to 14655963)
tctataattcaacttcacagtattttgggaaacaagtaagactactatccctttggattttgattttgattgatattttttctccttggtatcttgtaggattagtatgccagtcattcataacaatttttctgtcatgatagtcataaattaacttgaataattaggctaacaattccacgtttcttttcaattttaggtggtcagctatagcagctcgtttaccaggaagaa

SEQ ID NO: 55421 - DNA, 718 bp, Populus trichocarpa
  Intron number 1 from transcript POPTR_0006s21450.1 (locus POPTR_0006s21450) derived from phytozome v7.0 (chr-ID scaf fold_6; pos 20522486 to 20523203)
gaggtaaagaaaaaaaatccaagctttattttctttcttttttctccttttgaagcttaattggatttttgttttcattttctgttggaattcttgaattgatttgactggtgtataaagtttgaatcttttgattgtattgatcaagttctcttctgggtttcatttgtatgtccatgattctagctaatgatatgattttgttttttctggttttgaaatgaaatatgcatatgagctgcttgtagttatcatgtaaatgaaaataacatgaataacaaatggttataaaaaatacagcatggatgcttaattctttgtgtcgctgaattcttgttgagccttgtttgggtttggaatacgtttcactattgatttagctctattctatgtggtgctgattctggtagataagcccagctagtggggaatttggctatctggattggggtgagaatttatgaattcaacaggctttgttggttttctaatcacttcaacatgtaatacgtgttggagttttcttattgatgtaaggagttaacgattctcaactgtttggcaatgtcattgcctgtgctctttggcatagaagcggcattttaaaaatcctataaacagtatatttgacttgtctcacttgtgtgttgaatgatttagtaggctgtaacggttttgaattttctgggtttcggtgttttaaaggttctggaggtgg

SEQ ID NO: 55422 - DNA, 571 bp, Populus trichocarpa
  Intron number 2 from transcript POPTR_0014s07230.1 (locus POPTR_0014s07230) derived from phytozome v7.0 (chr-ID scaf fold_14; pos 5468116 to 5468686)
gctcaagtatgctgcatctctcttcctttttcttgtcttttgattgcagtgtgaaatgttgcttcctgcctgactaaaaaccttccatccaccattatagctttacaacttttggatatgctagtttacctaattggattctagatcatgttagaataatagcatttatttcactgattaatctcgattccatgcttgtgcttaaacagttatatttgaccagatatgtggggatcagattataggtctcagtaaatgtatatgcatcagttcgtgaagatcgttaatgtgaattggtatatcgttaataaaccgcctctagctaccttgagtttgactagtttgcaaagttacactcgtgcagattacatgtccacttgcttggcttggtgaaatcccctacccccaccagtcctaagcagcttccaacctttggaaacaaaaaatgacttttcttaatgcatggttttcactatgttcagtgcaatcactgccctcttgactgccatgtacaatttctgttttttaattcctttcttgttgcattgcagtgtatcgtacattcaagcta

SEQ ID NO: 55423 - DNA, 707 bp, Populus trichocarpa
  Intron number 1 from transcript POPTR_0018s04010.1 (locus POPTR_0018s04010) derived from phytozome v7.0 (chr-ID scaf fold_18; pos 3433802 to 3434508)
taattgcaaacttgggtatgcttcctctccgatttaacatgcagtaatttagttgttgctagttaaatcattgattgggcatgcatatcatattgtcagtaattacgaatggtgctttacagtgtttatgatcaagttttttttttttttttcccctcctgtttttgttcattttagatcaattgtcattttattttatgtgtgtcacaaaagttctttaatgtttgattttggtattctgctatgaaaatcctgaaattaaggtgatagattatatttccagctgtgctcttacaatctcctatgcctctcaggggccaagaaacaaaggaagtggttaacatctctgaaaacccacacggaagaaaagactcacaaatgctgcagaaaggaaaactctcaaacaatccacgcagaagaagagcctcagaaaagacacgaggaagaaaattctcagatatactgcactatggaaaagcctcatggattccatgctgaagaagaatgtcaggaaagtcaggtgcaagaaaacactcagacatgctgtgctgaaggaaagcttcaaacaatccatgcagaagacgatccttgggaaagttgcgcagaagaagagcctcatacaatccatgcagaagagtggctgcagccatgctgctcaaaggaaaagcctcagacaatccatgtacaagaggaaaatcaagaaagat

SEQ ID NO: 55424 - DNA, 470 bp, Populus trichocarpa
  Intron number 2 from transcript POPTR_0003s04940.1 (locus POPTR_0003s04940) derived from phytozome v7.0 (chr-ID scaf fold_3; pos 6034171 to 6034640 reverse strand)
aggtcagttacaagtcattgtgggttcaaaaattcacttgttccttcaagtcattccattatcatttgacacatatgagacctagtttgatggttaacttttctattaattactctagtagttcataactgacatgaatgtgctgtagtgaacaaatccaatcaatatagtagtctgataaatgccatgttgattgttgaggagagaaaggtatgtgggttggaaaaggtgtgcttcgctagttaatgtcaagttttggcatctgtcattggatgctggcgacacactttttttttttttctctccttgtttccatctaaaaatctcgcacaaaaagcatatggtattttttggagtgcttcatttgtttttttttttttttaacatacatgcttgacagattactaatattttcttctctgtgtgaaatcacaggcaattaaaacagatctcgactactctcactttgt

SEQ ID NO: 55425 - DNA, 1015 bp, Populus trichocarpa
  Intron number 1 from transcript POPTR_0019s10300.1 (locus POPTR_0019s10300) derived from phytozome v7.0 (chr-ID scaf fold_19; pos 11884226 to 11885240)
agctgggtgctcctttctttttttctttttactttgtaatgattgaccttctctttatatatataaagaaaaagaaaaagggaaagggaaaggtttgctcatcttcttgaaacacacttggcccttaacgagaaaaaatgatacatgtccttttacgacgtgcgcgacaagtctttgaattattttttagctccatttccaaacaggaactaagactttcggaggggctaatgattggtgtataaggaatcgtactccatcctcctggaaacagacttttctcaagaagagagtgcaattttgtttattttttccaacccggaagcatagcacttctcttttaacaattcaggatacttggaaatctcttatatattccacagatattttttcagttttctctttggaaagtacgtagtggcttcatttcttacaatattttatggaattaaatagtttgttgaacaacgactgctttgtttgtttgttgctagttttcataaaaaacaatttgggagatcatgtgcgcactggcatcaaaacagcgatgaatgttcacatatgcattttatattcatagtttgttgcaattggtcccgatgtagactaacgattggtgccaattttttcccatcaattgaggtcaatcttcaccattccaccttcgagtgcaagatttgtatgcttcttcattaactcttgacagctccagctccttgcagcacaacctctgccactttcttgttcttgttagctatttcttgccaatcaatcgtaaaggcatttatagcgaaactttccttgctaatcaaacaaaaaatacgaaaaagaaaaaaaaacaattatagttgggatttccatctcccaatcaaccagtaaatcaaatgacagaagctattttgttcagtattactgatagaatcttgggaaaactagggaacctggccctgcaagagataggactgatatggggtgttaaggacgagcttgaaaaactaaggaatactgcttctgt

SEQ ID NO: 55426 - DNA, 510 bp, Populus trichocarpa
  Intron number 2 from transcript POPTR_0019s11330.1 (locus POPTR_0019s11330) derived from phytozome v7.0 (chr-ID scaf fold_19; pos 12652411 to 12652920 reverse strand)
gaccccctcaggcaagctcattcttcattaattttaataataacaaaataaaaaataaaaaaatcatttgtctttctcaacattgcacgtataaaagcattccttaaacgctccttcttggagtgcagatatagctgtataaccaagcaagcattcacaccttgaaataattatagctagcaataaaagcacttttggtgatcatgctaatgtccctctgaagatttttcccccccttaagatccatgaaattaacgaggggaaaataaaatcaaacattgcatcagtactataacaaaaacttattaaaaatcaacttttatcttcacaaaacagctcataatttttgggttgagagaccctttagtaaatatttaacattctcacaaaaaaaagaagtaattcactacaattattttatcatcttaaaagaacagcattattttatcctcatactgagcaactcaactaattagctaattattctgggtttcaaatgcaggaagaggg

SEQ ID NO: 55427 - DNA, 686 bp, Populus trichocarpa
  Intron number 1 from transcript POPTR_0006s09520.1 (locus POPTR_0006s09520) derived from phytozome v7.0 (chr-ID scaf fold_6; pos 7010129 to 7010814)
tggcttctgctgcaattgtggaacactcattctatgtaattctttgactttaagctcttctatcttacattagtactaacactttttgtggaatggtccttataggttcccgtcttgataaattatgccatgcaaaggttgcattagggtttttggtcattattagaaatatcaggggtgaggataggatggtaagccggtttattatatcctcctacgaagttaacctagagttttgacataggaaaaattacattcatcaaattagccatacgcttttgtttcatcttgagctcctgagatcaaaatcatgttcacactttgaatgaaaaggatccaaggaaaaagatttgattctgcgacgtcccaagattcagtaaactcttttctttcgttacaaaaggctcgagctcgagatgcctactaacttggaaggaaacatgggtgtcggcaactcaatacacttccaacacagttctgcccataatttaaataatctactgggaaaagtttttcatctcttctggactgaccaagtttgcatattctagctagtacataagtctgctatatatatatataggcaaaacgattttctacttttcttaaaccttaattgcaaaatgatgggttttgttgtgaatgttttaggtgaaaaaccttacagttcgtcggctgtgcactga

SEQ ID NO: 55428 - DNA, 599 bp, Populus trichocarpa
  Intron number 1 from transcript POPTR_0006s27430.1 (locus POPTR_0006s27430) derived from phytozome v7.0 (chr-ID scaf fold_6; pos 25333195 to 25333793)
tctatctttctgaccctatccaattcccttaccaggtgagctttcacctaacttcgtttttttctctgctttcttttgatgcccatctcttatatgttgtgaaagtttgctcatttttatcttgtttattggtgtttggcttcagttttagtgattttaagctagaaaggtactgtcttgattggttaagaacccagaatttcttgattgatttactgtgttctgtttgagaatcatcaatttctttgcttaattattcttaattggagtatttaatttgatcaaaatattgtatcttcaattagatggagatgtaagagagaattgtctttcattgagtagatgattgtcatctctgattttttggtttgttttgggctcatgttcacctgatcaaaactcaaacccttagtttggtgtcctagaaaatcaaaatcttgtgagttagaagttatggggctttattgtttttctcttttcatgtatggagtgttcaaattacattttcagctagaacttgcaaagttttatttaatttaacaaatcctgtgatttggattcatttagaggttcaagtgacaagctaggctgcggtggag

SEQ ID NO: 55429 - DNA, 444 bp, Populus trichocarpa
  Intron number 1 from transcript POPTR_0003s18420.1 (locus POPTR_0003s18420) derived from phytozome v7.0 (chr-ID scaf fold_3; pos 17505794 to 17506237)
gagcggtactgatacctgattatacgttactttgctgcttttatgaaaatggttatataacaatttgtttttgtttttagtcttgttgattgaattatgctattttatgttctaattgaattaagtgctatataggagggtactcatttttctaagttttatatggggttaatgtttaattggaagatataggtgtccataatgtattggctacccctcgtgttgcttaaatttttaggatagtttagtgtcaaaatgaacacagttgagtgataaaacttcagtgcattcttcattaatgctgttggattatgttattatggaattatttgatctgaaagtttgggttttttaatctttgctatgcattttatggcttctgataaatggtgatgattgattgagtggatgttgacaatctagcagatttggtttttttccaga

SEQ ID NO: 55430 - DNA, 720 bp, Populus trichocarpa
  Intron number 1 from transcript POPTR_0006s22590.1 (locus POPTR_0006s22590) derived from phytozome v7.0 (chr-ID scaf fold_6; pos 21570218 to 21570937 reverse strand)
aactccaatcgccaaattacatatttgcgacacaagtaatttctaaaacacaagcaaatcagacgattaaatatgcctcaaaaagtcgagttcaatatagattaagctccattcacacatctaattgattcatcatctttgccaacttcatgaatcttttagcccaattgagctaaacaaaaatcaacccaactcaaaaaagtaacgatgaacaaaaaataaagaagggtttaaatgtttcccacctaataatgaaccattcacatgaatatcagaggatctgtagctcccattgattgaaacaagcatagataagaaaaagtgttaacactattacatacctagcagtttaaaaaacaggaaaagcaaacagatccaaagaaaaaatgcctcacgaagaaaattcaggtgggagtataaagagaaattcaataggagaacccttttgaaaatctcctaaaagaaagttcaatattgcgcggctatgactcaaaacgcttccattttatatggaaggcgatcttaagggcggcgcttattagaagaaaaaaaccctaaaaaagtttgatagattataaggagaggcaagagtaaaaccctatactggagaaaccctagagctccccgtgagggtcacaagagatgtacatcgcaatttatagccgtccctttgtctgagtggtttgcgagctttaatctttataggcccgaaaagcccaa

SEQ ID NO: 55431 - DNA, 832 bp, Populus trichocarpa
  Intron number 1 from transcript POPTR_0013s00650.1 (locus POPTR_0013s00650) derived from phytozome v7.0 (chr-ID scaf fold_13; pos 315634 to 316465 reverse strand)
ttcctttcttactttccttcttttgaagattacgggtaagaaaatttatgaaaggtcttatctttttcttctttttgaatttcaagatagatgctttttagtcccttcgttttcttagatttctgggttttgattgttttctttatatatatgcttatctggtggtccttgatcagttgtttcttgattgtgaatcaacttgaattttgagttcaggtggattaacagtggtttttctcatctgggttttttttttcctttgaaagttgtgatcttatttagctgggtggtacttaattgaatttgaattagactatcagatttatttgcagaatcttgacatgggttattagtcttgttcatcttcttttgatcaataaagatataacttgattcctttgttgtgttttatcttgatttgaggctattggttctgccactgtagtactttggattgccagttttttcttacaaagttacagaaagttgtgaaactttgtttcaggagtataattcttcaggttctagtcatttaatgtttcttaattgaaatgcattgccatggtagctaaattatgtctacagcatgtagtttcagtaatttttaagcaaacattgataggattttcggcttaaggagtgagtcagttttcgttttgtcacttgctataacaaagtattaaggcattgtaatttgttttagaatggtgatgataattgtaaatgtagtagttctatgttctatcattcttaactgattctaatagtgtggctgacgaactcaattttttgtgttgtttcctgcaggtgcttggatttcaatttaattttc

SEQ ID NO: 55432 - DNA, 802 bp, Populus trichocarpa
  Intron number 1 from transcript POPTR_0019s04160.1 (locus POPTR_0019s04160) derived from phytozome v7.0 (chr-ID scaf fold_19; pos 4256623 to 4257424)
gtcccgcggtatgttcttgtgaaattgaacttaactcgctttatgaattaaaaattgtttataaactataacaatatatgtttccatcaaaagaataacaattatagcaattttataataatgtaatttattaagtctcaatctattatttgcattatgtattcatcaagcaaaccctattgatattattttgttcaatttattatagaaaatattaccatgaacattctatagttttattcatttttacacttttcttctgtgttttataaaattacagtttacatccttggtgagtgtagaataaactaaactatagaatagtctaggatataaattgttatgtgcataacaaaatttaagatgtaaactataatttttaaaaacttgaatggtaagtataaaaacaactaaactataggatgataagggtaatttctcatttattatatttataaatacatattcaattttagcaaattaaatacaattgaattattaaaataaaaaaaatatttttcagtgagaaaagtggggttggtgataataattcaagtagtgaagatataagtttttaattttaataattggtgatcacatgaccaaattgaaaatataaagctattttttatgaattaagaaaggtgaaaatgaggagtttttaaatcaatttattttgattattcatataagtaaactcaattacgattatattatatatgctttttgtttatttatttagtacttagtttaatgatttacaaaccaccatgtataataggcgacaagggagcttcgagca

SEQ ID NO: 55433 - DNA, 810 bp, Populus trichocarpa
  Intron number 1 from transcript POPTR_0006s12300.1 (locus POPTR_0006s12300) derived from phytozome v7.0 (chr-ID scaf fold_6; pos 9467886 to 9468695)
agaaagatagataggttggaacttggtgaggaattatgatttcatttcgtttatatttttgtgtttattattattattattattattattagttttactgcatatttatttgttttttttttttccctttatgcgtgtggaagattgcaagatgcagttcctttattttttctttgttgaggcaaatgatattgtgctttgaaagcaatctcaaaaaagtttcttttcttttcactcaagtgaattagtagttaaaacaggtggagggttcatatttcttagtctctgggaaatgaatcctttctctttccttttggaaacaaacagagactgaagcttgtcagcaaatttcactttttttttgttttctttttgcatacacctttctaagtcacagcaaaaaaagaaaagaaggaacttttggatgttgatgatggactcttcttaattaaaagccaatttgcagatattaaggtgcttcctctttttgtcccttttcttccccttcctttacaaccagttgactttcttcttaatcttcttttttttttttctttttgaaactggagcttaattttgttcttagttatctatcctctggtggtctctgcttatcaatttattcctggtgcttgtgttttcttttttccctcatgaaactgtagtatcacttttgcttgtgattaagaaagtcaataacaagtatgtattaatagtcttcaagctcatgtttcttccatcgataacaattatctatcctcccttctttgtatagatcgaaggacgacaacaactcaaagctattgctga

SEQ ID NO: 55434 - DNA, 699 bp, Populus trichocarpa
  Intron number 3 from transcript POPTR_0003s17840.1 (locus POPTR_0003s17840) derived from phytozome v7.0 (chr-ID scaf fold_3; pos 17106350 to 17107048 reverse strand)
ccaattttttagttgcgacttcttgggacaatcaggtttgtataatgtgttaggtttcactatctcgtttttatgttctttaaaatttgctaagagagttgattgatgaattgatgtttgttaaaagcgagcgattcagttaacataattattttgatattttaatttttgatgttaattttagttttcgtagacatctggttgtttttatttatagaaaatagttttattattttttttatttccatctctagttttgttgtttttttcttgttcattctaaaaagatattttcatggaaagcttaggaaaaatgttttaaatacaaatttttgaaaatgaaaaaaacaagagacttgattggcttaaatgaaaaattattcatggaatgacctaaaacattaaatgaaccaaacaaagttcttatttttatagtggagaatatggaaaacaattattttggtgttttctgattttctataaaagtggagaattagaaaacatgtgttttctaaacaaaaaacaattttcatattcagttagcaaacattttttttggaaaactgaaaacaagtaaacacaacccttcttttccaaaatttcgttactttccttctgttagtttgtttgctatttatttcaattgttctcaaagtttagaattcatacatgagctgtttgaaaaattttgtaggtacg

SEQ ID NO: 55435 - DNA, 743 bp, Populus trichocarpa
  Intron number 2 from transcript POPTR_0018s05070.1 (locus POPTR_0018s05070) derived from phytozome v7.0 (chr-ID scaf fold_18; pos 4497330 to 4498072 reverse strand)
cttctgggtactatacctcaactgttttgtttctatttttattattgttattggtccaactcaaaaggataaaggtagtccttcctcaacccctaaattcccatcccaccccttccagcctggttttgttttgaatatgaaactttctagaaaaaatctcatggagcttgatcattaaaactctgatatcatatcaaaaaaccatttcatccaaaagcttaagctattaggtaagatctcaggatatgatttatattattccctaacacatcttatcaagtgaaagtcttttagacttgaaacttgcacaggttcacattatcttgtgattattttttatcaaataaatagggatgttgagattcaaactcaagaccacttggtcatcaaagctctaataccatatcaaagaatcaattcaacccaaaaacttaagttgttaggtgaggtcgcaagatatgatttatattattcattgataaagtcttaatggtttggcatggctttttagacactacacatgcatgtgtgtttggatgaattgaacaattggtatttcaagctagatcggttagcatcaagactaatgtcctcatattctagttttgccagtataagtcctgggtatatgatgtatcagttcacaaaaatcttaactctgcatataaagaagacattgcattaacatatgatgcgtaatttgttcaggtgtgacttaaggatagtaagcgattcaaattact

SEQ ID NO: 55436 - DNA, 758 bp, Populus trichocarpa
  Intron number 3 from transcript POPTR_0013s03150.1 (locus POPTR_0013s03150) derived from phytozome v7.0 (chr-ID scaf fold_13; pos 1919089 to 1919846 reverse strand)
tgctgtttctgctgatatatccagtcttccggcttgtgagtataactggatcttgagtccttgttgctgttctattaaatttgcattttgttaatttgggatggaatattaaaatttggtgcgctcattaagagatgataaaagtattgatgttaggtgtgtagactgatggtttagggttttggttgaggggtaaatctaaaggttatcaagaaaatggaaccttaagttgttgttttttactttagaaaggttatgaattgcgagtaccttattaccttaaaggaatttttagctattaggtgttttatttatgaagtgagtttgttttaagaaatcttgctgttgctgaattatcaagatgtggaatttgtactccttgttgcatcccagtggttctttggttttttaaattgtgttacatgaacacctttatagcagagttggttattgatttatccttcttaatgtgatcgactgaatttttctaactcttattcttatcgaagaaggttagctaaaccatgccttacacatagtcgtcccatctatgcacttaatgtgatcaactgaatttttctaactcctcgtattcttatcaaagaaggttagctacaccatgccttacacatagtcgtccatccttaagcttctgtttttgccatgccatctatgcacttaacattgcgaacatatttgttcctatttatttctttgattagtcatgattcatcactatttcttttctttgatcagtc

SEQ ID NO: 55437 - DNA, 711 bp, Populus trichocarpa
  Intron number 2 from transcript POPTR_0003s07400.1 (locus POPTR_0003s07400) derived from phytozome v7.0 (chr-ID scaf fold_3; pos 8961327 to 8962037 reverse strand)
gtcgcgtttcaagatatcaacccttctgctttcaggtttgccaaaatcattttctctggttttttcctcaaattacatgataatgtcatacataggttttagctttctctaatttaaatcagggtttgattgaatccaataatatcatattggggaaaattatccaatctttaacggtaggtcaccttttattttataattctggctgcttaagatttaatcattatgatatgtttatttttgtgcttgtaatctcttgattgatggatacaaacatgggcattcatatgaaatgatcatatagcaaacaagtaggagtcctgatctcggacagacagcgcaaggggattctaaaccttttaaactccagattgactttactggcgttgtgtttatgaaactttattttggttgtcgtttggttttaaagacattttcttttgtcgaagcgtgtttttttatcaaatacaaagttaatgccaaacacattaaacacaggagacatttgtttgttctatagcaagtatctatcttgtttctttcagtagttcttttagcgttgtttggggtgatcttgtatgattgtttggtgccaattttgtctcctcacttactcttcttgctaaattcttttaatattttcgtaaaatgttcctttgggtttgcctcatggtaggcatttcttggtgattcctgtggagcacattccaa

SEQ ID NO: 55438 - DNA, 917 bp, Populus trichocarpa
  Intron number 3 from transcript POPTR_0003s13570.1 (locus POPTR_0003s13570) derived from phytozome v7.0 (chr-ID scaf fold_3; pos 13925545 to 13926461 reverse strand)
attttagcgcattgctaccaagaggtgcagcagcagttacgcatagttgtgctcgttgctgctgctgctgctgatggggtgataccattgttaaaattttgtttttaagacatgattaataaacaaattagaagtggagtcgacttaaaaaagaaaaatagatataaataaacatttgattatcatgttttaattaaacttaaaactttttattttatattgaaaaattacataatttttttgtagtttatatatacgatgaaaacttaaatgatgataaataaatataaataaaatgaatttaaatttaagtcacttacttagtttcagacatggctacatgccagtttattttgaactcaaatttaaattcgttataaaataattttttaactaataaaaaactattttaaattatcacgagcaaatacaattcttctattaaaatgatgtttgacaacatctattttatattttaaatgttttaccaaataagtattcataaatactatttagtttaattttaattatgtaatttcatttaagtatgcttgctttgttttaacatatgtttatgatttttggatgatcacatgtttacatgttcgcatcttgtaattaaactaaacaaatctaatttgaattttcactatattctatcttgtattcactataacttttgataacaacctcaaacacttgaacccatgtctcatgcaaaatcagcgaatgtaccaattgtagttgcaatttatgacgtgataaatcgagtggaaacctagtgagagtcaaactccagcttgcagatcagaaggcttgttgctggaggaaatgggtgggagatattaaggtagttttggctatttacaaaaaacgggtttgataagctgtaggaggctatacttcttcaggcaaag

SEQ ID NO: 55439 - DNA, 584 bp, Populus trichocarpa
  Intron number 1 from transcript POPTR_0019s05460.2 (locus POPTR_0019s05460) derived from phytozome v7.0 (chr-ID scaf fold_19; pos 5813083 to 5813666 reverse strand)
gtggaagacacactgtgtctgaggatcctgataaggtaacattgaattatgatcatttgttgtttgatcttgtctagagaaataatgtgcagtaaatgccttagctatgaggaattaaggattcccagttaacaattgattcatatctgtttgcaacttgccttttttccattaagtttcgtggaatggcttttattgtaactccgagggggatgactacctaggctaggttgttgaagatagaagtgttgccagtccaattattattattattattattattattattatttcttgcttaaggaatggctcattctttcttagagggaaggaactaaagcgggagggaacatatattttatttatgttgagaagaaaaggaaggcacaaggaacaagggaaatgactttcgctcattcccttttggtttcatctgtgtcccttgcctctgcttttttttttttttttatcaaatggagactataaatttgctttagtaagtttcatgttggacgatgttacttgttaagtaatcaattgtttctgaactttgattctgcagggatacgtcttcattgataggg

SEQ ID NO: 55440 - DNA, 847 bp, Populus trichocarpa
  Intron number 1 from transcript POPTR_0013s02120.1 (locus POPTR_0013s02120) derived from phytozome v7.0 (chr-ID scaf fold_13; pos 1277776 to 1278622 reverse strand)
gttcagacccagatagcaattgccctgaatcagtaagtgtatactcttggatctgtgaattagggtttttctggggggggattttgaggggttttataaggaaattctttttttcggtttcaattttttatgcaactttttcgtgttcttgttatttccgagggggttttgaaacggtttttggattttagtggaatttgaaaatttgagggttttgtagtgtattttatttgaatttcgtttttttataattttggtgggttttgatttatttttctttttcttttttttgaaagcattttttaatctctttttctgaaattcgaaattgggggtttctggaatcttttattgaagtgtttctttaatggcttgcttattttgctgtgattcgtttggttttattttactaaatttgattttttttcatacatataatttgtttcttttgatattttaaaaaatgatgtgattttgacaattatacactttacttaaaagttgaatttttgtggtgggttttttggtttattgccagaccgaggttttaaatgtaatttgggtgggaaaatattttatacaattagtgcagcttagtaaactccaacttgagtctacgtatccgaaaaatagaaagaaaaaggaaataattttaatatctggattgtgtgttgtgtgtcaaattatgggagaaaagatcttcttgctatgttaagggttttatatttttattattaatatattggatgttgtgaattttgatggttattgatttccacgtcaaaactttaagcaaattggtttgctaatctgttcacttgatttgctgcagatagatagatcatcc

SEQ ID NO: 55441 - DNA, 676 bp, Populus trichocarpa
  Intron number 2 from transcript POPTR_0006s12740.1 (locus POPTR_0006s12740) derived from phytozome v7.0 (chr-ID scaf fold_6; pos 9886354 to 9887029)
tccagctctttcggggtgacaccatcttaatcaaggtttgattttccgatctaagattattgtttcagttttttcgcgttggggttgggtactttgttaattatgttggtgatctatttgaaatttggggttatttgagattgaaatttgtgtttcatgcttatatttgtatacgagcatgtgatgttttatgctgggtttttagaatctgtgagctgggtgtttcttttacttcggttatatcgatgtgttgttggggttgttttagatgaagtcgtgttttagtgtattgggtgtataatatatatatttttttagcaaatacttgtgaaaattctttattcttggtctgttttattactaaaaattcaagaagtttgaacggaggctgtatatgcatgtcgaaattaatttcttgttttttgcatgtataaagatttcaaatttagtttatcagatgtattaggagtacacctactactcttcaccatgagcgatgtttggaaatatgattcttcttgggtttctctctgtgcttgtgtttgttatgcaataatactcaataatgctattttgcttggattgttttgacagattgtgctaatggtgttctttgttaccttgttgcttgtggtgtttagggaaagaaaaggaaagatactatttgtattgccct

SEQ ID NO: 55442 - DNA, 827 bp, Populus trichocarpa
  Intron number 1 from transcript POPTR_0014s05270.2 (locus POPTR_0014s05270) derived from phytozome v7.0 (chr-ID scaf fold_14; pos 3988361 to 3989187)
ccaggaaatctagagcctctgcttcccaggttaaggtacttgggttcttcatgcactagttttttctctcctgttcatactcccttgtttcattatttttgttccaacaactgagaacgtttaaagctcccaaatcattgaaggtttcttaatttcagtgttacaaagctcacatggaatgcattaacaataaaccttcgatcacctttgtaccctgaaatggtcagggttttcgcctttcccccacttactttgcaagggatgaagttcggttatagtttttttattttttattactccatgtattcctattaaagtttggttgcagttctttttttctagatcaaaacactaggctgctagctgcttgtttgttttagtaccttctccttcttctagctaacttggggcaactgcatgatgcttgaggaagaactcttggctgtaaatatacaatatctagttcagaaacccccaatatccatgatatatggaacattatgctatacaatccctgaaccgtgtattttactagaaaatctaatttggcttgtttggttagtagaagaaactgagcaagcaactagttgctccaaacgatccactgtgataaaaagtttgagatgtcatgaaagtcagactcctgataaatttgatgttttgcatagtattgacttatagtgtataatttatatatagaattcgatgttttgagatgccatgaaagttcttgctagtgagtatgcatagaattattttgagaagttaattttatagctagtggtgactcttgttttatttgtcatgcgagcagaaaacttccacaa

SEQ ID NO: 55443 - DNA, 714 bp, Populus trichocarpa
  Intron number 1 from transcript POPTR_0003s05380.1 (locus POPTR_0003s05380) derived from phytozome v7.0 (chr-ID scaf fold_3; pos 6657080 to 6657793)
agcttggtttgttgttcttcgggttccctttgaaggtaatactctgtttttctattctcttctaaagttttgaagttttttattggttagagactcaaaattgattaaggtaatgcgcatggcagttgtgactgtatattaatctaaacccatcccaattgaatgtgtataagaatatttttttaacatatgctttataaattatcacattcaatgcgtacattaatttgcaagtaacccttgcataatctttttaggtcatcttgaagtattcttttaagcaaatcttgagatgctagttcctccaaagccaagtttactggggccgagcacaagtcatagtaaaatgcaccaagctttgaagacctgatcaaattattaggctaatatactgaattgttctaggccttagactgtattatatttgacaaatttagcttattgaagctgtcaaaactggttctttcttccccttttcccttcatactttccagttcttctgtcatatcatgtgcttgtaataacttctctgcctatatatgatcccaggtgatgaagattgcatgcatgtgttgtctagaacttaatgtagtaattaacctacatgatctacttctattgattccttgtgtttagtgatatcaaaggtgctgtcttaattctatcttaattaatacaggcaagagtgtcctgtgaagttctggtaaatacaca

SEQ ID NO: 55444 - DNA, 896 bp, Populus trichocarpa
  Intron number 1 from transcript POPTR_0013s02990.1 (locus POPTR_0013s02990) derived from phytozome v7.0 (chr-ID scaf fold_13; pos 1815204 to 1816099)
acctctccgctgtccttgaatacctcgctgccgaggttcgtttcctttaacttctctaactgggtctctaaacttgtttttaatcacgggttctgatttgtgttctggggtttcaggttcttgagcttgctgggaatgctgcgagagataacaagaagaaccggatcataccgaggcacatccagcttgcagtgaggaatgatgaggagttggggaagctgttggggtcggttacaattgcaaatggaggtgttttgcctaacattaaccagactctgcttcctaaaaaggctggcaaagggaagggcggtgacattggatctgcttctcaggagttttagggcttttgattaggatgtgctataggttgtcatatacattgcttagggtttttctatgtatttttttagttgtctaatgaaattaaacatttagttgcttaacatcctgcccttctctgctttgattttgaattaatataattgttttattaattaatcaatataattatattaattatttggaattagttgaattattcaattctatttttttttaatatgatattgcataaaaaacattagaaattttatcaaaataatgaagctccacataatttatatcaggccagcaaagcaaagcccaaaagcccacaaatgccattaaaaaaaagcggaaatcaaaaacaaaaaattcaatttcgcgccgcgagagtgaaaacataagccacgtcatcgatcccagtatacctgaacccaccaatcagatcatacctcctctccttatataagcaaacaccaccaccaccaccaccactccaaaaatcaaaatcacctctctcatttcttctccactctctaggaccaaaactagggttagggttttacagcgttgta

SEQ ID NO: 55445 - DNA, 977 bp, Populus trichocarpa
  Intron number 2 from transcript POPTR_0019s12530.1 (locus POPTR_0019s12530) derived from phytozome v7.0 (chr-ID scaf fold_19; pos 13574495 to 13575471)
aaagacacaaggctgatttttctatctccaccaaggtttttcctccctatcatctttttcctgcacttatctcctgttgtgaatacagcacctgtctcatttctttgacatgtttaccgagtgtaatggatgaaggatgactaccaatattaacttgaattattggcttaagaaagtcatttccaaaaactatgtggtcagttcacggatagtttggcattgccctcttctatctaaacccacgacaaagccaatttcaaaaaaagaaaaaaaaaacaggtggtcggtttcatggatgcttgcccttctctatctaacctacgtcatagccaattccaaaaaataaaataaaaatgtggccagtttcatggatcctctggcattctctatctagacctacgtgctccttttggtcctcatcaaatgttacttttcttaatattcttgtctgccatacagtctatgcctaagttttcattctgcagttaggcaagccattctctataagtgcctagttaatactgttggtggagtttgaagttacacccccaattttttccagcaacgagacaattctaaattggagcgtggttactcaaaacagtgaagaaagtacttttggataagtttttttaatcaatcctaatacacagaaatcgcttagctgagacagtttaattttagttggaggtatttgcaaggcaaagcatttgggtgctttagtgattttctatggtggtcatgtggttaaattttcactcaaaggaggtcaagatgcaccaagaagcagattgtcagaccttggtgctggttgacatcctgcgaacccagagtccctgagttaaatctaatatctcctcctatagggattatattgctggtcaagttaatccactgtacaagatttagtgctcatgtgtgccttattcaaattggtaataggaacgaaaagagaaacttggggaacgcatcgtagc

SEQ ID NO: 55446 - DNA, 742 bp, Populus trichocarpa
  Intron number 1 from transcript POPTR_0003s16800.1 (locus POPTR_0003s16800) derived from phytozome v7.0 (chr-ID scaf fold_3; pos 16329266 to 16330007)
agaggaaagctgtacgagttttgcagtagttcaaggtatcaccaaaacaaaccaatttttgtacacgtcgacacacacaaaaaaagaggaaagcttctctcttttacctctctcagcttccttcactctcttagctagctagatcgattcgatcagtttttctttgaccccctttttgtttcttgttttgaaaccttctttagattttcagggcttgggaagttgattttttctgtttccagagttgggttttttaagcttttgttttgagaattgaaaagagagagatggaaacaaaagttggtttctttttgtttccgtttctgtgaatgtctcggcgtttatagcaggtagagtgtgcttgtggtggtattgatgttagatctgcaactggaaaacaataaaaaagagagataaatatctcttcaactgttatattgactcaactctatcactctctttttttttttccaaagtcttttgccctttccccttctcttttccctcttggcttactatctgaattttccatttgtatgttcatttttcttcttggaaagtgaaattcggatgatccattgcttttcaaactgttcaaagcccaccaagctatgcaattttgagttttcttcttaattaacaagctaagagttttaatgcatcttttttctttttttatcactcttttcctttcattttctcttcaggatccaacatagcaccgttattgcacgagttcaga

SEQ ID NO: 55447 - DNA, 770 bp, Populus trichocarpa
  Intron number 2 from transcript POPTR_0649s00210.1 (locus POPTR_0649s00210) derived from phytozome v7.0 (chr-ID scaf fold_649; pos 6260 to 7029)
tcagaacttccttggatcaccaacctttttgccaggtacagtttttattatcgagcttcaaagattataagtagtctttcacagtctgccatcatcataacttcgtaaggttgattgaatgatttcagctttggaataaaggaagatttgctgaaaagaattgctttgatatctagtcccagaaacaagaactgatggggtttgaccaacattttcttctctcaaactgaaataaaacattgatcacatgtaggtacaaaatgcccagttccttgtcataaaaggaagcgatatagtttatgattattgttttgcacctattttctgctttggaagtaattaaaataccacaggcttcccagactcaacattttagagaagacaagcaaattaatttcctaggaattatatgttaatttctgcaaattaaagcctaacttgatcaattacagatcgatgatcgatgaagctcgggtctctttttttgtagaattaagttaaagtttaccaatcaataattcacgttctaagaatcattttttgattcctttgcatatatcgtaggtaactgaagatgctgaaatcattcaatcaaccttttctctatggaatgctcacagcgatgctttctcatgtcttttgtccgtgtttatgtctcttgcaggggttccttctgttttgttctggtttgtcaggtcagaaatgcagtgaccaatgcttttcacgtcttttcagctggttctctcttttgcttcttttggcaggcaact

SEQ ID NO: 55448 - DNA, 1014 bp, Populus trichocarpa
  Intron number 1 from transcript POPTR_0003s04610.1 (locus POPTR_0003s04610) derived from phytozome v7.0 (chr-ID scaf fold_3; pos 5472970 to 5473983)
gcagtgtgtgggctcagagcgccactttccctcaggtggtcttttcttgatctgttttgttttgttaaattgttttgtctgtctcaatataatttagattgagattttatcggatctgattcattactcttatttaatcacaattatttccttcctttgtttctcgtttggattggtcattggttgttgtgtttgatttaactaggaatgatggattatttaaggatctggctttttctagttgagagatttagtttagtttttttttaatccttttttgttgcaaattgcaatcaactattgaaatgtgatgcttttgttgtcattcaatattattattaacctttctttctatgttcttggttttcttgattcgagagaactaaatcggttaattgtttaaagatggattttttttttttgtaaaatgctgcatttggccatcagtttgtgattggctctgacttttaaggatatgaaaagcgccccattacctgtaggaaatggtttatgataataatgtatatattgtaagtggatgcgcgttgtcagagttaaatggattgtcgacctggttttgcttttcatgtcattcttaaaaggatgatttgaatctttgttctgatttgttgtgtatgaacatttccatgcagtgagaatgttagctgatatgctatgtggtgtctctctctctctctctctcttttctatgatttttctgagcttgtatttaatggtgtgcgattggacctgcaaaaaacattttgttatcattttattaattctttaaccattgtttgtaatgtgaatacagagtttcgattgtgctattcttttgaatttattgtcactatttcttctgttgtcgaatgcccttttcttgctggatatggtttcaactagttgataagttggagtggtatcgtcagttttcttttcctgtttcatgtgtcattgacctaaagatttatcactggttgtttatagtataagcctgaggagatttctgccatc

SEQ ID NO: 55449 - DNA, 367 bp, Populus trichocarpa
  Intron number 1 from transcript POPTR_0003s17640.1 (locus POPTR_0003s17640) derived from phytozome v7.0 (chr-ID scaf fold_3; pos 16937139 to 16937505)
aaccaacaatttattttcacgtaagatttaaaattatagcgccaaaactaaaaaaactaataatgtatgaccatgaaacaaaaaggtatcggacttgaagattttcttttgttcaaaaggaaagcaaacgagtagaaatgcattcaaagcaaaatacaattagggttttgggtcaacgatcaattccttcatctttcatctttcgctcttcaaatccgtaaccaaaccatccctgggattttattattatcatctgtttcttaatttttttaacggatgatttatgcgtaatcagtgctaaagattgtggcttttttttgtttgattttcagtagcgctaaagattcaaatcaagacgagcaaagag

SEQ ID NO: 55450 - DNA, 757 bp, Populus trichocarpa
  Intron number 3 from transcript POPTR_0019s08230.1 (locus POPTR_0019s08230) derived from phytozome v7.0 (chr-ID scaf fold_19; pos 9675703 to 9676459)
tgtctggagagtaccgttctcgtctcataaagttggttagtattgataatttttaagggctttatttgtatgtttgatgctcaaatttctgattgtttttgttgcgtggaaataactgctctatgctgctgctgctatttattttgatgtttccagttatctgctttatacttgtgaatctcacattgcttagtgcagaacatgctctttaattttgtgttcactttatcagttcaaccatagcattcgtgtttggaaaccctccaaatttagtcttacaacatatgtgaatttcactactaaatgtttccctcttattctaaagcatcatctgctatatactgatagtgccatgctatgatgtgtatttggttacctgttcttgtccatgcatcattttttggtttggatggaacatatatgagaatcctaaaggaaacataagtattgcttggattgtcctttttcagtatgatgccgtggggcttgtagggtggtgccttttgcatttagtataacttgtgagtcaaatgctttgtttgtctagtctcttctgtttgttcagtgtctgtatgccatttatttgttaacataaacatgcaatataccttgcacagtactgaattatttattaatgtgtgggataacctatatcttcttcattttttgatatttggctttccatgcttctcccccatttgagtgttactatgcagtcattatttaatataaagtcctttccttcttttcaggcaaa

SEQ ID NO: 55451 - DNA, 408 bp, Populus trichocarpa
  Intron number 1 from transcript POPTR_0019s02280.1 (locus POPTR_0019s02280) derived from phytozome v7.0 (chr-ID scaf fold_19; pos 2122246 to 2122653 reverse strand)
ggaagaaggtgcatcaaattccttaagttgtttcttttttattcactttctttttgcagcatatcagttcatgtagttgaaggttctgaagtaataaattttacttacattttgattctttgttcctctgtaatcatgttagggtttgcattcgagggactagttctacatgttctgaaattcagaaaaattcttgttcttagcatcttttgtcctactaaactggccatgcatgtctccatcgcaaaaacaagtgataaaactaatcttgcagtgatatttatgatttagtcctaaaaatcttcatatctcattttaatatttgagtttttctagcttcctgacattatctttcctgttttgctaacaaaaggtcacggcaaaattatcgaaaatatatccgaaaga

SEQ ID NO: 55452 - DNA, 655 bp, Populus trichocarpa
  Intron number 1 from transcript POPTR_0014s07870.1 (locus POPTR_0014s07870) derived from phytozome v7.0 (chr-ID scaf fold_14; pos 5854692 to 5855346 reverse strand)
ctgaggtaacgaaacccacctttcttttttcctcttttcctctttacaaggatttcccattgcaagggaaatttaacttttcatattgaagtttgagtcttgtaaatgctttatcttgttacttaaagaaaaagattggatttgtttaagaaaattgaaggaattggttagcctttcgagccaaattggtgaattaggattagttgagtttattgtattgttaatttttgccttaggtggagtttaaagtttggtactctagcttcaattctgtttttaaatctctggagttgtgcattgcttctgggaagaaatgatgaacttgtgcctcaaaatttgaccctttttttttccaatcttgaagtgatgccaaatgttccttacgactcacctcttttgtttgttaagtggatattgatgccttctagtttggaatatgtttcgctctcttgaagcagatatttataattcaaaagtaaaagaaacacttctgaaatttcactacaagatgtcttaaagtgcattctacttttgggttgttagctcaagcaactagtatgcttttatcttattctcgtgctgtgctgttcaacttggcgtgtttgtttaacaaactacttgcaaataatttgatttcaggtctttgccctcagag

SEQ ID NO: 55453 - DNA, 378 bp, Populus trichocarpa
  Intron number 3 from transcript POPTR_0014s17250.1 (locus POPTR_0014s17250) derived from phytozome v7.0 (chr-ID scaf fold_14; pos 13391173 to 13391550 reverse strand)
gagtatccttttgctttgtccaatgtttgagtttccttttattcttttttccattcattaaactatttcattcccctttgttgcacactcttgctgcttcatgtgtttactgggaatttttactctttaatgttaaaatgcttaaggaattgggtttatgtgttctcagcatatagtttaagagtacaggcatggattttagtgtaattgcttcatgtgctatcttctgcattggtccaaatggttggaaatggctatgctattagcatgctgtggtctccttaaagacccagttttttttttctatcttctttcaatttttggagtcaaatttgaagggccttaatctaatgattagagaactggaagacaatctgg

SEQ ID NO: 55454 - DNA, 749 bp, Populus trichocarpa
  Intron number 1 from transcript POPTR_0003s09580.1 (locus POPTR_0003s09580) derived from phytozome v7.0 (chr-ID scaf fold_3; pos 10876278 to 10877026)
ttgaaaatatctactaaagttattgctccatatcggtaagaacaccaattctcttctcatattctcttttagttactctgcgctgtgatttttcttttctctctgcccttgcatatttggagtggtgaataaatgatacagagcttcaggaggaggtttttcatccgttcttgtaacgtaaatttgccggttgcgttttcaagtcgtgcgtaatttctagggataaaacaatttgttttctgaaactgattttacatcattgcaatgtattgggtggtaaataacagggaagttaaacaaagagttgcagaacagcaagagatgtcctcataatcagtcttggataatgaatcttctcaacatttgactaatttctatgaattgaaaggttctacatttcttggtttctttggttaggaataatttagttcatctgcgttggtgggcatgtggactatataacctttggagtttaaatcgctatataactctataggttttgggatcaccttgcattactttggcttcagttccatctttgattcgctatatatactacaacttccacagtttcagcaaattttaaagattcctgcttgtttttctttggttatcatttcacgaaatgattgttctgagtttatgtttacttatttctgagagctttctcttttcacatgtgagctctatgattttataattcatgcactctgctgaactattcttgcaggcttctaatccctgtccga

SEQ ID NO: 55455 - DNA, 459 bp, Populus trichocarpa
  Intron number 1 from transcript POPTR_0006s14230.1 (locus POPTR_0006s14230) derived from phytozome v7.0 (chr-ID scaf fold_6; pos 11541019 to 11541477)
aagcactagaattagattacactgtgcacatcaatgtcaaattgaaatggtaatataagttgattgatatacaggagtcctgatttttacctggttgaatttgatgctatgaaaataaactattgaagttttcacctaaaattgttaaatgtattccagaagtaattcaaacaaaccatgcattgctgaaaagaaagaatgaaatgataaataattcatattgtaaatctgaaatttgatcttatttctagcattttgaagtgccatggcaatctacaatatcccttgcaaattatatatgaagcttttctctcatcagagcaaattacaaatttaagatgaaattggaggaaaagagtctcgctcagggttcctgtcttgcaatatttgctgcgagtcctgccattttacttatttttctattgaagcatatatttttttttcagatactggaattga

SEQ ID NO: 55456 - DNA, 1035 bp, Populus trichocarpa
  Intron number 2 from transcript POPTR_0014s16220.4 (locus POPTR_0014s16220) derived from phytozome v7.0 (chr-ID scaf fold_14; pos 12313006 to 12314040)
tggagccaaaagctactgctgctggtcttagcgtaaaattataaatttttactgtgggctgtcagtttgatttttattctattatcagaattgaaagaattaatttttggagaaaaagaaactgattaaatcacatattttggatcatttttcttggcaacttaacaagggatatatagatgttttttttcttgtctttcttattaattattgttggaatttatttatttacatgaattatttatttaccatggaagaagagtacaggaactataaattggttatatgttcgaaaatgctgtgtgagtatccgcaaaataaatggtttccgaattgtttgatgtggggtatagctttgaaacgttgtaatccattacgttatatgtgaaaggaattaattgtcttgcttgttggttgattgaatatgtgcatcatttggcttgtttactgcaaagggagtgttggcgtatctctgcacaagatcgttgatttgttagatgggagtgttattttacaaataaaatgtcgatgcacatccatttgtgtataatatgtgagtatgctttaccttttatcccaactgcgcacacttgagttcatcagtgcgcgcggttgggataaaacactcaaaataaaacaacaactagaagaacaatggttaaagtgcttgctatttttatttctactagtgattgatactggtacaaaatctgtatcgatatcatgccttaattctaaatcaagcatacatgattttgattaccagccttcttttatatatttagattttcttaattttcccatatcactatgaagaactttaaaatattttttgtttgaattttgaattagttggtctcgactgtcaatttgcaaattctcgctattattaactttattttgatgcctcttcaggtatgaacaaccaccaaaatgaagtccgcggttaattgcagtaatggcatcttgaattaatctctttggtttgttctataacttcccaaattaagatggtttcttcagaggaagttccag

SEQ ID NO: 55457 - DNA, 386 bp, Populus trichocarpa
  Intron number 1 from transcript POPTR_0019s11340.1 (locus POPTR_0019s11340) derived from phytozome v7.0 (chr-ID scaf fold_19; pos 12670475 to 12670860 reverse strand)
gtgagttccctaacgttggtggtgacttgaaacaggtaattctgattgttttttagtaaaatctctgtttttttagttatcccttaacttttatggtttaaaaatttgggcttttggttgattaagttaaaagaaattacaaaaatgaagctttaatcactgaattatgttcttatgtaacattatgtgtaaagtaatactagtatgattgtagtgattagtagtgaagagtggtttttgatttttacaagaaaatggttttttcttccctgaatatatgagttagggaactttttatgattttttttttgtagatttgaaactcgtgtatggattgatgttgtttttttttttttggatctttgtttttattatagcttctgcaa

SEQ ID NO: 55458 - DNA, 614 bp, Populus trichocarpa
  Intron number 1 from transcript POPTR_0006s29060.1 (locus POPTR_0006s29060) derived from phytozome v7.0 (chr-ID scaf fold_6; pos 26543337 to 26543950)
ccgctaaagcaagccttctctcactctctctctctgtgtgttttgttttgttttgttaatttcgctccttttaataattgtttcccatttttccattccgtcaacgaaaattaaacaaaaagcaacttatttatcagtgttaggtttttataattatatttcccgtgaaagtgtgggaaaattaagtgaatcaattgagaaagtggagtgaaaagatccgtgtttttgtcgatcttcgcggttttgtagttttacttgctgtttggttgctgagaaagtgtaggaaaattaaagcacgtaactgaaaaactctgttgagtataatttgaatttgagtgttggaaatgaaaaaaattgtgttttttttttgttagtctcagggttatggattttatgttggttgtttgtttgttgtcaaaaatggtgggatgagaaagtaagtaactatcaattattgccaaatgtctaagttagactgtgatttttttttcttttcataatattgtataattgtcaaaattttgtcctgacaattccattcctttttttttttgtaaaaatttctttgtttgggaatagagtcgcaattcgttgggtgtggttccagttacggt

SEQ ID NO: 55459 - DNA, 857 bp, Populus trichocarpa
  Intron number 1 from transcript POPTR_0014s08310.1 (locus POPTR_0014s08310) derived from phytozome v7.0 (chr-ID scaf fold_14; pos 6174736 to 6175592)
ctttggttactctgaagagttaaaagctccctctggtaaactccttgtttgttttgttgacttttttactgtcttgcggtaaggtttttgctgagagaaaaggtaagaaacttgagacgtggttcttgattcatatgatatagtcttttttggagagttttctttttgggttggactatagaatgcgattgcaacacagtaatgatggtttgtttttaattatcttctgtgtaaacaaatcatggcttaaatgttgtgttggaagcaagggatcagatccttgaatagttttcttttactataagtttttatttggatataaatgagaaattactgaatatgcatggtttaacaaagatcacttcttgtctacttattgttatgctatgacaacgtttgattatcaataaatttcttgaaaccttaacaaatgtgtttggtaccgcattacttgttatatacaccaatttgattttcttctttgttatttatcgattttatggtaaaagttgggccgaatctcaatgtgttattatgataataacaaattaaataagcagatttggtattattccaaagcaacaggaactgggggttcttggcccatttcaaaaaagcgtaattaatctaaaaaaaacaaagaaagaaagtagacttgtatattcgattttaagtttatttactaaacacaaaacaatttgtgagacaacgctttagtttcagagcattgaagcatacttgaaatacatggtgaatctttttcttttttttctatttctatatgaaatgaatttgtagagttagaatgaactactcaaatttgttcctttcagttgcatctagtacttctggtggca

SEQ ID NO: 55460 - DNA, 500 bp, Populus trichocarpa
  Intron number 3 from transcript POPTR_0013s14020.1 (locus POPTR_0013s14020) derived from phytozome v7.0 (chr-ID scaf fold_13; pos 14335463 to 14335962 reverse strand)
gataaggttagtgttttttttttttttttgctcttgtgctgatcttacagcttgctgcctttttcaatctaatgttctttacttcgattagcattttattcagctttatttacccaatattcttatgactgatcaaggcaaaggaataatctattgatttgttgagaatcattccgcatccttttcatgggaggcatctagtaaagaggaaacgcaactttttgacttttgaacaagaaactatacaatttcttgagctgatagactcatatattacattgttaagttcatcatagtgtttcttgagcatatattcgcacgttcaatcgatattgtctctttaactttatactgttgcctggaagaagaatcaaagataccatcagcaaaatgagttttaaaatttgggttgattttgactattaatgatactgattccttctcattgtttagaagcttggattccaatgacaccttgttggactcttgcttacagatta

SEQ ID NO: 55461 - DNA, 583 bp, Populus trichocarpa
  Intron number 2 from transcript POPTR_0444s00200.1 (locus POPTR_0444s00200) derived from phytozome v7.0 (chr-ID scaf fold_444; pos 7619 to 8201 reverse strand)
cgtgaggagacacgaggaggaactaaatcagccacgtgtctagctcactacatgtcctcagaatttagatacagtaattggcagaggaaaatacttgtttgggactatttctggttgttctcctccccaccctctctgtttttttcttcttttaaagaaatctttgtgtgtttgaagaggaagatttgagaagatgttgattacgaggaatttacttggcatgtaaaacatgtaatgaaataagattttacttttttgctttttcagaccttgttcttttatttatttatattttatttgtaaattttatttttattgcaattcaatccttgaactttcatagatgccagagaaaatcatcatggaatggagacaggagagaaaatatttgagagaccatgttttgactataaaaaaataattttgatataaatgaattcttctttactatgagagtttaatatagatgatgtttacgcattataaaataaattagagcgtataatagtgttaaaaattaagtgactcaaaactcgaatctcactttttttttttttttaatttatggtgattgaaaacagta

SEQ ID NO: 55462 - DNA, 834 bp, Populus trichocarpa
  Intron number 1 from transcript POPTR_0014s17770.1 (locus POPTR_0014s17770) derived from phytozome v7.0 (chr-ID scaf fold_14; pos 14109777 to 14110610)
tctcacctgagtatgtttctgagattaataatactagaaggatccatgcgttgcaccatacttatggatgaaattcctgctatatccaccatgcacttgtgcatgagtttattgtttgacaaggcatagcaaaggagatttctttgttgctttcctgtggtgttatttacttgctcctcgcaccatgatgtgcccagcttgatctctgtttccttttaaaaacatgttcttaagctattctacggtttcgcccttgtttcctagaaaatggtttttgaaaagtgcacagtcaaaccaatatacatggaatgttgataaatataatgcagcatttaccacttagagtgcaacagagaacataaggggcagacttattccaagtgtgaattcaggaacttaggatgtagcgtggtcatgttgaatgggaatgccatgttggactggtaactagataatagaagttccttaactagtatttctatgacttgattcataaaatgactacctgtgatactagcagtgtgaaataattggggaatattttaactagaagtttcacttagtgtttgtgaatttttggattttacttttccaactatacttgattgttaacaaacatataataattggatcactgagagttcttttcaagatttatcatccaaagatatgaaatgctctctcaagtaggtgtggaaaattgtgatatcttactgtgactctgctggttgcattataaatgttgttttgactcctgactccctttgttagccgattcacctgtgaatttttgtttcagagattttgattattggttgtggaagatacactcaa

SEQ ID NO: 55463 - DNA, 1020 bp, Populus trichocarpa
  Intron number 3 from transcript POPTR_0019s01000.1 (locus POPTR_0019s01000) derived from phytozome v7.0 (chr-ID scaf fold_19; pos 767607 to 768626 reverse strand)
gcacttcacaccattcaatttagtaagaactaactctctgctgtattaatatgaatactattattttattttttgatctgttcttttccctcctcgtccttcatctcttctgtatggttattgatcactttgctgatgcttttacaatgtggatttcttttgccttcaaagcctcatatcaaatatttggcacctgataccttgctcagttatgcttcttgatttctgtgtggaaatggttataaaggtttgacatgtttgacatatggagacatgggtttattttgatatgcatcagctgatattcatttacaaaaaaaaaagaagaaaaaaaaacagaatgatgatttgcatttgtacaattttatgttcaacaatgtttagaatcatattttcagtttttatattttaatctcatgtgcttgttgtgtagctgccgcatcactttcatatggtctagtcctgcagaggctagtgttacacccttgggaaaatctgaaaattgcatttggtgtaccataatccataataatcaaagctctagtctgttagtttacttggttcatacttgaaaacctttccaaaagaatgtggaccaaattggatgacatatcagtaacatgatctataattttttcttatgtgaatcaattttccgcaatgccaacatttcatgtactatttaaggttcaatgcataagctgtgcttttctctaaaagttcagttataactatcctggttattgttactttgaattagaagcttgtctcttccttttgaagtagctggttgagactttctaatgcactgatgctataaaataaatttgaaacataatttttttttttggataagatctgaattgcctgtaagagaaaataaaaaagtggcatatgtgcttattttttgttgtaaacccaaacattggctttgtatgtcttgaaatgcctgtttggcttttactccttttatctactgattctatgtttttgtatttacaacccattggtatttcaggt

SEQ ID NO: 55464 - DNA, 497 bp, Populus trichocarpa
  Intron number 2 from transcript POPTR_0019s01000.1 (locus POPTR_0019s01000) derived from phytozome v7.0 (chr-ID scaf fold_19; pos 768743 to 769239 reverse strand)
gttcgattcacaaaagagatattccgagattatcagtatccttctttaaaaattattgaaagtaattgtatagaatgttttattggatttgcatgatgagttagtttttaatccttatagtttctaatagaccctagaaaactctgtttggtggaggtccccttttcttttctgctgccacatggggtattactaggttttccttagtttggattagggtgtagatgaactggataaaaggtcaaaagagatattcctaggttacgggttttcctagtttgaattcttaaggctgtatgaaatatgaattatatttggacatgctaaatcgtttgacacattttgtattcattctaactgaagcaggcaaaactttgttgggcttctaggtattggcttcttgcatgatggatgattaattaagatggattgcgagttgtttttttccttagtttgaattagaatatatttgaaccggataaacttgtatcgccaga

SEQ ID NO: 55465 - DNA, 781 bp, Populus trichocarpa
  Intron number 1 from transcript POPTR_0019s01000.1 (locus POPTR_0019s01000) derived from phytozome v7.0 (chr-ID scaf fold_19; pos 769351 to 770131 reverse strand)
atttacattcctcaaatctagtcctctctgtaagctatttctctcttttactctgcttttttctccttttgttctagttcttgacttattttgctcaaaatttcggttatggcgggaacctgattttggtatagtcttaatgttttttttttcacaatttttttggttatggaaaatggggttttcttgtttttgttgtggggcagtgaagaaaactaaaaaaaaatattttcattgtttttatgatgaatattggcaaatgggttctctaaaaaaaggtttttgagtagtcaaagtgaaggtgcttaaattctaggtttttttttttttttttcaggttagtgggttgcttctatttattgtaaaacaagcttgactgtaatgatttggatcaatgtgacactttttcatttttttgttatgcataaatttttagaattgagtgacttgttgtgcccttttgtttctagggtttccatgggaaaaaaacagattgtttaggataatttagttgaacttggacatcaaaggaggttactttgggggaatgtgtgaaaaagatgtgaacttttgttatatttttatgttatttgatctggcttttcatttgtttgtaagttggaatgaaggaaataaaaatgtgatctaaagaatgaattttagttgataatctttgagtggtgccttaatttgaaattattttgtgttattgcttaggtgtttgctcatggtgtatttttgtgcagttacaaaaattttgactttggggacatttgcgaga

SEQ ID NO: 55466 - DNA, 1004 bp, Populus trichocarpa
  Intron number 1 from transcript POPTR_0668s00200.1 (locus POPTR_0668s00200) derived from phytozome v7.0 (chr-ID scaf fold_668; pos 368 to 1371)
agagaggtaaattctacttgcatttacttataatccaaccttctatattgctgaaggtgttgccagtctttgttgctctcgtcttaatctttcattgtattgttgttgttctgtagctgtcacagttattgattttgggtattcttggaaagaaatgatgaatcttttgttagaagtagggatttggaattcctgtctatattaaatagatagaagtgggacgagggagcattatactagtaaaaactgaagtttctttttcttggctgaagaaatgatgcaagaggttttaaggaaaattatttttcctagttatttttattttttactatttggtttaggaaattaaatattatgcctaataattttattttttctattttgtttaggacttttattccttttcctttattttcaggtttcctagtttgtgtagatttgttttcgggtttatttaaggagttgtaaacctgagaaaaaagactattagaagagaaaatattgagcaataaaatttcaaattaggatttttgtctggcgaacctattcggcaaaattctgtgttgctttgtgcttattgtttttgttgtttccgtaagcatcgagaaagctaattaaaaggcatgattctaaacatatttttatatggacgacaataataagtatcattacttgcatgcttaacaaagatggaataaaaaaatagctttaaacgtatttaactaattaaaaagcatgatcttaaacatattttttttatagggatgaccataataagtatcattacttgcatgctgaatgaagatggaataaaaaaaatagctttaaaagtatttgcagttatatacttacattccattcattcctccatcttttatctgacatgttgaagtcatttctttagtgatcaaaacttgttgtaacatcagttgcttatattttaatggttgctgttttgaattgtatgattcaggtgaagcgatattttgtatacagtgattcaa

SEQ ID NO: 55467 - DNA, 719 bp, Populus trichocarpa
  Intron number 2 from transcript POPTR_0014s15900.1 (locus POPTR_0014s15900) derived from phytozome v7.0 (chr-ID scaf fold_14; pos 11984292 to 11985010)
cttacaaatacgacaccgctcttcttgctgctcaggttttccaagtttttctttttattatttatttataagaaatgggtactcgtagaagagcataacacaaaggaagaaaaaaagaacatcttgttttgatacatgatgcgaaaaacacattttagcagatttcagtgcatctaaaaagttccagagttggactgtaaataatggaccctgatgcaatgtcagtttaaatagatgcaagtttgcatgtgcgattttgtattatgaattaaaagaacctatttcctccttagttcagggctgctagtttagagaacctgggtgaaatcatcacacggaggacatcctagtggcccctaacttttattccaagaattgaatcaaaggggactttcttcctagaatcagaatatgggaagcagagtcttcttaaaatgttgggtaattgaattccattggaggtgtgatagactgctttccatgtgtgctgtcatgcctgtgagttttgggaaggtttctgaatcttcttaggtgcactggtatctaaaagaggggatatttgtggaacaggaagtagttatatttccaaaggagtcagggtatttggctattgttagcaatctatcatatttctcttcggattgactgtattttctgatgtattctcatgtgtctctgtcttagattcgtcaattggcgcaagagattaaggagttgag

SEQ ID NO: 55468 - DNA, 874 bp, Populus trichocarpa
  Intron number 1 from transcript POPTR_0006s26810.1 (locus POPTR_0006s26810) derived from phytozome v7.0 (chr-ID scaf fold_6; pos 24899915 to 24900788)
attcggatagtgcggtttgtcttctttactttaagcttcttttttttcatttatgttttctgggtttgatttgttttggttgcatttctgtgtgtttgtgtggatccgagtgttgaattttgcgatagtgaatttttttgggtggggttttgttaatttttaaaattctgctttgttttgttacgttgactagcaatcacctgatctagttgttggtcgttgtgaacgtgagtgtccagtttgatcttgatttcagcttgattcctttaaggggatttggccccttttgttattcttgatattacagtgtccttaagccaagatcagtagtggtttacatcagagagatttttaaaatttttttaatggcaattttaaataagatctacttctataaatctaaggaagctgttgttttggaatttttatttatttatttttgagctggattccatgataaactgacaattccgatcgtgtggcttcagataatgtttatattttctactcgggatcacttgagtgctttaagctataccaggttccttatgtcatgtaaaatgttaaaagggcagcaattccaatgtctagtatgtcaagaagaaagagctcgtgtttaattttcttgatttcatcttattcaagatgttaaatcactgtgaattgattttgcttcctttttcttttgtggaatgtcgggcccctaatgtgccttgctttggatttgattgcttcacttaatgtgccagtaaatttccaacattgctagctgttattttgttgccgtggcaattgaaaataatatatttattttctggatgctaatcagtgtttttctgtggaataatgcagcccaaacccctcaaaaacttga

SEQ ID NO: 55469 - DNA, 832 bp, Populus trichocarpa
  Intron number 2 from transcript POPTR_0018s13920.1 (locus POPTR_0018s13920) derived from phytozome v7.0 (chr-ID scaf fold_18; pos 14208818 to 14209649 reverse strand)
cttactctggagaaggttggaaaggtaaaaggtaaacagattttcttacacatcattcctttgaaaaataaagagcatctgctagttaattcagctttcgattccttcaaaaaataaagaacatctgctagttaatttcagcttttgattacaaacctatggtttaaggaatccgtttaaagtctaaccacttcttaatcagtgagaaaattttatgtgaaagatataaaggtgaaatataattgttttcaaattgttgatcgaagatggttcattttcttgaagcatgccttgtacaaacaaatttattccaggaagaagttggatgcttgaatgaatatgccccctttcttctaatcctgttacatgaattttgacgggtatctatgtttgaaaattttaccagatttggagctatctgatatttcgaggaagttctgatcaaatttttatatgagattcaatatttccctactgaagttgagaattaggataggctcaaagacattttcattgtaaagttcagccaaaagaatctggtggatgtgttaactgtgtttaatttttcatctgcatatgcttcgagatgaattttcttttcaatcatttattcttcaaaatttggaatattttactgaatctgttctcagaccaaaggaattttcccagtttacaacatgcataaatacaaaatgaaacaaaaagaactcttctgactggaagtttgaaattgatagaaccttcaaatgatgaaagaactccatttgttcttatcttttactgaatttctgtcacagtcgagagaagattcggccagaaaaggaactactga

SEQ ID NO: 55470 - DNA, 829 bp, Populus trichocarpa
  Intron number 1 from transcript POPTR_0018s13920.1 (locus POPTR_0018s13920) derived from phytozome v7.0 (chr-ID scaf fold_18; pos 14210171 to 14210999 reverse strand)
aggaggtggaggtgtctcattcttgagtttctgaggtacccttttcttcgttattgattttgagcttgctttcttgggttgtcattctttttatgtttagtttcaatgtgaatattttttgaggtcttggttttgatttgtcatctgggttcttcttaaattgttgtttttggtgattatagattggtttcaatgctaatgatgtttgccttggggtgatttccttgtgatagttttgttggtgatcatggatgattgtggtttatgaatctaagaatttgtttcttgccgcttaaacgtgctggaattagagttgagaatgtaatccagtgatcaccttgaaggatattattgttaatgaatgaccatgggtttgatagtcttggatgtgaaatgcatggaatattttttggctttaattgtcaaagttgtttagggttccatgttgatttcgttttccgtggatgtttgaatcttaaagatgattaaagaaaattgagtgttctttaattttactcttaacattggacgttacattttctttgtcgatgaagaaatatttccaatatttccaaattttgctcattttccaaaaagtcaacgcatggttagttatattagatgaaacatgctgaaaaagctgacttttatggaattcaatggtggtaatatttcatgttaggtcatgcttgaaactagaattgaaaagttgtggaaactgtagaattatctttgcagtagatcttgagcttcttctttatttatgagcaataactatacagctaaacgattgcttatacatctgtaatgatattttcagttctcacac

SEQ ID NO: 55471 - DNA, 930 bp, Populus trichocarpa
  Intron number 3 from transcript POPTR_0019s06280.1 (locus POPTR_0019s06280) derived from phytozome v7.0 (chr-ID scaf fold_19; pos 6929733 to 6930662)
ctggaaaacttattacagtaagtaaattttgtaattttgttcaattgttcatatttagcacaagcatttgagattatggaggttatgcatggctagttgccaacctatggttactggcaattaacaaaatcaaaagtggagaaattataatttccatattgtctacaaatgttaattccaagtcacctgttcctcgataagatgggaacttgaagacctttcaggccactttaaacttaaagatccttttgttgtggtttcctctctttacaatactgcgatcgacttttcttgagaagcatttgctacccttatctttgatttgatggtgatattatttttttcctttcaagggagatgtaggcttcaactatacttgggaagcatttttgtgtttacaattaggatctagttcaatctggattcaactagaacctacaaaacagggcttggtggatgtggcaccctaatgacctattctaaagcaattgagattaaatctgttttaataaattggcagtaaaaccaagtgaaggtggctaggggcctaaacaaaatgtccaaaggtataaaattcgtttctcttgacttgaaccgatgcaaattgcatctttatagtgatgatgattttatgatttctttggggtttgttctgaaacatgataaacttctagatatctacattttgagatcagcataatataatagatatatttcctgatttgaaagaaacaactgggtggaacctgtatacactctttcatggacaattaagatatttaactaatattttttgtgtaattttttttttttttgatgtgtaataatatgaagtcattattctcaacctgaaaaactgtatctaaacttgccctttaatggttcaatgttttaggttatatttccaagctttggtgagaggtacatccc

SEQ ID NO: 55472 - DNA, 606 bp, Populus trichocarpa
  Intron number 2 from transcript POPTR_0003s20170.1 (locus POPTR_0003s20170) derived from phytozome v7.0 (chr-ID scaf fold_3; pos 18739632 to 18740237)
atttgaggcctaaggtttgtttttgttttttgtttcgtttccgggttggtttggtttttggtgaattttaattggttttttgttgaagtttgattggttttaagttttgtgtttggggtcatgtttgcttgtgggcctgggttttgggttgattgaattacggtggcttctgtgatttttttttgttaattatggataattaattattaactatatggtttttatattttctcttagcacttgtgttttggctgtgaaagatgtgaacttggctgatcctggtttgcaagataattaggagatgaaactgagtgatttactcttcttgtttgcatgctagtattaatattttctttgttttttcttttcaggaactgaattttgtgataagtgataggatttgtttcatggttattttatgagtaaaattatctgtgatctgtttgctactttggttgacgagagaaggaaatgagggaaagctttgagctttgacgatgttgatgctattttgattttgagaatgaaagacttgatgaagtgtggcaattggctgttgaatgattttatctgacattttgtaggcttgttaatcaatgtgcagat

SEQ ID NO: 55473 - DNA, 971 bp, Populus trichocarpa
  Intron number 1 from transcript POPTR_0003s07780.1 (locus POPTR_0003s07780) derived from phytozome v7.0 (chr-ID scaf fold_3; pos 9309725 to 9310695)
aggtatatttttcgctgtttcatgcttggatcattgttttttcttttttcgctgcttttggagctctttgatgttttttttttttttttgtatgtgtgtgtttaatatggcacatgttgatgacatgtatgagggtttttgctttatatgtggagattggtttagttgggggtgtttgacgtttcaaatttgattctgtttttcggttttttatagtataggattgtgtagattgggtgtgtgggtggattttacatgcttgccatgtgttttgacgctaataagttttgttgtgtttgttctttttatggggttatttcagtttttggttgagttctgatgtctgtatgtgtagattaagtgaaggaagtgtgtgtttaggataggagattgggcggttattaaagagttgtctcaaagcaagtgacaatattgtttgggagtttaacttcattcccttatcctttgccaactttatttttgttctcttgtaccgtttagatttcaaaacacatttgttttctctgtgcttgtaaacttactaggacgctgaacttctgatgattggagtgaggagccactccaatctggaacttttatcattggttctttatgcttgtaaaatttaaacttggatttaagtttattaagaatgcttgtgtttttttaattaaatgttcttgtttggtgaaccatggttgcagttttttctcatcgattatctgtgaacgagttttcaattttccatttgtctattccggattgtttttacatgatgtctttgcaaatgttaatatcattagtaggtgtattacgccatattctttgagctcaagattcttggagttgtctgaaaatttacttgtgcctttgtgtaatgaatttcatatcaagtagccttctcaatttcatctcttctaacatgtttatttgcagtttatattgttaggtgctgttccattcccttctga

SEQ ID NO: 55474 - DNA, 1005 bp, Populus trichocarpa
  Intron number 1 from transcript POPTR_0003s20570.1 (locus POPTR_0003s20570) derived from phytozome v7.0 (chr-ID scaf fold_3; pos 19080459 to 19081463)
tatctgcgggaatttcttgagtggagcgaggtaagcttggaggattttattgaatttattatggagaatgaaacaagattgtgtgatttctatgctgaaaccattgaatttagtagtgaaaacctcataaaaatgatcttaatggatgctgccttcgtcattgtcataacctaatttttgaccattttattttaattattattattattattttatttactgaaaaggataaaaaaatgatgataatgatgaaaaaacaagtaaaatgaaataaatgaagaatgaattaaattttgggttaaagacaacatgattggaagttttgtggtttaattaaactttggaattaatttaattaatccaatcaagggtttaattggagaattgataagttttgagacttaattaagcttgaaattaatttaattaatccaattaagggtttaattggagaattgataagttttgagacttaattggacttggatttaattaaattaatgaaatcagggacttaatttaattaatccaattaagggtttaattggagaattgataagttttgagacttaattggacttggatttaattaaattaatgaaatcagggacttaattgaagaaatagcaaagtttggggtttaattggggttcaaattgcaaaaattaaaatccaaggaccaacttgaaaatcgcgcagaaatgtaaggatccaattatattttaagcagggggtttgattgcaaaattagaagaatcacaaggaccaaattcgtagccagcaaaacggggtcgttttgcaacgactgttcaccgtctctctactctgcaacggctctgccattaaaggcagaggcgcttcgtccgttggcaatgatggcagacgttttcttcattcaaatgcgtcggttacggatcatttaggaggggggcagccgttaccaccaaggttgccgctggttctataaaagcggagcaaaggcgacctcgcgaaggggacaagggc

SEQ ID NO: 55475 - DNA, 1033 bp, Populus trichocarpa
  Intron number 1 from transcript POPTR_1613s00200.1 (locus POPTR_1613s00200) derived from phytozome v7.0 (chr-ID scaf fold_1613; pos 1867 to 2899)
tcgctgaagaaagatcgactgtgaacaaggctcaggtatgtgatttatttttatttttaccaaaggtcaatattgctttggatgaaagaattaggggtcccggataagtcttgaagcccagaatgtgctcgacactttctctagcctgtacatgcatgaagttctttgacttctcaatcgatcttagatcggagaaatggttagatatatggaagaagattatactctatttttcgcataaatatatgtgaaaccggttataaaagaaattgttcgtgaatccaaacctttatgaaagagaatacatctcctaagctagtgtagggatgcataacccaagcacttaatattagatgaagtctaattaatgattttatattattctttctaaacactaatccataccttttatagttcacatgattcaccatttaacttacatacatatcaaatttctctaaattaattataattgttctgaaattgaagttcattttataattcaaacacttgttcttaatttacaaaactctttacatcaatcatatttctgtagaaatacatttctaaattaccaagttccatcattgttcattaaaaaaaaaaaaacaatcacattaactaccgtacgttattcctatcttcttctagctagcttcttctcccttgtcttttgagcttgtgggattcctgcaattactttaattcatttatttattggtcgattaaactgctccagccgtccatgtcctctttttataatttctcatggcatgtataatgtttagtggatggtgatcgcacactaatatggactctttacattttctttctcatacgaatctctttatctattttgacggaaagaaatgtcgattatcggtgcaatattctgtctatgcttacaacaaaagtctcgaatgaactattaaaggttcaactttctttttaacctcatttgtatttagttcttaccttctttttttcttggcgtgcagaaaaggaaaagaactggcaaaaaacaagcaaacat

SEQ ID NO: 55476 - DNA, 167 bp, Populus trichocarpa
  Intron number 2 from transcript POPTR_0014s10300.1 (locus POPTR_0014s10300) derived from phytozome v7.0 (chr-ID scaf fold_14; pos 7737205 to 7737371)
tgaattcgtgagtttattatacccttttgattcttgacttgctatggattgcttttttatcctttcttttttcgggttcacttggtgaagatttagaggtctcttttttcttttttgggttaatgggtgtagattattttgattgatctgattctgcacaagacaaa

SEQ ID NO: 55477 - DNA, 699 bp, Populus trichocarpa
  Intron number 2 from transcript POPTR_0420s00220.1 (locus POPTR_0420s00220) derived from phytozome v7.0 (chr-ID scaf fold_420; pos 39098 to 39796)
gtgtaggtgcttgaaggcggtttggataaatgtaatctcttggtactgatgacaattaaattaatcaaacaagtgctgatttcttcaatctcaggtttgtttttgttgttacagcgttgctacctctgataaaatctgcagttgctgttctcgtgttgcaagttgaattaattcaagggaaccaaccagaagagaacccagggagtgagctagggtggcagagtgcccttccagctaacacagtatatagataggataacagaaatgtgacaggaggaagaagaagacgaagaagaaggaagcagaacacgagaattgtaattcatttcatcatgccttcttctgttacaagctctgttacaaatatagcagatgatatattctagaataacaccaagccttggttacacgtgtccaaatgatagtgagaacaactgaaatgaactaccacagcgtgttggctggttgataaaatgcaagtgctgaaaacgccgctgtttcaataacggtcttctgttttaaatttcttctcccgacaacggtgcttcctgagttgcaacatctacttgtgaaagaacagcgtgtgcttggttccacaagtggagtgaatcttgctttgactggtcctggtttccaggaaagctcaaagcatcatattattcagttgtgattgccattactccttttctcttcagtcca

SEQ ID NO: 55478 - DNA, 955 bp, Populus trichocarpa
  Intron number 1 from transcript POPTR_0014s00340.1 (locus POPTR_0014s00340) derived from phytozome v7.0 (chr-ID scaf fold_14; pos 141012 to 141966)
caccttggtccattcaaagactgattctggtatgtaccgtacaccatttgtggatgcactgaaattctaattgattttactttacattttgttttgattctcatggtaattaccatagttgaatgaggtaatggtgtttaggaactatataacattttgtaaggttcctttctcagataacatatatatgtcggctcttaaggttgatcagaggttgaaatttctgtgcatgtttaacctcaggagagaatgtaatttgatttatttaacaccattcaagggtgatctatgatctacattgcctttatcaataccataaccatttgttgtttaatcaatggatagtgaaagctattctctctaaatgcaaataacttctgatggggtgttcttagttttcatagattggatctgtcaaggcatatttacaactacttcttcatgtatatctagataaacacattcattatgaaaataattatgctgaaaaattcatttcaatacacagttgtaatgtttgaatcaagttgaaccctttttgaggctaaataaataatagaagaaaaccataagctcaattttcacctccaatagtccaatggtctaggtttaaagcggaacctgtaatggaatgcgaaccgatgggtttaagttatagaaaatagaagcttttctttagaagtatttcaatctggttattggatcccttatgctccactgaagaactggttgttttagctataagtttggaccaaaactggatacaagtaggcttaaaagcttcaaatattcgaggacagctttaaaactctgaacccttcttttatgatcttcaatcacatgatcataatttgttgagtatctatatgattagaaaataataagttactttcatatgtagttgtatttaaagattctgatgtttccaatattgcgattgcagtttcggctttga

SEQ ID NO: 55479 - DNA, 531 bp, Populus trichocarpa
  Intron number 2 from transcript POPTR_0018s00430.1 (locus POPTR_0018s00430) derived from phytozome v7.0 (chr-ID scaf fold_18; pos 328189 to 328719)
gctagccttctggtaatatttctgtttctttccaaggtctattttttccttcttttcgaaattacagttgcttgacgcaggagctgaaaaaaatcattaattttttgtcgttgctccaaataatttagctcagccgtaataatttgtttgctacccgacgtatgatatctcctagcgatccagatgtatcctttctttacctcatttgtcaaagttttactgtaatggaggaccatgttttgtatgttagctatgaagatgtatcatctatcctcaatttctccatctgtccgtttgttttttctatccatccacataactggaaccagctccgtgttctcattctacagggcgatttgcgtcttatttttgttaacaagagacttcattttgagtttaacaaggatgagaattagagcatgctctgcagcttactgacttacaattaaggttgtagggctctcatgagccctgtaaagtactaaattaaaatcagaacaaggaatcactttaattttcatggtacagggg

SEQ ID NO: 55480 - DNA, 748 bp, Populus trichocarpa
  Intron number 1 from transcript POPTR_0003s19380.1 (locus POPTR_0003s19380) derived from phytozome v7.0 (chr-ID scaf fold_3; pos 18126241 to 18126988 reverse strand)
cagttgggtgtatccttgtatagggaaggtgacaggtctggttgagcagattccaattaagatgaagccgtcagaagcatattctgaaagcattagaagatggatttgagaattttctataccatttagaaatgtgtgctcaatactaacaggaaaatgattgaaatttcttgtagttgaaacatcgtagaatgcttgcatttgtctttgtttttgaaaaatcaaaacgatttgcttatcaatgttcttctagatttgtgtaatacttaggatgtgtttttgccatccggggtctgcagctatccaatcgcacaaggctatgacattaatggaaatatcctcctcttatacgtaaaatgctccatgataatcaactccagcaatcaatttttaaaatgaacatttgccctttttactggtacagaacatggcaagtcatgtttgtcaaatcgagaacacttgattcaactcaatggatttatcaaacacaatcagtgacatgatcctagtgcactcctagtgtatccatagttatcagactccacctgggaattgactaggaaaagagtctgaagtcaatcaatcaagtttcgcaggtttctcagatcaatctgtcaagaaccacgagcctatccagcaacaaattaattaggcgatcaccaaatacagcatttaatgttcactgccacccagtctattgattgtcggtgcgatgcttgtggtgatacttcaaaggccctgctctgaa

SEQ ID NO: 55481 - DNA, 216 bp, Populus trichocarpa
  Intron number 1 from transcript POPTR_0003s02220.1 (locus POPTR_0003s02220) derived from phytozome v7.0 (chr-ID scaf fold_3; pos 2327567 to 2327782)
tggccattttgtgttccaacttctggtgttgtgtttgttcataactttaatgctttttctattttgattcagaaaacaagaaaaatattaaaattagggtccgcgtgaattttcacctcggatttgttgttacctggatataattgattcttctttctctattggttgttgaattttgcagcggtgtcagcacttcaggtcattcagcagtctact

SEQ ID NO: 55482 - DNA, 873 bp, Populus trichocarpa
  Intron number 2 from transcript POPTR_0006s20600.1 (locus POPTR_0006s20600) derived from phytozome v7.0 (chr-ID scaf fold_6; pos 19630658 to 19631530 reverse strand)
agaagtgttgggagatcaactggtgttttcttaatggttttgctgaaattcagatgtcgttgctgtttgtactcgggtctcttaaaagttgccagcaaacaagattttgaaggtaggttctgcaggtatggttttgatccaagaactattgattttgaaatggtcaaaaccaaaggaaacatcgttttcgatgttttatttgatgtttctgttaacatgcctacatgtgttcatcacgatgttgatgagcgttttgagatatttttggcattttttgaaatatattaagctaccaaattcatggagacatcagacaagaatcatatgatagggtatttttgcctgattaagcacttgtttggaaacgtggtttgcaccgtgttttaaaaaaatttgattttttttttgtttaaaataattttgtttttatgttttcatattgttttgatgtgctgattttaaaaataatttttatatttttttaagttaaaagtattttgaaccatcactgtaattttaaatacataattccaaatagactcttaaaccttctcaaaaagtggttggacctattctgtcagttagtccttcaacaaaagttccagaaacctttcctgaactttactgaacatatatttacaatttacaaacttcaaattgagcgccaaggaattttctctctcccatttccttccattttttcgttggctgagatttacacacacacacatgtaggagctccaattgcaggttatgcaggaattattggttatgtaagcatgggttaccctttggagtagataaactgctcttatacagtttgggaggcaccataaaacaattatatagtcgcccaaaccaaaactcttcgtc

SEQ ID NO: 55483 - DNA, 400 bp, Populus trichocarpa
  Intron number 2 from transcript POPTR_0019s12340.2 (locus POPTR_0019s12340) derived from phytozome v7.0 (chr-ID scaf fold_19; pos 13387072 to 13387471 reverse strand)
gacaatcagactgttggattggaaaaaatattgaggtattgcacttgaatctcctgacaacttagcgcatacttttttgattgattttgtgatcagtagtcacctgtttctttcggttcatttacctggttttgctttctttgatatggttatccaatccagcgtgctgaaatacttgattatatcattatcaattgcaacattcctttcagggtaaagataaccttcttttcattagtggtagttgacatggcattgcctttacgctacttcagctgtcttgtgataaccaaggaataaaactaagtacatagtttatttctttagttttttgttttgcttaaagtaaacctgttatttgattattctcagtgttattaacttcattggagcattgaag

SEQ ID NO: 55484 - DNA, 628 bp, Populus trichocarpa; identical to SEQ ID NO: 54450
  Intron number 1 from transcript POPTR_0019s14090.2 (locus POPTR_0019s14090) derived from phytozome v7.0 (chr-ID scaf fold_19; pos 14849406 to 14850033 reverse strand)

SEQ ID NO: 55485 - DNA, 332 bp, Populus trichocarpa
  Intron number 1 from transcript POPTR_0014s08420.1 (locus POPTR_0014s08420) derived from phytozome v7.0 (chr-ID scaf fold_14; pos 6259634 to 6259965)
aaaatatagatctggctaattctcattttggtaagctgattctcattttgctcgcctgtaaaattttgattgcagcacaggtttagggtttaaggatgcttctgtttttaatcttcttcctcttcctcttcttctttttataaactttacattttattatttgatagttaaaacttaaaagtgctgtttaaggtggtttattttagtttttagacccaaatttatctatactacttttaatctcttcaagtaagtttgtctgattcctatctttttatttttctctgtgttttgcaggttgagagccttttgacaagttcttggttgcaaat

SEQ ID NO: 55486 - DNA, 874 bp, Populus trichocarpa
  Intron number 2 from transcript POPTR_0014s01020.1 (locus POPTR_0014s01020) derived from phytozome v7.0 (chr-ID scaf fold_14; pos 966551 to 967424 reverse strand)
ggaggtgacaggatgctatgctagaggttaggatcttcacttctagagactgattgctttgctctggactcttaagtttgcttggttatggcgtcgttgaaccatgtgctctttggtttcttttcttcagtagcttcaatgtctgcattttatttaatatctatggccacaaaacatatgttaataacatgccaagttgagaaaatggaaagactctgtcataagaagcctctggaggtttctcactggaatgatcgtgtcttgcatttggttaatgtttcgggataaaaagaacaaatacaaagagatagcaatgtattttattgaagaaataaagagagatataaaataaatctgtctccgtgatagtttaggagagaattttgtactttcaaaataaggagacatatcatccctattttcactgttacagtcttttctgtcctgagacattcccccctactaatggtaggcatattgatgattgcatacctatctttgaacacatgaaagtccattgtgtccccaacattgggaccatatacactaagtttgacgacatcaaaggatttgatcgtagtgccactaccactataccagatgacttgcagatgagctcaatgagtagaatttgagtctcttgaccttttgttttcttaatacagagtcatcttctggagcatgcattcgataagattttggaagctggagaaatccctcatccagtctcttgactgaaatgggatttcaagccacagctcaatagaattatgagaaggctgtcactcttttagcaccatggctcatgcctcatttcaaattagtggaaggcagtggacagatcttgagaaaaatggtgaaaaaatcagtcagg

SEQ ID NO: 55487 - DNA, 1049 bp, Populus trichocarpa
  Intron number 1 from transcript POPTR_0006s08770.1 (locus POPTR_0006s08770) derived from phytozome v7.0 (chr-ID scaf fold_6; pos 6455515 to 6456563 reverse strand)
actctgataacccagtccacgagatcaaacgcaaagtagagtaacaaaggactttcccttttggaattttccatgccattgttctgtttctgttaatttcattgatttctctgttagttaagttgtgtgtgtgtgtatatatatataaggtgtggacattgcgtcaatgttgcaattttgtttattgccaaacggattggtagcttaaatgaatgttgtctgttgctattcaactgattttgattgctgcaatattcctacgttggacaagtaagtgtatatatgtctaattgagtcgaggtgttaacacacacgtcttgttgactatgtcttgttgtcttgctcccagaagttgatgtttgggaagctaattgagtttgaaaattttgtgcgttgaaatattcgactgtcctttttttctttttgcactgcaaatttacaatttgcaatgttgattttatgagctcaaaagttcgacttcctttgtttgaagccatttgcattgtacctggatgcttgattttgatacatcatctgagttgatggatgtttcagggtctgatttcattttctggaaatagaatgccatcatgactttcctaactagggttttcgtcgcctcattctctttggggttgactgatctcttcccatatcgaattcaaatgcctgtaaaagaataagatactgctctgttcaaatgattttgaggatggatgagtggtgacctagtggttacggcctaacatccttctggatttcatgccagatggcttaaagtttaatagtcactgttgccgtgtggttaaatgcatgttaaaatacatatagaaacagaaagaatattttcaattagttgttttctttatttagacgtgtgaactgatcattgtaacatacaaatgcacttaaaacctgaaattgcaacatttcttgaaagcaggtgattttctatattagtgagaaactcgagccctggcttcccatatatgacacttcggtggatgtttgcagggaggagacttgagattttgccagaagtgttctca

SEQ ID NO: 55488 - DNA, 455 bp, Populus trichocarpa
  Intron number 1 from transcript POPTR_0013s14340.1 (locus POPTR_0013s14340) derived from phytozome v7.0 (chr-ID scaf fold_13; pos 14564278 to 14564732)
acagtgtctaagattcttgtcatctcctctgtcaggttatcatctgggctaccttttcttaactttttttcctatctgtttttgttttgttctctttgatcttgttgagttttgatctaagagatgtgtttctgaagagtttttgaccttagtatgtggttgttcccttaacaaggtatatctatggctggaaaagtaaaggaaagaaaagaaaaaggagcagaacattgcataattaacataaaagaagtaagctaggaaaaaagatggaatttatggatgaattaagctatggagtatgttacagattgaatatggtttttcttctcctttttatttcacatgcttcatggtttttttaacaataatttggagactttgcatacacaatgactctttgttcatgtgctcttcaatttgacttgctagcggtggaggtctactggcattttctg

SEQ ID NO: 55489 - DNA, 625 bp, Populus trichocarpa
  Intron number 2 from transcript POPTR_0006s27910.1 (locus POPTR_0006s27910) derived from phytozome v7.0 (chr-ID scaf fold_6; pos 25740433 to 25741057 reverse strand)
ctaatagctattgggtatgtaactctacatgtctctctgtttttgggctctttgttttgttttgtgtgttttaattttcatttacttgggtactatggtatgggctatgagttttttataacctttttgtatttggaagtaattagtgattgaaagtagttcaaaatgtatagtttcgtgtctgaatcttacatctttagctttcttgaataggtatttggatttgtgcaagcttttagttttataaaaatagttttctgctactcatgaggttatgatattaatactgagaaatttggttcgtgctggtgaaacttgtgcttgcttaatggcattttcattgtggcaattttcggacagtgaaaagaatctcatacaacatttattagcgaatacaaagacagagttgacctttaattttcaagtaacatctttgaatttttaccgaataaaaagggtagttttgttattttaccaaaaaatgattgtagaatggctttttggtgtggagatggcaaaaccctatttttattttggttggtaaaccgtggatggatgattggatgttctatttgatgagatggaagttctgttttgtagattgttaggcctcagccagggacaa

SEQ ID NO: 55490 - DNA, 582 bp, Populus trichocarpa
  Intron number 1 from transcript POPTR_0021s00920.1 (locus POPTR_0021s00920) derived from phytozome v7.0 (chr-ID scaf fold_21; pos 555803 to 556384)
tggacagtaatatcaaggatgtcattccacctgccgaatcttagattatctagtggcatgaaaacatctcagtggtgtaggacattttcttctgaaaccatagacaggataaagctgtgatagatggatgctacacatgatgtcaagagtcaaggaataaataggcctgggcgataatgttcgacattgctattatttagagtgttaagcagatccttaaatatcagttcagaggctgggcatgtattttctgctcttaatgtcctttaccttttgatttgggatcgttgtagtagaaatggatgtagactttggtaataatattttcttgcaaccttttggagtaaatcagttgaaagtagtatatcttagttatcaaatttccatcttaaatttgctagaagaggaaggccaaatctgtttcccaaagaaattttagggtcttcgcccacaagtttaagagaacagtttgtttagcccaaaactagtatagcttctgctgctataaaacctaaaaatctgctactttccgtttgtttctcgagaaaacagagaacagaaaataaaaacccttggagctct

SEQ ID NO: 55491 - DNA, 326 bp, Populus trichocarpa
  Intron number 2 from transcript POPTR_0003s17590.1 (locus POPTR_0003s17590) derived from phytozome v7.0 (chr-ID scaf fold_3; pos 16915453 to 16915778 reverse strand)
actggaattcaggtatatattttttgaccagcttcaacttattaatgtttttcaaaaccccatttgtagttttttgataaaattggaataaagaaagattcttctttgttttcttgataactcataatataagaagaccccctaagttttggtctggccttgaagcatagaactcaatgaagttttggtttagcataaaactttaaatggttcttcctgtatgaaaactacaactgctaattaatgtcgtgatatacattatatatgatatttgcatctggtcctgatattatatatggtatcaggcaacacagctgttacgcaag

SEQ ID NO: 55492 - DNA, 1012 bp, Populus trichocarpa
  Intron number 3 from transcript POPTR_0019s02260.1 (locus POPTR_0019s02260) derived from phytozome v7.0 (chr-ID scaf fold_19; pos 2105176 to 2106187 reverse strand)
tggaggtcagtttctggtttctgtttagctctcctacccttttgaaaagcatatttactccttatcaatgtttttgggtcaaaaagttgcgaagacaacttgtgaataatggaactcatttaagaaggggccgtttctttagagttttaaggaaaagtagctgcacttgaccattattattcataggttgcacattattggttgcaactctgatgaatgtattttagagtcagctttcacttcatgagctttccactccctctactatgttttagaagataaaatgattcgcaactttcgtaggtctattatggtacttttcaatcagcaatcttttgttataatctcaaacttcaaattagtgtgaagttttacttgttaaatgttcagaaatttgatctcatgtacttgaaaattggttacatcttgtaaggtcaaggtttgtaattgtaacattcaataactataaaatccatgaagtgctcaacttcagctatttatggctttcaacttaccattaattatctaaagatctgattgacacaccaaatgagttgttcatgtatattattatgttgtgggtaatcaaagaaccatctcaatctaaaaacttaagttttgagtttgtttgatctgatgagaggataatagttgttcatatataaacacatgttgtgaggtctcaaaatatgatttatattattctctaacatgccccgtcaaatgaaagctttttgggtttcaaacttgcacagatgtatcactgccttgtgtttaattttatcaagagattcgaattcataattgtttggtcatcaaggctctaatatcatgtcggcatgcaaagatatctcttgttgtgatgatattctttatattcccattgtattctctattgtaaaagaacacttttttaaatagaaagacagttgaagggattttggagaatgtgcatttctgagcagaccctgattatattgagcttctaacactcaggtggactatcgaggtt

SEQ ID NO: 55493 - DNA, 527 bp, Populus trichocarpa
  Intron number 1 from transcript POPTR_0019s02260.1 (locus POPTR_0019s02260) derived from phytozome v7.0 (chr-ID scaf fold_19; pos 2106458 to 2106984 reverse strand)
aactgggctgtcttggtttgcacttctcgtttctggtaattaagtttcagcttcatttcttttcaaagttttaatccttttgatttatttgtgctgttgttggaatagtttaatcatacccaggttagaatttaggttgtttttagtataggtaacatgtttatgtgctatgtgatacacccatgttagaattttatatgctctaagtactaggaattacttactttgtagttatgttatgatacccatgttagaattttgtgttttttgatgtaaaaagattgcatttttatgtgatatatatggtgtcaatgattggttttgagcttgtgatctaattaggtatatactgataaagaaaatgatagagaactgagtcatttatatataaagtaagagttagttaattttttcttttccagtgaaaggctgttcctttctatggtttttgatttttcgtagtttagaggtatcggtggaattgattattttttatccttccttctttcaggtttaattatcggcac

SEQ ID NO: 55494 - DNA, 561 bp, Populus trichocarpa
  Intron number 1 from transcript POPTR_0018s07690.1 (locus POPTR_0018s07690) derived from phytozome v7.0 (chr-ID scaf fold_18; pos 8385327 to 8385887)
gagtgatcggtaagtcctcactgaaggaagtcagtagcaaaccatgagagtcagtcattttctagggaatgtatttctctgaaggaagtcaagtatctatctagtactacgtgatccagtcaactgattttctcactctttctagggtccgacaaccctatgaaatgtgttttctaagcacttcatgttctggtgaaatatctgagcttcatccgagacttccaatacgggtgaaccagccaaattggaataaagaaaatgaataggaatagaaaggtgtactatcgatcaatgcccgagcccagctaacatacctaatgggattatagaaataggctataagagatggaaaaatgttgtggtagggtatttccttgaccgagcactccctttgaatcttgtgaaagaatgggcttctaagacttgggagcaagctcttgaagatgtcatgctccttgataatggcttctatgtttttaaattgaggagtgaaaaaaattgcaatgttgtccaaggcgtaggaccataccatatagctgggaagcttttgattattaagaa

SEQ ID NO: 55495 - DNA, 739 bp, Populus trichocarpa
  Intron number 1 from transcript POPTR_0013s05340.1 (locus POPTR_0013s05340) derived from phytozome v7.0 (chr-ID scaf fold_13; pos 3822311 to 3823049 reverse strand)
cctaggtaatttaatgttgtttatgtttttctgtgaaattaatgtttgtttgtggtccattaattattttaattcatgggatcattttttctttcaatatttgtttcttcttcttgtcatcaattcttacgttgtgtgagtaatttgtgttatgattttaaatcaaggtaatcatctttaatttcatcgagtttaatggatcagaatagttttctgtgttgggagtttttttcttcttgtgttttggtgattttgcattcaaaataaaagattaattttgttttaatgtatatttctgcatgattgtattagacaaaaagaaaagaaaagaaaagatagttgctgtttccatgaggtaaacaatgtataggctgtgtaattatgcattctgtgtggaattcaaaaatcttgattaattgaggagttgacatgcatgcttttcagaaaggagttgaagtatatgaaatcagaagttaatcggccaataaaagaagcagaatctcattttaaaaaatgtattggtagataattaaaccgtggatggtaaatctctagattagagaaccatgccattctggttgtgcaaagtttttttgtgatggtattccattcataattttggtagagagcaactggatcttacttttctatatttaatatttctggagggtgctctatttttgaaattgattagactgttctatatcctgttgcagtgacacctcagttggagtggaac

SEQ ID NO: 55496 - DNA, 987 bp, Populus trichocarpa
  Intron number 2 from transcript POPTR_0003s14890.1 (locus POPTR_0003s14890) derived from phytozome v7.0 (chr-ID scaf fold_3; pos 14838745 to 14839731 reverse strand)
caagaaattcgattcgccgacgcttcgagccgtcggtattttttatgctctttttttcttttgtttttaattattttttatcgattgtaaattgatatggagttatggtgaactgttgaaagtttaattcagaaaataatttatgtgacgggaagttgcgctgagccagctaagtgtctgtccgggttttatctgacctgcgccagaaggtgtgcgccagagtttctcaccataaaaaaaaaaatttcatgcatgcggtgcattttttgcatttcagtcgtgtgtgtgaaacatctgtgctgagaatttgattctaactcgccacgcatgtattgtatgcatggctggaatgcgatgctcatgacatgtgtgactattgctagtgttactctgaggtctttcttgttaagttgtcttatttatttgtttgtttgtttgtttggtgtacaggattcatttttattagggtttgtactctgtctgacttgttctcaatggcgattgacgttagaactggagtaaaatgttgtgagattaatttggtggctgcattgttagagcttgagatgcttaatgttatgtggccctaacttgcattctagtgtcatttatgacctctgctacatcctccaaacccaattagtagttgagaatccactgaatcttctagccctttaaggatcacattgcagtgctcgtctctataagcttgtgaacacgaacactcttgatcaagtaactgtgtggctcaagtccttaaactgcaattgcgaatcactcttgatcatttgcttagaatccttctttggcagctccaacactaaaaaaatgcccttacatgccgaatataataacagaatgtctgcatcatttccctggctgaatgcaccttccttgtaacttgaatcaattctgtgaagttttcaacttttatagtggctaagaaagtcttgtgttttctctgagccatatgcagggctctttttg

SEQ ID NO: 55497 - DNA, 972 bp, Populus trichocarpa
  Intron number 1 from transcript POPTR_0006s11820.1 (locus POPTR_0006s11820) derived from phytozome v7.0 (chr-ID scaf fold_6; pos 9016751 to 9017722)
cttcctttgtggtactacctagcattattgctttggtgagtgtatgcttgcttgttcttttgtgctgtagtttgacaagatggcttggtgattctttgtgtaatttcggattttgggttctttacatttcttcattttgatgatttttaagcttgagatctcaggcggattttgggttctttacatttcttcattttgatgatttttaagcttgagatctcaggctgttttcctccgcgccccccccccccctctcttttattataggaagtcatgtggtttgtaaattgaaaattacaattaaaacagttactgtgatttaatgaaagtatgtgatatggtcggtggaagagattttgacttcaattatacaacttttgtgtttggttgctgaaatgtgaaagaaactcaatcttttaaattctaaaaatgaaaataatttttatgatttattgaaagtaattgctcaactattttgactaaaccaagtaagtaattagttttctaatgatggattttgttttctattttggagaccctgatcaattaatagactcaagattcaaaattttgctgtacttcctctcttatggttactgttatattcttttcctttctgttattttgaagatatggcaattccaatattttatgtggtgtactagagttaatcgtctgcctgtttgaagtctgagtttaggtgggacatgctgccgattttaatgtttgatttctagtgatgctgaactctcttatagctcagttttaagtcatcttgtactttaaggtttggtctttctactagtttcttgagaaacaaaactttgtcatatcgttgagttcttgcagattttagtagtcgaatcagtctcgggtttatgtgcttctacctgttatacggggatcagtagaccccctgaagtttgtttttgagattttgtctgtaacatatgttatttgatgggacaggcg

SEQ ID NO: 55498 - DNA, 842 bp, Populus trichocarpa
  Intron number 1 from transcript POPTR_0006s08310.1 (locus POPTR_0006s08310) derived from phytozome v7.0 (chr-ID scaf fold_6; pos 6042426 to 6043267)
gtctttgtcaccgtaagtttaatttctgtattctacaatttagtttaattgcaaactatgtttttattgacaaagatgcttattacctatttcgttccctgctacttcttttctcttcaacatttcaaagtaatattgtaacttaaattgttgctagtcatttggtgtgtatccatgtgggggacttttgagatggcatgcatcgaatagtgttgagtttgtcttctaacaacgtttcttttaagcaccaactgcaatagtccactagttggtatgtaaatgactagctcgtactactggtttaagtcaacccatctttgaatgcatattttgtttgaatttttgttatgcaatgaatgttgttctcatcttgtataactgctctctctgcaacagtcttccactattgtagcttcatcttttttcctatattattctagcagatcataatctctaggttgtagcacactctccattaatctcacatgctcacatatctccatgctgttgtcactttaatttttaacgtgaatccaagcattgtctaaaaactctagaatctatttgatgctattagtgcgctataaaatacatagctgtgtggcaggtaatgtaccactggatttgtctttgcacttatactcttgctctagagtgttattgggctcgtctaaaatataaaaatgcttaggataaggaccaagcacgccagaagcggaatactgtgatatactttgatttctttgctttgttttcttacctggatagatatttgttactctctttcttttgcattcttgcttgaaatttttaatttgggaactttgtatttgaaggctgga

SEQ ID NO: 55499 - DNA, 819 bp, Populus trichocarpa
  Intron number 1 from transcript POPTR_0006s24380.1 (locus POPTR_0006s24380) derived from phytozome v7.0 (chr-ID scaf fold_6; pos 23002256 to 23003074 reverse strand)
tccaacctaagtcttggttctaatcgccgtggctggtaatttgcaatttttttgctgttgcttcttctgtttttgagaaaaatgtcaagaaaaagcttgagttttggtgcgatttattttattagatgaataaaaacaattactgtcatttgatttagattacttatcttgtgagttgtgatcataaaatattcgtgatttaggttagagagataaagcattagcagtagccagtagctctggctcagaagtagagtacgtgtcaacttttggattgacaccttcaaagccgtagctgttttcactgttcacaaaagctctcactcttaaccagaaatccatatctctctctcaacatagcattttgaagttagcttttaaggatggtgatattaggtgtgattttgtattgagcatttcactttaagcaacccccttgctaggaatttccttaacgaaggcttattactaaatggtcaatttaaaccttgcaagagaggaaaactttacatttagagagtactatttttggttctgtgcatcctagtccttcaactggaggataagaatctccatcattataggaaaaaaattgcctcttattttctgcattaaactatgcttgtagaaggtggaagaatatttggtttggtctattggaataacatcacagttttgatttttcatttcatattaatgcttaaagaacaggtgagattaattagagtaatcccttattacaaggcatttcttcttcttagacaagccataattcttcatgcttgtcaataatttattttctgctgttcgtaggagatc

SEQ ID NO: 55500 - DNA, 659 bp, Populus trichocarpa
  Intron number 3 from transcript POPTR_0013s05850.1 (locus POPTR_0013s05850) derived from phytozome v7.0 (chr-ID scaf fold_13; pos 4210599 to 4211257 reverse strand)
acaaggcagtgactgaatacaaggaggctaaggcagtaagtgctctggttctaccttttatttgtcgagatttttctacataatactacctcgtatattaataaatttgatatatagctcgtagattaatgaatttgatatctaataatcatgatacatcaattgtggagtgaaggcatggctgcatgcacatagttcttgctccgcttttaatcttagtgggtgttcgggagtctggaagtggttgtttttcatagtgtttttggttagaaatgcatcaaaataatgttttttttaaatcattttttatatcaacacatcaaaacgatccaaatacataaaaaaattaattttaagaaaagaattcaaatttttaggaaatgcggtttcaatcgtgcttagaatcttagctcaaaacatctttgaaatgttgatagattcaattcaatatcttttcggtaggtcttttttaaggtcaaggaactgttagaatagtctgaaactggtatggatgttggagattctatactcatcatgatattatgcgtgctttttagtatgaattttttgagtgcgcctgccaaattctttataaactgattgttttttttgtctgtcacccagcttggagtagacacaataccggtccttattggccc

SEQ ID NO: 55501 - DNA, 702 bp, Populus trichocarpa
  Intron number 1 from transcript POPTR_0013s05850.1 (locus POPTR_0013s05850) derived from phytozome v7.0 (chr-ID scaf fold_13; pos 4211804 to 4212505 reverse strand)
gaaccagtctccctacccttgctgttgtatctccgtaaggtgtgctgatgtctgctcttccttttatctctcttcttccttcatttctcatgcatacaccaactaccccttttggtttcgctcttcttgggtttctttttctcattacgttgttctctttttcattaaaaagatctggtcagtgtactctgcttctactgattttgctctgtactatcatgtttgttgcagtgtctgatttcatcgtttttttttcgttctgttgatctgattctaactgagtcttttacttgttgcattggatctgatgagtagtagttagttagtggtgtttaagaagtaaagttaaaatgaatgtatgctctgcttattgtctacagagcaaatgataaaaaaacagacaagaaggttatacagttccaatctttgaggaaacctcacacacaattacagttaattgcatttgggtttctttgttgatgtgttctcttcatatgctgtgttaagtgttagatctgtcgtcttgcaagaaataggtgaaataagttcaaatcaaaactgctcatttgtgtaatggatctgattagtttttgctcctttattgttatttcagagcttaatctttatagatccgtttaagatttattgtttggatcaagaaaaactgaatcttgatttttgtgtggcataagaaacagaaaa

SEQ ID NO: 55502 - DNA, 702 bp, Populus trichocarpa
  Intron number 1 from transcript POPTR_0003s02840.1 (locus POPTR_0003s02840) derived from phytozome v7.0 (chr-ID scaf fold_3; pos 2950862 to 2951563)
ttgacaggtattttgttaaaaaaacccatcattgcaaagcttcgattttttatttttttaaatttttcggggtttatttttgaattttatgaagtgggttatcgctgaatatcgggttttgttgatgaaagatttgtaaaacttagtgtcatttattatctgggtccttttgttattgtgttctaatcatgactgtattagtcttatgatatttgtgtagagagaaacaaagaatatctaagatagctataaattgattaaagcaatcaagtaatttttttttctaagttatgagaatcttgaaactctttttaataattgattattttctgggttacattggtaataagtgattagggtttgtagtggaaaggtgccagaaaactggctgtaggattgttgaaaaatttgaggttcaaactagaagaagcttatagaaattttggatttttaaacaaaagaaaatgcaagagagggacccacttagcaaacttcaagtagcttgagatcgagacttagcaaacattcaattcatttggggttccaggttttgaatgttattatggttacaatgtgcactctgttttcctgtgtcttttaattcatctgtagaatgtctcaagttcagtgcaaaatctgagctgtaccttttctgctatcattttcatttgtttttcaatgcattggctcagtgagtgtaaa

SEQ ID NO: 55503 - DNA, 805 bp, Populus trichocarpa
  Intron number 1 from transcript POPTR_0018s00950.1 (locus POPTR_0018s00950) derived from phytozome v7.0 (chr-ID scaf fold_18; pos 866357 to 867161)
ctcataagcatttcaattatccataccagtttcaggtaaatggaactctctttttcatgctcgcttctctcttctttttcaaaaaaagataagaagaacttctcgggcatcggattatatctggagggcatgatctttcaccacatgaaatatgtttattctttccactcagatgttaatcttagttttcaacatgattctacatttcaacgtctctctgttcatgctgtcagattttttttaagataaaaagaacttctcgggcatcgggatatatctggaaggcatgatcttttaccacagttacctttcttgtatatgaaatatgtttattctttccactcagatatgaatcttagttttcaacatgattctacatttcaacatctctgttcatgctgtcagatttttttttctttctcattattgtcgttgacaaaaacagttgctcagtaagagaacatgaggtaacctaaacctgacatgaaagtaccttcagaaagtgatatatagcacctgaaaaacagaacatgaaaaaaaagtggtggcccagttggagaaacaggaggaggcttcactcctttcgaaagtagaaacccttaatttctttgccatattgtcaacttcgcatcagcatattgatgcaccggggagaaattcgagccagcagtacgtactatgccatagctgccatagctttggactatttcaagggtttggtgatatattgttgactttatgattttgattcaatcacctttcaaacaggcctgtggttccctttggttcaggtaaatcaagaagg

SEQ ID NO: 55504 - DNA, 1036 bp, Populus trichocarpa
  Intron number 1 from transcript POPTR_0006s19400.1 (locus POPTR_0006s19400) derived from phytozome v7.0 (chr-ID scaf fold_6; pos 18458252 to 18459287)
cctggtgctgccgttgctcagtttaagggtagctggtgagtgcttttgcgaccttttttaatagcacttctgagatggatttgaatttggttttcctttgacataaaactgttgatattcatagtgtttttctcttgttgcttgtttcaattataatcgtggacgattagttggataattactcttcgaatgttattgtaagaaatgaaataggttgtgattatttttgtgttctaaactttcatcagttttgtaggatgcctatactgaaattgggagaattttttttaggattaggattatgattttaaaggtatgaagaaaatgccttgttatagtcatgcttatctagacttgatgatatatatgacttataatgttggatgagtacgactgactcttacttgaataaattgaaagttcaaagaatagaagtcaaaagagaagttaatagtagtatggtatttcactgattgatgaaaatttgatctgaataaaatcttctgagtcgagtaaaagctatcaaattgctgagtgaacctagtagacattatggcttattgctttggtgcagtcaatgcaaatgcactggacacttgtatatatgtgttcctgcaagcactgtaaaaacacgattgaaaacaaacttttgagggactgcatgcgatgattagcttccaatttggccaggattaaattgcttgtggtttattaatgcagtttggtagcgtgtgaaacttctagaatgggcttcatgtgtattaaaagttctatttagttgtttaagcatctattgtaattcagaagggattttttagttgcatgcaaatggttggcataaatgtacgcataactttagttctgtgtattagcaatacatctacattcaaatggttggttgaccttgttctttttagttacaattaagcaacatagcaaatttcccatatcgttatggccggcaagaagtgtactgatttgctgtcaagcttatgctgtagggatcgtggcacaacttctgggatcattcactcca

SEQ ID NO: 55505 - DNA, 562 bp, Populus trichocarpa
  Intron number 3 from transcript POPTR_0003s04580.1 (locus POPTR_0003s04580) derived from phytozome v7.0 (chr-ID scaf fold_3; pos 5378676 to 5379237 reverse strand)
gcatctctccattcctctaacctcaaggcagcaatgttgagtgtcatcatgactaatttatttgctgtttttgcgtattgattaggttgtagatgtttgtttttacgagtttttatattgtcatcatttggagaggaacctcttctattctttgttagcattacaacttttatatatatatatatatatataattttatttataacaatgcttaattgttactaagaatcaagacaggaaatcaattttgaaaaattaaattaagatttctgtcaaaatcaaatatattaattcctatccttagagatcatggacaattcaagtaacgtgaaattaaaattaaaagaattattatcagctacatattattaatagtgatcattttattttactttattttttatgaaattgaccctcttgatttttatatgaatttccaattctactgcatgcaagtaacgattcaaatgcataatgtctgaatttatagatttcctttaatttttattttttaatccaccgatgaagtccatattttttaggtttactttctttttttctt

SEQ ID NO: 55506 - DNA, 860 bp, Populus trichocarpa
  Intron number 1 from transcript POPTR_0018s10270.1 (locus POPTR_0018s10270) derived from phytozome v7.0 (chr-ID scaf fold_18; pos 11225569 to 11226428)
gggacaaagaaaagtgtactctcatttatcaaactcccggttgttttcatgataccataggcagccgaccatgataggcatcaaggaaaaagcccatatattcagtccatttgacctctaaattaatctatgacttggcccacgtgacccaggcccaagccttgtcattctagcccaattgaaccatgcaaattaatttgagtaaattaatattcgtaaaacaaaatacaaattactcggcccttctataagcgagagacttactgatattccaaacccatttttcagtgcatttaaagctaaaaatactcaataatcaattctagaagttgtagaaacaaatttggcagcccaaaaaacttaaaaaacaactcaaatcataaaataaaataaaataaattttcttttcctcaacttatatctgttttttttaaaaaattaaagcttaaaacaataacgataaaactctccacaccgccgatataacatattaaaaccaattgagcttttcttaattaattgaacccacaaggcaagttccttgcttgattaactttgactcccaattgattcaattatgagtatagtgtgaacgtgaatcatttgcaggatcttcttcctcacagtcatcacatatagtctcaaggatcttgttttttgttacacccattgctaacctagatcactcggcatggaacaccacgcttcttgttgacatggtgagatcttacattactttcaccattaattaattcatcccagcatccatatatactggtaatatagccaggccttttcacaagaccaacacacgccaaacttcctggctttagtagaaaataatatattcattagcagca

SEQ ID NO: 55507 - DNA, 867 bp, Populus trichocarpa
  Intron number 1 from transcript POPTR_0006s27930.1 (locus POPTR_0006s27930) derived from phytozome v7.0 (chr-ID scaf fold_6; pos 25779151 to 25780017 reverse strand)
cctgatctctcaaccctccttcactccctctctcagtagctctcaaaccccactttttttttctctctttaatttttactcaatttgatgcttttatagattttttggagtgcagaatgtttgaatggtaaaaaaaaataatgggttttttgagtaggcaagtaggcaaggagttttagctgattctgtactgattttaatgtaggagaagaaagaaaagaaatggctttaatgggcaatttttttgtatttttgtaatagagagtgtgaagattttaagtaagcattagtagtgaagaatttgtctgcttttatgttgtttagtttggaaatatttgtgtttggattcatggattttatcaagattgagtttttagaaaacctatttagagttttagcttaagtgaggaagtaaacagtttcacagagcctgtacctgtttaacatttatcaaaaaggaataacctgtttaacattatcaaaaaggaataacctttaagacaagtcgagggtagaaatttgtaatcaaatgttgttttatgttcaattaatgaaacttcaatgacactgtaacagccctttgtaaaaagaaaaagggacttgaaacaattatgtgtgtgagatactctaaatatgatcctaaaattgattggttgaaagtgaagattttgaataagaatgtggaaacaaaaatgggacctgaaaacattagaaatgctaaatttgaaggatgaaggaatgagggatgtgcttttctttttttcaagttttttaatagtttggttatttattcattattgatttgaaaattaactttattgttgttattcagaccagaggatagtccagcacgttaccaagaggaat

SEQ ID NO: 55508 - DNA, 762 bp, Populus trichocarpa
  Intron number 1 from transcript POPTR_0018s00660.1 (locus POPTR_0018s00660) derived from phytozome v7.0 (chr-ID scaf fold_18; pos 576212 to 576973)
tgttttcttggcttcgcttgcctatcttgttgcaggtatgcattttttttttaattcgttttgtagatttggtttccgtttttaggtgagtgagggtgttattaattgtgggtttcaatggtatttggttaatttatggtgatttgtttctagttatagaatataatgcaactgtacttcaataaatgatttagatatcagtttaaaatttggtttagctttcagtgtatcaactaatgataatggcttattgtaatcgtgcattttgatgcttaaagttactgtttaacaaaatgtatcaagtgtcaaaaaggaaataatgagagcatggccaattgcgtaatgtgataatacagaatgcttttcagtctaattaaaagattgataccagagtaaacaagatctccatttcttgtctgttgtagttattaatctctggcgttgtgttatgtgtttagacttgagaggtacagtggattaagtgtaatcttggtcagtcctggacaaagtaactaactaacatgaagtgtggaatatcaattttttttatggactgatattgatacagagatgggcctgggataacttcttgatcataaaaaatactcctatagttagtgacttgggtgtccctcgattgagaattaatttgttgtgttccttttgtttttggtgttaagggtggaatatttgaggttgggttagttggtttcttgtgttctctgatatccagaatctcatggttttatgcatggtgcaggg

SEQ ID NO: 55509 - DNA, 517 bp, Populus trichocarpa
  Intron number 2 from transcript POPTR_0013s04830.1 (locus POPTR_0013s04830) derived from phytozome v7.0 (chr-ID scaf fold_13; pos 3362023 to 3362539)
cgtaaagagaagcaagttcaagttcgcaaaaagatgtaattctctccatccttttattgttttcggattaacattttgtgatttgtgttcttaattatgctgttcattgattggtggtgttgtgttgatttagtttatatttcagttttaagtgatgggtttgttctagatcttgatattgcaatttatgctgttaaatttggttgcttgtagttattatcttgtgcacagtgaagtgaagtgatgctgatcataaactttgttagtgttgatattgattttatcttgttttttaatcatttcttttaattaatcgatattataaaagtttggttcggtttgaaactgtgtaggagatattactagtttggttttattgaatggagatcaggattggactcaaaataatttccatcaatttgttttggtacagaatggattattttattcttttctcatcagaagtcatatgaagtgacattttgttgtgttggttgttttgtgtagtgagtattca

SEQ ID NO: 55510 - DNA, 618 bp, Populus trichocarpa
  Intron number 3 from transcript POPTR_0013s04830.1 (locus POPTR_0013s04830) derived from phytozome v7.0 (chr-ID scaf fold_13; pos 3362652 to 3363269)
actacaagaatcttctcaaagaccttattgttcaggtcattattaaataaccagcttgcctatttactggtccctttattatatgtgtgtgtgtgtgtgtgtatgtatattttcatactcatcagtttccgtaaaattgatgaaaattgtagaattgttgtgccatgtatagtttatgaagcttcaggtgatgggtttttttctcttgtttgcctttgtatcaatgtaaatttttgatacatggcataatgtctgcatgttagtggttagatacatgcacataatttttcctactgagaaaattgattttaatgataaagtgaagtgaattttaatctacagacaccccgatgatggcttgagcttttagggacttgtgtgatgaaagtttttaccttactgatatatattagaggatggttggttgtttgtaaaaatttagatgttgaaatgaaaaattgtttttattaggaatgctcagaaatggtcattttgattcattatgtaataggaatgtggtgttatatatttgaataatgtatttttctcataatctggattttttttcttcaattgtctgcagagtttgctcagattgaaggagcctgctgtcttgct

SEQ ID NO: 55511 - DNA, 615 bp, Populus trichocarpa
  Intron number 1 from transcript POPTR_0003s15320.1 (locus POPTR_0003s15320) derived from phytozome v7.0 (chr-ID scaf fold_3; pos 15139624 to 15140238)
tggccaccggaactagcaactgtaagttttacttgtactcttctaatttttatccagaaaaaaaagagcctgtaaatatcgtttgtcgttttttcactgtagtgtaccagccaaccgatctgaagtttgcgtttatgctgcaaaattaagtttaaatcacaattaaaattaacccattcaaatcaatcttgttctttaggctttggatcaagaaggatctggtgttcgagaagttttttctttctaaaatgctgcctttatgattgtgaactttctatatttttaactcctaatattataggtaatattttgtggagaagatctagaagaaaggatccattttgagcttgagtttacagctcatttttcatttattacgtgctatttcttttaatttgtttagatttttcatattttccttagccaacaaaattaatttatgtgtctataaatattcttctgcttgcatgtgtatagaaaattagatagattgatgtgcttatcacagatgttttggttgaatgaaagccttctgacatgtttcagtgagcaaacctaagtgcgtcttttgaaggttttgcccttttaaatctcatctgcagacgtctaccgcta

SEQ ID NO: 55512 - DNA, 591 bp, Populus trichocarpa
  Intron number 1 from transcript POPTR_0019s10570.1 (locus POPTR_0019s10570) derived from phytozome v7.0 (chr-ID scaf fold_19; pos 12111782 to 12112372)
tttcttcttgtcaatttctctgcatcttctttcaggtacctccattttgtttttcattttctttcttgatttacttgtattgacttgatacatgcgatacccactctttggaatttcaggattgctatgattctttagtttttagtttctgtttcttgttgaattttcgataatctatctgtttggtttctgggaaaactaaagaaggaaaacagacagatgctaaataatgaattttagttggggttagttcattcttttcccactttcaagaaagttagagacttttggatctaagctctaatgggtagctaacaaaatcaatttcttaggaataatatttgttcaatggtttcaagacccgaattttcttcttgtatttatcaatttgtgacctgaaatttaattgcgtaagatgtaattctcatgattctgtttgtgtagtttttgctgtcttaaagcatgattttgagttttgtgttgtatttagtcaggacaggcaacatttatttcactaattaaagttgggtttcaaaattttcttgtctgtttcaaggtttagcgagtgacccggcgaatcctaaagataca

SEQ ID NO: 55513 - DNA, 720 bp, Populus trichocarpa
  Intron number 1 from transcript POPTR_0013s12800.1 (locus POPTR_0013s12800) derived from phytozome v7.0 (chr-ID scaf fold_13; pos 13460932 to 13461651)
aactgcagcttgtactctattctaattattggcaggtactgcttcataaccacttattttcactgcatggtccctagttttctttttctgacaggtgccgtcttttcctttgtaagggtagtcattttcggttgtgattccaccaatctttttgatgtattgaaatgttatcttcatgtctccgccttcacagccctgggtatcactgctaacgtcacattccatgagctcttgttctgacagagatactaattttcctgtcttgattttgttgatgccttccacagctgccactgcagagaaagcccaacaacttcctgtgttggaaagaaactagcatcagctgttcttattgaaaatgatttgagataagaactgacaattagcaattaaatgaacttgaatgagaaaaactcataccacattgaccttgatccttgataggagtcacagcacctttcttcctccaatctactgcagctggcaactctgtgctattttcgcaccccgcaccgttgtttatctttttagctgtatgtctattactctgaaaacccaggtaggtaaatttgaactcttcatttgttaggtctgcaaatttgttgtcagtgagcctgaaggataagttttgagaattgatgtagtcaatgaactgaacattagattggtatattccaaaacacagtgaccattcgtctcatattctctgccatatcgggc

SEQ ID NO: 55514 - DNA, 455 bp, Populus trichocarpa
  Intron number 2 from transcript POPTR_0013s01060.1 (locus POPTR_0013s01060) derived from phytozome v7.0 (chr-ID scaf fold_13; pos 584268 to 584722 reverse strand)
agttggaatcggtgggctctcacttcctattctaggcatgtattcattctgtttcatggttaccatgttgtgttatgttcaatatcgcaaaaagccactcgaagattttctgattttttacgctttacacttcatttatggcataaactgtttatttcaactgtgctggaaattcatttctacccacaaaagcaaataactgatctctgtggtgtataaaatagtttaacaggtagccatatttatgagttgaactatcaaataattatacaacacaaagtggcttttgatttgcgattaaaaaggtgaccctccaagaaaatttatcaaaatttatgacctatcactgctggacatctcctcggcacataagatccaactgtttgctagatgcctcttcttaattcctttgcgccagttattcatggagcactgcctgctcctttttgcaggaa

SEQ ID NO: 55515 - DNA, 586 bp, Populus trichocarpa
  Intron number 1 from transcript POPTR_0003s08220.1 (locus POPTR_0003s08220) derived from phytozome v7.0 (chr-ID scaf fold_3; pos 9633412 to 9633997 reverse strand)
gcaataaaaaggcttgtggatctaaatttggtgaggtcagattgaaaactggggtcctttatcttgttttgattttcatttttttttgctggaattttaattgttattttgaattatttggttgaaatagtggattatttggattgacaagaatgaattttatttcttcaatggaattagatctcgaatatatataatttaaatgatgctgtgatcatgccctttcaaatcttggatcgatcattgacttaattcaatgcgaatttgagagatattggatctgtttatccagaaattatataagttgttcattgtaaacgggcttaatttttacatgttcaatatcaaaactacgaccaataagaacaatgaaagggctacatttaaagaggatctccacgttagttggattttaaccattaggagcctgttttctttatgcgattttcgctttctttgaactattgatttttgagtctttggttgtgttttttttaatgatatactaaagttacaattatgacgacaataatctcgttactttgacttgcttcatttctccagtgttggctgaagaagcaaaagg

SEQ ID NO: 55516 - DNA, 513 bp, Populus trichocarpa
  Intron number 3 from transcript POPTR_0003s19690.1 (locus POPTR_0003s19690) derived from phytozome v7.0 (chr-ID scaf fold_3; pos 18363076 to 18363588)
gatcttctgctgtcctgttggtcatttacattcaggtaaaccaggctttgtattatttcccaattttccaatggaaatgagagtaacacttcacttcttataccacagctgttaaaccccgccggcatgactaaacagtttgattcaaaacatgactcgagccaagtttaaaaaataaaaagagttaatttaatatgatatcctaatcaactcaacaggtcaatatacaacccagtcaaaactcaagttaattattttttaaaaaaaacatggttttaacttaagaattgaaaacatttttattttaattgacttagttaacctaactaacctatgatccaatacttgagtcgagtcatgggtcaagccgagtttcattattatccattcattctatgaatagaagatcagacttttgaacttgatgctcaatgcattaatgttccaaaattatgtggcattgatgaacgtggaatgcaatattgaaattgtgattatgtgatgaacaggaca

SEQ ID NO: 55517 - DNA, 327 bp, Populus trichocarpa
  Intron number 1 from transcript POPTR_1727s00200.1 (locus POPTR_1727s00200) derived from phytozome v7.0 (chr-ID scaf fold_1727; pos 1512 to 1838 reverse strand)
aataaaaattaaattacttactgtaagtaatttaggcattgtttttctttctagattttgagttttatgctctggctattgtgggattgctgttgatttagtgtttgatttagttatgctaacaaatcttgagttactttcatttttcataatcttttagcaagaaatgaaatttcttgattcttgtgctcttatttttgggttctgggttttaaagcacttacctttttgttgcatttttctttgcttatttaagattttgttttgttggtatttgcagcgactgaattttggtttgttttgaaacagggactctttgtggtgatt

SEQ ID NO: 55518 - DNA, 484 bp, Populus trichocarpa
  Intron number 1 from transcript POPTR_0006s28340.1 (locus POPTR_0006s28340) derived from phytozome v7.0 (chr-ID scaf fold_6; pos 26049537 to 26050020)
gcatcttgtgtctcttctttctctcaggttctctctcttctttctctccagttttatttaaaaaaaaaaatttgttgttgtttctattttttatcatgtaaatattatcttgctctttttttcttagatttaattattgatcaatgcaatttttggaatgtaatttgcgaggattttgagtctttttttgtttttaagatttaatgtcattgattaattaagtagatgtttttttcttaagtttccattttttaatatgtaattcatgaggactattttagattttattgaattaataaatgtaattgtaaatgaaattatatttttaaaaaattatatttttgaaaatgtaatttgcgagtttaatctatgagattgtagtgtaaggttaacaaatgtaatttagggtttaattttgcttgagttttaagatttgtaatctttgttatttggttgctgtgcaggttaagttactgaattggaa

SEQ ID NO: 55519 - DNA, 866 bp, Populus trichocarpa
  Intron number 2 from transcript POPTR_0014s12150.1 (locus POPTR_0014s12150) derived from phytozome v7.0 (chr-ID scaf fold_14; pos 8985619 to 8986484 reverse strand)
gaagaaggaagcagtttaagtctgtaagttccttccttcacctgccttctaaaattatttccaatttattgctagcttagcccattatcccccatacttcttcatagttttatttggaagctatacctaaagccttgcgattgtaaaggaaatgaaaagaagatacgcagttaattcttcggattttgatacctaggaggcaaacgaaatgatcgggatctttcattttgatagcagtggtaaaatgaaagcttaagtagttctatagtttactctgaatctgaaacataaaatatggttagttttttaatctacttttcttatgagtcattcgcccttgaaagtgtgtgagatcggtgagcccatcctatcaagtcagtagaagattcaaatgcagcttctttgtttagctgctgctaattttggtgagttcgagttcattattgttccaatggccaatttttagaataaaatctttgatgaaaatattccatttcagtgtagccatattttgtccagacaaggtcagttgttaagcatcctcctttccatattccagttaggcgttatgaaaaatcgcttaagagccaatcagagcatctttatccaataattactgcagtgctagaaataccatcattttcatatattagagttccaaattctccctatcaagctccaagtgaacatgtgaaattcatgttgtttataaaaccaaaggcaatcctaatgcaactgcccatcagtctgtggttagcatattacaatagtgctacaactctgttgtcttattaccaaaatttgctttgcaaacaatattttcatgattataatatctgtgccttttctatgctacattgccagag

SEQ ID NO: 55520 - DNA, 812 bp, Populus trichocarpa
  Intron number 2 from transcript POPTR_0003s13900.1 (locus POPTR_0003s13900) derived from phytozome v7.0 (chr-ID scaf fold_3; pos 14126313 to 14127124 reverse strand)
aagattgttggtggagatcatagacttaaggtacatttttctatgttcatttaactgttttgcatagtcatgagttggattgttttaagaaatttttagtcatgaaaggtttggttattgaggtaatcacatgtgttttggtgggtgtctaaatcccagatgaatctgatgagattagactggttgttaggatgtgaactttgggcatctaagcttatctgcaatgttagaatttgggtagcatgacagaaacattttttatgctgatgtgattggtctaccttgatgttaatgcaattttgcctaaaatgtcctaatacggtctttgtagatgctgatgcagtttttgctctgaaatgtagagctattttctatagcgtagtttgccaaatggcaaattaaaatttaaaacttgcatcacaatctggctggatatatttcttcaagtaatttgggttaattgactttatgttagaatctgattttaatgtgccattggagctctctgctcgaatttttcaggttaagatgttactatatgagaattcaaaagcttctaaaatctgatgtcatcgtaaacaagatttatatacaattcgattgattgacagtcattgatttttgttagatactagtttgttcaatttgtatgatacatggtagtttgtatgctggcttatcgtcacagaagattttattcttaggaggcaacaatggagcacaactgctatgttgaattttgcttaataactaactatataatatgctattttacagaactatttgtccactgttactgttcatccagaggt

SEQ ID NO: 55521 - DNA, 669 bp, Populus trichocarpa
  Intron number 1 from transcript POPTR_0003s13900.1 (locus POPTR_0003s13900) derived from phytozome v7.0 (chr-ID scaf fold_3; pos 14127276 to 14127944 reverse strand)
ctcttgtcaagcacatcaaggctcctgttcctcttgtaaacaccaattcctctctctctctctctctctgttttttctcttagattaaagttaatgtttagttacaagagagatgcatattttttttatagatccgagagcatttaaggttgattttattgttcgtcgggtttatctgtggttttagtttttgggcatatttcgaagaatttttggttgaagataaatggttttgttttttcttaaaaacaaaaaacaaaaaaattgtagcaagtattttgaagtgatatattttcaaaatttgcagctacgattgaaattggttgagtttgtggatccataagaatggggtcattacttgtctgcatttttatttactttaaaggctcaagatttgtgctaaaatatgcaaaattggtcgtttaatgtatttcttccgaagctagaaagaatatttactctttttgcggtgattgtttaaaaagttaaatcgtgtgtaatggtgggtagagacggcattactgccttttatatatagtttcaaatatttgattgttgtgacgaatatggaaatgatttgattttgatgctcttttatgcttgtgtcaatgattagtggtgtttgcatgatcaggtgtggtctctggtgaggagatttgatcaaccaca

SEQ ID NO: 55522 - DNA, 760 bp, Populus trichocarpa
  Intron number 2 from transcript POPTR_0006s25880.1 (locus POPTR_0006s25880) derived from phytozome v7.0 (chr-ID scaf fold_6; pos 24220438 to 24221197 reverse strand)
gtttgatccaaaatctgcaacagctatttctaaatgtaagaaaccattgaatcttctgtgtgaaaagggtgacctttgtttttacgccgctcttccccaccatagagaaaggaaaacctttttgattcgtttgattagagtatggggagaggtagaggatggggggggaaggtaactaaattattgaatctactacttaattggttcaaaattcagtttacataaaagtaatgactattttaactgattttttaatcattgaaactttcaagtacaaagattttctcgagtcggagaactaatttaccaccacgactggcacctttcactagctcttcttgtcatggcattttttgttaaacttgaaaatgttgaattagagcttgaaacttggaagcacagtcaggggaaggtgcagtgcctatttcttcaaaagatttgtaacagttgaaattttatttgttcacgtgtcctctgtatgttaaggagggatgggctttactgaacagtggaggagactttcagcatttacaaatgccttttttttcgattcagattgcacagtgaagtatgggtaattaatccatctgctgtgatttatcagtctgactagtaagcagttaacaatatgtaatgtgttgtgtgaacagtgaggtagcttacagaaaatgtgaaagggctggtttgttggaaaataaattgctctttcatatgttacttaaaaagtaatggatttttggtatgtataaatttggcaggt

SEQ ID NO: 55523 - DNA, 783 bp, Populus trichocarpa
  Intron number 1 from transcript POPTR_0014s03400.1 (locus POPTR_0014s03400) derived from phytozome v7.0 (chr-ID scaf fold_14; pos 2729769 to 2730551)
aacgaggcaaaaacggcaagctcattaaagctctggtgctctctctacttcgattttctcttgtttcttctagcgttttgcaaataatgtgaaattattctgattttgttttgtgcattgctgtggatatcaatttttttttattaaatgcagaaaagaaggctgcttttttaaacattttgtttgttaccaatcattttctactgtataatgttgtggaggaccgtttctgtatgctctatcatgatgaacgaacggtggagatttgatttcagctgataataataaagttaatctctttcaatgctgggaaatatatatagttatagttgtagttatagttataaatttagttcaaagacagcaagcattccgttatggtttctcttactgtttgtgcatagggacaaactgtttagtagctgtgtttgttggcagcattttagaaatgaggaacctaaatgtaaaattctgtacgaggaactttgtatgtggtattatgcttttaatgattaaatcagatatgtataatttttattttttaaagaggattagggttgttttgctgaaatgaaattctggcgcctcgcttcatgtccaatcttctttattggggatgggattaatgttctagcctttagcaaaatatttgaatctgcctagcggaaacattcaattttgtatgatgcaccaaaatatgcaagtgatttcttcttgtgtatatagtttaatagaatatagggataagtgagatttgtttttcattctgaatgcaggcgaaat

SEQ ID NO: 55524 - DNA, 700 bp, Populus trichocarpa
  Intron number 1 from transcript POPTR_0211s00200.1 (locus POPTR_0211s00200) derived from phytozome v7.0 (chr-ID scaf fold_211; pos 2827 to 3526)
aatgtagagctccatatctaagagaaacctccaagttctgttccgaatgtggtacaaagaggctaggaacatgaaactatggtaaaaaatatccttttctgatcctatgatatactcatctccgccattgtaaaattgtaggtgcttgatatcatgagttgactgttaactttttttaaaatatctaaacttcccttttcaagtatttttgttttgtttttttaggaggtgagattgaaaaattgactagaaatgaaggatattttagaagaaataaaaaaaaacaattaaattatcaaggaaaattaagagtaagatgaaatacaatcaactatgaaaatacaaggattcggtgctgggatcttcaaaaaaatttaaaagaaaataaactaattatttcataaaaagcacagagattaagataggaaaatgattttttatgaatacatcattcagttgtatggttgcttaagagataatctccaacaaaaaactaacacgcaaataatagaagatttaccgatttttatttttattttccatttgattttgggttcatcgttgttttcgtacatgtcacaatctcatcaatgaccatttaaaaatacgttaattgcagcctcgttctaaacgtacttgcaaaaatttaaaaatagtaaaataagttaacccccgcgctctcactgaagaaaacccggcc

SEQ ID NO: 55525 - DNA, 690 bp, Populus trichocarpa
  Intron number 1 from transcript POPTR_0006s07980.1 (locus POPTR_0006s07980) derived from phytozome v7.0 (chr-ID scaf fold_6; pos 5839785 to 5840474 reverse strand)
cctcattgaattcggtaagtgaatttcatttcaatgcactttgtttcagactgaagtaagccctgccttatgccattctttcctatgttgatctgtttttttatggggtatccattgaattcattacttggtcatatgtctctgtgccaattgagattgtgctctattctatgtgactatcgaaaaatgtggcgctaattttatgaaatcggtgatctttagttaatcaatcaagctatcttccaaccacttagctttagctttgcagcacgtaaactgtagtgatgcaaaataatggacatccacgtgaagagggatgagcaatcctatttccattttgcacatcaatatataagaggataaaagtatctatacttttggggttaagttagatgtaaagaagaattagacagagtatcactgacttttgacggatttttaatagtatatgatcaaagtgtttggttattaaaagagttcacaatggacattttacatttgatctttgttgaacttgactacttcatgctgagtttcataagatgttgtaaatatatattttgtttatgctcccgttattttaaaattttgcttattcaagctggcatgcttgtactcaatacacttatccatatccatattcatctcgttgcaggctaagtttttggcagtattgataatcataccctg

SEQ ID NO: 55526 - DNA, 573 bp, Populus trichocarpa
  Intron number 2 from transcript POPTR_0006s23870.1 (locus POPTR_0006s23870) derived from phytozome v7.0 (chr-ID scaf fold_6; pos 22593542 to 22594114)
ttcttggtaaatgaattattttttactattattattatatgagtgagtgttactctgtttctttagcctttagatgttgaaaaatggatgaaaagattcgtagcttgaatgcaagacaagggaagatagatgctttttgatgccttaattgttgtcaaaattggttttaatcttgttgaggatgcggcttttttcttaggagctcatgatggtatttggagaccataacgattgattccatacactgtattcttcaattgctgttgtgtgtcggctagctcaatattttttgttatttttatctcgctatacaaattagtatactttttaaccaaattcatagttgatgtaattgacgataattaaatcatatggtccctcaattcacatattcttccatatttttgtttattctgtatttccacaattgattctagccaatacattctgtttttgaggttttttcgtaatcaataaataattttttatataatttaacggatttaattttctttcaactcttttgtgtatgttttaggtgagaagggaaggaggatcagggagctgacttct

SEQ ID NO: 55527 - DNA, 811 bp, Populus trichocarpa
  Intron number 2 from transcript POPTR_0021s00630.1 (locus POPTR_0021s00630) derived from phytozome v7.0 (chr-ID scaf fold_21; pos 330997 to 331807 reverse strand)
tttagaatctgaggcttgtgatcagaagcttgtaagtgcataccaggcttttatctaaatctcacttaaaagcatatgcataaagcttaagcttagtgttgtgttgggccatgtggcatggagtgaattcagaatgcagcatgactatttggttgccaatgaataaattcgtataactaaatgttttgtgtttggtttggctatgaataattttttcatgtaatataatctttactttcatctagctttttgatttgtaaaattcaactaacatggaagaacattgtgattattgcttatgtttctctgtcttatgcatcttattatcctaagaccttggtagttaatacttggaacaaaaaaggttggaatatgtagcctgacacatcagctatgacatttctgtggttgatcaataatttcttcgaattaagaatttaattgtttaatttgactatggtctgtcttctcataaaagccgtcttcttctatataaaacttttgatttgtgcttgcaaaagtggtggacaaaagaagcagttttcttcaaaaatgtatttttgatttgtctgcagacatggtggaagaatatattattacatgttagttttgatatcggtgcagtttttttttttttgtcattttttcaagcgaaggttagaatttgctgtgtgcatgtttctggaaatctatatttctgcgtaactagctttcctatgatcagatttagctatgctttttctatcaagccattgcaattgacatgccaattatagtatttgctctgattttttgcctttatcagaaggtt

SEQ ID NO: 55528 - DNA, 744 bp, Populus trichocarpa
  Intron number 1 from transcript POPTR_0021s00630.1 (locus POPTR_0021s00630) derived from phytozome v7.0 (chr-ID scaf fold_21; pos 331800 to 332543 reverse strand)
agctcttattgctttcttcaaagatgtaaactttggtggttgttttgattgtatgatgcattttaactcaactgggtttcactgaattttgagaaatatgtgatctttgagagagatattgaaataagtgaggctctttgactgatttcttggagttttaatttgcagtgttgtcattgattttcgaagctaaatgtcttaagacagaagatgaatgttgtagaacaaattgtgtagtattttactcttctgttcttgatttttggatattgtggaatcaaatggcagccatgattacctttttatttttttggcaaatatgtctccaccgacactatcttcaccttggaaacagaaaactgtgaaggtgtgctgtcgtctctttctttattttcctttacttaaactaatgtctaatggtgtagggctggtttcaattgcactttttattctatgttttgagccacataattgataattccatatatagcactagtgttggtgccaagtggtagcaagcttcatttattatattttggcagacatttgaagttgtatttattttttgtatttacttgttttttttttttttggtttaggacttctttaatacaagttgaggtgaatgatatgtcatatatatgtatatgtatggatgtatgtatgtgtatgtatgtatgtatttattaatcaagaaatattgtaccaggatacggacagagcctgaaagaacaaatttagaat

SEQ ID NO: 55529 - DNA, 928 bp, Populus trichocarpa
  Intron number 1 from transcript POPTR_0018s02070.1 (locus POPTR_0018s02070) derived from phytozome v7.0 (chr-ID scaf fold_18; pos 1836869 to 1837796 reverse strand)
ctgcttggaaggcacttgctttgtcacttttcgtacaatgtctctgttactttgcataatttaagcattacagctttagcttttcaaaagcatgaagctttctttggttttgtacatttttatgatgttaattatgagcaaggacaatactttgaatttgtggatctgttttgtacagtatttatttttttatgagaaagttagggttttactatttttgttctttgtttgtgtgtgtgtattcttgtttgtttttttatagtaaaattggggtaattatgatgtgggttttgtttgttgtgtctaaaggagtttattttattttattttttggctgtggggtttgtgttatgttactttagaggtgctatttttgctagggtttggagtgagtttttgttctttgtttattttgctttcatggtatttgtctgattggtgcctcttttgctcttcctctgtgcatatggcttgcttgctgtttttccttgtagggcgttggttaaataaattttgacatggattttttctttttcccctccagaaaagtaaaccacaactttgttaaactggcaagcatgatatatataggaatagaattagagcagaagcccttcgaaagtaaatgatctaacttaaggagattgatggctagagtgattcacatacacattttgagaatgctactctcttttgtgcgtaacagttatcattgaaatgaattcaaccttcctcattcatggtgtggcagatttgtttgtttaaaaaagtttgtgctgcatgagaaatgcttgggttccattgattttttctcacggtgcttgtgggagacaatttgtttcttccaactggtctcttaatcgagcagaaatttggctgtcttttgttaccagataggttctttgcctaacagatccagtgacatccc

SEQ ID NO: 55530 - DNA, 819 bp, Populus trichocarpa
  Intron number 1 from transcript POPTR_0003s11300.1 (locus POPTR_0003s11300) derived from phytozome v7.0 (chr-ID scaf fold_3; pos 12155037 to 12155855 reverse strand)
gctgctggtctctttctgtttcagttttcattatctgaatttctttgttttggagttagtttggtgttgtgtgcggggtgttttttgggtttatgaaggaacccgtctgtgaaatacttgttttttgtatgtgtttgatgaaatcgtgcttgtcttttctgttttcgctacatatttggcaatggaatttgagataggaaattgcttttattctgttcctttgctttttctattttttagtgatttattaatggagtttcttcttcttcgagtgcattaacattaaagtttggattttttactgccatgacagaggaattgagttgagtattcggttggttgaaaagaggttgcttgttttttttccctgttaaacttatgagctgttggatcgtggatatatgaaagtgcaaggtttatttttcctgcgcatggccttcgctttatatttctttcttatcacaaaggctgttcggactctagcctttacagtttatgttatctgtatcagtgtcagaagtcacacaactatgctgctttgtaggtttaggtgactgataaggttccttcctaggatagcttcgtgattttgattgattgtagaagttctagttgcatactgtctgcaagattcaaatttactttattgagtacgtgagctgaggcacatgaattttaaaaataatctttaatctagaatatgaatttccttgtgtcaaatgattggtgcttgttgcagtctccacatctggcttaacatgttttctactttacctttttccagaggcaaagcgtacggtgcctttgaaagattaccgg

SEQ ID NO: 55531 - DNA, 465 bp, Populus trichocarpa
  Intron number 2 from transcript POPTR_0019s12340.1 (locus POPTR_0019s12340) derived from phytozome v7.0 (chr-ID scaf fold_19; pos 13387007 to 13387471 reverse strand)
gacaatcagactgttggattggaaaaaatattgaggtattgcacttgaatctcctgacaacttagcgcatacttttttgattgattttgtgatcagtagtcacctgtttctttcggttcatttacctggttttgctttctttgatatggttatccaatccagcgtgctgaaatacttgattatatcattatcaattgcaacattcctttcagggtaaagataaccttcttttcattagtggtagttgacatggcattgcctttacgctacttcagctgtcttgtgataaccaaggaataaaactaagtacatagtttatttctttagttttttgttttgcttaaagtaaacctgttatttgattattctcagtgttattaacttcattggagcattgaagatgaaagagttttgtttttccttggagtaggacttctgattcgaagataaaccccaggatactcc

SEQ ID NO: 55532 - DNA, 1023 bp, Populus trichocarpa
  Intron number 1 from transcript POPTR_0014s09120.1 (locus POPTR_0014s09120) derived from phytozome v7.0 (chr-ID scaf fold_14; pos 6753799 to 6754821)
ttccttgataataaccaactctttctctgtcaaaggtattgtctctcttctgctgctgattcatttcatttatctacttatgataatttggtttccgtgtcctttttttgttgtctgtctgtctgtctgtctgcctgcctgcctgcctgccttgaatcttaatactgtttttaactttagcaatcataaaaaggacctttggctttggccgttgttatttatggattgttttttgtcccttacaaaaataaatctttttttttgttttgttttctgtttcatattctttgcaccgggagagtccatcggagcttgaactcatttgtatatgcatttccttaccatttgtttcatggcatacaatgaatgaaacgttttcccggaaatttccccgacgttgaccaaatagttgactatcgtcaagcagacgattaaaagctttacacttattcttggtgaatcctatctcctttataaattcgctgctgctgcctgtagattttgactctcttttctatatctcttctgagttcctctgtgatttctcttcattgaatttgaagagtaaaaactcaggtaaagagaagaaactaaaattttgacttttctctcttttttaggggggggggggggggttgttcgtgacttgatagtaactggaaattaagttcgttggaggtttttgatttgctgggatacaaaatagtaatatttgaagattcaacgtgctgaatcccatttttgtcaatggtttatttatgctaactaaagttgtactaaaacactgcaatttcacatatctttggtgacatagattttgtctcccccccccgtttagcttgtatgtattcccatggtttcatttcaaagtcctaattaaccaaccttctttgtcgttttattgaacaataataactgtacaagcttgatctttgacctcgctttgtattatacgattgctaaaatatattttcttctttgtttttgctgttctgattgcagttttcaaaagggtaagtgagg

SEQ ID NO: 55533 - DNA, 402 bp, Populus trichocarpa
  Intron number 1 from transcript POPTR_0750s00010.1 (locus POPTR_0750s00010) derived from phytozome v7.0 (chr-ID scaf fold_750; pos 795 to 1196 reverse strand)
gaggttgctgcacaatctgaggtaacattttttattattattagtattctttggaacaatttgaatttaattaaagccaatttctttcttttttttaaaaaaaagtattctgatttggcattactttttttaattgggtaaattacctgcttaatcactgtttggtttctaggaaaatgtagggaatatatattgtgggttcaaatttcttctttgggaaatatgtaagctttttctttctttttggtttgggttgtgttgagtgtaagcaaaatgaatgtggcatcaaaggtcaggaagcatgatttttatttatttatttttatttttggcaataaaatgggttttgggatagtaatatcgttgtaaatatatgagtctgtttgttctgatattaggact

SEQ ID NO: 55534 - DNA, 609 bp, Populus trichocarpa
  Intron number 2 from transcript POPTR_0018s05850.1 (locus POPTR_0018s05850) derived from phytozome v7.0 (chr-ID scaf fold_18; pos 5475174 to 5475782 reverse strand)
agctaaaaagtgggttactgaattgcagagacaaggtaactagctgcttttttcttctacaatgaaatgagtaatataccattcaataaaatcaaaaatatatggagctgagactcaaacatttaccattctctacaatgattttttttccgaaatctacaccattttctactctcattcttctacaacaatctctcaagttgcttaccataagttaaatgttgtggaaccctaatagatcttctatgatggaccccagcaccaatctatcgtttcatcagcataacatgctagctatgttttatgttcccaggatacaagaaaaccacttgtgcttggtgatgttttatcatcaatttaccttttcagcctttcaatcttaccttgtcgtctttgtgctcccagtatttacaaagttatacacatttttaagaaggtcatctttggtttagatcatttggtttttgatccgaacaagggtttacgtgaaacggtccaagtggaagtcctttggtgctattaattagaatagaactgagaattgaagtgagattttgtatttacaaatttatgctgtgttgtgccacatcaggaaatccgaatctgata

SEQ ID NO: 55535 - DNA, 611 bp, Populus trichocarpa
  Intron number 1 from transcript POPTR_0018s05850.1 (locus POPTR_0018s05850) derived from phytozome v7.0 (chr-ID scaf fold_18; pos 5475762 to 5476372 reverse strand)
ctgcggccgttgtggtatacgatatcacaagcgtagatttctatcaactctaattcttctattctttagtatattaattattagcttttacttgtttacatgtacgtatgttcttgtgtgtcttgaatgaagttgtgtaaaaggattcatcattgtaatttgatattaattaattcttgatttatcataaccctaataacttgaatagccctcgtatgcgtgcctttgaattagttttatataacctgtgacgaaacttgtcacccttgcatgaacattatagaaacagcagcaagaaacatctcctcacgttcgataaattatgaaatataaacgtaaggattgtcttttggtcagacattgatgattggcctatttgtacaaaatgtggttccatttcatgttttatcatctcataaatattggtattcacaaatattctgtgaatttattagctgggtcttgcttcatgcctgtgatgtatgtcaactaagatttttagttttcttaaatatcatttttgttgtaatttcctttattacatctcctcttaattgaaacatgttttatcttcaggattcatttgaacgagctaaaaagtgggttactga

SEQ ID NO: 55536 - DNA, 937 bp, Populus trichocarpa
  Intron number 1 from transcript POPTR_0003s20780.1 (locus POPTR_0003s20780) derived from phytozome v7.0 (chr-ID scaf fold_3; pos 19210589 to 19211525)
caataataataataaaaaaaagcaaagaacttcaggtacaaagctctaatctttctgtgtttcatgcatcgatctaatatagaaatatgatgtgtggttatgttttgtatttgcgtgtcaatgtgaaatggtttgcttttaatatcatatcctatcctatgttagatgatttgaatgtttgttagataatgagatgtttggtcaaattctatgaacttccttgtctgtgctcctttttcctgctctccatgcttccagatctttctgctcccgttccctcgtaaatttgtaccctttatataaatccccccctcccacctaccctttttctttttattgttttttcctcataaaagcgtcttcagtttcttgctcaaatttttttcataaatcatcatcttgtcttgaagaagtagagtacaagaccacatattttaaggtgttgattgaaaggagaattttgggttttccttggttttttcatttgtaaggacatcactttatagtcttctttttgtttgaccatgcttgttttgtggggatcgatctgtctcaagtctcaacaattttgtttttgttttcaaagatgaaacctgtttaatcttctcatttcaattttttgatgggttctttcaaaattccaacttttcatctggtagtgatcaatattattttattgttttctagatcttgaaatttgtgattttgtttgctaaaccatgagctctgtcctatagagaattatgtattgtgctggtgtttatgtgttagatttgtgcattgtgaaagaaatgattctttttttgttttttcatttactttgttcctgtgtgaatttgagattgggatgctgatttggttcttgcttgtatttgatgtattaatgtactgctttgattgtggcaaggacaacaagaggatagttgtggttgtggtt

SEQ ID NO: 55537 - DNA, 402 bp, Populus trichocarpa
  Intron number 1 from transcript POPTR_0018s03910.1 (locus POPTR_0018s03910) derived from phytozome v7.0 (chr-ID scaf fold_18; pos 3331824 to 3332225)
gtaagcaagaaaaggtttaacttttgtatactacaatttgttgtctagagtctctcaagttatccatattttatcaaaaactaatgatgttgatcatatgagaaatatccaaacctagctaaccgaagaatcttgtcttgtatccatgcaagtaagctactagttagctatcaaaaattttgttccaaacaagtttttcatttcttggatcatctttcctgttacttgggaagatatttgatcctttgtacgtaacacataggagcttaaatgtttttttttttttcaaattttatggttttagggttttggaaattttgatcatttcatccatgtcgtttcgatgtagtacagaatcctataagtgataaagggaagaaacaaattgggaaggagaaggac

SEQ ID NO: 55538 - DNA, 501 bp, Populus trichocarpa
  Intron number 2 from transcript POPTR_0018s03910.1 (locus POPTR_0018s03910) derived from phytozome v7.0 (chr-ID scaf fold_18; pos 3332384 to 3332884)
ggatcttccaggtagttttaacttgagatctagttgctagagcactcgtgaaaatcagcttgaaattggcttgatccatcaatttgttttccagcttttgagtttttaaaagaagaaatcaagcagcgaaccttcaagaagaaaatgtttgatttgtcaaaatccatactatatatgtatccattcaaaccatgatggcttgatgattttttttcctttccctcatcacttatgagttagggtttgcaacacgatttagggttttcaaatggctcatgatacaattttgacaagagtgttgacataaataaccatattcaattttttgttctacttttgggatcatagatctatcttcttaattatacaataatacatctctagctcttctcttgtttctcttaatttctcaccaaacataagcaaattccttaatgtataatctttgagtagatccttgactgtttcaaatttgttggctcttaatcaggaaaagcaaaa

SEQ ID NO: 55539 - DNA, 569 bp, Populus trichocarpa
  Intron number 1 from transcript POPTR_0013s01040.1 (locus POPTR_0013s01040) derived from phytozome v7.0 (chr-ID scaf fold_13; pos 575332 to 575900)
atcaggtttaaaaatgctttcttttccttctttttgattcaagagtcaagctttcaattttctttgctagtgttttggttttgagttgagtttttagtctcgttcttacgttcatgggttgttcttgctgtctggttaatggttcttggtatactttacttgattttctatgtgaaaatacatttcttttttatgataacatcatcaatactttttctttatttcttggtggggtttgtttttatcaaagcatgtaattctctctttttatctcttatttatctcttttttaagatgttgacatgcagaatttttcttcttctttttatgccatctcctcctttttagttaacataaaatacaattaatttttatggtgtttactgttattaattttcctttattgaatttgattaacgtatttaatacaattttttttgctttaatcgaaagggtggtgggattctagtatatgttcgcattctcttcatgcaaaatctctccttccattttctttctttccacatgctatgtgctatgttgaattcagttcctgtcttgttagcagg

SEQ ID NO: 55540 - DNA, 983 bp, Populus trichocarpa
  Intron number 2 from transcript POPTR_0003s09260.1 (locus POPTR_0003s09260) derived from phytozome v7.0 (chr-ID scaf fold_3; pos 10569844 to 10570826)
ggctttggtcagtttttcattcatttgcatctgcttcttattgtttttttacaggattcgaatttttagttacattttaatccaactcttaatgaattggtcatatgtggtcagtcacttgctgttgaatttgtggggttagtgatgttttattttggagaaagttgggagggatttgcaaattttaatttttatggaatcacaatcttactacatacatgcctgctgccttcaattgtatgataaaaaattgttaaggtaattaagaatgacggttgagaatgtgtcccagctatcagtgaatctatttttcatgcttttatttccctccctcggaaaaaagagttgcattattcggaaacgggaaatctttgaattgtagaatctttctgattgagagagtatcattcccatattcagtcagtgaacaaatgcttaatttttaaatggatgatagtacggggtgtgacaaggtaggaaagtgtcaagttacattaacatcttcaattaacatgtctggttcccctcttttattccctgcaattcttttagcacattttcctagttgaagttttcctttggtaagtgttgttgcactacatcaaactattgactccgtgggattgttgtcccgggctttaattgcatccttttagttgttcacctgtggatgaacacaatctaacacagtcattgtgtgcacttcacaacttgagttactagtgactgatttttgctgattctctgtagctatatgaagtttcttgttattttgttatccccgactagagcccctttaaaaagttcattgcccctgataatttgcatttttaatgcatctcctagcttgtgattgtagcaattctctagactgtttaatttcctctaaataaggagacaactttcctccttttcaaatcttcacatttttctattttggttagcctgaagcttttgtcaatcataactttctgcaggtttgc

SEQ ID NO: 55541 - DNA, 876 bp, Populus trichocarpa
  Intron number 2 from transcript POPTR_0019s12190.1 (locus POPTR_0019s12190) derived from phytozome v7.0 (chr-ID scaf fold_19; pos 13310175 to 13311050 reverse strand)
agcctggtaatagattactactctatattccatttgtcccattttgttaagaagactggatttggcatggggcttgacttactgactcataattgatatgtgagaatttgaaaatatgatttgattttgtcagtatggtagtgtgacatatgactgtagaatgataaagtttgatccttcagcagatgggtcgaaacattgatattgcatattttactttgggaattcaagaaatgattttaaaaaacttgacacaagtccactaaattcgtttctggcactgaatgcgtcattgttgatggaaactatgacattatgaagttgaagctgcagtgatgtgggaaatatgtgtccttgataaacatttgcgacaatagattgagctagtgatttgggaatatgtgatttttcaattgataactctgaattcctatcgttcaaaaccagaggggcatcaagtcattctttaagtagattcatgatggtttaccttgcatatgaattgtaacttttgtgtttgcaaccactggactgaagtctttccttagaagttcctttataggcaaggagcattcagtcatgtttttgttctccgtccttcatttcttgtggctattttaataatgtgtgctctttcatgttgggcagtcaagtttgggactttcatctttgttatttcaactttatagatgattatacagattttcccagttgaatgagtgattcttccatctttatcattcacgagccaccaagttttgtttaatgattatgggttggcattccatgccatttacttctcaccgagatgtttcggttgtgactttgatttgtactgcaggaacttcagcctgcccaagcggaaaattttattgc

SEQ ID NO: 55542 - DNA, 954 bp, Populus trichocarpa
  Intron number 1 from transcript POPTR_0013s02870.1 (locus POPTR_0013s02870) derived from phytozome v7.0 (chr-ID scaf fold_13; pos 1739559 to 1740512 reverse strand)
gatcggcaaaataatagaagtggataactaaattaattaaggtccaaagagttcaaaaattataagtttgtaatataaaattgaagaatttacatatattataaaacgatgcttcataaaattttattttttaaaaaatttaacaattacaccttacgagatcttatatgttaaaaacattataagattttctcattatcaaggctttgaatttttttaaatataaataactacacaatcattcaaccaatcatcctcgtaactaaccataaattatttatttcattaatttttcataattttttttcaagttacattgaaaatttaattacaaataatttaaaaaaattataatttaagaaaaaacttaggtttaaaataagttatagtttattttaaatctaagtttttattataatctatgttgaaaaattagaggatgtttgagacaatactagatatttttttaaaaaatactctttacttggaaatataataaaataattttttttaaaaaaattatttttaacatcgagatatatattaaaataattcaaaaaaataaaaactaataatttaaaataaaaaaaacttaaaattttaaaaaatatagacgaaccttgatcaaacaaaccaattttaaaaaagatagtgcaccaatatatagtattaaacaaaccttgatcaaaccctggggccctacctacccaccacaccaattttaaatttctgcaactcgtaatatcatatgaggattgaggagctcttagacgtagttgaactctgtatggacatggcttaatttaatatccatttaaaataaagcaccagtagacagagcgtgaaaatgacttctcaattacccccttccctaaacgcaatattctgttctttatttccaacgtttgaagctcagcagcctgtcttgtcttgtctacccttctttgttgccca

SEQ ID NO: 55543 - DNA, 956 bp, Populus trichocarpa
  Intron number 1 from transcript POPTR_0006s06670.1 (locus POPTR_0006s06670) derived from phytozome v7.0 (chr-ID scaf fold_6; pos 4831715 to 4832670 reverse strand)
gtttacgttcttgctctttttttctcaaaagattggtattttattttctcctcttctgctattttcttagttgatttaatgggttccttttgttgctatcttacttgggttgatctcagactttttgttgaattgaatggaatttggatcattaagccttttgatgtcttgaggttttttttagcttgttattacaactgggggcttgctagtcttacggtggattttcttgggttgcttttcatttttggtgactttaaagtgtattgactgtagtcaactggagcacagtgtgttgtttgtttctcccacaatgattgctcaatgcttacaaaattttaagagagttcattttgttgttcttgatattttattctttttgttaccgtccgaatttcttatatgggatttttcttttctttttgccattttttagaaattgactgactcaactctttggtggatcaaccttgtttgtttggtttctaagtaaagaattgaaggtagttatagcgtttctttaatagagctccttgtctgaggatgattttactattacaatttttgttaaagtgttaagagtgccgctgaatcattgagtcttctctcattttatatttagtcaatatgaggagctgctgtgaattcagcttgtcttttcaatgatctatattgggattcatcggtcttgcatctgcgagttaacacaaagcagagaataggaaaagtcaaatttagtttggttatgatcgattgatctttgtattctcataacataattcaatacacatttggaggatttcattggtcttatccgttgtttttgcttttgttctatgttccttgttctttggtggcttgaaacaaattagaaagtggttaaagaaattatctttgtcatcacttcttctttccttccagagcttctaacagctgaagcattcactggaacctat

SEQ ID NO: 55544 - DNA, 822 bp, Populus trichocarpa
  Intron number 2 from transcript POPTR_0006s19200.1 (locus POPTR_0006s19200) derived from phytozome v7.0 (chr-ID scaf fold_6; pos 18179183 to 18180004 reverse strand)
aactcaagaggttaaggtagtaataaatctgtctcaagtttttaatagttgttgcttcctcgtggaccttaaatctgtgttaaatagtgaacctgccactgaacccttcatgatgtttaattctagactagaaataaactaccacggactagagtttgttaataatccaaaacaccaccaattactggctccatcatccagagatatggtttcaggacctaaatacataggatattttctctccttttttttttttatctttgaggaatcatgattgtaatactaacattgaatggtgctttcatagtgtggttatttatttgactgttctgtttcacactaattaaggtttctcttagtctaacgtgctgggtaatactaattctcttgccatatgctactgtaatatttaaactagcccctgatttatgtgacaatgcatgatgtgctttgtaaatggaggatttgtgaggaaaccaaatacaagtggggagtggggagtgaaaaaggttaactgcagcaaacttgcatcagctttggaagtaatggatgatcaaaagttgattaaacatcagtgtttgtcttctctgtgagcatgatggttatgcagtgtacactgatgaaatggtgctgaaaaacagcaatagaaaaaaaaaaatacattcattgatataataaggattcgattttttctgttaaaatattttcactgtgacatacaatgtacagtttattaagttctaacttacatctacttttttttttcatctgctctttcggtgaaaagagctacattcgagtacgaaaaaggattaaatatag

SEQ ID NO: 55545 - DNA, 1044 bp, Populus trichocarpa
  Intron number 1 from transcript POPTR_0006s19200.1 (locus POPTR_0006s19200) derived from phytozome v7.0 (chr-ID scaf fold_6; pos 18180528 to 18181571 reverse strand)
tcttcgacgcttcctccacggcaacaccgccgccggtactctctctctttacacatatatttacagttttgtactcctcctttgccttctataccaatttgctttttttgtttttttgtttttttgttttgggcctcaaagattcttgctttgaattcacgttgatcttactatcgatagcaaaggaaaagaaaatctgtaataatatatatttcgcgattctcttaaagttaggcttgaataggcttgaataaattgattgcttatttaaaatcttagtaaaaaaaaccccaaatttaaccttgaattatgctccatctcgaacttgaacttgagatttagttttggtaatctgggttgttcggtttttggaagttttaacaatctatgagaacgttagtttcaaatttgaggatttttttttataaataagaatagctaatggaaccagatgtgcctgctggtgcattgcgtgtacatgatataatgatatgacaatggtgataaatggtggtttcagcttttgggtttatgcgtgtgggttatttgtttagaaaataatataaatcatatcttgaagtatcatctaatagcttaagcttttgagttagatgtttgtttgacaatttgaacttgtttatataaatgctttgtaggtaatccaattgtcaatctttatgattttataatggtgtctcatatgttctgaggtgattttagtttctggctactttaaaacattctgcagactggcatcacaggcacaatcctgtaatgatactgtcctgaaggtcatatgggcttgttttggtcatggtaggcgggaatgtgtctattgttgaaacagattgttttagaacgcttggaaacctttctgtagatttaaacggcaaatagaatagacattttgtacttttatccattatagtgtacattgtttcacacttggagtgattccatagattgattgaaacaccaatctgcatctcagaactctgattgaaaattaaaccttaatgcttgtgcagacctgagagaattgtc

SEQ ID NO: 55546 - DNA, 815 bp, Populus trichocarpa
  Intron number 2 from transcript POPTR_0013s07880.1 (locus POPTR_0013s07880) derived from phytozome v7.0 (chr-ID scaf fold_13; pos 6825843 to 6826657)
aagaaacatacaaggtattccttatttttgtttcttagtgatctcactttttgaatgtttgccttaagaaactgggttaagaaaaggaacatcctatttgcaattaccttatggcttgttagcaatggaacattatcctgagtttaatgcaaatatctgtctgaagttcagctatgcgatccttttttctctctcctattaactcctattatcggatcaaattggattttggtttgtatttggttttcagccttcttatagtgtaaaggctaaagtcttctctgcttgatgaaatgtgattcttagcctatacaatcttgattgaaagggagtcatactatcaaaatcactttgatcaagttggctgggtaaatatgctaaaatacaccatagaagttaaatgaagtgttccatatttatctacttttttgggttcatcaggagacctgctgggccttgggctacacaatgggtagccctcctccattacataataaccaaataaactggagttattaggactcttaacttgctttgctgaaggaaactatggggtatgcaactaggctatgcttgcttgtgttttccatatttaaatttgagaaagcatttgtttgctttgaatatctgtggaaataaattgtcttgtaagaaaattattgaagttctttattgtgcagtgttgctatagaagatatatccatgcaataatttgactagtgcagatttatgatttctcaaaccattattgtttcttgaccttttcatatttttctgaagagtttaaaatcaaggggtatcagattccctggtcg

SEQ ID NO: 55547 - DNA, 526 bp, Populus trichocarpa
  Intron number 1 from transcript POPTR_0014s07830.1 (locus POPTR_0014s07830) derived from phytozome v7.0 (chr-ID scaf fold_14; pos 5841315 to 5841840 reverse strand)
ttcttgaggtacatttttagacacccatcattaaattttaagtcttgggttttaatttaggcttgaattcattttgttcttttgttattaaacttttctttttggtaattttggttcgtgggatctgatcatgcttttcatttttaagttccattgtgtttttaatttgtcattctcataaaagttcataatttactgttgaagtatgaccttgaaatataattttcactgcttgcaagccctcggtggagtgtacttgaaataattccttgtatttgcctgcttggtcagattttgagtcctgttctattaattttgtttgagattacgaaaaccttgtctgagagtgttaagtgacacagaatacagcagtgaatggtttctttgtatcatttggagagttacagtgaattgcagttggtgactacatgtctccatttgttagtgcatcgatcattaagttaattatgcatgaaatgttgatgttaagatgggatgggtttaaacttcttctgttttgttgaag

SEQ ID NO: 55548 - DNA, 823 bp, Populus trichocarpa
  Intron number 4 from transcript POPTR_0013s01160.2 (locus POPTR_0013s01160) derived from phytozome v7.0 (chr-ID scaf fold_13; pos 627306 to 628128 reverse strand)
aagttgatctcgactctcggttggggaaaactcaggtgtagttacttgttttagctttaaatactggcgtttgttgtttaactcactttttatttgcttgaatcaatatagtatagtttctggtcatgtgggtgtgttttgatttcttacaaattgtactacttgtttgtgctaaggtaataatgttaggagtgaggatggtgatagctgataaattgtattaagttagttaaaacgattggtaggagcttgaaagttgagaacaagctgttgttttagattggatttgtggggagctgaacaaggttgtgattcttgttggaggtgctattattgtggctgactcccattgtaaagcctgtaaatgaaggggagatgaatcaaagtatggtttgcaagaatgaccgaattttgactttcgaggttgagggctatatctgcagggagatactggaaagctgtggtcacttgttttacttaatatgtaggagatagtgtcaatagaggtctcgctccctttgaaggtgacctgtcagtgtatggctctcatagtagatgtcaggactctggattatctaagtttttcatcttttcatgaatgggaaaggtgttttgctgttttcaatagtatttctgttattctatttgggctggtttcatggatcaagggtatgttaaggttcttccgaaacatctttggcatggagtatcatggaatttgaatctttgttactttgctcttgtctgtttgttaattcatatttatgccctttttttttctctcgcaggttgttacaccaattgcacctctaagtcagcaggt

SEQ ID NO: 55549 - DNA, 322 bp, Populus trichocarpa
  Intron number 2 from transcript POPTR_0018s13170.1 (locus POPTR_0018s13170) derived from phytozome v7.0 (chr-ID scaf fold_18; pos 13604174 to 13604495)
aggttagtatgaaacctagtttactatatgggatttgaacatgtttccggtttgggttcatgtctgtttagtagctaaaaagatgtaagaaaaatacaaggaaaccaacaacattcttgtcgtttccagcaaaataagagcagagcgtctctagtgtaatcagattttcatggcaacagatcttgacattcaaaatctaaaatgaacccattaaaggaaaataaatctagataaagggtctgatctgatttttgtgtattttaaatttgattgataaattgttttaggtctatatcaagagacttgacgatccatcttcagg

SEQ ID NO: 55550 - DNA, 775 bp, Populus trichocarpa
  Intron number 1 from transcript POPTR_0014s18720.1 (locus POPTR_0014s18720) derived from phytozome v7.0 (chr-ID scaf fold_14; pos 16102490 to 16103264)
aacaccaattcttggatccctactctcatctgttggtatagtttgtaaatgaataaagaaagaaaagatatttatctcgcattgaaaagaaacactccctcctaatgtttataagtatgggtttctattatgtagtaaattaagtcatggtggaaggactctcctagtgggctttctaatgttattatatgaatatttataatatcaaaagatgacactcgacacttgagcacttgaaacttcatatgttagtgagattaattaatccttgaattaattttcataattaattatgatatttgtgactgttgagataaaactgaatagcaactattcaatttaatttaaagtataactctttcatcaacagtcatatatatagtttcatgaacagtcatatcgtttaatcgtgatggttcaagtatattaaaaacctgctactatatagaaaacaatacaataaaaaacataaattttaatcgttttgacacctccatatttgtttcatcctaaatatttctaacatcatgtttctcggacagtcctaacaacagcagtgacaatcaccatcatgatattatcaccatgatgctaagaagagagtgatgttcaagatgagggggggagagaagaaatggaaagtgtgaacacggaacccagacactttggtttaagtaatgagatcataatgagatggagaacatggttttgactgaggaggtgagagtcatggatagattttggagagtaaattttgaagaagataggtgaagaa

SEQ ID NO: 55551 - DNA, 613 bp, Populus trichocarpa
  Intron number 4 from transcript POPTR_0018s09570.1 (locus POPTR_0018s09570) derived from phytozome v7.0 (chr-ID scaf fold_18; pos 10508354 to 10508966)
tggctggtggaacaggtgagtactgatataaaactatgacatgttataaagaaaaaaaaagcactttatttgattagaaaagctttaatgaatagaaattgggaggtgaagccacaccatgtggccatgtgtaaaaacaaccatctgatttacaaggacattgtctccagagcccatacatctctttcctttgcatagcacccaaaagaatactaatagtgagaagacttgcttgcgcaactctcttgttcaactatggtgtaaaagcaagtggccaactggttcagctgcaaatttacaaggataatgtctccagagcccttaaagttcgtcatttcatctcaagttgattccaggttttatccatacaaatctagaaaccaaaatcccaagtcttcctttggtctcagtttgctagtattaaatccttggaaaaccctcttcatataacctttacatccaccttttaaatatgcacgtgctacttatatctagcaaattgttcaactaaaattgatgattggtatcttcttattcttgttgttttttcattgttatctcatagtttttatgagttataagatcttgagtttggaattcttaattgcaggag

SEQ ID NO: 55552 - DNA, 333 bp, Populus trichocarpa
  Intron number 1 from transcript POPTR_0003s13280.1 (locus POPTR_0003s13280) derived from phytozome v7.0 (chr-ID scaf fold_3; pos 13668668 to 13669000 reverse strand)
acggaattctttggcctttgcctctctcttgctcggtaaattcatcttctcattatcagccacacgaaaattttatttatctaggtttttattcgatcctctgttttaatttcagtgttaagttttgcttgtttagttagctagggtttataatttaacattataagtgtttctcggtctggcgaagcagcgagcatttcggaattaaattttgattaattctgcttttttctttttgtgtgtatttttttgacacttgctgatgttgattagattataattaataattttttttcggggaatacagagggattgattttgcagttgcgaaca

SEQ ID NO: 55553 - DNA, 873 bp, Populus trichocarpa
  Intron number 1 from transcript POPTR_0013s13470.1 (locus POPTR_0013s13470) derived from phytozome v7.0 (chr-ID scaf fold_13; pos 13947187 to 13948059 reverse strand)
ctccctttcaaaaagctgctgctcttgttgatctggttagcttcgttccttgaaaattttaattttttgtgcgcttgaatgtggatgttgatcattttatagtaaaaggaaatacattttgagtctctaaatcaaaatgggttattataaagttgagtttttgagtgtttgtgatcatgttttcttgcttgatttgtaaatgggattgatgggttggtttttgttcttttcttgctttcatgtgatttggatttaaggtttgactcatcattagagagattttgataatcattttattgtctctttagtcttatttttcttcttttcttttgctttcttgttctggaattcttttcagtcagttaatatcgtcttgatggaagtcaaataataataataaaacagtgaagggttgacttttagagtaaaatacttgtggtttatgatcatgtattgttttcttttagtttgtttatagtccttagtatgggcacagttatgttagtttatttccagtaatacaggtccatcaagggttagtgaagtggctaaaattcaaaatataatattgatttatagaaattaatgattggtgaggaagcaccaagccgatcattgaaaatattaatatctataaatatggaggatatggacctgtttcaagtggcatgaattatcatattagttgctagcgtgcaaggagctgaatcggtttttgctgttacttaattattcatttatctcccacgcaatttactaaccatcttaagtttaagattttttacaaaaatttacttttcgttattggttgagaatttttgggactgggattgaatttagttggaatggtttgaaaatacttacaggctgaag

SEQ ID NO: 55554 - DNA, 895 bp, Populus trichocarpa
  Intron number 1 from transcript POPTR_0006s02750.1 (locus POPTR_0006s02750) derived from phytozome v7.0 (chr-ID scaf fold_6; pos 1744421 to 1745315)
gtggtatgtttcttgatctgtctttcgctttgtttcttggggtgtttttgcttttgctctatgttttttgcttgtgtttttagcttgatttgttttagatcatgttgtttggggtaaaaagatggtctctttgagggaaatatgtgattttgattgatgggttcttcttgagatttggaaatttgttcggctgagattgggaaaattagtgtctttggtaaaaggtagcttctcttagtgaaattggtgaagggttctttagattttgattgaaaacgtttcttattttgactattgaaaagcagattgttttattttgggctacctttaatgatccaatcaacaatggaatataatacatgtatgatgttcgttaattatattgcaggatccaaggcttgtgatttagggattttttggtggtaaattagcagtaatctttgactctttgcatctaatgattgtaacatggtgacacgtagtgaacttctttgctgattaatgttttgcaaatggatgtcttgtgccaaattatcaatttttatggttagcttattgttgtctgccgggtttatttgtattttaggttcttgaatgcatgtgattagttgtttccgaaatatgttgtttttaaactttacgagatgcctatgtaagtggtaaatgagattaagcttgctactaagaatatctaaacagaaggttctttcagatcctaccttttgctgcatttggcttgttacaattgcagaagtaaattatagtctgaaagcgaagctttgattatgtgtgtgcccatgagaggcacatgagaccatcaaaaacagttggtgaattggtttttgatgtcttgtgtattacaggttgcatcaccaccaaggaattggggactgtc

SEQ ID NO: 55555 - DNA, 390 bp, Populus trichocarpa
  Intron number 1 from transcript POPTR_0014s17750.1 (locus POPTR_0014s17750) derived from phytozome v7.0 (chr-ID scaf fold_14; pos 14074936 to 14075325)
gcctgcttaaatatttgcaaagaggttggtgaagcttattgtaatttctctacattgcttgcaacctctctccttgtgttatgtttttcatggctaggtgtaggtgtaaatgaattcatgctcttccagccggcagcttaggaattactggcaattttctgattctggtatttactttaattaaagactaattaaaatcaatctagtaattaaaaaacaaattcgctgtattgaaattaatttatcggcttcattttgatttctgaatataattaattcttaatgtaattaaatattaatcaacatcagctggcccatatataatagtactgtgcatgcatgttaaaacgtgcaggaaggaagcgtgcaggggaagctcgtgaagaagga

SEQ ID NO: 55556 - DNA, 726 bp, Populus trichocarpa
  Intron number 1 from transcript POPTR_0019s09800.1 (locus POPTR_0019s09800) derived from phytozome v7.0 (chr-ID scaf fold_19; pos 11405349 to 11406074)
aagcatactgtaaagctccaagtcttaaggttttcctttgagtttagctgaatgaaagatttatttgctgagatttaagtaaaaaatttatgttcttatcaaatgattgagcgtaaggctacatttgagcatggtttctaactttctagtccattaacaaactgcaagtattcccattttgtcggcattttggcgtggaaggatctagtgatttttttgtgaagaaatttttgaatccttgatatttgtaaggtgggtttcagcgtttagtgtttaatgagtttagtgatttatccttctcttgaaattctcgactgttgtttagtgttgtggactgtgatttatatccttaatttttcttttctaggtgaaaaagagagtatctatgaacttctaatttcaagtgattttctgcacaagctagtgaatgtcaaatagtgtttaaattgtatatgttccttggacttctaaatgagccttaaaaatgctatgcactggttaatttcaagaaacattataaatttaagaaatttgagttagttgctacgagcgtgatgatcacaaaaattccaaatgaactcttaacaaaaaaaataaaaaataaaaagatactgcattatcttcattattctatttactttttttttggataacttttgttttactaacgcttgttccttgtatttggtaggcctgagcccaaacttgtaagtgagattgtgcaat

SEQ ID NO: 55557 - DNA, 898 bp, Populus trichocarpa
  Intron number 2 from transcript POPTR_0021s01020.1 (locus POPTR_0021s01020) derived from phytozome v7.0 (chr-ID scaf fold_21; pos 604132 to 605029 reverse strand)
ggtaagttttcatctgggtgttagtggtgattaccaatatcagaaatgtacgaaagctttcaactttatagtatatgtatcaattctttcgtctgcacagcctctagcatcttaatatcagaaggtttcaagctttgtctagctccttcggtgacctgtgaacaggctcctaggtgtagtgaaatgagaatttcacattcgttttgcatctctattataagagggtcctgaattggattttaatatctgcatatccataaacaaagatgtagatatactatgaatagaagagttattgtaaactttggttgaacaagttcattgtgagcgttgcagtgttttgcctggtcaattttatgacatttgcatatattacagcatgtgatatccaagtttttaactgcctatcttcttcaagcaaaaattaatattcaagtgcaaattcttcaatgaaatactacctctttttttccagtctaaatcttaaggcttcagttccaaggaaagtgattatcaaattgtgattgttatcattctacagagggaacctgagttctgtgttgggaatcaacaattaattcctaaaactgaatcgggcacttctaatataccataccaagatgttgcagatgatggagtctgttcgcatagctgattaaacttgcactttatggctcttttttttccatgaaagcatcttacatcctggggtgctttttaccggaaagtttggttttcttatatctttatgttatgtcaaattccttattcacaataaagatagggttatgagttctgactgcttatgatatacttgtgttcttgcagttaattttttttttttaatcaccaactgtctttcttaatgttcttcttcatgatgccagacttggacttt

SEQ ID NO: 55558 - DNA, 647 bp, Populus trichocarpa
  Intron number 1 from transcript POPTR_0021s01020.1 (locus POPTR_0021s01020) derived from phytozome v7.0 (chr-ID scaf fold_21; pos 605094 to 605740 reverse strand)
ctgcagttgttaccaccattggttgctctcttgatgtatgcctgcctgcttgccttctctcactttttcttctctttttaaactttgtatttgttgtttttcttcttttttttctgtgttttaatatgtgggttttgcttgttttgatgggataatgaatggtaaatttgtttttaatgaaatgggctttcttgttctttttatgattcaaatgggtttgatttaattttgtgaatgataggtttttttctttgattttcattgtgggttttgttgtttttgaaaaaaaaaaagacaacgttttgagtgattctgttcttgaatgatttcaactgggtttcgttcagttctgtaagttgtagtttcccttttgattttcattgaaatttgtgtttgtttttatttcttgatttttttgaagaatgttgaaataattaatttggatatttggaggttgagttagctattgcttttgttattagacttaaggagttaaatttggttcattctgggtttatatttatcttggcatttgtgattttgatgggtttataaaggtgaaggaacttcttttatatttaatttagctctggttttgtttgtattgggcagataatatctccttctaatctgtacttaaaccctaa

SEQ ID NO: 55559 - DNA, 1030 bp, Populus trichocarpa
  Intron number 2 from transcript POPTR_0013s12020.1 (locus POPTR_0013s12020) derived from phytozome v7.0 (chr-ID scaf fold_13; pos 12697036 to 12698065 reverse strand)
ccaacctgacaaggaaactgtcggggcaacttcaggtgcattgatcaatttcttatcttcagctagaaaatatggacattttgatctgcatttaaatttaaattcacagttcgtcacttcctgctggtcttccaattatatagaacaccaatatgtacaagatttctttttccttttctttttctttttctcgtagtttttattgtctctctacttttgactcaagtatagcatggataaaaacaaaaactagggttattaaactctaaggttacattctgaaattatagaaaaatagacagagaaaaactctaatattttatgaaaagttttaattccataatccagaggaaagaaatagtctataaaactatttaaataaaagaaaaacatcaagattaaattaagggttctaatctaagtagaaaaaaatataaaaaaatgagaaggaaaataaagaaattctcaagcaataacttccagcaggtccaattccgaactcggatgaagttatcatgtttttatcaaaagatcattttaacatgttgatacttcttcttgaactatgactttgctcatggtcacctttcctttctttcgttttcttgaaatttcacccttttagttttaattaattgaattgagagcgtgttcttcgttcaataattgtttgtttaaggattactacacagtatacacctaactttctactttagttcttcgcattaactatttttgccttggttgtgaagaagacttgtaactgaaaatgtcactcttgccctgagtttttgagacagacacacatcaatgctcggggttccatgcaccttaaaggacattatttggtcaagagcctttatgggcaacaaggccctggtttccatttaccatttcaattacaggatgaatttgaactttcaacaaatatcttgtctaaatttttcatggcaggatcatgttttacagctttaatcaatacattgttgctgcagaaactgtacagtttagggggtcgcaagtttgcctt

SEQ ID NO: 55560 - DNA, 1000 bp, Populus trichocarpa
  Intron number 4 from transcript POPTR_0006s23690.1 (locus POPTR_0006s23690) derived from phytozome v7.0 (chr-ID scaf fold_6; pos 22421826 to 22422825 reverse strand)
cttagctctgggagctcttctgggaccaggaagaggtacttagttgccttggcagtatcacttttctcaagcttgttatacttatatatcacctgcataggaatgagccagaattcacttgatcatgcatactctgttattttttatttggtaccaatcgtgcaatctggtaaagttttgttgtttattaaatttgggtcactgcttaacattcttattataaaatatagcttgaatattattagttaaagagaaatttatttcacattaaaaagataaagaggttttgttgtaatttataatgcaaggacactaaatcaatagatttggatgttgaagggaagatttggagggaaaagtaaaattgatatatatatatatatatatatatatatatatatatatatatatatatataatggcacttggtactttaatttaagttaattaattaattttcagaattaattaattatgcatgacatctcttgccaagttgttaaattaatttgaaggtagaggtgtgtctttaaactctacagatatattggtttaaaagagtgttattttctttataaatactagtttgatattgacaaaaatttattagaaaacaatcttcttctctccctaatttttctctacaaactctatgtttatgtttataccataaacaaaataaagaagttgttgtttataagtttaagattttgctatatcctgaagatatattgctttaaccatgcaacaaatacagtggaggcaattaatattttaaaaataatgatctttacgcctcaaaacctgtttactatactcactgacattacaattcttgctaactgactatcgtatttcttctttcaaattagaatgtgttgatattttactggtatgttacaactgacaaagtgtaattgactccctaatgttgagactagcaatcacaattctgataaaatcttttttacttcgaaatcttttgcagacttgcttgttg

SEQ ID NO: 55561 - DNA, 867 bp, Populus trichocarpa
  Intron number 2 from transcript POPTR_0006s06320.1 (locus POPTR_0006s06320) derived from phytozome v7.0 (chr-ID scaf fold_6; pos 4507042 to 4507908)
caagtgcctcaggttgcggatctacttggcttgttaaccaggtaatttgttgtgtaaatcttactttttttttcctttttttttccagtatgaaaaaagtataccgattactactaattacagagaaaaatcctataatattacatggactctccattcttcttgtaattcagaagcttaagatgggatttgaagaaattttgtagcttcagtttgatttccttttctatgattttgctctcctttttcttacagcaactacaaatttctttgagaccttcacaattggctgcctgttcttatcagattcactaacccttaaattaagcagctaattggaaaattaaccaaagaggaaaaataaatagagggggggatggaaaattgaaaaaaaaggggattttgttttcttgggggatgatcaggtagaagattatttaggagagggaggaaattatgctttaagattaatattagtgaataagtttgtgtgggttcttttttgaagaaaatcacttacgttaagtattgccatattttcatgtcaagaaattaagaaatattactgcccaagtaaaatgcaggaaaccttgtgttccagcaagtcatctcaatgttctttaacaaattatggtgataattgaaattgctaagccttgcaatatttttacaggtcaattcttattagtgcacaaagaaatgtttcttataattcaaaggatttctatttggtaagtcgcctcatattagataggaaacgcattcctcattctccagttgtgaattgatttctcatattatctaacaccaaaaatgtttcaggggacaacacaactactagatttggagcacatatcacccgtggaa

SEQ ID NO: 55562 - DNA, 724 bp, Populus trichocarpa
  Intron number 1 from transcript POPTR_0013s12540.1 (locus POPTR_0013s12540) derived from phytozome v7.0 (chr-ID scaf fold_13; pos 13189849 to 13190572)
gacatgtaagagtaaaaacggtggtccggttatgtggttgcatttgcatcctttagcatttaaggttttttagtgccaaaacagcaactgagaggacaaaagttaagcaaagaaactagggaatcagtaacatgaacaagtgcaaacaacagaggatcacacatgagtaagtgcactagcatgcacaatagccacattcaaatagctggagccagcattgacagaaaacaactaggataccatcagctcaacatgaccaaaaaagtagcagaagttttgagttttcctaagaaaattacgtagaattccacaaatttctcacacgtttttgcaacatgacacaaaatcaccaccaattcaaacttatgaggccatttttcttggcatcatttcaagggtggaccgtgtgttgagttctggccaactgtccaccgtaagaagtagtgactttgcagtcaaaccaaagtcaccttaacaggggacccaataaggctacaacccattttttgatcttcaatacatgacactactaatgaacattttcagcttataatgtaaagttcaacatgcagaatgagatgaggcaaagcacttataaagcttggtgaatgcctgcactgaaagtctcatacttagtgtcttgatgatgttaattgagagagtttaaatctctataaggggtgcacaagcatacaaaatcccatacgttttgcattaacaaaat

SEQ ID NO: 55563 - DNA, 958 bp, Populus trichocarpa
  Intron number 1 from transcript POPTR_0633s00200.1 (locus POPTR_0633s00200) derived from phytozome v7.0 (chr-ID scaf fold_633; pos 6382 to 7339)
tgttggttaatgaatgagtattattgtaacatatactaaaacgaatcagtgttttactgtgggctgcacagtgcagtccacagtaaaaaaggctgaggtttttttttttttgttttttttaaagctgtttttttcttttttctttgtatttttaaagctgtttttttttgtttttgtttttttgttttttttaataattttttttattaaatttttttctatttagttattaaactttcatggaacgaattccgagtttgatgggttaattataacatatactaaaactatttagtcttttactgtggactgtacagtgcagtccacagtaaaaaggctgagctttttttttgtgttttgttttttttaaagctgtttttttttcttttttctttgtttttttaaagttgttttttttttttgtttttcttttctttgtttttttttaatgaatattttttttgtttaatttttttttatttagttattaaactttcatgatacgaatctcaggtttaacgggttaacctggtttgaagggttaactcagttaattctgatttttttctttttcttcatttaggctttttttttcttttaaaataatctttttttttgtttagtatttttttttgcttttttgctttttttgctttttaattattttttttaaaatttagtttgttaatattaaatttttttctattttgttatcaaacttttataacacggatctcaggtttgacgggttaacccagttaattcagattttttttctttttcttcattagttttttttcttcctgtaggtttttttccttcgttttttttttaattaattttttttgtttaatttagttcattaatattgatttttttatttagttatcaaatttagtttgatttcttactgtaggtttaatttaattcagattagctggctcaacgcaattaggga

SEQ ID NO: 55564 - DNA, 365 bp, Populus trichocarpa
  Intron number 1 from transcript POPTR_0013s08410.1 (locus POPTR_0013s08410) derived from phytozome v7.0 (chr-ID scaf fold_13; pos 7543638 to 7544002)
tcatctcagaagaatttaaattttcgaaggtattttgaacacgttcaacttttaacgcgttaattttacaattattgatttttcttattgagtcgacattgatattgctcgctttcaaaaatacaaaaaaataagaaaaatcaaaatttacaaaaaaagaaagaaaagaaaaggaaaggaaaagttgagggactagtttgaaaacctagcaacacttctcctataaataccatgctacagtgaaaaaacggagacacaggggaggaattaaaaaaaataaaggagggtaaaaaagagaaaaccgtaaacctaaaaccctttctcctgcagctgccaccttttgaaaccaaaacggccgcccctcc

SEQ ID NO: 55565 - DNA, 592 bp, Populus trichocarpa
  Intron number 2 from transcript POPTR_0019s09630.1 (locus POPTR_0019s09630) derived from phytozome v7.0 (chr-ID scaf fold_19; pos 11233089 to 11233680 reverse strand)
gctactctaactgggtgggattcgcggaacattaggtgagcttcttcaagatttactcgtcagagtttgacaaagtcaacttacactatgtttattttgaaatccaacttagacaaggtcctagttgaatttgctgaactaagccatgtttattatcagtaaccaagaaaataaaatatatttaagtgatttgttctaaaaaaaaatatcaataagctagaccattacttcaaattgttcaaacattcgttcagaccgaaaggttcacgaagcaaaattctaaagtaaataacatgtatttttttaatgatgtgcgatgtcttgtccatacaaatatcagaatacagtaattaaacagacgtcgtggacccttcaagatctttatttaaaatcatttattcttatgtagtaaatcaaatatattatatgcttacttaatatctttaagaaatttagcagcgttattaaacccagattctgaaaattagatatgatactttgtgttattttctgtaatttctcaagaacttaaaagatgtattctttacgtttggtagatcagagtctgaacttattgaggcgattgctggag

SEQ ID NO: 55566 - DNA, 898 bp, Populus trichocarpa
  Intron number 1 from transcript POPTR_0019s10050.1 (locus POPTR_0019s10050) derived from phytozome v7.0 (chr-ID scaf fold_19; pos 11675353 to 11676250)
tgtcgtcgtgtctaggctacgtaattttagtgaaggtgagatcaaattagtggtggcgggatatgagaagagactggttcagctcactgtcagatttaaaaataggttaggtggtgttaaaaatattttttttcttgtaaatatattaaaataatatatattttttaatttttaaaaaattatttttaatatcagcacattaaaataatttaaaaatataaaaaatttaaatttttaaaaaacaaaatttcagtcaagtttcctaatactattttagtcatgtgagagaggggatttggatgctagtatggtttgtttagaaagctagtttgtttgtgttaaccggattatggtgaatatttaataaaaaaaatttttagttgataaataaaaaataataacaatcttataaataattagattggtttagaaagaatctaaaatattacgtgttacaaggttcagaatataaattataattttttaaattattacaagtaaaaattaaatcaagagatgattttcacaaatatttataaataaaaattttccgaatgcttaaaataagttcttttgagtataaatagtgagggtatacttcacatatcttcaagacatccaaactatatttttgtaattgaattttaaacaggtaaaatagaaaaaaattgattgaatatgaacaaaaaaattgtatcaatttatttatttatatgtcgacgaaaaaggaaaatgtaaaaaaaaacctggttgggctaatttgagtttaaagattgaacaatttttctatagaaatggtaaagcccagttacatgatcttttgggttaaaagccttgatcacaaaacttcgatctttgccatcttttgccatagataaacatagcagccatacattcc

SEQ ID NO: 55567 - DNA, 155 bp, Populus trichocarpa
  Intron number 1 from transcript POPTR_0006s27060.1 (locus POPTR_0006s27060) derived from phytozome v7.0 (chr-ID scaf fold_6; pos 25082751 to 25082905 reverse strand)
ataacggttctgataatcgttgcttaattatccttttttctgcataagcaaattctcttcttggtgttgttattttgttttcaagtgtttcttagtggattaatgaattcaaaatagaatcttgattgagttttattcttttacaggagaaaaag

SEQ ID NO: 55568 - DNA, 1067 bp, Populus trichocarpa
  Intron number 1 from transcript POPTR_0019s01470.1 (locus POPTR_0019s01470) derived from phytozome v7.0 (chr-ID scaf fold_19; pos 1291609 to 1292675)
cttcagggatcgccggcttgactactgccttttgggtcagtcctcctcctccttcttcttcttcttcttcttctttgcctctgaattacaagtctttgtgagcttgacgctttgaaatgcaactagctgcataactttgactactaatcatcatgaaattaatttctgctacactggaagatattgcagagaccttgtcttggtacagaaacattataatttgtagtgaatatttctatggatcttcagtcctttgaattaattagttgttttagtgattaatttaagcaaattttacttactaacctgttttaattcttaaaatttatttaggggttacattttcaaaattttgagaccatatatagatgcatgctagttttccccttgaatataaaaaaagccttttctcttcattttcagtattgaaacatgagaaaatatctctaatagtagtatagtactgcccttccatgattttcttttcttttctttttttcttaaatcatatttgcatataaagaaaaaactagattttagtggaattttcaacctttctaaaaaatataaataacaaattaatttttatttagctaattcatatagctcaagaaagagctagctctcataaattatttcttaccgatattaatttagtattaagatagtagttatttttaaagtataaataacatttgtttttattttttaaaatttattttttacatcaacacattaaaatatttataaacataaaaaatattaatttaaaattaaaaaaaaaacaatttttttagaatcacctttaaaatacaataacaaaccaactcttaattagtttttacccatgacaagaaatgaatcactagtataacaaataattttagaattgatatttttgtcagattattggagctgactaagaacaagaacgtaatagttttgttttgttcttaagatttcttccatgacgtgaggagagaatctttcaaaagattggtggtgagaaatttctcaagttaactgatgcaggtaggtccaagatcatcaaaggatagagagagatt

SEQ ID NO: 55569 - DNA, 658 bp, Populus trichocarpa
  Intron number 1 from transcript POPTR_0014s18780.1 (locus POPTR_0014s18780) derived from phytozome v7.0 (chr-ID scaf fold_14; pos 16232592 to 16233249)
gatcaaccgccttttcttcatcggaggagagctaggtgagctccttcttcagcacgtgaaaacccttctctcctgttttcatcacctgtgaaaataacgaggcagagcatgaattagcccaggccaaagagccctaccttctagtacaattacccttcgtttgtataacacgcgctcttcaagtaaaacaatcttaaaaaaaggcgggggggcttttacactctctttccattcaaaccaaagctctctttttgatgaaaaaaagtcactaatctctctctcctaacgagttagggtttttttttttttgcttgaaattataatcaggtacattgctatttccttctcgattctttctctttctttaatcatcttgtttggtttcgttttgattattgtttgagaaatccttgaatttagggttctgtggttttgatactaaatcagctcttgcatgtgcatgtgatgagttttgattttgaattaagagaaaaacctaattagaaatgtaattattgagtttcaattaaaatccaaaacggttgttgtttcaatgctaagatcctgaagaatgccttttttttttttttttgaagagttggctctcttgctggttttgattcctttttaacttgcaagtgcaggtatttgactgtcg

SEQ ID NO: 55570 - DNA, 727 bp, Populus trichocarpa
  Intron number 1 from transcript POPTR_0018s00530.1 (locus POPTR_0018s00530) derived from phytozome v7.0 (chr-ID scaf fold_18; pos 466420 to 467146 reverse strand)
acagactcgaaatctgttgggctttgcctgcgcaggttcgaatcctgctgtcgacgcctcttttcttttacctagctatgacgctactggtcgtttggatctcttataattttgcttctcgcaagctattcaggaatatgttcctttctttgtctctaaaaaaaggatacatttctccacgatattggcacacctcttcttttattaaaattttcattcgtttggaatatcattctagtttacttaattttttttattaaaaattaattatttttttatttttatatcgttttgatgtgttgatatcaaaaataatttttaaaaaataaaaaatattattttaatatatttttgaacgaaaaatactttataaaacatccattattatactcacaagcacccttttacactacaataatatatattatttacatcttttttttttggtttcgaaagaaatatactgtagattcgtagaacaacataaaaaggtgctaaaattcactttacatatctgtttcttgcaaaatagaatgagtgctcctcacttcattcccatctcttcttcctctaaagaaataaaatttcttcacaactcctagctatctgatcagacattactagctagctagtgatatggtgcctaacttggacctaatcctccttgcattcctctatggctgtttcattgcttgtgtagtaggagctatcatctttgcaatcttga

SEQ ID NO: 55571 - DNA, 873 bp, Populus trichocarpa
  Intron number 1 from transcript POPTR_0006s17200.1 (locus POPTR_0006s17200) derived from phytozome v7.0 (chr-ID scaf fold_6; pos 15224384 to 15225256)
aacttactagaaaaatcttgtcaaatctgttattagtaagttcgactctctaaaataatattattctccttgaattagatctctgaaatcttctctgaatattattttagatatctagtttccaacacaacttaaaaagcttgactctattaatcaggttatatccttctgaaattttcgtttctgcaaaaatttcttagtgtccaatttcttcttctccttgtatttgtggcatataaaaaaaattattgtttcattctattactgtccaaaatatatcagtagcataaaaaaaaagagaaaaggaaagaaaaaacaaatcgttcaaaaaaacgtttattggtttctgtcgcacgaaactaaataagggaaaattggatcaaatcttttcggaattatctcaaatatgataatctaattactagggtcctaatcgcaccatatattaagtttagggtcaattggatattgtttgctttggttttcaatttcaggtctcattcataatgtttttgcgtcagcatatcaaaccttatcgtaaattactcaaattgtatattctatgtatttgggttgaaatagcactatatccgaaagtttatcccaattggacatcatttactttagtttccaaattcggacttaactcgtcgaaaactagtctgttttgcgtcaacttttgaaattcgctttctttctgttgttttcctttctagcagtatattttcaacatatctaacatatttggaagtggtgggaggttgtattgcataaacatgctatcccactattctctttcattttatagctattcatgaggcttttctgactcaagatatacttatgtcttatagttatcttatgactcaagat

SEQ ID NO: 55572 - DNA, 705 bp, Populus trichocarpa
  Intron number 1 from transcript POPTR_0014s05990.2 (locus POPTR_0014s05990) derived from phytozome v7.0 (chr-ID scaf fold_14; pos 4487383 to 4488087 reverse strand)
agcacagcaaggtttttcttcctttctctcagaaggtaaacctcaagtttcttttctttttctttatcttgattacatgtttttactttttagatgtctcttttttcaacgattgcttattattcgataaaatctgtttctttctagtttttagagcgcttatggtagttgtattgtagagtgtagttgaagttggtgagttgagatatggaagctgttttcttattgggctttcaattctctaacttttatggtgggtatcgttgaattttgtcattaatttctgattttgaagtttaatagctcaagttgtgatgagcttgatggtggtactgttttgtaaattttggcaatgttttattttcaaatgattctatattaactcactgtaatgagtaatctgttactgtcttgtaaaattctcgagagtcaattgctgtggtgtctggagtatatggttgctgtgtgattaagctgcttggagatgttaaaataatttgttatctggaagaagttatggtggctgtataggaaatttttttaaacaaatatgcagttagtttaaaccacagagaactcactggttcgtgaattgtgatcttctttgatctggcaaatgttcttatggtctttgtttccgtgtttcagagattgagaccatatcgtatatgcaaacttggtaaagcttcgtttgcaaatcaagcg

SEQ ID NO: 55573 - DNA, 420 bp, Populus trichocarpa
  Intron number 3 from transcript POPTR_0018s09120.1 (locus POPTR_0018s09120) derived from phytozome v7.0 (chr-ID scaf fold_18; pos 10024500 to 10024919)
aattacactatacattggaaccctactgaagttgtgtaagttcgctgaccatttctgtttttctacaacgttggccttatttgtcgatgacttacagaagtatgatcaaatattcactattcacaaaacaaaattattaatgatgatgatataaaaaggaaaaaaaagggggaaagaaaagaaaccagcatgactcgacattcagattaagctgcacagcactccaagtagattaccaatatgtgcactttttttttccaacataacttaaatagtcttcctgaagcttttgctaaactttcattttcccagcttacttcactacatccaccaaaccagctatctaattcctagataatccagaagcctaattttacctaacttgatatttatcactgcaattcaggtggtacattgata

SEQ ID NO: 55574 - DNA, 560 bp, Populus trichocarpa
  Intron number 1 from transcript POPTR_0006s09840.1 (locus POPTR_0006s09840) derived from phytozome v7.0 (chr-ID scaf fold_6; pos 7235600 to 7236159)
tggtcgagtgcaggattcggcattacaagttcaatgtaagttaaatgctgtagcaagcttccatgtgacgaaagcctgaactgcttgcgctttaggtcattagtctcattcatgtgacgaaaatcttctttgaaatgcatttcgttattagaagatagccatgttttgcacgatgcattgcacatcatgacactgccttggcttaaaatcatgcaactttacccatatctttttcctgactagtccatgattcaaatggaaatcatagagtttccacctacctatagccactattttaaataccagaaaagtttattctcatgcttactttatggttaaataattgcagcagatatatatatatatatatatatgttcaagaaaccattaaaaaaatattaaataggaaaagggtggtaagatctcaaagcactgtagtgacataatttgtcacaacaaattaaacaatatggacagtttagcagtcatgacctttgaattatatacatttgatgtagaaatgagcttaaatatttcacctatcatttcaacaggtggtg

SEQ ID NO: 55575 - DNA, 975 bp, Populus trichocarpa
  Intron number 2 from transcript POPTR_0003s09490.1 (locus POPTR_0003s09490) derived from phytozome v7.0 (chr-ID scaf fold_3; pos 10793607 to 10794581)
ttaaatcacatttgcaggtaatgaaagcatattctcaactgtttttccttcctgcgtgtagtgttcaaactcctttttgttaaataaaaaagatatgttggaaaaattgttctttgttttctctctaactttctaactaaaacttattagctcgagttaatagtgttaaattgatgcagtgttaattgtacttctaagcagaatttgcctttcgatagcatacattacaggaagggtgttttattacacatgtcacaaattccaatgtttccctgcagagggtctctctaatcctttaagcacttatttttctattagatctgatggtgctgctagctaataaacagctttttgcttggaagaatgaaccaggaagggggggggggtatattatcgatttcaggaatcaagtaagacaaagcccaaggaattcaaaacgagtcatagccaagccgcgacaagtttgcactcagtccattatttttcattttaaaaacattttctcttacattgaagagaaaaaagaaaaaaaacccatcattgttcaatgatatgtttcgcagatgggtttatcaacaccacttttttaaccatggtgaatctcatccatgcatgccacatcacctatatacatacatgggctcatcaaccccacttttttaaccatgctgaatctcattcatgcatgccacatcacatatctgcatacatgcatttgtatgggcaaacaaatgattctgttcagagttcaattaatctcactttttacagtttgtacttgcacttgaatcaaaccatctcttgtgtgtgtgtcctacacagcatattggtctctttttctcgttttatccttttctgtttaaagttttcgatattcttcttgctctgttaatcaatgcccatttaagcttaatttctatgcttcatcacaaaattagtctaataatattgtttctgaaattgtgatggatgcag

SEQ ID NO: 55576 - DNA, 770 bp, Populus trichocarpa
  Intron number 1 from transcript POPTR_0022s00790.1 (locus POPTR_0022s00790) derived from phytozome v7.0 (chr-ID scaf fold_22; pos 388938 to 389707 reverse strand)
tcctgtctctgcataggcaaaagaggtgtgtatttgccatttttttcccatatcaatgatgggttcttttcaagttttgatttttgttcttttttttcttgccagtgcatttttttgtggaagataatggtgaaactgtgtaaaaatactatccttttgtcctcatgtatgttaagcttaactttagcttgctggatggaaagcaaaaaccctaaagacaacactgattatatattgaaaacccaaacagaagaatttttcagctttttgtttagtgtctactcatttcttcaatattctcgtagtttatggtttacaaatactattactttgccctcatgtagggtaagcttagctttagcttcctggctggaaagcaaaaaccctaaagacaacactgattatagattgaaacctcaaatcagaagaatatttcagctgtttgtttagcttttaccaatttcttgaatgttctcatagctggaggtcggtctatataattggttaggctgtcagaatgtttgaactcttgttggagcaaattgtagtgcattattactgctaggttaggtgtcattacagtaaaagcaaagtttggtaatcgaacttgtgaaatgagaccaattttgcttatgataatttcttttgtaaaatcagtatataggctgatttgaggtgaatttggattttcttgataagtgtggtttgtgggttttgatgcgattttttttttcttttgcaggttttttataactatttggtaatcgaac

SEQ ID NO: 55577 - DNA, 814 bp, Populus trichocarpa
  Intron number 2 from transcript POPTR_0013s01300.1 (locus POPTR_0013s01300) derived from phytozome v7.0 (chr-ID scaf fold_13; pos 725429 to 726242)
tttcaactgtgagtgttctttcttttctaggtttgttttttaatgttcttgtttttcatttttcttatgtacattttgtgtttgtgtatttaaagttgtgttttttagcttaagtgggtgaccctttatgttttttcttttgttttttggtactcaagtttggttcttgatggaaaataaggaagacccatttcttgagatttgagtaatactgaatagtttgatgagactttgttgaagaagtttagtgggtttgttttgatggaagataatgaagacccattttttgagatttgcacattctgggtttagttatttgatttttttatatttgggtttttgaggaaaaaactagataatatagtggagaattggggtggttgatgaattgtgaactagagacttgcttgtttggaattatggaaatgaggtttaggcataagttcttttttttttgtaaagtaaagactgaggcttggatgagctattttagttctcttgtaggtgcattattttgtactgaattgattagagaatttagaatttagttcagatacctgtgtgatagtgtgaagtagatggcatttttctcgaaagttttggtttttcttttcacggtgcaaagatcctggaaaaactggtcctttatagttgattttagtgtttattgaactaaattgtcatgtaagggtttaatgattcagtcacatgtgcatctttaatttgcttcatgaagattgaatacggttttggcactggggttatggaaagtgttgacacataaactgtcacgaaccaggacaatatatcgagg

SEQ ID NO: 55578 - DNA, 841 bp, Populus trichocarpa
  Intron number 2 from transcript POPTR_0021s00620.1 (locus POPTR_0021s00620) derived from phytozome v7.0 (chr-ID scaf fold_21; pos 316927 to 317767 reverse strand)
ctttgggttagtttttttttttttgtgaatttcatcggttgttttgtttattttttgattgaattgttaagacccatatttttgttttgatcaattttattgaatatatattttggtagtttgaaattcgtgtttttatgaattttttgaggagttgtggaagatattgttaattagaattattgcaaatgtgaagagaaaagaaaaaagcttgatgatcttatttttagtaatttgctctttatgttttgaattgtgaataatttgggatgtttgaatttcaagttactgttttgatgatcttgtttgcttgttcatgctgtgatttcttattaggtaggtatttagtttgatatatgcagataagataggcttatttttggaaagagattctggggcgtaatctggttttgtcttaggtgacatttcagtgtgatgtataaaagagtatttattttcataatgaaactgttggacttaatacagtttgatatgaagagctcagatgtgtgtttattttggtacgagactcatatgagtttgcaatgtgctaatgtggtcagggaatttcgctaatttcattgtttccaagtattctgtcttttgtctcatctatgcttttctttgatgacatggaagaaatcaactttataatgagatttgaattttgtgactgattgtaatcaattggttggatttgttaaaaacaacaaaatgaatgtcacctttttctttttccttcttgttaacatgtagatcctatataaaatcgtctaccgtgcatctaaaatttggtcttacttcagagaggaggcaagcagaagcttctcgcatcagagag

SEQ ID NO: 55579 - DNA, 457 bp, Populus trichocarpa
  Intron number 2 from transcript POPTR_0006s25990.1 (locus POPTR_0006s25990) derived from phytozome v7.0 (chr-ID scaf fold_6; pos 24279323 to 24279779 reverse strand)
tgcttgtgcctttcctgctgcccgtgtcagaaaatgtaagttgctcccttttaatagatcaagaattgatagatagatgttaatttttttattattatttaaagcaagatttggtttctcgattgcttctcggtgtttattgttatgatcttgttgcttgcctttatgttctttgaatctttttaacatttttgggatttgtattttaatttactttggccagcttttaagactcttttttcgatttactctgattataagaatgagagatatagagctgtttcaaccgcagaaagcatgttgttttcgcatcatagggtttgtttttaaggaattcttctgtttgagcgaatttagaattgagggttgtttttggcaaacagtgacgaatttgtatgaatgttttgtctttggtttcttagataactggagtgtgaaggctatccgcagaaagacc

SEQ ID NO: 55580 - DNA, 379 bp, Populus trichocarpa
  Intron number 2 from transcript POPTR_0006s24660.1 (locus POPTR_0006s24660) derived from phytozome v7.0 (chr-ID scaf fold_6; pos 23244724 to 23245102)
caagaaactttgtgaccacaagaactccgacccaagtagccagtcacgcacagaaatattttcttaggcaaaacagtctcactaaaagaaaacgacgccctagtctcttcgacgtaattatcaccattatttctatatgcttaattatcaccattatttctaaggctgtgtttgttttgcagtttgatttaagtcattttttggtttttaattaaaaaaaaatcacaaatatgtttagctggaacaactttttacttgaataaaaaaatcattacaaatttaagtcaagattttacttccattaaaagttgaaattcctagctttaacttataaattttaccaaacataattcaaaaattatattttgacaggttggga

SEQ ID NO: 55581 - DNA, 349 bp, Populus trichocarpa
  Intron number 3 from transcript POPTR_0006s23420.1 (locus POPTR_0006s23420) derived from phytozome v7.0 (chr-ID scaf fold_6; pos 22147721 to 22148069)
ataccagaggtaaagatctcgtgttgatttctataaattaattggcatggcgttggttttgtagctaaaggaaacacatttctgtgatgaatttagttgttcagtgctgtgaatttggtttatccaattctcaaatttgaaagcctagtccgtcagtttgttttccgtatttttctatcaaattacacaaatgtgaactctgcaagctcaaaaagtgacaagggaagctcctagaagaaatgttgattcaaggaattgatttacaccctgctttgatatcttacctaatcatgcttggttactgggaggagttaatgttgatcttgttttgatatctgtcttttagatt

SEQ ID NO: 55582 - DNA, 781 bp, Populus trichocarpa
  Intron number 1 from transcript POPTR_0006s03280.1 (locus POPTR_0006s03280) derived from phytozome v7.0 (chr-ID scaf fold_6; pos 2087488 to 2088268)
agccagctcaaaagacacccctgctcttcgtgcaggtacggagattctcattttccaatttatatttgcatgcctgtgtccacttactccaccatctgccttttagtcctagctattgaattatatttgatgacaattagctcagttcatgaagtcgcttggcatatttcttttacgcgtgctgcctgaatcaattttttctaacatttgagatagctaggtttattggggtttctttttgtttttgttttttttttcatttttaaagattcaaggaattgaagaaggcccaaatgtgactagggtaagccctaatagaagcatagaccttattttgtttcttagatgaagctttgaaatatgtatatttgggtgatctataatttctatgaggatgctgaggtttctaatgctggtgttccatgcttgtgggttttttttgtttccattacttcttctttgttgggaggaggggatgcgtggagcaatgtgggtgctcatggacatagttatcaaacccgatccaagtgtcagcaaaatcttagaattgatttggccgaatctcacccggttaggctaaatcaacaagatcagctgagttggttatcggtcatgtgagtaaccagtggggggatatttgtaatttgtcagaggttttctgcattaggcctgtttgttattaaaaaaaacgtgaggatgagaagaattacagtgtaaagaggaagatttttttttatttgtcacaatttaatgatatttgaaatttagtttcttgcaggaa

SEQ ID NO: 55583 - DNA, 855 bp, Populus trichocarpa
  Intron number 3 from transcript POPTR_0003s19860.1 (locus POPTR_0003s19860) derived from phytozome v7.0 (chr-ID scaf fold_3; pos 18483320 to 18484174 reverse strand)
gttgctgcaaaagagaaaaccagcagtcaaagaaggttggttaaggcaatgcatttctcatgcttctgttttcaaatttaatctatcctctctctttttttttaacatttttgctcaatggaaatgttaaattaggatcttttaatgccatcaccattttctgttttccattctcattctagaaataaatttaatttttccaatattaacaaaatctatgcaagttttctgcaatgttgattccagtgaatttgtgcataatcaccttaatccgaaaaggagagctaaacacacacatccaagtctaaatgagtggcacaacatacatgataaattttactagatttaactaagagagagagacaaagaatgttaaacaagtgcaataagtttattcaaggacgaatagaaggaaaacaagatctgtacaaattcactgaaatcatcaatgcagagaacttgcacaactttagataaacagggcaaaaatattaaatttcccttcaaatttaatgatcatctgcagattcatgttacattacattttaagcaagaaaatttaagaactcaaatcatcttctaatcggctcatctatgtctaaatgggatacttccagccaaaaccataagctcttttgatctgaaactcgattttttgttgtaagcgacaatgtgattgtttcttgttccaatgggtttgttcctttacatctcgtccttcccatttcaaattattcaatttgtttgcacaaaattattaatcaagtctttatcaatttgtttagagtatggcaatctcaaactttcctgtcattttcctcatggattttatgagtatactgcagggtggttaag

SEQ ID NO: 55584 - DNA, 690 bp, Populus trichocarpa
  Intron number 1 from transcript POPTR_0006s00760.1 (locus POPTR_0006s00760) derived from phytozome v7.0 (chr-ID scaf fold_6; pos 399857 to 400546)
gagctactcactcacctcttctgttcactcctcaggtgtgttttttgtgtttttggttgcttttgttttttatgttctatgaatgaatcaactaaattgtttgaggatttgattggtattgttagtttttagatgattctggattgatatcacatcatcttcgttgtgagattctattagatgctgaagaattttgttagtttttagaaagtcttgatttggctgtattttgtgtgggaatcagaaaggaaattgctttagctacttttaacgtgtgaaaagatgtgaatagaattagccatagggttcttgctatgagattctacttgggcgtggacacgattagtggtttctaatttggtgccatgtagcttgtgttgtcaatctggaacaaagtgtgcatttcgatttgatgtaaatagggattgagctgttatttttaatccgacaagatcaagtgttacatgaactaaaactttgttggatcctggtgatattcattttaatatttagtgctatcctcatgtaacttgctcttcttcatgcccaagaaaatattttcgttaagctgagttatttgctttatgtctattctagtgtgtgcttccatctacaaccctattagagttgctatcttttaattgcatgttttttgttgtcaggtccctgtggctccattgcaaagacctg

SEQ ID NO: 55585 - DNA, 524 bp, Populus trichocarpa
  Intron number 2 from transcript POPTR_0013s11020.1 (locus POPTR_0013s11020) derived from phytozome v7.0 (chr-ID scaf fold_13; pos 11695360 to 11695883 reverse strand)
tgcttgccaggccaattgctctcattggttttgcggtcagtttctatctgcacatttgcttcctttcatgttttgctgattgattggatctgggttctttctgggtgagcttaaatacgtgaatgcaatgtcggtttttatttttatttatcttttattcaggaagaagattttgatgataccattcaagaaggataaatgattatcttttatgggttttattttgtttgctaaattaccattgtaatgatgcttgatttatagtttatggtctgcacagttgtctattggaacataattggtttggggtcattttattatagttaaagaacgaatttttgtccagttatgtggtcaaaatgcataattttatctgtttgttttgtcaagcctgttgaaatgatatttggggggtttggttaatttttttgttctccttctaacttttgggttctagactgttaagattaaacctgcaggtaatttaacattttcttcacttggtatttttaggtgattgtatt

SEQ ID NO: 55586 - DNA, 698 bp, Populus trichocarpa
  Intron number 3 from transcript POPTR_0003s01650.1 (locus POPTR_0003s01650) derived from phytozome v7.0 (chr-ID scaf fold_3; pos 1522275 to 1522972)
accgtcaacggtgaaagagaggcaaccagaagtgggtctcaacaaactcaatcgcttgttgctgctttctgaggcaagttttttttccctcttgaattgtatgctaatttgagctagctagccagccagctaacatgtttgttatggattcatttagctatatagggcacgatcgcgcctccattaagatgaagggtttagctttaggttatttagattgtttgtttgcttagccaatttggtatttgagttttaggctgcagtattttggagagggatgcacttttctttaatgagtagaaaaatgatatgtttggattcagggaagtcaatagaggttggtaaatttcattgaaatattcatatacgcttacaaatgcaaaaatatcaaactttaagagtagtggttattcacactcgtggtgctattttttttttaaaaatggatgctttgaaacaatggtgtctgctatcaaacaccttttttaatggaaataacatgaacaagctatggaactggtgcatctagaattcagaaagtattcatcttctataatttcattgtagaaatgtgtcctcagatgtactggatttgttctgttcagaagtcatcagccaatttatttgctgcagtctttgattttgatatcataacacggtaaacaatttttgttttcacagagatttacaccgagagg

SEQ ID NO: 55587 - DNA, 784 bp, Populus trichocarpa
  Intron number 3 from transcript POPTR_0019s08530.1 (locus POPTR_0019s08530) derived from phytozome v7.0 (chr-ID scaf fold_19; pos 10044388 to 10045171 reverse strand)
ttgtgggttttgatactttcagcgaattcggactggtaagcagtaactagctgacatcactataaatgattactaatttgagagatttgttcgtcattttgctcatgttagcgatatcatatgctaacccagatacatagttcattccacaaattaaattgtgaatatcggaaacatggtatatgctttttatgatttcttaaagtcaacagatctgcaactatccatgaaggatattgagtttgttgttactgttgttgcctttcaaaaacaatggttataaatatcttggaattccaaaaatatggtttttgaaatgtattcaaaacctactgcattctgatataccttttggttcagaactctccttttgtctacttaatcactatcccaaaaacagagaaaaagaaaatcaagttttactttgcaaaatggtaccacacaggctttagacattaccatgagcctatagactgcttctgcaatgctggacatcaccaagtttagttggaagtttagagctcggtattatctatttctcaaatgcatggcatctgttacaaaattcagttgttattttgtttttcttttaactagtgaacccaaatgctgtaatctctacctttaagaagagagtacgttgtagcaacactttttttctctctcttaccttgaatcattctgacactgatatcttgtttctttattcttgctatgattgtgtaagaatgcattattcagttttgaactttttgtcagggaaacgaagatcttatcattgttc

SEQ ID NO: 55588 - DNA, 571 bp, Populus trichocarpa
  Intron number 4 from transcript POPTR_0003s04710.1 (locus POPTR_0003s04710) derived from phytozome v7.0 (chr-ID scaf fold_3; pos 5702917 to 5703487)
tctttcttcaaagagcgactggtgagtttgtcattttgcaatgcatatacatgtacatggaagaggctgcaatatataataatttaactttatgttatttaggtgtttctggtgtttatggcttatcacatggaagaggctgcaatatataataatttaactttatgttatttaggtgtttctggtgtttatggcttatctgctgttttgtttcattttaccctgtaaaattagctgcacacctttgatactatgcatgaagaaatttcttcttggttccactatattgcacaaagtcttgtccattgtaattttgatctcaatacacttgactggtgatctgggaatccattagagaatacatgagattatgcacatttaatgaacaagtcaaatgaagtatttctaaggtttacttattctggaaacattcttacctatgttgccatgtgattggttccgtgttcctcctataaagttggataggttttgttggactctttttttctatgtttagattctccttcctgatgagtcttggttttactttgaagcctttctttgagtttca

SEQ ID NO: 55589 - DNA, 1025 bp, Populus trichocarpa
  Intron number 1 from transcript POPTR_0013s10430.1 (locus POPTR_0013s10430) derived from phytozome v7.0 (chr-ID scaf fold_13; pos 10729848 to 10730872 reverse strand)
ttatcatcactggagcttcttctggcataggagaagtaagcaacccccttccttctcaaagcataggagtgatctctcgtttttacttattttcggtgctctatttgcagatttgagtgtttaatgctgtgatttatctcattagaaattttgagtaattaattataatgcaagcttgtctccattccttattagatggccaactgaatttaaggatcagacttcaaaaattctaactttgaagtatgatctttaaattccattgaagcatagtcaagggtttttataggatggagatgggttatgtccttgttgtaatcaaattaactagacttccagattatgcattatcagtatctggagatttaaattagaacgccaatgccgcattgaaggaaaagggtatcaagcaaattgacttgcctacgtaaacaaaattaagggatttaattgaagtgattaagtgtatattgaatgcttagacaaagccgcaaagatagaataaaagtacatgcatggcaaacagagagtttttggttgagctaatttcaaccaagagttcttgaaattgtaaagaagtgcatgaaggcagcttgggttgctgcaaattgttacgaactctatataaattatatgcagagttctcaatcataacctgaaaaacacagtgattttatcaagccttcactggacacattctgcaaactcatagcagaggcatttatgaaaccacttggaaatgatgtggtcaaattatgtatcaaatagaaaccgaaagactggaaattatactggtgatagaatcataaactcttgcaattttttgtacttgaacaaaagcttatttgttgccatgcgtggaggccaaaccttacttctttaccaactccccccattcccagttttattttcttcccataagcgaggtcgatattttataatagctgctgcagttgcatctacaagccattgcagtgtattgatcatttaatgaacttgctggttgtaattgcagcaaattgcat

SEQ ID NO: 55590 - DNA, 433 bp, Populus trichocarpa
  Intron number 1 from transcript POPTR_0019s09880.1 (locus POPTR_0019s09880) derived from phytozome v7.0 (chr-ID scaf fold_19; pos 11498732 to 11499164)
ggattcacaggttactaggtaactatagattctcatcttcaacctttttttctggaattatagcaattaaaatttatttataacaattaagatttcttgtgcatattatagtttttttctctcctgtaaatcaattgtgcttctaattagttcatagtacttgttgcttcaaaaggcacaagtctgttctgtttttttgtggaaaactaacttccatcaacagccaatggacttccaccttaatggaaacctcacctttgacaacattttcttataataaaaaaaaaatcactggagcaaattatctggaagatgcttacattcaccattttcttaatttgcttacattacttacatttttttcttaaagatacaatttgagttaaggatgcttctttcattttttgcagtccggagtccaaactagtaacag

SEQ ID NO: 55591 - DNA, 417 bp, Populus trichocarpa
  Intron number 2 from transcript POPTR_0006s05210.1 (locus POPTR_0006s05210) derived from phytozome v7.0 (chr-ID scaf fold_6; pos 3671277 to 3671693 reverse strand)
cagtgtcagcatcaggtgatttttgaattttgtttgaaggaccttattggaatgattctaaacgtaagcttacttcctgaagtttaaggacataactgacttttagatgacattcagttgatcaatcatctttctattacatttaggtgagatgggatagagttaaagaatgccttacatgatagtttgttgctggaaagtttaaacattgaggcggtactaaaatctcacactcagtgggcaatatcgtacttctaaatttggcaggcagctgatacttgtctgctttatttgttattttgtctaagtagttgcttatgaaaactattgaattctttaaggacttcgtgcctttccctccaaaggaagatatactttgtattatgatactaatagagattttcctttttctggcag

SEQ ID NO: 55592 - DNA, 171 bp, Populus trichocarpa
  Intron number 1 from transcript POPTR_0018s04960.1 (locus POPTR_0018s04960) derived from phytozome v7.0 (chr-ID scaf fold_18; pos 4404141 to 4404311)
actggtctctctacaaacacatagacctccccaaggtgtcaaatttcttctacttcacacttgcatcaaattcttctgcgtagaaatcaacaaaataatttattgttttttctttttggtttgttttccttcaaaggtatcagctttaaacgaggcagttccaggaagtgc

SEQ ID NO: 55593 - DNA, 654 bp, Populus trichocarpa
  Intron number 4 from transcript POPTR_0018s04960.1 (locus POPTR_0018s04960) derived from phytozome v7.0 (chr-ID scaf fold_18; pos 4405019 to 4405672)
agagcgtaagttcaacttccatgttgtgttgttacttcttcattgcagttcttgaaattttgcaagcgggagtaattctgaagcttctacagatggtagatgctgctgatttaatgtagtttccgcaactccatagaacttactcaaagctgttttaattaaattattgaatggcctcactctaccttgtgtgtgtgtttcagaccccaatgttcttaccattatggtaatatttaggcaacttttaacttcatattttgtcttatatttagattttttttgttgcattctccctgtttggtgtgataatgtttgagtgttaatgcatccctacaaagacagattcaagccagccttattgtgcagcatcaatgaggcattaccatccaacctagttagcatacttgcctttttcattcactcaatgtatgttcttgttgagtcattggatgtacaatgattgttaagctatgtaactttcccatccagatcagttaggctagtttttttagtaaatatataaggaactgatgttaaagcagtgttttgaataatacaaattctctttcaatattctctgctgtgaccgctttttgtaacaaaaaaaacttagatttgcttgctctttaaaattatttaggtttatcaatcgag

SEQ ID NO: 55594 - DNA, 598 bp, Populus trichocarpa
  Intron number 1 from transcript POPTR_0018s14330.6 (locus POPTR_0018s14330) derived from phytozome v7.0 (chr-ID scaf fold_18; pos 14569303 to 14569900)
tgtgacaaaggacagtgctaagtcaacagctttgttgatttcttgtttcccctgttggaggcaattgacaagagaagaaattactttcctgtggtgtcagagactggaacttcaaattcaagtcatagggttctgataagactagctgttggtgcttcgctaagacagttaaagactgtttgttgctgtgtaagagctgtctacgtgaacatgaaacctgttgcgcttgtgccacaagttcatccgtaagtgggagacatcaaagcttgtcatctgtgaacattgatgaaatctttactatgctaggctcttttctctatcagatttctgctccaattgcttgaaggtgtgttttgcagaccctagactaatgaaccattcaaaataacagcttcaaccattttcaacttccatatcttccctttaacatgcatgtgatggctaatgacaaaggggtagaattcaactttagatggcaatggcttctaaatgcagggttcgttgcgtctttcttcatttgtatctgtcaacaagttcgttttattatttgttgtaattttgggcattgacttgatacttgtggcattagtgtaggaac

SEQ ID NO: 55595 - DNA, 394 bp, Populus trichocarpa
  Intron number 1 from transcript POPTR_0019s08180.1 (locus POPTR_0019s08180) derived from phytozome v7.0 (chr-ID scaf fold_19; pos 9656189 to 9656582 reverse strand)
aaacatcgaatcccttgtcaaatctgtctatcaaggtaaccaattctccctctctctctcttcttttgattgatctacgagaaaccccggcatctttaattcttttcttgcttgatctaatttgattatggaatggatttagaaagagacgtgcactttatttatgatttttgcggaaaacccagttcggaggttgtacccacccacccgtattgattcaactgggtcgggtgaagtcgagaaagaaggaagtcctattatgttttatttcctaaaaagtgggtttaaccagcttgccaactgcatacgcatgcacatgatggaccgctctactttactagccaaaattctcaaagcaactcattgttttaatcttttgtatttccagaggctg

SEQ ID NO: 55596 - DNA, 662 bp, Populus trichocarpa
  Intron number 1 from transcript POPTR_0006s00380.1 (locus POPTR_0006s00380) derived from phytozome v7.0 (chr-ID scaf fold_6; pos 161828 to 162489)
aaggagatcgagaagcaaaataaatttacagagtgccaagtttactcagtttggacaaacctatgacaaattatttacactttgcaagaaaaatcagtgcgaaggccatgatggcagctcgataaagtagattcgaaggctattgtctagggactgggaggtggtctacacacacacacacacacacacagaagccgattcatgtgctaacttggtttataaatcgttgcacttttaaattagaacgaagaggatgttcaaagatttttggtgcagaagtaaagttttttgtttcttttgctgggcctaggatctgttacaattgatttttattcttttacttagagtaacgaagcctaatttgtgtttgaggtgaaaacatatatagctgtggttaagtgattggtaacggcagcttgttaaaattgaatattttgtattgatgatttgctgctgggattgacaaggaatgaaagtccttttttttttttttcctttgcagagatcatatataacgacatgagtttagcctatgattatatgtaaacttactgaattagccacccagaagaaaatctggtgccatgttttgagtttatgattgtgctactctgtgctatgtttaagaagaaaacttgggctgggaaagattgcaaaactta

SEQ ID NO: 55597 - DNA, 641 bp, Populus trichocarpa
  Intron number 1 from transcript POPTR_0018s13160.1 (locus POPTR_0018s13160) derived from phytozome v7.0 (chr-ID scaf fold_18; pos 13600899 to 13601539)
tgaagagattgttgaaaaagcttcttttcctttttgtaagtttgattcttgttttaaggttctttatttgatgatatgtttgcctggctttaaatggtggatttgtttatctttggggtgtggcaatggttgtcttgttttgtttcgatgattgttattgggttgcttgaaggattgtgttactgatagtcttttggtttgcttatttgtttggactagtagttatggatgtggaactttgacttcataattcataaattgcctttagtatgaggtgtggggtaccgtacttggataaacaggtgattctgctaagagtggggtatggcattttgaaagagaaactgatggtgctcaatgtcttttttggttaatgatcataatcattcacaaacctcagacatacttttacatttaccactccatgtctatatagtgcatggggtgggatcattttgctggtgttttggttttcttgtttttatcatcaatgcatccccaagttcccttttgcaccgtttgtgacttgtgaacatttttgtagaccatggaacattttcttgtctatatactatacgcgtgttgacttttgccttgtgacagagcttaagacctgaatcccattttatcttttcctgtag

SEQ ID NO: 55598 - DNA, 464 bp, Populus trichocarpa
  Intron number 1 from transcript POPTR_0018s10990.2 (locus POPTR_0018s10990) derived from phytozome v7.0 (chr-ID scaf fold_18; pos 11811704 to 11812167 reverse strand)
ctggttctttgtttttggtttttttaaggaaggaggtaataacactctctctctctctctctctctctctgtattctcatcattctttctctttgaagatcagaaattcagataggagattttatcctaactggtgcgctgctttcttctttcttcttgttttctctatttatttatataatattctggtttttaactgaacttatgattcttttaattattggaaaactaaaggtttatctggtgctgatccttcctgttttttttttttttacttgtcaccgttgaaagtgaccgttatttaattatcttaacagcgatttttcttttttcatgattccttgtaaatttgaattttgtatgaagttaattagtggaaaattctggtttgcttttttccaattaattacaggactctgtatattctagagagcttgtgctgatttgattggtaaaagctccgc

SEQ ID NO: 55599 - DNA, 731 bp, Populus trichocarpa
  Intron number 1 from transcript POPTR_0018s03670.1 (locus POPTR_0018s03670) derived from phytozome v7.0 (chr-ID scaf fold_18; pos 3130495 to 3131225 reverse strand)
gcaccgttacaatcttaaacgcaaggtgtgttctttttgttgtttctttgcttgggtttttgttgttttctttgcttggtttagaggctggttggagattattgcatcactgtttttttttttttttgaggagacaatgtttttaaagttggagaatttgaggttttctgtaatgacaattgctgtgttgtgttttttcagttaattgtaattgagtgaatgatttggttttgtgttcattattactattgacaatgatgatgacttttagctctacagtggcatgattttgtgggttaattgagattaaactagccaagttttgatattaagaaatactttggaagtgtagaaagtgggctttgtttaggaataacaatacatgaaagccgctataaattgctttggcaaaagaatcaacatttattgcgcaattggatatcaaattacggattttagctattgttctttggtgatatcagtaagaggattaatgatatggtttggttttaattaaaaattcattacgggttcttaacgttttactattttttggaattttgttgaaatttaggttgttggtgttctacaagtgctcagcatatcaatatgagccaaaattgtgttgtctagcctcaataattcacgacaagttcttaactttttaatatttctgggtctgttgttaaaattcaggttgctggtgttccgggagtgactgaagcattgtt

SEQ ID NO: 55600 - DNA, 280 bp, Populus trichocarpa
  Intron number 2 from transcript POPTR_0014s04530.1 (locus POPTR_0014s04530) derived from phytozome v7.0 (chr-ID scaf fold_14; pos 3492219 to 3492498 reverse strand)
ttgcaaattcagctgaagaatctaggagaccacaggcatgttttgttgatttggtgctaaatatgcaaaattctaatcatgattttaagcatcatgaacataatctgattgtataaattttgttttcctgatttgtttgatttttagtgggacttgccattaggcatcatccgaagccttttcaaatgcattgcactttgtatttggagtctgtttggtgatcaatgggatggtactttactatcttcttggggaagacgctccttaggttgaggctttt

SEQ ID NO: 55601 - DNA, 384 bp, Populus trichocarpa
  Intron number 1 from transcript POPTR_0003s18200.1 (locus POPTR_0003s18200) derived from phytozome v7.0 (chr-ID scaf fold_3; pos 17380323 to 17380706 reverse strand)
cttctctgccactccatcttgtcaaattctttcaggtattcgttaattatctgtttctttttgttcaatctgtttggttcccaagaaaatgtagggaaacaaagaaaagaaactgtaaagtatgtcactttacgggaactgttttcctgcgagtatatcatgattttgcttattcattgagattctttctgggtactgttgtgtgtatttatacgtatttatttacgtgcgagtgtttatgagtggtggggtatatctgtgggtcgcatgggttgacatagttgaatatttggggatttgcttaggcgttatggatggtttgaatgcaagaaaaatggttggttttttatgattaattgcttttgattttgttctcagcaagaa

SEQ ID NO: 55602 - DNA, 399 bp, Populus trichocarpa
  Intron number 2 from transcript POPTR_0003s20770.1 (locus POPTR_0003s20770) derived from phytozome v7.0 (chr-ID scaf fold_3; pos 19206890 to 19207288)
attgcctggttcatcctcttctctcaccccatctggtaccttctctttcttttttccttctcccccagaaaataaatcatgattgcaaagtcaaaagtttcattcttcaatatcatactgtctgtctaaaagcttgtacttaaaaaaaaacgaaaaatgttattgaattacatatatgtagtagaggcatgtatttaagtggttgggcggttatttttcaatttactctttttctgtgtttctttttttaaagaaaatgttatcgagttatatatagaagatgggcgacagatttcttccttttatgcggcaatgctcacggttcctactgtattctgtgtatcaattgaaagtattgtctgtttgtgtcgtgttgcaggaacatttcctctgacaagt

SEQ ID NO: 55603 - DNA, 640 bp, Populus trichocarpa
  Intron number 1 from transcript POPTR_0003s19320.1 (locus POPTR_0003s19320) derived from phytozome v7.0 (chr-ID scaf fold_3; pos 18088253 to 18088892 reverse strand)
tgtccattctcttaatcaaacccacccaccagaaggtcttttttcttctttattcgttgatgcttattgtgtttattttgctgggttttaggtagtgttaaagtttgaatctttggcttgtgagatatgatatgttatgatgaatatgtgtgtgattgcggtttgattgtgtttagatggttcttataccatgatttgaaacttggaattcttttgtataataactttaagctagcctcttcaatttgttggtggatatatgattatttttcgaggtctttgcgttgttctgcttgatgagtttttggttggcgagaaaggaaaaggaactgaaatagtcaaaaccatcaattgcagttttacttgtttatccatacttttaaagtggatcctgtagctccatttaactgatgatgaagttaaaaagattcaggcttgtgttgtatgatatatcaagcttttggcaattttcattttgttcaagatcttggctgcctcagctacttgtaatagaataaggtgtttcctgtgaattaaatatggattgtttttgcttggcttttctacatctactagatgtttcttgatctttatgatattgtttcttgctaaatagggattttcttttgtctccgcagac

SEQ ID NO: 55604 - DNA, 539 bp, Populus trichocarpa
  Intron number 1 from transcript POPTR_0003s11650.1 (locus POPTR_0003s11650) derived from phytozome v7.0 (chr-ID scaf fold_3; pos 12429008 to 12429546 reverse strand)
accactcccaggttagtttcttttaaaatcttcatcagtttgcttttgcctacttttgatttttttttttaaaagcttttcttgagtttcttcgctgttcttgccttcttgtttgagtttcattgtttctcctgccaattattcttgtgattttcttcttgatttgcaacctatctggtatcaactgtataaaataaacaatttgtgtgctaatatttttttttttgcttggcatcaaaatctttactttccattttttttcctgaaactggtcgccaaccccacatcacatgcggtctgatttcaaatctccccttcaaatcttttccttttttataccaatttaaattaattttgaagacttgtaatttttttaaataattatttgactttgtcttgtgattttcatacctctggaactttaaaacctctcttaccagacttttccaataattccttaactttgaaatttaaactcatgtaaaacgcaattcttccctgacatggaccttcctgtgttcacagggtcgtcatcgaca

SEQ ID NO: 55605 - DNA, 823 bp, Populus trichocarpa
  Intron number 2 from transcript POPTR_0088s00260.1 (locus POPTR_0088s00260) derived from phytozome v7.0 (chr-ID scaf fold_88; pos 77192 to 78014)
cattgaggttcaagtgtagtcttacacatcatcaggtacattttctctgttttgaggttgcagtattgataatacaccaatccaagggtaaatgtgagctacagattcaaacctttcgggagttcagtgctcaaacatcatattccgagaaatgaagtcaaaagatactactctctgcattgatgttcagtgttccttctctaaaacagaaagcgactctgtgtatgaagaaaagaaaatgcaattaatttaaagtttcttagtctttgcaatctgcattctttattatttagcatctcttctttgttttgtgcccaaccccaatgcccctttaagtgttcaagaaaaggaaaccaaactctgtccaccgagaaaataaaaatgaaactaatttaaatcttttattccttgcaagctgaatatctctttaatatttagcatctcttgcttgctctgtatcaaagcaacctaattttaagatttttagtcacatatgttgatttgcaaaagctgattgcaggagctttagaattataggcaaatacatcttggaagttgcatctttctattttatggcattgcaacccgtaccttctttttgcttgtaacaacattatgcagcgattctttttttttcttgatacctcaactacaatccactgcagaagtaatttctcataagaatattttcactcgcccgctgaaaatgtgcaaagcagcaaagcctttgcctatctagctagaatctcttgagaatgaaaagatattggataaactcattgttttattcattgagaggatgactatcgttgattaggttaag

SEQ ID NO: 55606 - DNA, 986 bp, Populus trichocarpa
  Intron number 2 from transcript POPTR_0013s03270.1 (locus POPTR_0013s03270) derived from phytozome v7.0 (chr-ID scaf fold_13; pos 2012134 to 2013119 reverse strand)
ggggcccttctagagcattaattgctggagttctggtgagcactggtctctatatcttcttctattatatgaaaaaattatcattagttcagttcaaaattatagtgctttagtatgctttcctctctttctcaccagctacaaaccctcctacaaagactttggaccacaacatcatgccaaaatttacagtcgacactagcattttttggattttgatcaatctgggagaaagctctacattttgtgctctataactttgcatttcttagatccattataacaatgtagatgttgtcaactgaaatatgtaatgaattgatatatccatgttgtttatgtaagttaacattgcaagtttggtcctccaccaacaagccaccacttagattgtcacagctccatttgaactggactttcattaaatgatcgtgctgtctcttttttcaaattaactatcttattccaaacagtaatttctctagaaaaacactgtctgggaaatttctgggacagtaatacttgtaatccattaatgctaatccatcttagtacagtcatctgaacactgtagttttttttttttttgaaaatgactatactgggattgaaattataagattttcttattttgacaattttgcaccctttatttgtgtctcctaggaacatcctagcaatgaacataatagctagtacgatagtaaatattatttatggtaaagaggaggttgagcttggtatgaagaaagaataaaataaataaactgaatacaggacaagcaattcatggcttcaggaaaatgtttttgaatcttctttgttctaattgactttatagcttgcttcaaatttgcatcttcatagtacatcattctctaatgtttcctcttgttacttttttgtaacttattcatcatttttatctcaaaagtcaaacatattatattccagacaataagtttttgtgctttctcttgttcagg

SEQ ID NO: 55607 - DNA, 921 bp, Populus trichocarpa
  Intron number 2 from transcript POPTR_0014s08230.1 (locus POPTR_0014s08230) derived from phytozome v7.0 (chr-ID scaf fold_14; pos 6105055 to 6105975)
tacagcagcagcagcagcaacagcagtctaggcaggtaaggtttttcttttcaatttatcaaatttgattaattgatgcgtgtgattagtgaattccagttgtaatcaatgtgattgattagttttttgaattttttattaatcacgagtttggaggaggcacactaagcatgcatttaatcttaggagaagattagggcatttaaattattttgaggtgtaattaagcatctgagtttgctcgggggtttgtttcaatattgaagatcaatgacaactaagcgcgggtcctgctattgggtattttgttttagcagttggcattccttatctgggtgatgtttaatcatgtctgttgttttccttgttagtttatgtggatattattattatatttcatttctttaacttttttttagaaaaaaaataaagagcccttttttttttattgggattatggaataatcctgcagaagtatcatacttggtgttcatggtggaatctgtctaattttatggttcttgttatctgtcgtgttttgccggcattgttttttgagctgcaattttagatggaggttttttttttttttttgtactgaaaatttatggcgcagtttgcataaaaatgaatctgtagatgcatcatgcattcatttattttgctttctcttttagattcttgtcaatatgaaggtgcagtggcgattctagtgctcggttgaccatcttcgtgcttgtttccaaatccaattttgtgtgctttgtgaattgtatgatattgtgcttatttctaagatttccttacgggcaagggtagtttgcgctttcatttttaggtgaaattttggtagcatttgttttatatttctaactgtgcatgcaggcattacagcaacaattacttagaaaacccgaagg

SEQ ID NO: 55608 - DNA, 878 bp, Populus trichocarpa
  Intron number 1 from transcript POPTR_0006s20080.1 (locus POPTR_0006s20080) derived from phytozome v7.0 (chr-ID scaf fold_6; pos 19158002 to 19158879 reverse strand)
catcttccgtttcacaactccttcttttgcttgaggtaattttttttccttttatcatctctccactttactctttctctcctgtaattttttttttggagtaataaagggtgtgttttagggtttctgttttctaagtaattgagcttttttattaaattaaattttctgtttctgccaacattttgttatgtgggtgggaaataaattacaactatcttgaatcggctagagtctgctcttttttaggaggtgttttttttttagtttgtttaatgaaacttaggtgtgactatatcagattaatttggttcgacttcaatgtgcgggtgcatcttcttgtaagctttggtttggttgatattataaacttttcttttccaattttgcactgcatttcttttaaagttacaagggtgttctgaggttgatgttgcatgtacactttaattttgggttttgagtccaacttgaagtaaaataaagttcttgaaatggaattggttgaagtttgtcctgctgtggttatgccaatattcagtttgaatgcaatctagaatacgttttggacttcttttggttatttgactgtcaataattttgatcaacctgaggttcctagtaatcttgttgattatccgacttgtactgggaaatgtcacacaatacttaaaagttaaatgtctcaacctccgaggtgaagatgtcggttggagtgttttatctattaccctctatttactatctgttaagctcaattcttcttgtctctctctgtttaaatgcagatgcaaatgcattgtctcattcattttccttttgttttcttttcctttttcttagaaacttgaggattgtttaaagagagtgaatcagtc

SEQ ID NO: 55609 - DNA, 806 bp, Populus trichocarpa
  Intron number 1 from transcript POPTR_0019s15410.1 (locus POPTR_0019s15410) derived from phytozome v7.0 (chr-ID scaf fold_19; pos 15953855 to 15954660)
cagaggtatgaaaagaacaaaaaagtcttggcctctttttatttattattctttttgttcatagaaactttgctcatttggtataatttgttaatcaaagaaaagtttctagctataaaatgttttatcatacttttatctttgttttcatggggttttggtgaacattatatcttaattctctagtttctatccatggttttgtatgattaagattaaagagaactatgatttatgataaaatggtgttctttataatatgttgtctaattagagtaaatatcatcatttgcaaaagggaaaaaacatagaacacatgaaggaataaaaaaacgtgtactacctggctaggctctcattcataggctaggctagggctaatttaatggagaacatgattgtcattgccataagttggctatggcaccatggaagttaccacagtgacaaatgtatgagaactcatgaccaaagtggagattaacaaggactagaccccacatcttgtgcttttatttttatcactttgaggaaattgaaaaggaaaagaatatcctgtcatttctggtatttgttttttgttagggatccatttgtttggatgctagaggtggcaaaaggttagactactctagaaaataactcataacattgcaaatccatggtttttttaattaatcccaattaattagcaaggagagaaagaagtcttgagttttagagacttgactaaagtttttatgattcacaatttggttcctatgattgcagtgaccacagcagaaaacggaaagagagcattggag

SEQ ID NO: 55610 - DNA, 999 bp, Populus trichocarpa
  Intron number 1 from transcript POPTR_0018s01880.1 (locus POPTR_0018s01880) derived from phytozome v7.0 (chr-ID scaf fold_18; pos 1699091 to 1700089 reverse strand)
ggtaaaattgttaatctaatttaattacttcgtttaatttcaaaactagtttttattttagtctgttttttttttcttaattagacttccatggatttttttataattctttgtaattaagtattatctcagtatgaactgatcaagtagttgctgaattgtgatttgatcgatggatcttgtcaacgctgagtttgattaagaggataattaagttttaattagaactagtttagctgttttttgcatatggaaagtgatgattcttggtatgaagttaatttaggcgaaccggactggcattctatgtgacatcatgccaaatcatctcattaattgtatctcgattgaaacaactctgtgatttaattcggcacgtgtttgattggttgttttcatttggcatgtgtgtcctaatttggatcgcgtgtttagtatcgcgatcacaggaaaactctgtaggtttactatcgcattctaaagaacccggtgcatcttattaagtaagagctgatttaacaaatataaatgggatttctggttgtttatttgtatatttttctttgatttttcattattggaattgagagtcttgcgtctgctggtagtaccatgcagcatgcatcgacaagtttagaggttgtaaatgaaaatggtgtttttaaccaggatcgatgcttgaagacttgataggaaatgtgaaaatctatagaatgatggttggaagttgttgaatttgtcaagtcatgttgtgaacaacatagagaatggtatatttgcatcccttatgtagcttttgttttttgtttccatgactgatgtattgatttcttttttttttaatgaggttttgcatccgtaactggcctgtcattttgtgataacaaaatgcacgtggttttttatagtcttcttctgctcaataaaaattttcaatgcatgaaaggataagaattctttttttttttttgcagagtgcgcgagaaaccatttggcctc

SEQ ID NO: 55611 - DNA, 910 bp, Populus trichocarpa
  Intron number 1 from transcript POPTR_0003s14100.1 (locus POPTR_0003s14100) derived from phytozome v7.0 (chr-ID scaf fold_3; pos 14275275 to 14276184)
atcatcagatctgctcttcctttgaattaatccaggtattgtatctctctcttatagcatctcttaattcgcattttgattttttacgaagattgaagatggaaatctttgggtgcccatcataattccttagaacgttagcatcttcttcgttcttattttgctatgttagaaatcatgtgatgatgggttgttagaaatgctatttatattgtaaaatgcattgttgaagttttctctgaaagaaattactttggcagggactgtcgtgggtacaggggatattatatagttttttattttaatttggtttctgtatttttttttttaagtttgcttcttttttttttaatgaaaagcattttgttctgtactttggttcagagggggattctaagtttaattccagttgttctttttttatgaatctggctcaagggtcattgtcaaagttgtgcttgtttgctggtggagatgaagattgtgagcctaacttatgttttttaaaagatttttaatggaagaaaatttgtgaacttgtaaattatgaattctgttttgatgggaggtatttgtgttttgtgggaactgcaaaagtattatgaatggggaaactttcgtatgggagggtttatgtatctttcaaatggatttattactttgtataagtttaacttattggagaatgttcttcttggatggcttttttgaacagcttcatcaactttgaaatattgcatgttcaacacttagtttgttccagtaaaaacttgccgtcaggttaacttcgttgttatttttcttgtgaaagaacccgacggcatgtgatctatgtatccggtaaccactcactgttttttatctgagcaatgcagtggcgtcttggtggatatcaagaagcagcagcagc

SEQ ID NO: 55612 - DNA, 443 bp, Populus trichocarpa
  Intron number 1 from transcript POPTR_0003s16470.1 (locus POPTR_0003s16470) derived from phytozome v7.0 (chr-ID scaf fold_3; pos 16060615 to 16061057 reverse strand)
agcttgctaaagcctctcaggtactcttcactcctctccctccctcgttcttgctttgccttgatttcgcagcaaccaaacacgactgctgcttcttcttacttaaataattttcattttgtgtcggtcaattgcaactttttgttgttgttgttgttgaatagataattgaggattttaagcttaatctgatctgatcagagtcttttgagtttgtttggataaaaataataatagtagtaataattgtaataaagggaaagcataaacaatgaaatgattggtttggttagtgaatagattatgtataattactttaataaaccattattttaagctatattaatgatcgaatgtttgctacttttttctgtgcttttgatctcttgggattctgtttctgtttcttataaaatttggttgctttttattattttcaggac

SEQ ID NO: 55613 - DNA, 284 bp, Populus trichocarpa
  Intron number 1 from transcript POPTR_0006s25760.1 (locus POPTR_0006s25760) derived from phytozome v7.0 (chr-ID scaf fold_6; pos 24143061 to 24143344 reverse strand)
attccccccctgcctcctctcacaacttcaaccaggtgagattctaattctaatctagctcttaataatcacgttaatcactttcaattatcttatcattatcctgtttcttcagctttatctaacctgtaccgattgttggtaacctgtttggattccgagaaccagaatcaaaactcgagagaaaagttttttttaatttttttttaatgagttattaactgataatttatctccgtaattatgcagttattgaagcgcgattcggttaatttacttttgga

SEQ ID NO: 55614 - DNA, 851 bp, Populus trichocarpa
  Intron number 1 from transcript POPTR_0014s08780.1 (locus POPTR_0014s08780) derived from phytozome v7.0 (chr-ID scaf fold_14; pos 6506546 to 6507396)
ttgttttatagagagctcagttttgatatctacaggtttggattgcacttaatttttgcttctttagtatggaattgacctttttgaatctgtgttatgtgttgcttttatgatcatggctgattcttatatagctgttgtgattggaaggctttcattgcgaattttaggattgttttaactaaagattacaattgaacatggatttattgtccctgttttccatttggtgaacaataatgatggattatcagtacaggcaattggaccaaaatgatcaaattgcaagagtttcggtagtaacggaagccgctagataggaatatgttgcttgtcttgtggctctaaggttaaaagattgtttgccttttattgccaaggatggatattactgatttcagtcttcatctgtccagaaacgttgagctcatttgttttgatagtcttgttaaattaagaggtgcgcatgcccaagcagaagagtattgttgccttgatctttaatgttattttccaatagggttgggctacaaataggttcctgaaagtttagatgattctcccaaaataattgctgatggtatgcgactgtcatcaggtaggagaaaaggcagtggtgcagttttcactgtcatttaaaagggtttgcgtgaacatgttttatgatttgcaaatttgtaggagatacaatgcacgcgggcacatagatacacgaacacatggtaaagctggaatgaggtccttggtgatctatgccaaataacttgcatgagaattattctatttggtgttttagaggtgctcttataaggaaattattttcgttaatggattctgtgcttatttcaggg

SEQ ID NO: 55615 - DNA, 866 bp, Populus trichocarpa
  Intron number 1 from transcript POPTR_0014s03760.1 (locus POPTR_0014s03760) derived from phytozome v7.0 (chr-ID scaf fold_14; pos 3003862 to 3004727)
gagattctgataccaccatcaaagctacatccctggtaattaatcctccacaccaattaacccatgctatagttcatacccaattcaaataattattatcctctatgcttagtcttttaaggattaactcaactacctataacattaattagactataaataaactatagattaataaatgtagaaggctccgcaattcttattttaacattgaaaagaaaaaaaaagttgcataatttaaacaatactttctgcattcctcaaccatgccaagaggcaacattttaacaagttttatgttcattgccaaaaaaaaaaaaacaaatcatgaataagagaatattttaggagaatatacatcttttttgttgaatattttaaggggtaaaatatgctaagatctcctgaactattagttaaatatattatgttaaatttattcagcttagataatcatttaaaaaactaacaaaaaagaaatattcatattaagttaacttttcattcaaattgaggatagtatttgtcatgtgactagcataacttaataaaaaaaaatctaatttttaattttaattttctttgaggattatctacattaaataaattagataaaaactattgacactttgacctatttaaagttcgagacattttaccttattttaagttagtaataattattagtttatttgaatgaaatagaaaaagatatagacatatttttcaggatgaggctgaaattatgaatttttttaaaaatgtaaataattattagtctatggttgcttgagttaatgggctacagcttgcggaatatcactcttgcaggcccttattctggcagcctcagacacgacagcagt

SEQ ID NO: 55616 - DNA, 763 bp, Populus trichocarpa
  Intron number 1 from transcript POPTR_0003s14980.1 (locus POPTR_0003s14980) derived from phytozome v7.0 (chr-ID scaf fold_3; pos 14886843 to 14887605 reverse strand)
acgagggatctatttctccaggaatcgactcagtggtatgctcctgccatttcttttttaatttttaagcatgtccttaattatgttggatatagacattgccatagattctgcagtagatgcattatgcatcctatgtaactatgctccagaaggtgtttcatgtcaaatcctttgcaagaggactataggactcgtaaccttttacagaattcagaattcttctttcaacatctattattgagatatttgtgcctttaagtaaatgcactaaagtgcactacaaaatgatatgtcaaggtttgatcttattattcacattggccatatctgattctctagccatattgtatccataatctgaccaactctgtttatcaattagttgtcctgcagggtcatggctcactatgtccctgaagagacaatcattcactagtgccctctaaatttgtttcttatcaagggaattgcttacgaacctattgaaatttatctctgaaaatatcttcaacagttattctatcaactctaggtgcagtgcttgtttccattctgaacttggcagagtactttagcctctgtatctggaatctggattatgaccgtggacattgttaatgagactagtctttcgaaacataacattattatgaaactcaaaatgtctgcaaattcaccggcatcttcaatatacagatctttgattaatagtctctcatcatatatttatccagacattttcttctagtgcttgagaaag

SEQ ID NO: 55617 - DNA, 687 bp, Populus trichocarpa
  Intron number 2 from transcript POPTR_0006s27900.1 (locus POPTR_0006s27900) derived from phytozome v7.0 (chr-ID scaf fold_6; pos 25730525 to 25731211)
tgtgagtatccccatttttttggtctttttttcaagattaatgattgtctttttcaaagttagattttgtgcgctcaaattttgtaagtaatttggggtttccatggtttatttgatgtcaattgaggtctcttgaagtgggattttggctttctcaatttgtgattttgtttcaaggagaagatgctttctgtgttttgattgattttgaagagtaaaggtttttcgttttttggttttggatttctatggtttatttgatgttaattcgaagtccttttctgatagcattctcagtttgtacattgttttgttttgattgaatttttttttttaatgttctggctcctaatttgataaaaggagaagtctttttctatgttctggatggttaaagaataatttgaagtcgctgtttcctttagttatacatgactgaattacgtggattaatttgctttttagatcaagaatgtagtgtcattttcttgcatttgttgttttctgttttttttttttttttaattattattaacatgttatatatttgattttgacaagtcatgttccatgttattttcttgaaacagtttttgcatttaattttacactactgtggactaaatatggttctgttaacaaaattttgcaggaacaaagctgccattgttaaagcaggagctgttc

SEQ ID NO: 55618 - DNA, 709 bp, Populus trichocarpa
  Intron number 1 from transcript POPTR_0006s24830.1 (locus POPTR_0006s24830) derived from phytozome v7.0 (chr-ID scaf fold_6; pos 23356236 to 23356944 reverse strand)
ccaatctattctccttctacagattgctaccagaggttagttcttctctcatatcttttaactctcttatttctttcttaattactactttctatttgattttcatgctaaaaaacctaaaataaaaataaaaatccccaacttgtttgtgtttgctttcctggaaacgtagcaaaaccgaatttattttcatgcaaatgatgaattcagctcagacaaattaatctctcttgctattgagaacgaatttgattaatttgactatttttttttttttaaaaagtaacatttgtaaaaataaatttacacctttttttttcgggtgctaaacaatgaaaaatcaaacaagttcttgagtttcaattgaaaatcttcaaaaaaaaatttctgctactgaataatgaagaaaatggcattcgaagaaattctcaattttgaactatttgttgcattttgtggctgaaaatgtgcgaattcagcttactgattttgagctagatgttccattgtatttagctgttatttgtttgttcctctgctattctccagttggctgacttatatcagcaggtcttttaaaacacgagtaatctgtgaattattagtgtacattttgttggcaattgaattgggtgtttgatgcttggtgctcttgtttttcttggattctagttaaacaactggtatcaaacattcagttcgattcagt

SEQ ID NO: 55619 - DNA, 696 bp, Populus trichocarpa
  Intron number 1 from transcript POPTR_0013s00990.1 (locus POPTR_0013s00990) derived from phytozome v7.0 (chr-ID scaf fold_13; pos 522942 to 523637)
acagatctgcttcagcaagggcattagctaaaagggtctgggcctcttttcatgtttgtttgttttgcaagctaattagtggtttttatcatctggattggtgatgctttggggtataaacttataaaaacttattttgagcttctgggtttggcatagtagttgaattaagctgcttttactggtatgtcacaatgtgtttacggtatttgttcaagtttgttcctttcttgctgtttgcttctttcttggctctctttgcatctccttagaatctttgttgttatttctcgtggcgcttttgtgttgccagtttaaaaaggcgcaagttttttgtgaaggtaaaatcatgtttgttcatggagtcttcactggagtgtgttttgtgcgagttattgttggcgtttaaaaaagaaggaaaaactcatggccttttttcttcttatcactattattttttgttgaatatttgctttttggcatgttttggtcatgcttacactatttgaaccctctctcttcaaaaatctgatttggggttattgatgttttaatgttaaatatttatcattcttgtttcgttaagttgtgagttatattcagtactttttgattcatggtcagtggcttaaaaattgcagtagaatttagcagggttttaactcttgcttctttgttttcgacaatgtacaggag

SEQ ID NO: 55620 - DNA, 364 bp, Populus trichocarpa
  Intron number 1 from transcript POPTR_0006s12910.1 (locus POPTR_0006s12910) derived from phytozome v7.0 (chr-ID scaf fold_6; pos 10100422 to 10100785)
gttgaggtattctctccctcttccttttcttttaaagaccctccttttatttctctgttagctttgcttctgttttatggttttaattcttatgtattttctctaaattgcaacatttatttgaagttaattatagtattttgagtgttctcagttttttaaaagatacattttttattccatacggtttttagtgaagccaatttaaggaataaaagattgcttgtataattgataagatgtgttgatgggatgcaataggggtccttatggtctagttttagaggttggattgccctttatttgaaagattagtaaccatttgctttaatgtgctgaacttgttattttttgaaggtaaaat

SEQ ID NO: 55621 - DNA, 572 bp, Populus trichocarpa
  Intron number 1 from transcript POPTR_2119s00200.1 (locus POPTR_2119s00200) derived from phytozome v7.0 (chr-ID scaf fold_2119; pos 829 to 1400 reverse strand)
tcaaccaaagtcaacgaacaggtaaataattttttttaaatattaaaacaatatagtttaaaatttattttttaaaaaattaatctggatttcactggttttttttaatcaagctaacttgaatgtgaattcaaatgctaggttaactaaatataataaaattaatttctaatataattcaatatcaaatctaatttagattaaatcggattaatctactatacttagtattgagttttttgtaataataaatagaatttaaatgattgttgtgtttaaaatttcattttatcatctgaaaaaaattattaaaatgtgtacatttaaaattattttaaaaaaaaatctaatctcatttaataaattaattaatctgatgatacctttaattaaaaaaagaagaaaataatagtaagtcaataaaaccgtttttggtcttgggtaaaaaaccacaggaagggacagaccaatgggcaaaaaacaagccttatctcatttccagatttcccttctcctttctccggttcttcttcccagctgtcgccctttatatcttccaccggtcagcacag

SEQ ID NO: 55622 - DNA, 1013 bp, Populus trichocarpa
  Intron number 1 from transcript POPTR_0003s08970.2 (locus POPTR_0003s08970) derived from phytozome v7.0 (chr-ID scaf fold_3; pos 10255537 to 10256549 reverse strand)
gttgtgtcttgctggtttccttcttgagttttaaggtaagttgtataaagggttagatttgttgttgttgttcttgttgttgttgttgttgttgtttgtgtgtttggttcttgagagatgaggaaagtcaggtttaagagtatgaaggaggtttatgagaatagtagtgaggttattgagtacaaggtagaattgttgttcacgggtttcttttcttattttgaagccccctttttctttttcttttctctttgtttggggtgctaatggttcatttttttttagagaaggtttgagcttgtgggttgattcaatttcgaaagatcataatctaagttcttttcatttcatttcatttttttttcagtttgctaataaaactggttttttttttatattggtttctttgtttttaagggattagaggtggtgttgttgactatgttcttttgacctgtttttggtcttttcttttgtgtgaaggaagctgagtttgtccattttgtttgcttaatgtactgggtttcgtttctttatgataaagctcaaatcttttttattatataaaattacaactgctgattaattcatttagcctgtgcactggtaggagaagacatgatatatcatatatgtgatcattaacctcaacttttattattgttttggttgttcttgtaccctcagttttattttattattgtgaccactgccgtactgcaatggaaatgtgtgatataagcaactattgttttgtaagtgtttacgcagtttctgagtaattaaacagcaggaatacgaaataagcctttcattttatcactgtgatctgaattaatcatgcaaacatgttcattttgagaacttagtttagaaagagaaaaacgtttgtgttttgttatgagctgtgacaattttattggtaaggtgatttacagtggacattaattagctgaattttttgttattgttttatagatcgcgccgacatttaaagtcggttatccggtaga

SEQ ID NO: 55623 - DNA, 681 bp, Populus trichocarpa
  Intron number 3 from transcript POPTR_0018s03390.2 (locus POPTR_0018s03390) derived from phytozome v7.0 (chr-ID scaf fold_18; pos 2991598 to 2992278 reverse strand)
agttgggtacgcttttttgtttactgcagtttagttttctgattgtaagtttattgcttgaacttttggttatttaactgtatggcttggtagaggcctgctaaaaaacacgctggtggattctaattatcttttatcagagtagttcttaattaatgcctacattgtgtatcaatcttatttgtctcatctctctcccccttgataatagatagatggatgattggtagatgtgttaattgcatgccttatgtcatggaattcgaggtgttgataagctatcactttactatagctagtttcatcacctgatttttttgtcaagaagataagaccccacgatcttggctcaatttatgtcgaaatttatgcattatcattttcaaacatgatggttttattgcttagtaaaaaatttaaaattctttctgtttaattctcaattttttccaacttctttttatgatgccttgatttaattgtttcaattgccttacactatttcaaaaactattttttttaaaaaaaaagtgttgctagtaataaatgatagggttatttcttctttatatgcaccgataaatcttgatacttgctgcacagatgttattttacaagcaatttgatttattttgctgttgaatcattttagttaatcaattatttctggagcaggaaaaa

SEQ ID NO: 55624 - DNA, 869 bp, Populus trichocarpa
  Intron number 1 from transcript POPTR_0003s19760.1 (locus POPTR_0003s19760) derived from phytozome v7.0 (chr-ID scaf fold_3; pos 18411302 to 18412170)
gcagctaccggtgtattgcaaccttgcccctgcctgtaagttttctcagatcccatctaccaaaatcctttctaacttcttaaaaaaaaaattcttttttacttcacatatgcaaatatgcaatctttgtaaatttggaagactgaggactggatgttatgttaacgtagtgttaattagaggcccttttgaagaagaatttctgttatcttgagttgtttgattattcagtttttcatgtttaatttcagttttattatgctcagtaatttaaattttagttggccttggaccctgtaaactatccagcctgtttaattatccaattttctttagtcaacatgcattatagaatatagactgctgaatatgtggtagtagtagtggtcagaaactgtgtaaccgtaagcataattttcttgtatgctaaagatcgatggtatagcaatggagtaataagggtgtttttggtaatgcgtttggactgcgtttaaaagtgcttttcaaagtgcattttgatgctttttcatgtgattttggatttttgatatgcttacgttataaccatcaaaaagcacttgaaaaagcacctacaccaaaataccaaacacacaatgaaaggagcttaaaacacttcatggtggtgagccaaagtgtcaggcttatgtgagattcgtggaaattatagggcctaatagagataagaatgtgaattttgtgtaattatgccgaatggggaacctgcaaaattggtttctgatgatttataattagggtaaagaaaacttcttgtcagattctagttaggttttagggttctgagatacttgcatgatttacgagaccctgcatctctcttgagcaggaaa

SEQ ID NO: 55625 - DNA, 694 bp, Populus trichocarpa
  Intron number 2 from transcript POPTR_0003s13980.1 (locus POPTR_0003s13980) derived from phytozome v7.0 (chr-ID scaf fold_3; pos 14203329 to 14204022)
aatatctcaaaaacgttgaagctgaggaactggtaaattttcaattcagggtttgtttaactgagtgaaagtattgcttttttcttaccctcttggttgttggtgtgattgtgtacatttgtttggtttctaggtagaaaagatttcagcttagggtctcgagtcactggctttatgttgtttagggttttgttatgaaaagagggtcattttgtctagatgaatgcttgtatttggtgaagtgggattggatatcggaaactgttggacacaaattggtttcgtgattgattcttaattacacaacacgaaaatattttaatcttttttccagcatttagggaaattgatagattccataacacctcaagtccaagtccacgaccagacttgtgaataaaagggcaaaaattgttttggattatgacaactgctgcaatatttatttgtgaaattctgtatcatgaaacttgtgacctcaagccgtaatgtcaaagaaaatgcattatgttttaaatgggttgctttggtattgatctggaagatgatttaatctttgatggtgtggatagattacatatgtataatgtaactctctgcttattagatttattgagtttactcttaaattttctcctctgatttttgtcttggttgttggttgcaaagaacgcggatttggttttgggaggag

SEQ ID NO: 55626 - DNA, 766 bp, Populus trichocarpa
  Intron number 3 from transcript POPTR_0003s13980.1 (locus POPTR_0003s13980) derived from phytozome v7.0 (chr-ID scaf fold_3; pos 14204155 to 14204920)
aggtatttttttccctttttagtttagtggtttgattgttgattgagttagttcccagtgggtttgtttttgtggtttaatgtcccaactttcaatttgattgaaaaccattttgtaaattaatgtacgctggtgaccaaaaagatgctatgtacatcagcaagaacattggtgaaaatgaggcaatgttcaagcacattttgagatgacaaaaatactataaatttagctactgaagccttttttaaccttgtgaatgttaaaatggcatatgctgttttttaatgaaaagtttaacaaatttacagggctagaagcctagaactaaaattgtaatatggaggcatgatgagaagtaaaacgtttctttgcaaaacacaatgcactgtcaagcctactttcatgcccttaaaggtgttctatagaaattacaatagaaattgaaaaccacgggtgtagctggtgtttacaataaccaatgtacaaaaacattgcaacataattttatttatgcaacaccttacactagaatatataaatcttcatttcatggtagcactttttaaaggaggttgaaaactttagttcaaaaccaaactaataatctgaaggtgcaagttcagaaataaatatttatccacacctgtggcagttaatcagtgttctattcttccatgccttctcttaaataaaattcgtttggttaaaatttatcttacatttaacgtgccttttgctgttgccacatacaaaagattgtggagtt

SEQ ID NO: 55627 - DNA, 927 bp, Populus trichocarpa
  Intron number 1 from transcript POPTR_0006s01060.1 (locus POPTR_0006s01060) derived from phytozome v7.0 (chr-ID scaf fold_6; pos 602131 to 603057)
ctccgctagaactttcagagttggagacaaaatttgtaagccatctctctccccctctctcgctctttcaatatttcattttccgaaagattttttattctgatgataacatctgtttggctgatgagaaatgtaaagaaaatcaaatccatgcgcctctgaaatatactgattttatgctatgtatgtatagagagtgtttgttgtttggtttcaatgaattcaaaagcataaaaattgtatcatttttccaggaaaactcgtgtattttcatggattctatagaaaactatcaaagtcttgaattataagctgtcgaagaaaaaggaaagaaaaaaagaaaaaaggggtgcttgtaaataagaaagaaactgaaaggttcagatttggtagtaacagattcagcttgattaaaatcatatggcagatttggtagtataaactagtttacaattgcctaattacttattttgttatgaaaattactaattttttttttatcaagattggaaccaactcccagatatcttaatataataaagtgttgcaaatccaaattttagaatatatactgatatttttatctaatttttattcttaagagtgattttgataatgaattagcatagtaattcctgtgttggacaacttaatccgagttaattaaaccaattttgtttttttattttaaatttaaaagctaaaccagtttgtgggttgatttgtcatgtaattccaagtttatttatttattttacattgggctagaaggagtgtcgaccggcggaaatagactaggtttaataatagtgtggattttattacatttgtatgtgtattttgatacttgagatttgctagtaataatattttggagctgtggtgagggcagggttcacccactcagcagcacagggtaaaatagct

SEQ ID NO: 55628 - DNA, 906 bp, Populus trichocarpa
  Intron number 1 from transcript POPTR_0013s03660.1 (locus POPTR_0013s03660) derived from phytozome v7.0 (chr-ID scaf fold_13; pos 2328216 to 2329121 reverse strand)
tctcttttgatctactacctgtttacatcactcaggtacctcccttccctttcttttcttatctttttctttgtggaatctgtagatttgattcactttctttttgtcaatgtaaaaactgcttctgtttttagtctactttgcatttcctggagctgcatttgtcttcccaaggtcccttgggatcttagttgtttaacttgataagttttgaagttcttgatttgtaatgtagggagataagttgatgaatttgtggtctttgtatgtggtactttaggtagatattttttttgtacagtctcccccccccccctccctctccctgtctgcttttttttttttttggtaatgagagtgtttggttactcagaaaatgaggtaaaaggaaatatggtctttaggatgcttaactatgcaacaattaggggctggtaagaaattgatagtttcatgaatagttgagctttatacaatgaaaatagtttacttgatctgttcatagaaaaaataagcattttgccactaaaaacaaaacccacaaatattcatttcatttcccttgatttcctcttctttttttggctaataaacatacaattaaattttttcccccatttgtgagattattggatgattttattattcatgtttacctaaaatgctctcataattcttgtatttcttagctttcaagggccttcccagttattttattttattttatttttggtcaatttcgcgcagttcctttctttgttagtaaagaagtttttggtagcttatagtatatgcatttatggagtaactttacagacagtgtagctttttcttgttattaccttattgcattctctttatggcgttgaagatttctttttgtctacatccagagaagcaagtcat

SEQ ID NO: 55629 - DNA, 401 bp, Populus trichocarpa
  Intron number 1 from transcript POPTR_0003s18380.1 (locus POPTR_0003s18380) derived from phytozome v7.0 (chr-ID scaf fold_3; pos 17484686 to 17485086 reverse strand)
aaaaccggtcaaaaaaccggcatttcgaagcccaggcaatcaccaatctctcttcttcctctctctatctcttcatcgatcatcttattgttacgtatgttttgattaaacacctaattaatgcctctagttacgctcctgtgcgacgtcgtttacagcactcaaaattaaaacagagcaatttttttttttaattttccttttctttttgaccgttactttatttggacgtcgtttatagcactcaaaattaaaacagagcaatttgttttttaattttccttttctttttgaccgttactttgtttgttgtttggttgctgagaaaaagaaattgtgattcttcttatttttttatgttatttttattttttggaaatttagaggagaagttcatagag

SEQ ID NO: 55630 - DNA, 356 bp, Populus trichocarpa
  Intron number 2 from transcript POPTR_0003s10190.1 (locus POPTR_0003s10190) derived from phytozome v7.0 (chr-ID scaf fold_3; pos 11280977 to 11281332)
tatcttgatcttctccaagctgattacactgaagggtgagtagttacccgttatttttctttcatgttgactcttattaaatactcgggcaagatgcaaaattcagaaatcaaatgctgttattttgggtgtggtttatgagatttctataatataaagattttcaaataattctgagtttcatctagtgatttatgatgtgactagcacaagaactgcacaacaactttccgaaatgcttccaactgatagttaacagtcgtaatggtagtcatatgaagttggatgccaattaatcaattgaaactcatagatgacatgtccaatcaaatcatatcttggctcttcatgcagag

SEQ ID NO: 55631 - DNA, 810 bp, Populus trichocarpa; identical to SEQ ID NO: 53961
  Intron number 1 from transcript POPTR_0006s03390.1 (locus POPTR_0006s03390) derived from phytozome v7.0 (chr-ID scaf fold_6; pos 2160489 to 2161298)

SEQ ID NO: 55632 - DNA, 669 bp, Populus trichocarpa
  Intron number 1 from transcript POPTR_0021s00290.1 (locus POPTR_0021s00290) derived from phytozome v7.0 (chr-ID scaf fold_21; pos 84748 to 85416)
tatctctccttttttattttggcttttcaaaatctgtgagcatctttaaattttttcttgataacccatttttattaatgtatttttgtgattatttttttttgtaaaaagttagtttctttttgcgtggtggttgttaatttttaacttgtttctttgttttgattaacttttttttgtaagtttgattaaagctggttggaatttggattatgctgttaaattagagttagtttgagtcagtttgcttctccttttgtgtactgaagtgggtttcagtaaagtttctttctttgttttggaatgaagagctaggtgctgattattttctgctttggtgtagttgaggcttgaatagacataaagggtttggaagttttgatcttttactttattagttttgtagaagtgtaaagactgaataaagaattgagctttacctgagccaagatcatgcagtggagaactgcttgtttctgagtgaaatttcatgactttatgttagacttttgatttatgattattgaacttgatattagcctttttcttgattttgcatgttaatcactttggattaatgtgaatgatcatattggttattgtgttttctgaattggactttttttttttttttttaaattttgttaatgtgaatttacaggtgtaaaa

SEQ ID NO: 55633 - DNA, 925 bp, Populus trichocarpa
  Intron number 6 from transcript POPTR_0006s24210.1 (locus POPTR_0006s24210) derived from phytozome v7.0 (chr-ID scaf fold_6; pos 22857300 to 22858224)
gtgatttctcaccgcgtgctgttaacttagttaaggtctgatctcttaccctttactagctgatttattgcaatgatgattgaacatattcaagaattttactatttcattttgttttatttttctgtaagaagtaactgtattaatcagaacatacattggatctggcacttatgttttatgaaggtaaagttttagaaatgatagtgtggttaaaagttattactctaaaattttaaatttctgcattattgacactgttctcttgatgaatcgagattggacattatatgctcaggtagctgcaatagtatttatctaagaaattcttctgctcctaattctggcatcgagcatcgcaattgcagttgtcttgacccatgtccattaaatatgtaaccaatattgactcatttatcctaattcttctcgcataagcccccaccctctctctgaatatagtgaaccaccatttttgttttcatatgtctccactatgaagaaaatatgatagattgcattacagttgacttttgtataatctggtatgattgcatacattgcaagggtcaaggaagcattgatttataaagttcttcaagatcacacatttctttctttgagattaatagttgttgttttgattttgacaatatgttttatcttcgtcaatattctgtgtgctgaacttagaattgtgcctttagtttataaattgatgaaatagtggcgtgatcttagtgggcattatgttctattttgatcacatatgaagcttggcaaattttaccttgaactcataatttctgtttctgcatttgttttttactgtctgcttataatccgtatttttttagcgtaagtaggtctagtggtgaatagatctctattgcttgttgcagactcataaagactacttagagag

SEQ ID NO: 55634 - DNA, 663 bp, Populus trichocarpa
  Intron number 1 from transcript POPTR_0003s20350.1 (locus POPTR_0003s20350) derived from phytozome v7.0 (chr-ID scaf fold_3; pos 18869978 to 18870640 reverse strand)
cggttctttcttctttcctttcttttttactgctagtaagaatcagattctctatctctttctttattgctgataatatatatatagagagaggtatatattcttgtcttcatcacctgatccatttgtttcacattcctctcccacattttcttggattcttcaattcttgagtaatcaggtatcacataaattcttgattttcttgttttatttttacaatgtaggttctttcttttttagagatcaagaaatcactttaaaaaaacagttgttttagagatcaaaaccctgtagtagtgaagataggcgagaaagttcttgatttggcaagaaatgtgaaaaagtttgttccttttgagttgatagaggtaattagagatcactagcatctgatttagatgcttaatggaaatgggttcttggctttttttgtaaaaaggacaagttatggctgaagtgagctattttgttctgtttctctcatcttttgatgtttctctcggttaatcttggctttatttgaagccattttcaacaagttgggatcttttttctttaagatgttttgaatatgcaagcatttcttatttcattgcttgatttatcttgtgctatcaaattttatgctaatttgctgacttattctgtaggagttgtgag

SEQ ID NO: 55635 - DNA, 589 bp, Populus trichocarpa
  Intron number 3 from transcript POPTR_0006s24430.1 (locus POPTR_0006s24430) derived from phytozome v7.0 (chr-ID scaf fold_6; pos 23046274 to 23046862)
tcgtgtgataagtgcagttattggacacagtaaaggtctgtttgcttccttgctcagtctatgtagaatgaaagaaccaaaaaagaaatgaaattagacagcatgtctggaaatatgtgtgaattttgagcagagcgagtgttgcgaagtatagatacatgtctatttgcagattcaaatctttttttcctctgatgtagcctttttgttggcattcgaatagcatcatattcactccatatatgtctactgatgcactagaatattgaatttatgtgggtgcacggttttcatgggtcaagtaagggtgttaatattaacactgataaatttttatttgaaattgagatcctcttaagtgctgaagaaatgttctctcatctgaagtggaaccactttgattatggctaatgcattaatgacaattctttagaaaagaagttatgatattgctacatgcacaatatgcttcattaaaatttagctgaacctggaaaatcaaatgtaaaaaaaaataatatattattgcgatttatgtcttgatttctttgaagggctagtttgatccaagattatattgcaggtggaa

SEQ ID NO: 55636 - DNA, 912 bp, Populus trichocarpa
  Intron number 2 from transcript POPTR_0013s03750.1 (locus POPTR_0013s03750) derived from phytozome v7.0 (chr-ID scaf fold_13; pos 2400667 to 2401578 reverse strand)
aaatcttggttgggaaggtaagtttcgaaatgttttttctaaggttctttcataatatgctctcatgtaaaagaattggccagtataatatggtatctagttttttataataataataacaaccaagccgcaatcacaaactagttggctggtatatagttttgatgatagtgaaattcttgcctgcagagttccatcttcaataccttatttctttccttatatttgcctcagcatcagaattgaaaatatatggactctcttgatgaagctagtccctttctgtttttctatttatatgtcatattggcatggaactgatgcaattctttagatggatatgactttcttttcttgctattatttctcataaatgttctagttgttgaaggccgtaaatatattgcatttgtagggctatgtgtcactatcatttcatcaattcttggacatgctcgagtttctcaactcaggggtactgaagtgcttttatcttcttgcaataaaaggttttccccactcatcaaatcaccggttaagtaattccctgcaaaggagtggtcatggcttgaaaagcttaaagattaaaagggtatatggtcatcaccatttgaagaattgaaacagtgtttgtaaatgagaagctagcatgtccaacaatggacgcccaaaacaaaaaatatgtcgctgaagcgagcaattaacatatgaagatcatgcctaatatatgtaatgaacaggtggccaatgagcctttgtttcaaatggcatgtgtctctcctcccctaaaagagctgttgggataagaggaatttctgatatagcatcaggtggtatttttctttgtttatttatcaccaagacttgcattttgcaggcattgaagtatttgcctagagaaaagatccagtt

SEQ ID NO: 55637 - DNA, 443 bp, Populus trichocarpa
  Intron number 2 from transcript POPTR_0014s17530.1 (locus POPTR_0014s17530) derived from phytozome v7.0 (chr-ID scaf fold_14; pos 13764214 to 13764656 reverse strand)
cagctgaagagaaaatcttatacaagttgagaaaggtgagttttggttttgttgatttaatgtgaaatatagtgagtataatagattaggaaaatccaagcccattgttattctctctaatttgagctgcttcaaccatattgatagacaccttgagattgatgtattctagtttaccatatttatagacaccttgagattgatgtattctggtttagtagcttcataatattcttttgttgaatgttatgttttgttttcttcgtacgttttggttgggggattgaggtggggtgctgcggaggtttactgtgtagttgagttttttattttgtttcaaaatgtttactgtatagctcttgtgatctgcttcaatgtatcttgtggcttagcttgttttttctgcaggctcaaaggaaagaagagaggtttgttcaagcttt

SEQ ID NO: 55638 - DNA, 924 bp, Populus trichocarpa
  Intron number 1 from transcript POPTR_0018s00870.1 (locus POPTR_0018s00870) derived from phytozome v7.0 (chr-ID scaf fold_18; pos 811926 to 812849)
atcacgtaatccgaagtccgagaaagtacacagtatgtttttgagctgttttttatattatattatttgaatttaatttagtagacaatttttatttttatttttcatggaaggagctgctgtttactttattttcgggtgacatgcatgaatgcagtgttattttgcataatttttttttcgcggtgtcaattttgtttaattatgcataaatacagagaattactgtggcatcggtatgccattatggaattagtttttgtctctaataatttgaaacatatcagctcttgaggttttttcttgcgatgttgttattataccacagctgcatttcatttcaccaaaaagaggggggaaacctaaaaattgattttggaaaatcagggaggggttgttttaccccccaaaattgccgcaccgtggcgatattcttgaatggaatttaatagttaagggactaacggcgtacagttcaaactgtaatgttgtgtccctgcactgtcggattatgtggtgtaatgtttgtccaagggttttttttttgtcagaatgcttagagtttaagttagacaagctaaccggcaaattaatgcgtgattgcagggaaaactaattatgcatggtgaatcttgatgaataagttacctgtggattggaaatgctaatgtgtttccaacagaaagtgttacatttagatgtcctcttagagcttgaactttcttgaagaacatgtatgtttatcgatgtcgttaattggtgtttacacactgtttagaaatgattgaagtgttcttacgtatggctgtcctcatgactctgttttaaaatactgtagctatcttctgatatggctctagcttccttgcttatttttgaaatgtttttcctcttttctgtttttttttcccagcttgattctac

SEQ ID NO: 55639 - DNA, 950 bp, Populus trichocarpa
  Intron number 2 from transcript POPTR_0018s00870.1 (locus POPTR_0018s00870) derived from phytozome v7.0 (chr-ID scaf fold_18; pos 813229 to 814178)
ttaatcctttggtaatcattttagattatacctttttttaatataattttggcttgtcttcggtagtgacttgttatatgactgtaatgacatatggtttggatggtttataaatttcaatgggggagtggagaagcttagtataaattttgtgacaattgatattggaataatgttccatgtttggtcaaacgtacataaatatatgctgcatgttgaagttctacatgaagcactttcataacatcatactcatctagttacctcgtaagtgctaaaaggagaataggtttcatggagaaaactaaagaaaactagagggttctatatttgcaaagacatgctcaatttttgttttaatgtttgggccctatgttcctcagaccttccattatatttgacacatgaagtagaatttggacataacatctttgaggggccttgcctgatctcacattgaggggagagaaggcacgatgaggtttttttcccttttttaattcgtttctttgattatgttgggcttatagcagtcctccattttttctctggattgttttacttagggttcttgtcaaggaaaataaggtcatccattcttaaaatttaacgtattgttttcaatatttcctacacttttaattacatctatttcattcttaatttgtagccaaatcttcaataggtccttctggcataataagatgtccactgacaatcatacatacaaaatgtaatgcttttgaatagaaatgaaacagtgtatttcttagcaccttaaaacatcgtcttgggtgttttctgtttatcttttactgaaatttaagaaattttcgtactggacttcaaattcaatttttttgtattggaaacatggttggtgctttcgaggtgcttgttctagtcaggttaatttctcatgcatcaaatcaggaagcaattgctggaaa

SEQ ID NO: 55640 - DNA, 695 bp, Populus trichocarpa
  Intron number 2 from transcript POPTR_0014s01840.1 (locus POPTR_0014s01840) derived from phytozome v7.0 (chr-ID scaf fold_14; pos 1695558 to 1696252 reverse strand)
tcgatccaggtatttaccgctcttgctcttctcggccgctaattttataacaatttaattcatagaatttttaaatttactttatttagtgaaagctgaaattaggtcaagataggttgattttttcaaagatccagttcaacccgatcacccccatacatacatgagagtatgtattagggagcaatgtaaaactattttcatgatcttagccaacggcttgagcttttgagttactggttttttgatagattttggaaaggatctgtgtttttaaccgatgaatgattacttttttttgagagataatcctcctctatagtcacttatctaggcaagaattaatcattggaagaaacccagtctcaaaaactaatcaatgattaagaatcatctatactagcttttccatgtctgtctgttgaccactgctaggctgcggtttagtattggcttttgaatgaattcgtggcaattgagagatgccctgatcttctattatatctatgcttttctttggcttctatcttgttattgtctcagtggaatttcttagattatcgctgttgactcggtgagattaccttctcgttaggtcttaacctataatttcagtcacgaaagtatttggactgaaaatcttgtttttggtcgtctaataaactggtgggttttgtttgcagtgcaaggtgtgt

SEQ ID NO: 55641 - DNA, 428 bp, Populus trichocarpa
  Intron number 1 from transcript POPTR_0006s04790.1 (locus POPTR_0006s04790) derived from phytozome v7.0 (chr-ID scaf fold_6; pos 3335432 to 3335859 reverse strand)
tcaaaattcgccatccttttatcacttctgctgaggtaatttttatttttaatttagttcaggtttaatatttttcaatttgatcttgaatttactcgattttcttcgaatttgactgaagttttatttgatttttctcttacttttgattaaattatacgattcttgtgattttctttgttatttcgcatgattctaattattgatcatcacttatgtgctgtttcttgatttttgtttttattttttaatttccttgtgcttgaatcaagcatctggtttctcttgttcaaattgatgcgagttttttattttcttctcattttttaactgtccgttaataggatgaattgtttgtttgtttgttttctttctttctttgttaaaatttgcttttgattttgcagatcttgcttcctacaattgta

SEQ ID NO: 55642 - DNA, 968 bp, Populus trichocarpa
  Intron number 2 from transcript POPTR_0003s16040.1 (locus POPTR_0003s16040) derived from phytozome v7.0 (chr-ID scaf fold_3; pos 15662209 to 15663176 reverse strand)
actttggagcctgcttccactatcaggtaggactgttaaatgctgctgggtcacactttcttagtaaccatatcttgccccattttggaagaacaaaagtatcctgatgtcatcgagctacattatacatgcttaagttaacatcttctgtcctttttagtgtgacttcccagtttccttaggcactgatcctgtagtctcattgagatgttgccattggtagcctagttaggtatggagattttgataagtgtggctttggtttcatggtgattagattttgactagtgagtttgtgctcgaagggccttgataaaacatggttaatgctaatataaactcaagaacgggcacctttaaaatttcttaattcattattggacctctaaatggggagaagaaaaaaagaagatttaactttaaaacttttaaacactcatgttctacatataccgggtgactgttccaggcagtcccccatgcttctctcagttgtttcaaatagggctgtagcttgcagttttttctacgcccttgctgctacaacctcttttcttttgtttttttgggtgggtaaaacccgactctctcctgctggccacacaggccggccaccaatccacccaatgctatcaatcctcctaaggggggattggtaatgcttatgataaatgaagctcgatgacattatcagttttaacagaattaagattttattactcatctaaatcgtttctgcttccatgcatcatagacatgtcaaaaaggtaaaaggttttatgggtttagtaatctgattccccgctggaaccatttaaaatcaagacctcagtgatatgaattttttgatcctctaatttgcattaatctagcaaacaatttgtaccagctgtgactaatttatcatggtttattttcgctcaaatactgtaggaagagaaagccattgagcggggcattcttccact

SEQ ID NO: 55643 - DNA, 706 bp, Populus trichocarpa
  Intron number 1 from transcript POPTR_0003s16040.1 (locus POPTR_0003s16040) derived from phytozome v7.0 (chr-ID scaf fold_3; pos 15663528 to 15664233 reverse strand)
tgctgatcaaaggctacgcacagagaggatttcaggtgcaattcttttatctccttcacgtctcactttatattggaatttaagctgttttcattttttgtagtttaggttttatttgtttttgttagacttcattttgttttgtttgattgttgctgttgcttttttacgatgctttagttttagtttgatctttcaacttgaagtcttgcaagattgcaatatagagaatgggggcttctgtgctcatgctagtacagaatcagaatggatatggacataaagagtacaagctctaacacatttggttttagctatgtgcaaattaattcttggagcttctgggaatttgttcatacttagttcagtgctacggtaatatggattatttcctttttaatttggagttacaggacacgttcacctaattctcccggattttcatgctttatgaatcgtaatggcccattcataaacatagtgcctgccagtgaatgcattttctttgcttctgataatgctcaagaaacattttacaagatgttgatatctatccttggatgatttttcatctctctgcaaaaatgagccctacagaattgttcagttagtctaatttctcttgagcagttggctatgttggccgtgagtatgatatgactaacaaaatgcactttgggtttcaataatgcaggaagtgctgggg

SEQ ID NO: 55644 - DNA, 839 bp, Populus trichocarpa
  Intron number 1 from transcript POPTR_0006s20340.1 (locus POPTR_0006s20340) derived from phytozome v7.0 (chr-ID scaf fold_6; pos 19397614 to 19398452 reverse strand)
atattgggatttcaggtacattttcccttctttttttttgtcaaaacttgatggagattgatgaattgatactgtttttgtggtaaagtttgttgaaagagaatattctaactggaatatttctttagattttggaaaggatgaaagttaggtggttgtcatgtgtcaaaggcaatgatgaaatagaaagtgaaagttttctggatgatgaataaaaccagaattcaaaccacaagggttttcggtctccttgcacatttctgagattataatgatgatgagagattaaaataaataattaattattcaatttctgcacaaagaaatgcaaattttgtaatagaaattgaaattaatcgttgacagactgcagggataattttttttaggttcttctcctgaaaaatagatcttgatagcagctattcaagttattgtttcctactagaaatagataatcttgacacaaccagcatctagaacccatcatggctgccaaaaaagactccattgaacatcgatgataacaaatatactagatgagatctccttgaatgttcattttctgtttttataattttcaatgcttccttgaagatgtcatgttaattcatgttgcaatttgatttttcaaggttgtcttcttatgataaaattaggatcacgatgattagagattagttggcattaatctcggagacgaaaagagaaactaagaaatgtaataaaggaaagaacaaaatcttgaaaatgttggagttctataacctttcggattctgcttcaaaactgagttttttgtataccgacttcaatgattaacaggaggagtgacatca

SEQ ID NO: 55645 - DNA, 887 bp, Populus trichocarpa
  Intron number 1 from transcript POPTR_0019s08540.1 (locus POPTR_0019s08540) derived from phytozome v7.0 (chr-ID scaf fold_19; pos 10050080 to 10050966 reverse strand)
caaattgcagagcgctatcaaattcaacggcggaggttcaacttttcttctttttaataaattagacttttggcttattaaatttgatgcgtttattcgttaataatttaatttgtttggtaaagagaaggagagctgcttgaatggccatataatgtaaataatctttttttgttaattagggtacgatttgaagttattcaaagtgtttactggattttaagggtgaagagtattcttgggtcagcttcccgctatgttgttatgcgagaaaattgaaatctggaaagagagggataaagaatgttgcttgttttacttgataatgactccgtcttatttagcagcttttcattaattctgctcaaaattgatgctacaagtttcagccttttgcactcaattaggcggatcttgggaaagtattgataacttggtatttgggcatggttctaaaaatttcttgttatgcctaagcagagaacactgttgagatgcctttaaatgcatgattctaaggatcaccagcttcaaagattacctaatagtttcagtttgattggaaaggaaaagattgctaatatattttcttctgcttttgcttaggaaagatccacctatagtagtagaatttttgttatgaaaggaaacaaatataacctttaatattgccggaagttgttcttgcttgtcaatttgtagaaaaagattatctctttttatgtattgccttttattgtggttattgcttcatctttaggttgttcaacttaatatgattttcaaaacttaaacaagaatagcttaaaactgaaacttttgtttgttgacatccatgctagttttgctccatcagcatccttgacttaattattctcatgcaggtc

SEQ ID NO: 55646 - DNA, 967 bp, Populus trichocarpa
  Intron number 2 from transcript POPTR_0006s29290.1 (locus POPTR_0006s29290) derived from phytozome v7.0 (chr-ID scaf fold_6; pos 26710078 to 26711044 reverse strand)
ggtttgaagaagagagagagatcaaggccagaggccatagaatcagtaaggcaagatagggattcttctgcatgttgtgagagcgagcgagcgaggtggtttctggctaggcttgggcaaattatttacagggaaggtggcggtttttgtaattagaggaattattttaattaaaattgtaaatatgtagttatttatcgggaagtctggttcagtcctttttcttttcttttctttttaggacaaactatatcttagctcctttaaaaattgaaacgttccatttcggctcccttatttaaacaaatgtttcaatatcatccttgcatctcttaaacctgtcatgcttaacatcattggactatggtgatgtcgtcggagccatttttttgaaagggtctcgagcactagaagagaaggaatgacaagcagtactgcttcctcgtggattcgtgtggattaagcatatatatcactcatgaataataagcatcattgttcatgtgattaacatatatcactcatgaatttgtaattaaattttgatttaaatgataaagtttgtattttacatatataaatatgattaatatgtatatactcccacgatttccattatgatagttgtatctgttttaaatgcttcttatgtttctcattatcaacatgtatttatttcactaaatagctagtaaaatttaatagaaattctgtttttttttttatttatgaatttttgtattggaatatttacgggatatgtttttaaatcctataagaagtgacattggctggctaattatagggttggcataagcattcaaaagaaaaaggattgaagtgaaagattattcgaataataagggctaagattaaactcacccttttgtttatctctgtccgatgataacgagaagtgcgtgtggagatagagaattcttgggaaaaaagaaaaagaaaataggaa

SEQ ID NO: 55647 - DNA, 306 bp, Populus trichocarpa
  Intron number 1 from transcript POPTR_1996s00210.1 (locus POPTR_1996s00210) derived from phytozome v7.0 (chr-ID scaf fold_1996; pos 3104 to 3409 reverse strand)
gagctaccaaggtaacgagatccatcttcttgtatatattttgtaactgttcatgaggctcacaatgtttaatttgatctggtagcagtcctggaaaaaaacaattgattccaaaaaacattttcttcttgttattaaagtggaataataattaaaaatttctcataacttgccttcttttatttttactctcctcaggctaaacaccttcaaatatctatccatttatctctgttctgttgcatgtaaattgaattctttcattgtttagactgctgcctttggtgcccttttccgagctagtgg

SEQ ID NO: 55648 - DNA, 913 bp, Populus trichocarpa
  Intron number 2 from transcript POPTR_0003s19500.1 (locus POPTR_0003s19500) derived from phytozome v7.0 (chr-ID scaf fold_3; pos 18214769 to 18215681 reverse strand)
ttgtggttgatcctcttcctgcaggtctcgatcgggtgagtttcctgcgttttttctttctcattgtggagagagcctgcatcccttgttattggttacgtctcgcttcttttatggtatatcatcttgttgttgagaatctatctttgcagtgcataatctgaaaaaaagatgttttgctttcgacattcccttgtacattttttatttggtttttggggaaaggaatgtaagggagctcatttgaatgcatggttttctcttaataagagttattttgcctgcatgtttaagtaaagtgcaagccatcctgttggaactgattcagattgttggcattctgcaattatttcactatttaatggaaggctgaacctgaacaaagtatttggctttggggattttggtggttcatagcatgtaactgcacttagatgtgattcatttgtaattcaagactcgtacttcagtcaggaagtttattatgaatagaagaatactgtgcagtctgtgcacatggaactgtagttcgtcctactctgctaatgaattgcatctcatttaccatgtcttatgaaggtgtcaaaggttgctttttccatgaataatttctagcagcgaaacagccaaccattaatatacaaacaaaatatactaccttctaacctctgtgaagctcaccggtttggcttcacaagtcatggtttaatatgtcgtcgaattaaatgacttgcttgtttgtaatgtaattatcttacccctcttgagaatgctatcttctgatttgattttttttctttctttttgtgtgttgattttgatactctgatctttttacacaaatctattttttcattagtggtgacatgactttccattctgtaaaccagggttacatcgtcctaaatagacc

SEQ ID NO: 55649 - DNA, 1004 bp, Populus trichocarpa
  Intron number 1 from transcript POPTR_0003s19500.1 (locus POPTR_0003s19500) derived from phytozome v7.0 (chr-ID scaf fold_3; pos 18216211 to 18217214 reverse strand)
agcatcgaatctctctgttaacatcaagcaggatcgtacgttactctctatctctgtctctatcattgtctggagacatcaaatcgtgatccactcgtgaattcttagattattgctttgtcttttccatgataaatataatagtgattggttactaagtacccctgccttatgcttaattcagcaacaagaaaccttcgtgggttctttatttgttttttaatcttttctttaaagaacgcatcttgatataataaaccctgtttctgccttctatttttctttgtctgtgatgcgttcttctgtttttttctttgttttttttagtgcccatttggcttctcaaggtgctattgaaatactcagttcagcatttgtctagctggattgaattttagtgatcttgtttgtttgttttggatgggaattggatgacccttcaatctttcttttgttctaataaaggaattatcgttgtgaattgtgtgccactgtcagcagtttggttatttttgtctctctgggcttatgtgaatcttctggcttgatttgacatgactggattgattctacctctctgtacttatccacattgcttttgagagttgagtttttgtgggtttttatctaaatatttttggaaggttttttttgtgtggtagaaaacagtgttagtttgcattgaagtgttgcactggaggagtgtaatgtgtctatggaatgaattcaatgagatcatctgctgttttttggtcatttctttctcaacgtggcaatttcatattttttttctggaattttctttgatcaatttgtatttgattgtaattttgctctgagcttggatccacatcatgttctaaactggtaatttataagcatttcaaatgtctcggtgagtagctgtgatccttgtatccttgtactggtcgtggtttaaactaatttttagtcctaattcttatgcaggttaactgccagagattaaatttctttagattttc

SEQ ID NO: 55650 - DNA, 520 bp, Populus trichocarpa
  Intron number 2 from transcript POPTR_0006s07230.1 (locus POPTR_0006s07230) derived from phytozome v7.0 (chr-ID scaf fold_6; pos 5180814 to 5181333)
cagataaagaatcctcgtgattttttcactggaaggtatcgtttatttatgtgttaaatgcccacgtgttgaaaagtggatcttttgtttgcttgttttttttttctcttgaattcttgaatttcttgttgagttcatgaaacaacaggggaaatatgcttgaaaatggattcttttttctattttatatcagtagatggtctatacggccttgagctgcacaacatgggatatccctcctcttttctaagtctcccgcatcctggatgctagcaggatttgataccagttgtcttcttccactggcgattaacttaccggttaataaaacttggcactaatggattcttgcatgtgtaaccaattcatttgattcttataaaaatcaatggaaatcattgaatgcggatcttgttttgacgtgcatttcaatttccaatcaatatttctttcgtccacccctttattcattgtttctgagaatgaaatggagggtcaattatatatggcagattgggga

SEQ ID NO: 55651 - DNA, 918 bp, Populus trichocarpa
  Intron number 5 from transcript POPTR_0013s08430.1 (locus POPTR_0013s08430) derived from phytozome v7.0 (chr-ID scaf fold_13; pos 7563980 to 7564897 reverse strand)
atcatccagttctgattcattgcaaacgtggaaaggttagtccaattccatcctacctttttttttttttttaattgagattgtttaacaatgtaaatgtagccccccccatattatccaaatctttgttcccttcctttgccgccactagtctcgtcatatgcattcttctgctgcttttattactattattattattcaatcaaatggagttaaatatattagagaacaatttcaatcaatcacaccttgttttttctctttgttattttttgggcgctgaaggttttcatcttcatatgagtttccctttgatattcaaatgatttgatttcttttttcttcatctcatacatgtctgcctccctcttttccccttgtgaagctgctttccattggcatacaccatttcaccttcatgctagtttgacttgtgttgcttacatacttgcaacatttctggctccaatggctctgaaaactaagttaattctcccggaagaaggcgtaatcttctcttttttttaaaaataataataaaaaaaatcccagtatgaacatttaattaggtgaaatgaagagccgttatgaagttcagatgtgctgtttcatatacttataatgtccgtttacctttttccaattttcaacaacattagtgccatttcttctccttttcattattcaataaatccttattctttccaaaataagaactcaatatgctgtgaaaaaagaagctaatgatgggttctggtcagatcctgtagcctagatgtcttatagcctttaagaccgtccttgaaatgctcgtcctagttgtttaccttcacttgcggttgttaatcttagagattctcaccatctattccctttgatgcagcatcggacaggttgtcttgtgggttgctttagaaa

SEQ ID NO: 55652 - DNA, 1022 bp, Populus trichocarpa
  Intron number 1 from transcript POPTR_0013s15380.1 (locus POPTR_0013s15380) derived from phytozome v7.0 (chr-ID scaf fold_13; pos 15379953 to 15380974 reverse strand)
agaggaagtaagtttctctcttcctttccttttttttaaatttttttttttaacacatcgaatcttggccattaattagatcttaattaatgaatcgaaaacaatcctgaacaatttagtaatctattaatattaagttttattattattattagttccctgcaaattcgtgcattactatttttaattttttttatgggacttaatattcaggcaactaatcaaatcaattcaagtatatactatctggccttaaaagcatattctagatagatcatgatgttaaaaaaatataatgtaaatacttatatcaataaaatccctccttaatattataattcaactcttctttttcttcctacttattcatcacttacagcgtcatgcttagggagtttgattttgatggataactagccggcagctctagtgtctgttctctggactggcagcttccatgtcttcatggttgttgccgtttggaatttatagttttggcattttgtgcgcctagttttttggcatcttgtgtgattctgcacatcgaggtctgtgtatatatacctgtttacttttgaagagttaatctagatttcttattaaaaaaattaatttaaagttaatcgggttaatctatcgggttagtttataggttaggtttgtttttatgttttaaagatgtttttaaaaaaattttaattttttttgttcacattaatattttttgatatttttagatcattttgatgcactgatatcaaaaataattttttaaaaataaaaaaaatattattttaatatattttcgagtgaaaaacactaaccacactctcaaacacgccttgattacaacctgattaaaattttaattgatttggttcaacctatttaccagcgactcgtccttttcttttgtaattgaaaccgtgatgattctgtttgaaggccgagttaggcagagatggtaatgaatattaatgatgttgttattgtacaataggaaacttgcaagcacaaagaac

SEQ ID NO: 55653 - DNA, 804 bp, Populus trichocarpa
  Intron number 1 from transcript POPTR_0013s06360.1 (locus POPTR_0013s06360) derived from phytozome v7.0 (chr-ID scaf fold_13; pos 4909968 to 4910771)
tgctgtctttctcttctcctccaaaaagcccaaaggtctgagcttttcttttcttttcttcttaattctgtgcttatttatcctttgtttttgtgcatgttgattgagtttctgttgggaagattatatttttttaccaactttgtgattgttctatgaaatctgggttctgggttttccaaatcttcagtatccatattgagaaagatggttcttgatgttgaatgcagttcaagctgcgcagatgttatactctaacatagtaataaatgggttgtcgttttaagtttgcttgctgtacgaggctttgatgcgattgttattagccatggttgctctaattgcatacttctataaatgtatctctgagttactaattttaaggtgatataggctttgctgttttgttctacggtttctcattgaatgatttatggttctgtaaaagaaccttatacttcatcatggattatggagagctagtattgttgtaccacggctggaacttggtgaactccccatgaatgaggttttaatgagcaaattgagattctctcaagcgcctagattgaagttcattattaactaaagcatgagtaactaagtggattggcttttagcctttttgtacttttgtttgctcgtacgctcaatcccttagattttacatttgagctagctttatgtgaagtttgttttgcctttattctttctatcaatgtatttgttgtgttttatgaaactaactaatttttctgtttgattataggctgcttagatccagaaaatttcaagcagtttaaa

SEQ ID NO: 55654 - DNA, 563 bp, Populus trichocarpa
  Intron number 2 from transcript POPTR_0013s02360.1 (locus POPTR_0013s02360) derived from phytozome v7.0 (chr-ID scaf fold_13; pos 1414029 to 1414591 reverse strand)
gagctacaagagagagagctcaggtatgaatctaaaacaattagttgaatctggttcctcgaaatagtgaagttagtgctttaggattctgattatttcaggctctctgaagaatgaaaatctattcaatcaagcattataatatttaagattagtacgcaagtggttagcttcattgtattaggaacaagggggaggattatttcctgttccttttatattgaaggattgttgtcctgtcttatgctgcattttttgcgaggaagaatttatgtgttctatgggtttccttaaaccagaaaatgacatcaaacagcaaataatatttgttgtgcatgattgggtaagggagcttgaatttggccaattttcatgcacttagaaacctaaacattcaaatgtaatatgaagtttattattccagaattatgtagagatggtgtaagtatggtagttgttgtaatagactctctcaatgtcaatattagaaaaatctgtcttagttcacttggttgttgctataagtaggctcacatcagagagcttgaggaagaagtgaagct

SEQ ID NO: 55655 - DNA, 406 bp, Populus trichocarpa
  Intron number 1 from transcript POPTR_0006s11900.1 (locus POPTR_0006s11900) derived from phytozome v7.0 (chr-ID scaf fold_6; pos 9101121 to 9101526)
ccaccgtctggctcgcttgggacactcaaatttccgtactctcttctttacctttttatcagtttagaaattcagcgacgattgcttttttttatggatctgggtttatattgcgtgtgtttaataagacggaggcatgaatttttagccaacaacatcagatcgtttaagtctcaatattctataattcgacctcctgaattgaattgatagtgtttaaacttgttgttgggagtagtcagctatatgaatcacttctcaccattttgttttctcgtttgtaaaaactgcctaaacaattttttattttgattacccttatgagcttttgtggatcttttgtaataatttttctttatcgggtctctgatgatgttttttacttggccataaaaattgcagcgat

SEQ ID NO: 55656 - DNA, 329 bp, Populus trichocarpa
  Intron number 1 from transcript POPTR_0018s06790.1 (locus POPTR_0018s06790) derived from phytozome v7.0 (chr-ID scaf fold_18; pos 6824861 to 6825189)
gtcccggttgtggacacaagctcgaaggaaagccggtaattgatatggataatttcctcataaatattctttccttcttttcaaatagatttcaacacacaagaatattgcaaagcaaaaatgactaacatgctttttctgttttattctggggtttttccccttttagcttttcttttttaggtattgattaatcaatgtaattgtaaataaaaaaaaactgtaattttcaaattcttaagttgatcagcttttgttttaacttggttttgattaattggagttaattttcaggactggttaggtctaccagcaggagtgaaatttga

SEQ ID NO: 55657 - DNA, 515 bp, Populus trichocarpa
  Intron number 1 from transcript POPTR_0003s09750.1 (locus POPTR_0003s09750) derived from phytozome v7.0 (chr-ID scaf fold_3; pos 10983603 to 10984117)
caagagacctggaaattgatcgcttaaaggtttcgtttttcttttttcgaaatttcttatttattcgttcctttctttggattcatatttgcttcctttatcaaataccgatatttgacgttgttaaacgttactttacattttgatatcttagtgttttttttttcaattccactttcggtgaaagatgaatgtgatgccatgtttttctcaaggggaaaaggattgaaatttctgattcagttttaattgattttacaaattgcagagagaattgggccgcgtatcaaagcaccttacaaatttggtaaaaagaaattcctactctttctctatgctataagtatttatctgtgcattatttatccattttcttcattatctagtttttcaagctacatctcattgatagtggcactttgttacattttttaattggtttatttatttgaaagttatgtccatcttaatggggttctgttttgatgaattgctaaatcatttcaggaaaaaga

SEQ ID NO: 55658 - DNA, 956 bp, Populus trichocarpa
  Intron number 2 from transcript POPTR_0003s09750.1 (locus POPTR_0003s09750) derived from phytozome v7.0 (chr-ID scaf fold_3; pos 10984204 to 10985159)
ttcacagccgaaaaaagacgaatttgtgaggcttttttttccctctcggtatcttttaaattttctttgaactatcctggttatatatccaagcagctgtttatgtgatattgcatgtgtggcttattatctctactcaaacaccagctgaggtcttgatcaatcttattttgcgctgcaaaatccagttcacagtttgacagcctcagagtggttatctagataaaaaatattcttggtggcttttttattcttagtcagttgatgcagggcagcgtagaggctgttcagaatctgacttttagaggctgttttatggctgttagaactgtgttagtgtcgatttgtggtggaatatgaggaaggatgtagatagattctaagagtcacacctagggttcttaagattcatacctaagaagagatcgagttacacaatcaaagcaaagttactggaaattatttcatattattaaattgaaaaatattgaaagcctacattcttattttatagagttttaattgtccaaatccactaaggacatggattcctaaacctccaacatgattattcctatttagaataggaaaagcctaacaaagctaattcttttagaactagtagaatgatatatataaaataaaactagatctagacagttttttcataatttccagcaaatctgaaaagtgcagaaatacccttgtctataaaaaacaatcaatatcgcttctttttttgtcaacatcatcagttagtttatttgaaaactttctctagctatggctttggttattcctttttcctttttttttcttaacattgcttgcattttttccgttgactatttagcttgtcagttataaaatcacaattgggcagtgggcacttttttattgctatgatttacattttacaattcttttgaatggcactggctatagtggcagggaac

SEQ ID NO: 55659 - DNA, 705 bp, Populus trichocarpa
  Intron number 2 from transcript POPTR_0039s00320.1 (locus POPTR_0039s00320) derived from phytozome v7.0 (chr-ID scaf fold_39; pos 116347 to 117051 reverse strand)
tgggtttgtgtttggagttgctacgggatacgttgtgtttagaacaaaaaaaccttcatggtttcttaggatggttgaagataaatggaatctcaatagcaaaaaaacaaagaagaatgttggcagatatggtgctagaagaaactaaataatgcaattgatattttcaagtaagttttgcgagcatttgaattttcaaattttatgttcacagtttatgttatgttatgatatcctaatataatttatttgaagtattttaggatatcaagtggatatgacattgaaacaacactagagtggcagatcatgatattggattcaaggtatcaagtggattttactttttcttctctctttttttttcgttcaaggttaattaggtgttacttctacgaagaagattctatgtatgtaataggtcaagcaagcaatagtttgagttaactataaaatcatttatgttttatagagttatgaacatttccttattcttgatcacttaaatcaatctccctttctgggagtattttgagatttatagagttatgaacaaattgctctacaaacctacaagtgtgcaagcaaattaaaacaattcttataaatttaaaagaacaacacttgactgatagattcagttctcataacaacagcaatatttgcaagcaaaatagagtaattctgataacttggaagtcataa

SEQ ID NO: 55660 - DNA, 457 bp, Populus trichocarpa
  Intron number 1 from transcript POPTR_0013s05610.1 (locus POPTR_0013s05610) derived from phytozome v7.0 (chr-ID scaf fold_13; pos 4007612 to 4008068)
accctttctctgctcaaaacacggttggtttttttctatttttttctttcacgtgtttttttatgcatagtttttgtacttgctgagttattagtctcagctcttgatggcttaacatagggtattttagtgctgcaatatttttgtttttgggtattttgtttctttcttcgtacgttttgtgttcagttctttcttctgctgcttgtctttcttgttatgcttttggtttctgcttcttgcgctagattttgtctagataatcttttaactagtttatgtgctcaagaaacttggaaagtaacagtttttgctgggttttatctgtttctgtgttacactgctgttttcaaagtaatatttgcttaattatattacataaacccagctcgcaatggccaatattcttactttggtgaattgaaaaacaaatgtaggaagttgattttagctccga

SEQ ID NO: 55661 - DNA, 759 bp, Populus trichocarpa
  Intron number 1 from transcript POPTR_0013s15360.1 (locus POPTR_0013s15360) derived from phytozome v7.0 (chr-ID scaf fold_13; pos 15368867 to 15369625 reverse strand)
ttctataattgccaaggaagcattcaatatcttaggtgctttctctttcagctacttggatttcgtatcatgcctctgttcatactgctattttttaaaaaaatacatgaaaatgaaacaatttttttcatttttttctagaatcataatcatgaaatatataataattgtgtggtttatttttctgccatggtatgtaccttttaaaaattctaatttgtttttttggctgaatccctctcatttcttgcttatggtcttgggaatgagtgtgaacttaaatatttagtagctgatgaaatttcttacagaggagcagtttctcatttggatagtgtcctccattctttttgtttgtctttttttcttaataatagattatttatcattttatataatagattattaactggctgtttagtagatcttttcttggtcccatggttttggttgcttgttgtgttaaaggtcttatgagttagattccaattggactgggattcttcctataagatctaccattgtggcatcatatgctcaaatgacttttacctcctgtttgattgttgttgtcatgatcaccaatttaatgatgatgatgaaaggatgttgtttttgtccttccgctagtattagattgcatatctggtatagaagattgagagattcatgagaaaagggccccctttcctctccactgactgttctctgttcttttaatcagattcaccctctctgaagcatcgaacacctgaaact

SEQ ID NO: 55662 - DNA, 399 bp, Populus trichocarpa
  Intron number 1 from transcript POPTR_0013s14080.1 (locus POPTR_0013s14080) derived from phytozome v7.0 (chr-ID scaf fold_13; pos 14422350 to 14422748)
aaggatttctgttggtgttactaatccaagtggtaattaagcttgacctttttttttcttttgctctttcttgttttgggtttctctctgcagtttggtttgtgagaaaatgtgggatataaaagtaaagttattagttaaaattaaaatgatataagctatcaaacctagatggaagaaatgcttggttggttttgtaaatttcctttcttgtttcaacttttctttttcagcaaccaaattcggatttttactagttgttattgtataattttaagctggaatagtagtgttgcttattaattttgttttatagtacatggaactttgaatcttatcacctgcattgttttgattgacttagttactgcaattaatagcttatacatttcactgggc

SEQ ID NO: 55663 - DNA, 624 bp, Populus trichocarpa
  Intron number 1 from transcript POPTR_0018s10460.1 (locus POPTR_0018s10460) derived from phytozome v7.0 (chr-ID scaf fold_18; pos 11378543 to 11379166)
gtaatctcagtagtgcgattttcgtagtgtcatttgtaagtttctctctctcaatctctcttctgctttatcttttattcgaaggttttttttggtggagctcagtgctttgatgatcttctcgttgctgtaatatttgctgggctgaatgactgaattttatttttgttgacaacccatgattgctatatgctaatgtaaccatgggttgttttccagtttttggttccatgtttttttttttggcaaagcttagtgctttgatggccttcttgataagctttgctggattgatggttgattttttttttatataacccatgattgttatctagtaatgtgatcatgggttgttttctaatttctgtttatgttatatttaaatacttaattgctaatcgtgcagcaattactggactgattatctgtttatgagagtgagagagatagagaggatggtcaatttttttagttttgatttattattatttcgggctcttaaagttgtctaattggtcatgggatgtgtgggtgttgatctatggttttcgttacttgattgattgattatcgtttgtttgtttgctttttttttctttatattgcaaggttagcttcaataag

SEQ ID NO: 55664 - DNA, 668 bp, Populus trichocarpa
  Intron number 3 from transcript POPTR_0006s22020.1 (locus POPTR_0006s22020) derived from phytozome v7.0 (chr-ID scaf fold_6; pos 21041058 to 21041725)
tacttaaaaagaagcaagctggtcagttttattaatgctttggtttgcttaatcgtttagcttttgggactcttggttagtaaattacggtttatgagacagataatactccctaatactgcttaattgctcttaaatatatggtgcaagttttttttcgtttttttttatgggtttttggtttttaagaagatagtagtggcattagaaatttcttgatcacattagaaaggatagttacttgcttagtctttgtatttctatggattttgattgaaacttgcaccttgtcaaaatatatcgaagggatggtcccagatggttagtgctacaattgttttgggattttttactcgtgagcccctattgttttcctttctacaattgtattccttgacaaaattacaaaatgctgccaagggagcattgctttttttgttgctgtcagtgcttcagcgcgtaatgcagaatggtctgtttggttgcagactagagactaaagagcgtactaggcagttgagaagaatatattttaaggatacaataatgattttctattatatattagcctctaccaacacctctttcatccaaaattatcacaatatgagctgatcacatttgttcttacagcagctggaccgagaaataggcaagagtccccactc

SEQ ID NO: 55665 - DNA, 656 bp, Populus trichocarpa
  Intron number 2 from transcript POPTR_0013s12990.1 (locus POPTR_0013s12990) derived from phytozome v7.0 (chr-ID scaf fold_13; pos 13575006 to 13575661)
gcaaaacccttgcagccccatcaacaaagcttaaggtcagtttctctcaaagcttcattttgagtacctgtctttatcacccttgtagctctctttggatttatgggttctctgaagttggcttctttttggattttttttctgcaaaaagagcaaaagatctgatctttttctgtttatttaatgggttttattaattgaatggtaatgttgggtttttagtgactttctgtctgtttattgattgaaagattgtgtttttaacagaccctttttcttcttttgcttgttatgtgattttgttgtgcaaattaatgaaggtgtaaggcggctttaataatttgaagagacccttttctatttctttcatttgaagagcagattagtattcagagatgataactctggagtgtttgtagaagtgaggaaatgtcattgttcatgtggattttttgattttaagctgattttggattggagtggcttaggaatttgtgtttgtttcgatgggaaataatcacgtcacttgcttgtttggttttgttttttgtaactttgtatgctttaagataaagagatttttcatttgttaatgagaaaattttgcgtttttattgtgtaagttttgttgttagctcattgttttctaatgtcag

SEQ ID NO: 55666 - DNA, 658 bp, Populus trichocarpa
  Intron number 1 from transcript POPTR_0018s12140.1 (locus POPTR_0018s12140) derived from phytozome v7.0 (chr-ID scaf fold_18; pos 12720815 to 12721472 reverse strand)
tgaactaattgtcaagaaggtaacctttcatcattcctgttgtaatctttaattctccttttttatggtcactggttggttgtttgaagcaccaactttggagttatttggattatgagggttcacatagcattgaatttacaaattggcatgtggaaataagtcattctccctttgcaattcggtgggtgggtggggggcggaatttgaattgcacaaaagaagttctaattatttgcagtgggatggattgcgggaaaggagagggttagtttacgatgcgtaattgtttcgaatgaagaatgttgtcatatatttacatgatacaatcatctttgaaaatgaattggagagagttttcccctttgattagaaattgtgtttagcttgtggcagagtatctaatcggctactcctattcgatcttgtagttgatttcattttattctgagagtagtttgtttaggcttcattctcttcagtctatcttctcactcagctactcctaatcgattttggagttggtttcctttcattgagaaagtagtttgtttaggtcttattgttacgagtccaagtgatgattacatattctcatattctattcttgttgagtcttacagtttggattggtgcacatatcaactggtgatcttct

SEQ ID NO: 55667 - DNA, 988 bp, Populus trichocarpa
  Intron number 2 from transcript POPTR_0003s19530.1 (locus POPTR_0003s19530) derived from phytozome v7.0 (chr-ID scaf fold_3; pos 18227583 to 18228570)
tttttcatcccccgagtttaattattctgtctctggtatcattctcttacattaatcttttccttcttgaaaatcatttagttaattgctatgaacactaagtagggaaatttacgagaaacatttactaacgtagacaatttgtacgagtaagatgtcggaccctccacccaacatatttatactcttatagtaattgtaaatgatataatttaatataatttaagaagttatcttaagaaatttctattttatattggaaaatcaacatttttttatttttaaattgaagtatttaaatttaatcttaatttaaactacagcttgtttgcaaactttttaaatgaacttatttataagattaattcatgagtttcattgagtctgctcatgaattttaatgagttaagtttagctaagcttaagctttttttgtatatataatcatttttaaaaatattattacatgaatttattatgttttagactatgtttatttttgcgattcaaccatggtttttaaacaatctaaatttattattgcttataattattatttttttgtttagatcgttttttatatgacatgtcaaaaataaatttaaaataaaatatattttaatatatttttaaataaaaaatactttaaaaaataaattctatcataatttcaaatacacacttaataaacaagtttgaaccatattcttaacgcaccaagcttcaaacaataactcagctcaattttttttaatcatattggatgaccattttatgaataatagatcataatcttcaattttgcaatgatcaaatctatttaactttcatggatttcaagatccagtaaatttcattttacattcaatgaatatttaatgtgtgtttgaaactataaaagtcaaaggcttctaccaccacagccatgaattccaaattctacatatttattctctccttgatgacaatatcccagcacctttgaaga

SEQ ID NO: 55668 - DNA, 687 bp, Populus trichocarpa
  Intron number 3 from transcript POPTR_0014s08880.1 (locus POPTR_0014s08880) derived from phytozome v7.0 (chr-ID scaf fold_14; pos 6552246 to 6552932 reverse strand)
ttggttgtggtggtggaattctttcggaggtaaagttatttttctagagtatttcttagtgttcttgctaaatttgtattagccagttccgaccagctgctttcacaaaatgtgaagcttcatttaagcgataaaatttaaagcaaaattttgaaaatttcaaggctaggcgatagaactcaagtgtctgtctgttgttatcaaggacgactgagttttctgttgcaactgaagcgatagaatacaatgtcttaacaaaagaagaattttatggcttcaatcttattcatataaatctgttgcaactaatggtagatatgctaagttttgattaattgagaaatgaaaagatttagagggaataatgctatatgttagtttttgtttctcatgctccgtagcttagtaaagaattctgaaaaaaaaaagagttgcaaatgcctgtaaaatatttcaagttcttatgaacacatcaaatcattcaatattttacttaggattacacactcacactagaacagaactgttgtggtattattgtgatttccaatgactgaattcggtacagtcatcagtgtgtatactatgttttctgtttttatgatggtaaatgattatatttattatttccaatcaaagccgtgataatactcaccctttccttttcttcttcagcctttagctagg

SEQ ID NO: 55669 - DNA, 569 bp, Populus trichocarpa
  Intron number 1 from transcript POPTR_0014s08550.2 (locus POPTR_0014s08550) derived from phytozome v7.0 (chr-ID scaf fold_14; pos 6353370 to 6353938)
aaggtttggttctctctcttggaatctttatttgtttatgtattccctttataattctttatacggttttcattctttaaaaggtcggatgctttctaaaaggaatttaagacattttggtttatgggttcatttgattcctggtaacatagttgtttggatgggtccatgagtatcaggggtctctttctgggactggtttaaaggaagaattagtattttcagtgctctttttaagaacagagtcttttgagtgccaaaagctcaggttcagattttgtacattagtcaagttctggtctttttacagacaactgatcattaaaagtttgttgattctgtgttggtgccgtgcatctgtaacgttttgattttcggtatctataggagcgaagacaatttgatgttttagccatttttttataaaataaaattggttttggtcactttgattaagaagtttgatgtaaaatgattaatgaatatgtggaggtagttgaattgaagctctgagttagatctatttgatttatgcctgcagaagtttgtgttgaaggtggacttgcacg

SEQ ID NO: 55670 - DNA, 288 bp, Populus trichocarpa
  Intron number 1 from transcript POPTR_0003s05350.1 (locus POPTR_0003s05350) derived from phytozome v7.0 (chr-ID scaf fold_3; pos 6626816 to 6627103)
attgcattatcactctaattttgctgacaatagaggtaattggactctgtttctttcttttcttttactgttcattcactgtttcagagttttgattgtttttcatttgttgaattgttttttatgatgaaattacatatcacaacatctgcagtgatgattttacaaaaaaatgtttttgtagtaggatagtttgtttaccaatgggatgattccattatgtcatgatattttaaagaataatgttttgtatcttatataggacatattgatcactctgcaagagtg

SEQ ID NO: 55671 - DNA, 626 bp, Populus trichocarpa
  Intron number 1 from transcript POPTR_0018s01070.1 (locus POPTR_0018s01070) derived from phytozome v7.0 (chr-ID scaf fold_18; pos 992032 to 992657)
aggcatgttcgattttgctttcccttaaaaaatttcaatatgttctattaattctgctggtttttttcttttttccttttcatttctggtatctttttgctttttttctttctattttttttaaaaatctggaatatacaattgtacccaagaaaacaaatctggaatatatgcaatgtgaaatggaggtgtgtgtaaactaatcttttgagatttataattatgcatttgattgttattcttcacgatattggaaagaaattagactcactagatgtgttaaatgtagaagaagaattaaatgtgtatggatattgattttgagctttgtataatatgcatttgcttattacaatttctggtgaagaaattaggctcaatgaaatatatgaagaactttatggttccatttacttggagaattatagcattgaaaagtcaggagttcttttagatggaggtaaaatagttgtttttgtttatcgcagtgaatttcttctctactgataataggacttttcttcttcgcgtcaaggacagtgaattgttgttgtggttacattgcctgggattttgatcaattttgtgaatccaggtcttgagtgatccacaaaaaagagcaattt

SEQ ID NO: 55672 - DNA, 784 bp, Populus trichocarpa
  Intron number 1 from transcript POPTR_1180s00200.1 (locus POPTR_1180s00200) derived from phytozome v7.0 (chr-ID scaf fold_1180; pos 436 to 1219 reverse strand)
cctggtgatcgaaccgtggtctggtcagctaataggtacgcttgcttatgcttatatttatacctgatggtctaagcatttgtttttgtttaaaaagtagaaccttgtacaaatccctaagctatacattaatgtttttatttgagttcctaaaataatttgtttcaattggatccttaatatatcagaaatcctcaatcgcatctcaattgggattttcttcaaagttcaaacctcgtcaggttctatctatgttcattataattttcatgtatagttttgatttcatgaatgaattgatcttattttaaagagaacttgacatactagaaaagctaagatgattttagatgggaagacttggaagtttatttggaaatcgatgtatagtttcgagaattatatatgataatctctcaagaaaatttgaaagcaaaagtctgacgttcttgtttaattatatgaacagaaaacaaaagaaagataaatgggcgatatgtatagttttgcatgcttgaaaagagtttatgcttgtattatgcctaacagtttcactatattattaatgtattaaatcagtatttataagttgcaaagtccatgaaaatctgttatagatcattaatggcactgaatcttgaccgaaaagagaaaaagaaaaatcaaagacatttctccttctttagtcttcacagaagctcttgcaggtgacaatttctgaatttgctcaatgataatctaatatttagaaactctctggtcaccaaaaacgcattcctggagc

SEQ ID NO: 55673 - DNA, 426 bp, Populus trichocarpa
  Intron number 3 from transcript POPTR_0003s21610.1 (locus POPTR_0003s21610) derived from phytozome v7.0 (chr-ID scaf fold_3; pos 19705699 to 19706124 reverse strand)
cctcaacaacaataccgatctggtagcactatctggtaacaattgttctttcccttcttcttgagaaacatgatcacaaaatattaaactaaaatgcattgtactgaatgcgcgtctcgtcaaactaacttcacgcttccataatttatatgttattcttcgtaaaagaaatcaatcaaactcaaaaatttaaactgtgatataatattctaaaaatatattattttctaattcattcaagtaaaagattctttgattattcaaattctgataccaaatcaaaaactaattcaatcttaagctataaaaatagttatatattactctctacaactcatcataagaaaattatttataccattattattcctttgatgacattttggtgcttttattcttaggtgctcacacatttggacgagctca

SEQ ID NO: 55674 - DNA, 493 bp, Populus trichocarpa
  Intron number 4 from transcript POPTR_0006s03980.1 (locus POPTR_0006s03980) derived from phytozome v7.0 (chr-ID scaf fold_6; pos 2696660 to 2697152)
tggcagcccaaaatccatcagcttttgcgcctaaggtaatcttcaatgatttgaggttctttaccccttgtttgttctttaatttttttttttgttttggcaataatatgagtggaaaattttgaggaggaacaacccaagtgagagtaattatttattcagaaatttcggtgtgtgtacgtacaccctttctcacgttcacttggagtccatttgtggtaattatgacttcaagtgagaaagcaccatgccatgtgaggtgaaaatctgccatgtagtaaggtgctctattttcaaatttgcgcctgaaaatttgagtgtgctattttattcatgatttttgcttcgataatgtagtgtggaaatatgtacattggcctctttcagtgtgtttgtttatcttgattcaaaaagtgatattttttgtcagcattctatgagctagtgaggggaaatttagttctctcatttgtgtttcattcacagataacag

SEQ ID NO: 55675 - DNA, 802 bp, Populus trichocarpa
  Intron number 3 from transcript POPTR_0003s12260.1 (locus POPTR_0003s12260) derived from phytozome v7.0 (chr-ID scaf fold_3; pos 12899722 to 12900523 reverse strand)
gagcacgggtttgggggcagttacagaattgttttatcaagtatagtcactaaaaactttacccagcaactggtcaattttctactcaagcaagcaagatttctatgaacaatttcttatgcggagcaaaaggatttggaactgattgtagcaaaataagaaaagaaaaaagaaaatttgtatgtcgtatgcgagactatgcgtaggttcagtagtccatttgtgtttcctatggtgtggctgaaagcttgtagatgattgttttgccattcagtggcttacaatttatgccttctatttgatctacatttttgtgtcattcttatgacaatttatgcttagagagaattcattgtgtctagattactgttattttttttttcatttgcaaatgtaaaggcaagaaaaggccagaattgggggtttcagagagcagctaaaatctgccatctcataaatatttgatgaaactgttggagttttcatacctaaaaatttagaaagaatatttgatcatatattagtgacagtgcaaaatatcaaaatttaatatttaggaggggtttaatttcatcaaactctcaaaaaatcttacaataacgtaacctattcacagactgtgtctgcagacactgactgatgctgttttagtctagcatatgattttgttccatcttcggtcaaataataagtgatgctaatgaattgatgggcagtttacttgtatgatgattggaataacaactcaaatcctgaactttttgcagtttgctccctttcgaccaccaaagattagcataaa

SEQ ID NO: 55676 - DNA, 715 bp, Populus trichocarpa
  Intron number 2 from transcript POPTR_0018s08990.1 (locus POPTR_0018s08990) derived from phytozome v7.0 (chr-ID scaf fold_18; pos 9882933 to 9883647)
cgatcgaaacataacagttagcactagcaatcaaggtagcgagcgtatcatcttttttttcttttttttttacgtatctgatacttttatatttttctttttgtgttattgttatctatctatctatctatctgcagttgctttttattctttcattttgtttggctgctgagaaagttgagaaatcaaaaggaataagttagcacgattctcagtcttgaattgaataattacgtattagcaaactaattgctttaattattattttaatatttggaagatcattttcttactcttaatctcttcagcaaccacactaagttagctattttttttggactgtcaatgttagccgatttccgatttctttatagatttaattacgctgcggaaacactttttttatgccttgatttgattgacactgtaataggcagattttttttataaaaaaattggatcaatgcatgggaagctgtaaggtgtttaagagagacgtgttcctgtttccttctggtgccattccgaattgttttcaaatttagctttttcttaaaaaaatttatatggcggtatatatagaaactgtaaaaatcgaaatccgcttcatttgatttgacttgatgattgagtgtcgatgattattttgactctcttgctttaatctctaaaaattgggtgatttgggaaggtaagctggctgcatttttttggc

SEQ ID NO: 55677 - DNA, 803 bp, Populus trichocarpa
  Intron number 6 from transcript POPTR_0018s08990.1 (locus POPTR_0018s08990) derived from phytozome v7.0 (chr-ID scaf fold_18; pos 9884444 to 9885246)
attgttggcgcttctataaggtaataattctcctgcacagaacaaatgcttataaaatgatgaactctatatacgtgcttcattttattgcaatccttcaggcttatgttagtttgtaagcaataactaggttttatttatattttttgggtggagtttaaattttaatagaaatatgttaggcatgattgagaaaaagcaatattgcgttagcaatatatcctatcagctcatggttgaacattgattctcttcctggcatgtatcacctcaaaatacggccacgatttgtcttccacaattattcaaacccatttcctaccattttactgtatcttccatttagacatgggtaaatcaagggaactttgttgagaaaaagaaatgtaaaaagtaagctcatgggcgttcttctctgttgccgcactggaacaatcaaacaactcaatgcagaaacaagttttgctaatctgaacaaaatcagacactgacaaaacagggatgaagacccaaactaaccgttaattctctattgctaactgcatccataactcgaacaaactgtatcacactgtcattacttgctcaaggatcacagatcaatatctgctttgaactgctatacttgcaccctcgttccatttgcatagaaacctctgttttaattaccattccagcagaaagacaaggccttagtgtgtttgttaaatcctttctctgttctgttccaaatatctatgtttgtgtttatatctgaatgaatgacctgcattttcagtgcaacaaccaaaactttggctggt

SEQ ID NO: 55678 - DNA, 343 bp, Populus trichocarpa
  Intron number 1 from transcript POPTR_0013s04790.2 (locus POPTR_0013s04790) derived from phytozome v7.0 (chr-ID scaf fold_13; pos 3303399 to 3303741)
caaagaaatctgaaataatagtaccctgtaagcatttttttaacctagacctagttatttttgttagctatgagtcttgataagtaatttactgtggtaagtttttacatgaaagaaatcccaagatccaatgccacgatcagatatttatcatggacagttcattaatttacagtgaaatgtaaaggttgttttcttcttctttggaaagcagcttaatctgcagaaacttcaatcaaagccaaccacaatatataacacatgcattactgaatattaaggcataaaccagtggatttgaatatataacccctaacagtattttgtggcaaggtattaatcc

SEQ ID NO: 55679 - DNA, 717 bp, Populus trichocarpa
  Intron number 1 from transcript POPTR_0018s09470.2 (locus POPTR_0018s09470) derived from phytozome v7.0 (chr-ID scaf fold_18; pos 10354937 to 10355653 reverse strand)
tttgtagtcctctggctgtttttgttcagattcaggtttgtttcttctctttctttctatttcagatccaccccgttttgttcctttcttacaatgctgacgcgtaactccacgtttattttcctgattttcttttcttcttggaatgcagtggattgaatttcaatttttttagctttgaatttccttattgtttgtctctcttatttatttattaggatctgatcttctttggaagttaattaaaaaaaagaattacgtaatggattgaattagattgcatgtatttcaaagttttcaactttttttttattctttttgggcgacattaaattattatgacagtgactgatcgaatgggattaggaaaggaaatgcttagattaattatatctgggacgtgatttaagtaattattgttctgcaaacttgccaagtgcattgggctaaccttgtttctctcttcttcttcttttttttttttttctaaacccggtatctaaaagttcattggaccctgattttctggggcattttagaagcatgaggcattagtttcaatatatcaataaacattgagtgagatttatttatttattttttcctattcttaatcctagaaaagcaaaaaggtgctttcttttggggttttattttaattttaccagctcttcaccaccctcttctctctttctccatgttgttcctgatgtaggg

SEQ ID NO: 55680 - DNA, 963 bp, Populus trichocarpa
  Intron number 1 from transcript POPTR_0013s04580.1 (locus POPTR_0013s04580) derived from phytozome v7.0 (chr-ID scaf fold_13; pos 3142021 to 3142983)
gcctcaaggtatcaatacttccatacacaagctactttcttttcttgttctttttttaaaaaaagatgagctattcgtttgactatgtttctctaggaagcgatatcaactcttcatttctatttttttggctaattaattatggttttgggtgttaaactgttaattgatgatcggaatatgctttgtatatgccttactctccctgtttttttttttttttggtgatcctttctttcttctgatttttgactcagtttgcagtctttcattgtttcaccagtggtcaactttgtgtgctaaatgcctaaaccttttgtaaacctctgaagtttcctctttttttttttcttccttccagtcagaactcagaagtttcccttttgttttcctctcaattgtttctttttatatctagccagttacatgtatcaaacaattacctagcaacttgattaccatgtgaaggaatgtaattatacttagtctaaggattataaggattagagctagaatcgtgatctgacattattattcttttgttattatggataagtttatctggcacatgcttgaacttgggtcaaagctttgataacctggaatgccttgaaagttgaagcttgctcgaaactttcaaaacatggaattgctagattctttttttattgaattaattatgaatggatagctattctttttctaaactttttattattattttaaaaaagaggtaagttgaagtgttgttgcatgttttctcaactcatttaaattgaaataaacaattcttgtaggtttaatcaatgcataaattcgtaattcatatttactgcagctatgctaaatattgttttactctacatactttctggaatcttagaatatctgtttgtaagtagaaatgataacgcattcattttctcaggtcaaggattcgctgctggaagaataaatttagga

SEQ ID NO: 55681 - DNA, 486 bp, Populus trichocarpa
  Intron number 4 from transcript POPTR_0006s10680.1 (locus POPTR_0006s10680) derived from phytozome v7.0 (chr-ID scaf fold_6; pos 8020457 to 8020942)
tgccctgatcagaattccttagaacgactctcacggtatgcaaccgatcagatcggatacataagatccaaactcagttttttttttttactttttgcagtataattgcacataaactgatgcgatttagtgtgaagttgtagtctggtgagtgcctaaacaaagacagttgatggaggcttcgttagactatcagaatgttcatcagcatcttcagcagaaaatccagtagcatgtgcaccaattattcacaccatccattatgttactaattcaaaataatcctgctagtcacttgattgtttccttatttccctcattatactctgacagtttaattgaaccacaccgctaagtaagttagccaatccaaaggatatctcttgtctttttctttctgttgcttgaatttttacaggctttcttaacattggtgacaactgtttattaggtgcttcttttgtggtagttgggcaggcaagaatt

SEQ ID NO: 55682 - DNA, 313 bp, Populus trichocarpa
  Intron number 1 from transcript POPTR_0019s01060.1 (locus POPTR_0019s01060) derived from phytozome v7.0 (chr-ID scaf fold_19; pos 811148 to 811460)
tgttcattcactgtaagaaaaagagaattgttctacactgtatatttcattctgcagttacagtagtatatattacatgaggaagcaaaacacgatcctatatctcagctaaaatatattaatataaagaaaatcattctaatatatttctttctgcagatcctttgcaaagtttccacaacaactcttccaagctattgttgaccattgtactgaaaacacaaaaaagaaaaaatcaaacagagattttgcttcccctccattattgttttctccagaaccgctcttctctctgtgctattactgtaacaat

SEQ ID NO: 55683 - DNA, 164 bp, Populus trichocarpa
  Intron number 1 from transcript POPTR_0013s05110.1 (locus POPTR_0013s05110) derived from phytozome v7.0 (chr-ID scaf fold_13; pos 3621016 to 3621179)
ggatctgccgagtaagttttgatctttctttatttctttggggtcaatattaagaaaacccttttcttttctttgcttaattatttttgtttattttttattttcttgctgaatttcttgggaattcttattgaaaatacttgttttgaacagagaaagcaaag

SEQ ID NO: 55684 - DNA, 826 bp, Populus trichocarpa
  Intron number 2 from transcript POPTR_0013s01120.1 (locus POPTR_0013s01120) derived from phytozome v7.0 (chr-ID scaf fold_13; pos 614468 to 615293)
ccaaggttgtttatttattctctctcatattgttttgtatagtatattttagcatattggttttgcttgcaatgaggttcagcacattagttgtttggaacgtgtggattggttgttcattgtggttgtaagttgcaatcatttcttgatacttgtcgttgatgtttaccttttagagaaatgcatgcagattcaggaagttgaaagtgtatccacttttgttaatgctaggatttggagctgtgtcctaatagtttaggaattttgcgaaactcggtgaaatgattcaagtaaacgtaagttactgcatttagtcttattggatggcaatatgaggtttttttttaccccttccgtccatcaaattatgttggaggaaggggaaaatgcccttgaacttggatatgttaaccgaccaagtgtcaacaacatttgaattggagactgctttttatttcataatcccagacaatgttgcttttgtgatgatctgattcgtgggaggcacataccaaatgggagttcactgataacgattttggtctttgaaaagtgttttactaatacctaaccacacattcttttccattgcaatatggaactgccgagtttttatttgttctagcccttgaataatgcaaaattgcacatgaaccacctgagtacttgttgtcttcctctccatttttgcacatcatttgtcattttttactattgacacagtaacttttagtatagccgtgtctgactgttttttgttgggtttttcctggactatattgtacttctgagttttgacatcaaaatccttttcttgtgaaggtgg

SEQ ID NO: 55685 - DNA, 751 bp, Populus trichocarpa
  Intron number 2 from transcript POPTR_0018s08370.1 (locus POPTR_0018s08370) derived from phytozome v7.0 (chr-ID scaf fold_18; pos 9313689 to 9314439 reverse strand)
ctcactcagttagaggtgaactccttttttcatgtctctaatcacatttaatttggccggatcacattttgcaaatgcttttacgaagatgtattatcttaatgcattgtcaaaaggatgtgcctgcacgtgctttgcttaactgcaagatatttttttatttcgtttctgtatttccattaattctcttgaaattttcaatccaaactgtctatgtttcccacgacttttatttattggaataaatatagtggaaacagtccttttgctgctcatccaagaattttgtggagatgcagtgcctctgctatttgattggatgctaactttggtgaccaatgcctcttatgccttattttggccgggaagagtttgctcccctgagagtttttggtgacccaatgggactatagcttacgtgtaacctcaaattgttaagacactgtgcctggtaacagggggttggtccatttgttttggtcttttcctcctattgatgatctgaggtttcttttgttaatttgcaatatccattgcaatagttgtgtaaatgtggtttggtaggagcaccagtgcttgacctcaaggataacatattttcttatattccatgaagtagctaaaacccctcatcccattcgtgaatgattctgcagatcagagttacatttttttgtgtatgcgcctttgccttgctttgtatattgagctgttatgttacatgttctcttctatttgtagctccaagttg

SEQ ID NO: 55686 - DNA, 764 bp, Populus trichocarpa
  Intron number 1 from transcript POPTR_0018s08370.1 (locus POPTR_0018s08370) derived from phytozome v7.0 (chr-ID scaf fold_18; pos 9315298 to 9316061 reverse strand)
gatccatttgatttgattcgcaaaggtatatatatttgtatgcttctctgtctttgacttttacaatagatctttcttcttctttaggttttagttatttagtgttcgagatctttaaggattgactgtgtaggttttggtggtgattgatttgtagcgtttgcttttattcgttttttgtgaaaataactttatggggttttgatttaattattctttgtaggtttttgggtttaaattgaggtaatttgtttgtgttttatgagctgtaacctactatttaatcaattatgggttttgaagtgttgttttgtgctactgggtcctatttagtgcaattgactcgctgttttactgaaaatatttgttttttattcacacggtatgcattttgtgctgattcgttgatggttcagagcattcaattgagcttcacctggggagaaaatgatttgaatattgtagtgaagtttctgttctatttacactatatatttagtgtaattgtaaaagctgaatactgaaaatggttatgctaaagttgcttcatttaggataattttcaattgagatatgcctgttggagatcttggtatccttttcaggcaggggttgttgaggtcagctgtggccaggactggattgtatgcatgtgggtgtgtcatgggatttgtacttcttttttgtatgtttaactgataagtataattaaatgaaaatgttttacaggttttggataaagcctactgcaactcaggagggtt

SEQ ID NO: 55687 - DNA, 503 bp, Populus trichocarpa
  Intron number 2 from transcript POPTR_0003s05190.1 (locus POPTR_0003s05190) derived from phytozome v7.0 (chr-ID scaf fold_3; pos 6415670 to 6416172)
cgcctgtgctttccctgctgcccgcaagaggaaatgtatgtttttttttgcttacctagtcgtttcttcatattggaatctgtatgtttctgggtacatgaatggaagtaattttgccttttcttttgctttcaagttagtgttttttctcctttgtttatatctgtactggcatatgcataggtttatcactgatttgtttatatcctttgtatgggtggtggtcaagcaagtttccatttctgcccacgctcaaagattcaagctcctttacctgtttttttttttatctgtatcagcaattcattcatgtatggtttatgttcatgaattagtggtttatgaatatatataaataattttgagccgctcctggttaacttttaaatttgaaacttctgcttgaacctgtacagtttgatctgtaaacaagttggttgattgtttgttcttttattgtggttttagacaactggagtgagaaggcaatcaggaggaagaca

SEQ ID NO: 55688 - DNA, 908 bp, Populus trichocarpa
  Intron number 1 from transcript POPTR_0003s11350.2 (locus POPTR_0003s11350) derived from phytozome v7.0 (chr-ID scaf fold_3; pos 12180775 to 12181682)
gacgcaacaaaactagaagaactgaagcaatttattgaacagtgcaaatccaatccttccatcctcgccgatccttctctttccttcttccacgactacctcgaaaggtattataatatctactctcattataatattttaatcatttcactttctatgtctctcatcgtgtttctcctctcctctcgaaacgtttcgtttcagtcttggtgctaagctccctgcctgtgctcacaagcacgacgactccaaatcggtacaatttctttttttgttgtatttaattatttcgatgctttttaactgaaatctgtttggattgaacgtagaagagttatgtggtcgaggagagtgatgaggaaatggagaaggaagagtcacaaggagaacctgaagtcgaggaggaggaggaggagataattgaatccgatgttgagctcgaaggcgagactgttgagcctgataatgatcctccacagaaggtttttttttttttaagaattatcatacggcgtggtgtgttttggttgcattttagtttttcttatttctatttgctgtggctgttttgtttgataatgaacttgactatttgtagatgggggacccatctgtagaggttacagaagaaagtcgtgatgcttctcaagaggccaaggctaaggccatggaagctatctctgaaggtattatcatgtacaagctttgcctatgagttcatgcgtgcttgttataatatgctgaaattttgattctattcgtgtccagtatgcatctaatttaagtcgataaaattttatggtgagattcgtgtatgtaattttggcgtttctatctatgcaggtaaattggaggaagcaattgagcatttgacagaagcaatttcactcaatccaacatctgcaata

SEQ ID NO: 55689 - DNA, 399 bp, Populus trichocarpa
  Intron number 2 from transcript POPTR_0003s21140.1 (locus POPTR_0003s21140) derived from phytozome v7.0 (chr-ID scaf fold_3; pos 19410815 to 19411213)
gttttggagcaaacaggtctacatcattgacatttgcttctcattagcagacaactaattgatataggtattaaatgtactgattgctctacatcattgacatcatttgataaaatatagggctgttgagaatgttttcttcctgaagaactgtgaacagactgaaggctctatctgttttgagcttctaacatatcttgaaatccaaatgcttccataggaaagaaagaaatttaacagaattatgcacatttttcattgcatacttggtgatattgcgtataagcttttttctctctctgatctctttgtttttgaacttaatgttttaggtcatttctcctaactgacttcttccttacagtgaccattggaggaaaaatactccagttctcgcaa

SEQ ID NO: 55690 - DNA, 541 bp, Populus trichocarpa
  Intron number 2 from transcript POPTR_0006s03350.1 (locus POPTR_0006s03350) derived from phytozome v7.0 (chr-ID scaf fold_6; pos 2131391 to 2131931 reverse strand)
actttgctcttgcgacggtttttccttcttgtaaggtttgaaaataaatacaacaaaaagttggtattaatgtatataagcggtgtctttgaacattatgtgaatatctgcaagaattgattttcttttgcatatctgtcctagatgatctaggatatgaaatcttttccattttggtttgaagcatatagatggttggaattttgggcatttaaaccctcaacaagaaaggcattgttgaaaacgactttgacaaggcaggagaaattttcttgaaattgggtacaaacatggtaactataggtagagctaactataaatcaaacttgatagaatttgtaaagttctaatgactgtttgattcaagctaacagttttacaaatcaattcaggctgtttctgagagaaaaactatagttttttttatcatctccctccctgaagtcgatagatgttctgggatttgttgtttgatgtagcaaatttatggaaatactaaaattttgctcttttatgctttcttttctccaggtttccaaga

SEQ ID NO: 55691 - DNA, 872 bp, Populus trichocarpa
  Intron number 1 from transcript POPTR_0019s13630.1 (locus POPTR_0019s13630) derived from phytozome v7.0 (chr-ID scaf fold_19; pos 14495722 to 14496593 reverse strand)
ctgcttaccggtacgtatattagttctcttaaaggaaagtatttctctgttttttgtttttcgagagaggacgggaaagcaagggaaaggaaatgacttttatatttattttgtttgattttttaatataattaaagggcttacatttttattcatgattgtgtaatatatagtgtaaaaagttgattttgttgctattttgaaatgttttttctttttttcaggatttgaaaaatattgcttattttattattgtgaaaatggtttgattttgaagattttttcagggcttgatgttagaaaaaagtgttcttttgatgcttattaatgggatttaggcaaaaataaataaataaataaaattcttagtattttgagaggcgtaaggatcaattagtggatttctaattaatcaatataagtctgtgggatcttgtgtttagaaatgagcttaattatattgaaagaaaatttgggactgaacattttggtttctgcgtctgaattattatgtagttgccattgcccaattgactgatcaaataattgggacatcatttgttacaccaagtttttttttaatgaaaaacgtattgactttgtgattggataacagttttgagagctaatgaatcaatgttaagtgtatgctgtttttattgtttctttattgtcatatccgagtattgttggttaatgattgttaatgttttttccttaaaatcaaagttttggagtactgaagtagaggtatttaatcgtaaacgcgatctaatagaggaaaattgggagtttagttctaatttgttctgtttgtgctgatgttaatgttatactgatgacggcaaccagatataagagtgagcttgcag

SEQ ID NO: 55692 - DNA, 1013 bp, Populus trichocarpa
  Intron number 1 from transcript POPTR_0003s01830.1 (locus POPTR_0003s01830) derived from phytozome v7.0 (chr-ID scaf fold_3; pos 1700162 to 1701174 reverse strand)
agcaaaatctttggtgggcttttgcatataacatcgtaagttttgttctttatccaagcaatggccatatgtttcagtactaaaaatatataataatagcagttctgggggaaaggggccatatggcagatcttggaagcatgcaccttgaaagagagaacagtaattctaaagtttatcagtgttgtataagtgtgctgatttcagcctaataatttagtatggtataaaaagccaagcagttgcatgtttatgcctgttgctggttgttgtgattatcacagccacacagggtccaggttagggattttcaagttgcttgtctctgtgaatgtgctattcaatcatgtcagagttttcttttttctttttatttcctttcctttcagtttctttttttcccactgtttttgaatgagtgtaaaaacagtagatatccgcatctgcatcgtttcggaattaaactttcacccccacctactacgtactatatatttctttcttatcctgatcccagaattctactcagatgcaattaaaaatcttctgttgcttttcaaactaaactccaagacctagttgactagttcatacctgcaaatatctatttgcttgctctattcggtgtgattgcatctgtggaattccttgctaacctcttaaaactccgctgaagctcctttccactcaccaggttgaggacaacatactcttttgctcaactctttctcagcctactgtctgcacacaccctcaccttttcttttttgcattttgattccttcaaaattatagaatcaattgattgtgaggtaaatttatttccaaggtcttgtagctcagattggcaatttttcccatcattaaacaagcttagcaaatctctatgcatctcctatgactacaataggatcaagcagctttcacgttgctcttcttgaatgtttttttctgatgctgcttgtatactacatgcaggtaggaattccgattgcagctggagtgttactgcc

SEQ ID NO: 55693 - DNA, 496 bp, Populus trichocarpa
  Intron number 4 from transcript POPTR_0013s13300.1 (locus POPTR_0013s13300) derived from phytozome v7.0 (chr-ID scaf fold_13; pos 13822855 to 13823350 reverse strand)
cgaaaaaagagacgacgacgagtatggcatttgtttcagggttgattgctataattagtttttacctaggtgtgaattgttttatgtggttttgtttattgaatcagaagcatgtgcacaattgaattcattctttagctaatattagagaattactttaggaaaagcagtccacattgttttgttttttttagtggttggctagagttaagtgttctgcatgtgcttttttgataggagtataaccttaatcaatgttgctgcttgttaaggttttctggtattgttcctatttaaaatcagctcggatggttcaaactcgcctgtggcattaattgaatttgatgtgtgtgggcatcaatccacttggttttacttatgctatatgtatgcattaatagtgtctgttttctgtttattccgtgttttaggtgttgttcttatcctgtaccttcatgcagcccaagagaagaggcaggcggaagggatcaaaaaa

SEQ ID NO: 55694 - DNA, 1003 bp, Populus trichocarpa
  Intron number 1 from transcript POPTR_0006s14220.1 (locus POPTR_0006s14220) derived from phytozome v7.0 (chr-ID scaf fold_6; pos 11538202 to 11539204)
tgtcgttctctcttcttctcagcttccttctgaatgtaagttttcacctgatgccctgctctttttctttcttttcgttttcaagtgtatgaaattttgatacgccttcaccctctaaagaccttctatgctgtaaataacaattcaagctaaggatctcactactaatcttgggtatgccttcttttgtctttatgattggattaatatgaatagattctgttgttactaattcatactactattgggatcggagtccatctgttgttactaatccattttactaattcatatatacaaaaattcatactacttattacataacttaagcttgtttgttcttttttttacttttgtttgctttaataaatcttttcaaggtatacttttaattctgttttctcaaggcaaggctgtgttctggttacatgggggggcttgaaatgtagggacagttcaaggattctctctctgttttctgtatccttatatttagttctgattttaaataatgaacttgaaattgttgtttgctttgacaaaattttagaattccgtgaaaatggaattccaaaatcaaatcaaattctccatgaatgacacctatactgagttttggtttagcaatgtagtcaatccgagaatccttctacatggccttgaaaacatgttgatcacatgtggcaaagatattaatcttgtttttctagatcttcaatatttttctattcacatgctcggttctcaatatgaacagtgtaccacctgttgaggagtctttggtgtagtgtctatatttgatggcagaaccattcatgcaataaggttcaattgtcaaagcataaaactttcagtttagttttgaaattatagcaagcaacatcagtgtttttgtaatttgattcttgttttgttttcatttttcgcttgatcaatcaatttactaatatagttgcatcttaatgcagataaggttgatcgtgcagttagcacatctatctac

SEQ ID NO: 55695 - DNA, 383 bp, Populus trichocarpa
  Intron number 3 from transcript POPTR_0006s28500.1 (locus POPTR_0006s28500) derived from phytozome v7.0 (chr-ID scaf fold_6; pos 26182102 to 26182484)
gaggtaatttttttctttccattattgtaatttgtaccttttatatatctgtcattcgttttactcttttagcaactgaaatctgagaaagctgttctaaaacttttgaatttggaaaactattaaatttacttcatgtaaaatgctattatgatatgttggtttcatcctctatatcttagtactcttctcattgcatttaatcgtcaaaatcttgcagtttagaatgctagtgtatgcattggttagtatcgtggatgaatgtgtttttttgtagttgacagtgtattgctatcttatattatggattatagtaacagtaaatctgatgaaatatgttttgtttccttgtttatgagtggttctccggcctaggtttattt

SEQ ID NO: 55696 - DNA, 665 bp, Populus trichocarpa
  Intron number 1 from transcript POPTR_0013s14390.1 (locus POPTR_0013s14390) derived from phytozome v7.0 (chr-ID scaf fold_13; pos 14605499 to 14606163 reverse strand)
caggcttgatcctcctaacaagctcttctttccttgtaagaattaaggttttgtggttcttttttgttgaaaatctttggccatgttctttttgttttgattgtgtatgcatagcttgtactgttttcggttttttttttttacttttcgtgatctgggtttctttatttttatatgaagaaatgaccttcgatttgttgatatcataaattacacagattagattgtccctgtagattttgcttgatatgaactgtgtttagtagattcagttgctgttggtgatgatctggggttttcttagtttagtgaagggaagtgagattcttgagaatggtaatgtctagcccttaagaaaacagattgattgttctttgttggtcaaaatcaaacaagttaaagaaacctaattgggtttgctcattgtatatcgactgcaattcatccagctgctctttgttaatgtacttatagctgaggaacctgattgtttgattagtttgcagatttgaagctatcattatgcagatgaactcagttgtttaatgatttgtccctttgttttttctggggtttactttgtgtttgaaacattggaaatttggtagtgaactagatttgtgttttcttggtacttaatttgttacaatattattgtgctgaag

SEQ ID NO: 55697 - DNA, 380 bp, Populus trichocarpa
  Intron number 2 from transcript POPTR_0003s09350.1 (locus POPTR_0003s09350) derived from phytozome v7.0 (chr-ID scaf fold_3; pos 10664509 to 10664888 reverse strand)
ggtttttgaactcaggtaattagttgagttattgcaagtatttgtgaaattgtagtattggatgaaatgggcacgatttatttgatgaaataaactggcacgaagagtagtaagttaggcacagatagcaaattgaaacccatttcgaggtaaaaaaagaagaaacgatatggcctcaagtttggatttgagagtttagttgattttttttagtggatattggttagttttatgtacttttttcatatacattttagataattttatgaaaattatgggcaacatccctttgattcattgttatgaattttcttttttaggattatttgcactaatttatgattctttactatgaatttaggtgtggatttggccttcta

SEQ ID NO: 55698 - DNA, 833 bp, Populus trichocarpa
  Intron number 1 from transcript POPTR_0019s04600.1 (locus POPTR_0019s04600) derived from phytozome v7.0 (chr-ID scaf fold_19; pos 4794361 to 4795193 reverse strand)
cattcagtaagggccattgctacttcttttaaatcttatttctcgatttacttcccatttcacttcctgatgcttagagtattgtttatgaacagatgaaggatacatgcaaatcaaatgtaagtacaactattctgttttctcattgaatcatttcttggaattttatttggtcgcgtggatcatcgtgtgaaggataaacactcataaagatctttagcttatcagattctctggtgaaagtgatatttgctatttttatagcaatcatcacattgttgctggtcttgcttctgataaaatacgtgagcaagggcaagaagaagcgtcctaagcctgtaattcaatctaaagagatcaccacatggtctggcttatatagattctccaaggctgagattgagaatgccattaaccacagcaaggtgaggaagagcctagggagaggaagcgctggggaagtttacaaaggtgttctaccaagtggccaagcagtagccatcaagcacattcataaaagcaactcatgtgattctttccagagggaagttgaagggctttccagggttaggcatccaaatcttgtttgtctctttggttgctgcatcgaaggagacgaccggtatcttgtatatgaatattgtgcagctgggaatttgtctcaacatctcctaagtaacttcctgtgaatctttaaataacgtttcagtgttttttgtttaacatcttgagttaatgggtgcttccagatgatgcctgctttgtgttgtccctagggtgtttctgatcatatgcctcaatctattttatccaggtaaagatactgtactgac

SEQ ID NO: 55699 - DNA, 740 bp, Populus trichocarpa
  Intron number 3 from transcript POPTR_0006s08180.1 (locus POPTR_0006s08180) derived from phytozome v7.0 (chr-ID scaf fold_6; pos 5954142 to 5954881 reverse strand)
tgcctaagcaagaacttgacaacaagtcacttatctggcaagtcttaccacgatttcaccaacctcctttttttgctgcattaatcaatggggtttctttctttgaccttgtcatgttcattttcacttatgaaaataaatatctggaattaaactactgttagttatgttatcaactagcattttctgcttttgtatgccaatgtttcatgtagacagatagtaaaatttacaggcagcagtttggtctttgatcagacttattgtaatgatattaagataacattgtatcaaaccaaaattccaaataaacaagcagaatcactttttacagatttccttttaagctacaacagggggctccagctcattttatagggtgagaggggctattttggtgattggaagggttttgagaaagaggagttacctctctttgtatcttagattgactagctttcttcttttattttaggggaaacaatttttttttcttgtttctcttgttgcatcttttgtagcctttcctatcttgcaattgcaagtcttgatattgcacatgggattgcgggatgcattcctttggtgctctacagtatacgttttgcatatctgaggtcttgtaggatcaatgattttttcctacatatgattaccaactacgtacacactgctagttcctgtaagcttatcatgtttacggtacaatgaacgttttgttttttgtcctcttctgcagt

SEQ ID NO: 55700 - DNA, 918 bp, Populus trichocarpa
  Intron number 3 from transcript POPTR_0003s11030.2 (locus POPTR_0003s11030) derived from phytozome v7.0 (chr-ID scaf fold_3; pos 11883746 to 11884663)
ctaggatcagggagaagtacccagataggattccggtgagagtccaatgacaatatcctctctcaattgtttattgttaattcccatgtgtgaactcttttgcattagaacagtgaatgccttgcttgggactgttaatgtgcttagaagagtgcctgatgttgcttaatgcaattactatacctgccattttgtaacctggtgtcttatatcaaagttgtatatatggtcaaaagttgagtatacagtggtgcatttctttctgcctggaaagtctaacacctatgtatttgctaaatgtattttaaaatatctttcagggttttgacagtcaaacacctataaatataatgagggccttgaactgtagtctttatccaaatgatctagcagcaaacagcttctgcttttatatggatttaggttgtgcgacaggttaattctgtttgcaattatcatccatggcaaagtctgatggggcattatttacaatgattggttggaaggttttaaaaatgagcaaacccagtagactatgaatgtatggtgcattgggaacaagtaaagtaatggatctgctgcatgctcttgatgcttttcttttctgtgggttgtattgaaaaatgccttatactaatgatcttaccttttcccactgtgtacataattttaccagtctcttggaatgagattatttttggctacaggatacagcaattaaaatgtgtctcttgcttcagaaaacatatcacgatttaatctctgatgttactttgtagttgctgtctatgattgcatgagttgagtgtgtgtttaaagaatcttatacgtattttgcattttcaagctaacatgtttctaattgtgcttgtttgtttttaaggtgattgtggagaaggcagaaagaagtgatatacc

SEQ ID NO: 55701 - DNA, 187 bp, Populus trichocarpa
  Intron number 1 from transcript POPTR_0003s13190.1 (locus POPTR_0003s13190) derived from phytozome v7.0 (chr-ID scaf fold_3; pos 13584710 to 13584896 reverse strand)
ttggagtgaggttcctgagaaagctggtacttgcctctctattcctcttttcaaccacttgtttcttgtccttcttctttgtttagttttccccggtaattaagctctgtataatttcttgtttgatataggtataattagtgaataatttctctcttttttggttgaatattttagggcttcaaag

SEQ ID NO: 55702 - DNA, 985 bp, Populus trichocarpa
  Intron number 1 from transcript POPTR_0006s04440.1 (locus POPTR_0006s04440) derived from phytozome v7.0 (chr-ID scaf fold_6; pos 3017318 to 3018302 reverse strand)
gacaagatcacgttctagaaaacctcctcatcgtatgtggagttctcttcctttgattttttttaaggccatgtaccaggagttactttgtgatttcctttaaacattaccttatttctttcaagagggtagtttcttgttggattttgtcgtggcagcctctgttttggtgttattgctcttcctgaagggttattttttgttgttttttcggcaaaaaaaggtatctttctgttggggtcgtgacatgttggggttggttcttttttccccttcgtggttttgcatcattgtttcatacactttaattgtttagaactggttattgttttctagatgtcggcgcttcttgttagggcaaggtgcttggtgatgtgtgcagtttctgtttgtagtgttcaagtgtttcactttataaaatatgcaattatttttttgttaaatttctgttggtctggtctgtttttagcagtggatgtcgatttaggtacacagcagttctctttatgaactatttctgagaattcgttcaagtcctgaagtttcctaccagacatgtacagacaagaaactgatcaatttgaaagtgttaaaatatatttgggaattctttctgaaaaatgtatgcagattgcatacaaaaagcacaaaatagaaattatggcagaaaaagaatgaacgtctgaagtgtttctatttagatttatacaagatttgtgtcgtatttgtctattatttttttttgttgtctagatatcctttctgtccttttctagtgcttttttctgtaaatatcctgggcattacctgttctctgcaatgattcttacattgtacatgctttctattcactctgttgttcctcttttcgaaacttgttctcctcattgtccttgaaacatcgatttttttttgttgtatatgaatagtttatcttatatttttgccttttgttttcaggtagttggcagccaactgtaccttc

SEQ ID NO: 55703 - DNA, 374 bp, Populus trichocarpa
  Intron number 1 from transcript POPTR_0006s07660.1 (locus POPTR_0006s07660) derived from phytozome v7.0 (chr-ID scaf fold_6; pos 5608040 to 5608413)
gctgtcttgcatataattctttcaacaaagtgcaagtttttaccttgtttatatataattattttattgttgctatgtgagattttggagaaattgagttcttggtttctagagaactcataaagaaagctcaaaagaatcttaatttctttgttctgttgagcaagtgagaaattttctctaacttgaaaataaagaaaagcacagacaacttttttaaaatctgttttgttttcttgtatcataattgcatgtgatgaagaaaagaatgtctcgtttattaggaaattcttttccatttgcttcatgtttctttctgtggattaatatactaataaaattttgtttttgttggacaggtagagaaaatccat

SEQ ID NO: 55704 - DNA, 481 bp, Populus trichocarpa
  Intron number 1 from transcript POPTR_0014s12380.1 (locus POPTR_0014s12380) derived from phytozome v7.0 (chr-ID scaf fold_14; pos 9137170 to 9137650 reverse strand)
ggtcgagacttactggggcaacgttaatcccatcggtgcgttttttcttttctttaattaatcaattaatttaattgtaattgatagccggtaatcgatatattttaacagatattgtggttcgtgtatcatagcattgaaataaagcctgtagctaacatgtgccgcctaggttactatgaaaaagacaatgcagacctgttgtctttattatttattttcggtaaaagtgtgacatcggtggcggccggtgtggaagtggggttcttggaccttagatccggtggtggcagttttgtatggtgaaggagcagcccgtgattggtgggtcggttaatcggacggttattaaacaacaaaagaattcgtaaacaagagaaaagtagcgatctagtcgagttttgattttttcattttctcaagacagagatcttgacaattgcgatatatttcgtttgtacaggtgtcaggagttgttacg

SEQ ID NO: 55705 - DNA, 512 bp, Populus trichocarpa
  Intron number 1 from transcript POPTR_0013s03450.1 (locus POPTR_0013s03450) derived from phytozome v7.0 (chr-ID scaf fold_13; pos 2139177 to 2139688)
tcactccttcataacccaccttcaaagcctgccttgtatgttccatatctttcacatcttccccttatgagtgtttctctactttattttgaaacagtcaataatttctgtttctgctagtgttttactgctgtttattgatcttccatcttcaatttctcaagtgttaatcttctgatgtttgatatacctcactgtatcattgagcgattagtcctattttcttgttgcctttttgtaatttgagtttctgtgaattacacttttgtaaaatgaattagcatttaaaatgaaaaaaaaaatcatggatctcatgagtcaaatggaagggaaatcagcaattattagtgggtttgaactgaatagacttttcagtttttcccaacataaattgctgtaatctgtgtaacacttgaaagcattcatcaatctagtactcaataagcttccataaaagtaaataatctgttgcagcagtggttttacagaactatagaagattcggaatttcg

SEQ ID NO: 55706 - DNA, 713 bp, Populus trichocarpa
  Intron number 3 from transcript POPTR_0013s03450.1 (locus POPTR_0013s03450) derived from phytozome v7.0 (chr-ID scaf fold_13; pos 2139887 to 2140599)
tggaaccagtagaacaaccaacagccttgatcaaggtaatactttaaaatttaatgtatgtggtcaagcatataaatctcatgtcacagcattgctattctgcaacttcagtgagaataaacataccgaaaacttagtgttattacctggttatttcttttactgtaaatgattggttaaccttagccttggattccttcacaacaaaactggggcacccaaaaaggtactctaaatatagtggcatctatgatcagatttatgaggaaagagttggcatggtacgctctggagtttatccaatcatttgatccattaagcttccttcatacattgtcttaagtggatttgtagcacttgccagtgacccaaaacccagatatggtaggtattttgcaagatcaggcttgaatcaccacaaactatttaacctttaggagtagatttattctcctcgtcagtagctttcaagttcagcttgcggactgccgagacacatcacaataacttccactttgctgtgttaattttaaaaatcccaacagaacacacactacacactagcgtgcacaaagttggcgattttgatgcttgagaggtcttgctttttgtgccttgaagaaaacaaaatggtgaaatggaaaatattttagctaacatatccatggtgtcctgcagatcagaaaaggaagttgcactccaaattcgatcca

SEQ ID NO: 55707 - DNA, 446 bp, Populus trichocarpa
  Intron number 2 from transcript POPTR_0018s14450.1 (locus POPTR_0018s14450) derived from phytozome v7.0 (chr-ID scaf fold_18; pos 14634801 to 14635246 reverse strand)
cggtaatcgtatagctggttgggttgagaacaaaggtttgctctcttaagtattacaaaatatttatattacttttgtatttttttagaattaatcaaataaggtgttgtttaattactatcattttggaagaaaatagaaagcatatttaattagtaaaaaggagtaatttgtttaattccttacattattaatataatcattttgagggtgaaatgcagctttacctgtaaatgcatattcataacgaacactaagccagtgatgatggaagcaatggacaagtagtaaattataatctttctttcaacctctttacatgaattcatcgtaccaattacatgcctcttcatcaataataattaagttattccaataatatcttttttttattctttacatgaagtctttatttatttattttttatttgtttatataggtggtt

SEQ ID NO: 55708 - DNA, 554 bp, Populus trichocarpa
  Intron number 1 from transcript POPTR_0003s08320.1 (locus POPTR_0003s08320) derived from phytozome v7.0 (chr-ID scaf fold_3; pos 9706242 to 9706795 reverse strand)
caagcagagacccgtcaaggcaaccaaccaccgtactccctccatctctccatctctccatctttctgtgtatgtttcttatgttttgatggaaaacggtttctaaaactaggttttttcttgtctttgcaaagatcgtcttagctattttataggttggtatttgagtactgcaatttgatttgcttgatttagtaagtgataaccttcgtagatatttgggacgattggattttgatgatctcttattttcttcattttctgaatttagaagtgacatgttactatcatatattaggttgttgtaatagcatccgtgattaaaaattctcttacatagattattcttcttttttgtccttgggttcgttggttgtaagagttgcctatttcggttgctgcttagaagaagtttccgattcaaggaccttgaatctgttaggatttatgcagttagcacttgatacttcgttttggatttagatgttttaagctgtgcatcttttgttttgattgcagacaaagagaacaaagaaggcaggaattgttggaaa

SEQ ID NO: 55709 - DNA, 610 bp, Populus trichocarpa
  Intron number 4 from transcript POPTR_0014s07640.1 (locus POPTR_0014s07640) derived from phytozome v7.0 (chr-ID scaf fold_14; pos 5724528 to 5725137)
gggtcttcactgttgggtcgaatacctcctatgtaattatctatctttctttcttcttaataacgttctgaattgttatgatgcctcttaaattttgttctctttttctgtgttccatcttaatgttgttcgagatgaatatttctactttccttaaaacttgatatttcatgtatgattaggacttctgtttacagttcaaaatgccaacttcatgaatcataactgctgcttaaaatgtgctcagtgctataacatttaaacatacttcaactggtatcttaagtattgaactcatgttttagttatttggaggcatttatattcaagttttgaatcaaatcgctcttgatatgataataatggcatcttggacacactccaaaaacctgttcaaaaaaaaaaaaaacagagatactccaaaaacgagttctttgatcaattatgtcaatcaatgatgttttatataaattaattgtattgtttttatttggggaagatgtgttacatatagccattttcttttctttttttccccttaatgttttctagttttctcaaggcgtgttttatgtgcccttaggttcttggttggtgaaggtgcacgtgt

SEQ ID NO: 55710 - DNA, 467 bp, Populus trichocarpa
  Intron number 1 from transcript POPTR_0006s26800.1 (locus POPTR_0006s26800) derived from phytozome v7.0 (chr-ID scaf fold_6; pos 24892959 to 24893425)
ttcaagttctgctcctcaacttgaagtcaaagaaggtctcatttctctctctctctgtctgtttttttttcttttcctttgcaatatccttttgactttaaaatggaattaaagcagtttctttattaaaatttattgcatttttcaaattttattgcttttcttcggtatttcaaataaactttcaaaaatttcatctgggttttttgtaatgaaagtcttgctatttatgctagaaatcacttgcagtaaagtcacagtcttttatttttatttatttctccatgatcttcaagtatctcaaaatctttccaatctgggttttttagaatcattaattttctcaaatgggtccccaatttttcttcaattttctcataagatcccttaaagatcgaaacattcatattgcattgtttatgtttagattttagaattttttgtgttttgttttgttaattttaggt

SEQ ID NO: 55711 - DNA, 600 bp, Populus trichocarpa
  Intron number 1 from transcript POPTR_0006s23750.1 (locus POPTR_0006s23750) derived from phytozome v7.0 (chr-ID scaf fold_6; pos 22460917 to 22461516 reverse strand)
cataataaaagggctaaagtttactcctattctaagtgagttttgaacttgttttgtgtttaatcggggctgaattttatttttatcttttattctgaaatggcatctttttctctattaaagtttcgaattttcagtgttttttggatgataattcaatgcttttctgcttactgcgatgtctatgcttcttggtcatgttttgaaattaatgttgttccacaatttgtcattttgttagagaattcaagctaaaccacactatgttttttccagaccttttggatttataggtttagttttctcttttgactgttgaagtgtaagtagcattgctggttaacttgtagcaagtgcatttctttcgttggtctttagcttgcgagcatgtagtcacatttggacatcacatttcaaacttgctacgatcaccttcatattttgatggaatggtcttcaccagcgttgtatgtaatacctgattaggatctggtgatgtgcatgttaaatgagttctttcagagtgtatgcgtgcttcatggttttaatggttgctgttcctgcatgatggataattgtttctctgcagtgactgtcact

SEQ ID NO: 55712 - DNA, 671 bp, Populus trichocarpa
  Intron number 1 from transcript POPTR_0018s03090.1 (locus POPTR_0018s03090) derived from phytozome v7.0 (chr-ID scaf fold_18; pos 2751543 to 2752213)
gcattttgtttctcttctttctctcaggtcattatctcactccatttatttattttgtctatttttgatcgtgtgaaataggaacgaatttgagtctatttttttttttggagatttaattggttaatgcaattgttattgatttttttttatataattttgaaatgtaatttgttcctttttttttaagatttaatgtttcttaattaatgtgattctaattgtaatcgaagatcaaagctagatgatttgattttttttttagttttctatttttgaacaagtaattcctgagaattctgaatctttgttttttagattttatgtacttttgatttatcaattaatcaacttacttattattgaattagatgttttttttatattctatttttgaatttgtgtgttaatttatgagattaggttgataaatgtaatttaggtttgattttgcttgtgttttaagctatttaagtttcctaattttttcgtatttgggttgttttgcaggttaagttcctgaattagaaattatttgagtaaatgttaatattagagggattaaattataacaaagtgtattatagaggaaaattattaattcagtcatcatcattgttgttgttgtttgtgtagttgtgattaaggagagaagtgtgtagtaattttgt

SEQ ID NO: 55713 - DNA, 922 bp, Populus trichocarpa
  Intron number 1 from transcript POPTR_0003s13480.1 (locus POPTR_0003s13480) derived from phytozome v7.0 (chr-ID scaf fold_3; pos 13858741 to 13859662)
tcttggctgaccctactcctacctctcctgatcaggtttatacataagcatataatatttcatagcttgttgttgttgttgtttttcttcccatttcttgttggctaattagggttttttttaatgattattggttgttgaattttagggtgttatattcgattctggtttatgttacgggaaaactatgttgatgctggctctgttatggttgataaatattagtttatggaggttctcctattagttgaaatttcttgtcaaagatcttagattgttcgattctgttttgattgaagaaaatcgttgtttttagtgtgatttgaaaaagattagttttttttatatacagattggttttgtacaggaaggatatctaatgtattatttaagttaagttcttctccttgctttgattttttttcttaatgcaatgctgctccttgtttcctatcttattttgaccgtttgctaactctgtttttctccgattgttatattttctaccagaatgagtgtcagttatggttaattatgaattgaccatgttttagtgaagaattttactcgttatttaggtgattcaccttaactaatccaacagtagtcatctaacacattttttttcttaattcaacttggaaaaccttttgagatctctaaatatttcatgaatccttaatgtgctgtatattttgtgtgactctaaacttgtcgagtgatgattgtctttgtgaactaacaggttgatgacaaccagtgagagtggcttagttggttaatttttccattgtcccacctgatgtgcattaacttgatcctaatttagaatatgttacattgtactgttgtttttgctgctaatctttatgtcatttcttaaccagccagaaagtgcaggcagtttgaggagacatattgc

SEQ ID NO: 55714 - DNA, 1039 bp, Populus trichocarpa
  Intron number 1 from transcript POPTR_0003s15900.1 (locus POPTR_0003s15900) derived from phytozome v7.0 (chr-ID scaf fold_3; pos 15567536 to 15568574)
accttcgagtctatcaaacctggaaaggcagcaatgtaatactttcttttcaacttgtttccctttcctttaaattttcctttttatttccttctctgtgtgtgtctttatgtgtttgttattatcaggttttatgttgtcctcttttgtttttgtttttggctcttacccagcttcctttcttagcttctttcaaactaatttttacttttctgccaacagaatcagtgaaaataattggccccaaggttttttttttttcccttttcacattgttgtcttcaccccccacgccccccaatttagtcttgctgcagcctgatgaatctttatgtaatctaaaccccattctagtatttaaatgttgagattaatgtttcatactagaggtcaaaattgggttatgatatcttgtattactaattatacttcctttgaactaatagattcatggaaaacatcaatgccaagaatattggaagtcatatagcatgtaaaatttactaatgtttgtcagcaacttcataggaaagacttaatatccaactatccaagtaaattatcaatgctctagttattaggagtgctatgcttgctctttctgttttgttgtccttcgtcaatattgcgcttccaaaaagaagaaattttaattaatatataattggtgttgatctaccggcaaaatcattttcccgcagcttctgttatttgtcgttctgtggatttgtaggacaacagaattactagaatgatcattgtatttgttacattttgcacataacatcttctgtttcatcagttgaatctttcacagtatgtataattatggatccttcaatttgtactctcttttttgcatggagcggtgtgtcatttaattcatgactagttatgcctacaaaatgtgctgcttcatgtttacggctatggagcgtgtgaaatgtatagatcatggaataagctaaccaagcaactgactcgatcatctaattcttttgcagatattctgctttgggggtaggcttgtatttggtcc

SEQ ID NO: 55715 - DNA, 789 bp, Populus trichocarpa
  Intron number 2 from transcript POPTR_0018s01760.1 (locus POPTR_0018s01760) derived from phytozome v7.0 (chr-ID scaf fold_18; pos 1602744 to 1603532)
gagttgactgccaagcttctcttttggtaagtttcattttcagctgcagaccaaattctctagctgatctgttctgctaaaaaaaaaacattgtgtaactgaagatcagagagatttcctcttctcaatcaaaacgtttgtgtaactgaagatcagttttggctgagaagaggaaatctctctaacatttcgtaattgacttgtaacaaatgcctgcattgattcacttgcatctgtagctacaaatttcatagttatcggctgttccaagatggtgtaagaaaccgatcaaaatagagtttttagattgtccaaattctatgccatagataggattaggataccctctgttcaattctgtgaaagaaacaagagaaatggtgttattaagtgaaatggaaacagcatatctgagctgtttgcaccactttctttattgatatggaagatttagctgtaaaaatatagtaaaaaaccaaaacacagctctgagtaaccaattgagatgaaataacttagaggtttcgccagataaggaaagggaaaaaaagagcaaaactcaaccatcgaaagcccaagtcttcaatgaaacagcgaaatttacaacaaacaattactcttggtatttgaccttttcattgtatatattttccttgtaacttacatgatgtgtagctactattgacctttttgtttaatataatctgaattactcttggcttaaataattaatcaatgactatttcatttcatacagattggtgtaagcttcgctgaggtcagaaattc

SEQ ID NO: 55716 - DNA, 607 bp, Populus trichocarpa
  Intron number 1 from transcript POPTR_0003s22170.1 (locus POPTR_0003s22170) derived from phytozome v7.0 (chr-ID scaf fold_3; pos 20065697 to 20066303 reverse strand)
ttaagcagcaactcacaaagaggtatcctactgcacctaaattttctccttagatgaaacgattgatttgaatttctttgatgttttgatttgtcaatgtttccattactgggttttaagcgtttcttaggcgaggaagcagaatttgatagcctggaactcaactatgtaattgttttatgctatagttttgtgttctaattgatatatcggcctgaaatacatcagtataatcgatcgctttagatgtgatattggtccttggacttagttctaagcctttcaagaactaggagagttcactcgaatgaaagcataaacatgaatgatttctctagttggattatgcacagtgttaagtacagacttcagaatgctctcatccttcagaaagctatttctaatgctagcttaacttaagcttgtagtaactgggatctcttgtaatttcagttcagttttctatgattcttcttatctttttcagtagggttgagctagcacttgagttccttttttctttaatgaaagatttaaagaaaaattagaaagtgttgtaattagtgatttgctgatgctaaaactagcaatcatcgtgatccgtaga

SEQ ID NO: 55717 - DNA, 972 bp, Populus trichocarpa
  Intron number 2 from transcript POPTR_0006s06830.1 (locus POPTR_0006s06830) derived from phytozome v7.0 (chr-ID scaf fold_6; pos 4939992 to 4940963 reverse strand)
gtggactcatgtgtgtactccctctatctctttaatttggtttatttttattttcagatgcttgtgattttaaatgctttctttttttattgtataggtttttttaacacttttaagcatccaattatttgatttcctcttctaattaaaagtcaggtatcttgtttaaatggcatgcttgagatgaattttggttaatatgttggttaacatatattcttttggatattgatttccctcttaaaagttctggcatgtttatagaatctgaaactgaaagggctgtttccttgttgaccttttttgtacatgttctgttttgccacaaataagccatcttgtcaattgattgatcagtattttggattgctggcaatccctatatatcattattatacaaaaaaagtatcataagatactttgtcccttgctgaagggctctgagctgcttcaagttaccgatggcctcctgcacaaaatttactagggaaacaaccatttatcaatcatggagaccagtatcttgtctcttcatttttgtctgttacactacagaaatacaaactaatttataagctggagagtcctgtacagtcttgcgctagtagatatgcatgattcattaatttggtttcatgccatcgtgatgttgaaattcctttgctatttttgaagaatctcgatcatatcattctgaagtaatattggtctagtcttgatctctttttgtgcttgtgtatgtgtgtatgcgcttgtgttgcactcattgagtaaaggcatggacattaatagttcagttgagaacagtttatgttgacaagtagctatcaatttggcgcattaggcattgaattttaatacggatgcagtatgaaaacacctttctagttgaacacctgtggaaatttaataatgcgcttgctgatatatttcctagatctgcggagactagtgccccacagggaattatac

SEQ ID NO: 55718 - DNA, 1058 bp, Populus trichocarpa
  Intron number 1 from transcript POPTR_0006s25720.1 (locus POPTR_0006s25720) derived from phytozome v7.0 (chr-ID scaf fold_6; pos 24115852 to 24116909 reverse strand)
caagatcgtagcttttgattttctagtgagaaaaggtgtgacttttactcgaattactcttttttatacttctgggtgttttttattgttgatgttttgttgattcgtgtgggttctagctgtggtttagcttgtttgttagtgttatttaggtcatttcactgcttgaagcacgttaagtttgttcatttccatgcgttttatcatttcggctctttctggggtgtgaattgattgatttttggtatatttcatggggatttttttgtgtgtttcgtggctattgaatttgtgttgactgtttacttatggtcaatttgtgtggaaatgaaaccctaaagttttcattttataattgaggtccatgattgtaatagttaacttggagcttttagaggatgttttgaattgggtttatagttttttcttgttttaattgacagattaatgacttctattcttgagttagcactgctagttttatgtaaccctaatctatgatttgtcttactggggttatttcttgaattagtttgtaattaaaatgaagggatttcattacatgtttgattatattctatgtgaagcactgatatggtaagtgaagatttatgtttgttgtgatgaaatctagggtttctctaagttttgctttgtgatgtcatttacttgtatttgcaagtggttgttattttatgtgcttaatcactttaaattatagaattttgatgtgttacttgatttagaacgaaagctagaaggaatctttgtttttagtttacatttgctaataattatgaacaaaccctaaggtgtatgtttggaccatctcttaagatcttctgatctactttggaactgtaatggcttgttttgatttgcctgtcatccatgttgttttaaactgaataattttgtaagtttagcatatggtgtttttttttttgataataatctagtgtattaatcattagcatatgataatatacattatgacttaagatttgtattgtgtatgcataggaaatttgtcgtttggcagttgtgctatatatcag

SEQ ID NO: 55719 - DNA, 915 bp, Populus trichocarpa
  Intron number 1 from transcript POPTR_0006s08760.1 (locus POPTR_0006s08760) derived from phytozome v7.0 (chr-ID scaf fold_6; pos 6448794 to 6449708 reverse strand)
aagatagcggtgacccatctgagattaacaggtttgcttcctgaatttttggttctcttgctttttaatcactatttctctcggaagaaaccttggatttggtgaaggaggcatgttgagacttgtggtttgatttttattgttgtgtaaatcagctgaaatgtgctaattgtttttccttctgtaatattgtagaaacgatctttgtttgaacatcaaaggaatagtttttagtactatttaaattgaagtagttaagctagtatctcaaacatttcttgcagttctatacaaaattactaaacatatagagtaaggtggcgcaattgaatagtttttaatatttcttgctatttttttctgttttcttcggctaaaagaaattcagcgattgttttgtatgatcctggacgagaaaatgtataaaacatatagataacaaggttagcggcagcttgttttggttcaaggctaggttttaattttccgtctccttagtttgtagcttctctgtcaaaaatccattcatttgcattatttgttgggacttaaatgcttaaagaatttacattattgaataggattgaaactatgtcgatgtattatttattcattaaaaagagatgttcttagaatatatgaatctaatgcttttacctagtctccgtaataagatggaattagaggagagaattatgttttgagcatcttctcgtatttgtggttagcaataatggaaacttgttcatctccttagtatgcatttttatccaaattgatgatcatgtacttttgcttcttgtccatattatcagaaaaacagcttcttactcgtcgtatggtgttctttttttttttttttttccacttttgctttcagcttccagttcaaagaagcacccaactccaaattgt

SEQ ID NO: 55720 - DNA, 350 bp, Populus trichocarpa
  Intron number 2 from transcript POPTR_0006s11790.1 (locus POPTR_0006s11790) derived from phytozome v7.0 (chr-ID scaf fold_6; pos 8966662 to 8967011 reverse strand)
caggttattacaattcataatccctccctttttttcttgtgagtttttgtttattgttattcttatattaaacgtatagctatcattttaattttaatggttgtaaacaattccttgttaatcattcaactttcaattatcttttatgtattggattttcctattttaaatgttttcgcaggtttgttttggttctgcttctgctactaagtattagtaggaaatagcttacctatatgatatttcggttgtgttttaagaagagtttaatatggaggcacattttgatattttcatgaaccctcaacatgccagggcgacccatcattgttgacttttctcctgtcacg

SEQ ID NO: 55721 - DNA, 777 bp, Populus trichocarpa
  Intron number 2 from transcript POPTR_0013s10200.1 (locus POPTR_0013s10200) derived from phytozome v7.0 (chr-ID scaf fold_13; pos 10215173 to 10215949)
tttaaagagattcaacagctgaggaacaaggttagtactcaatcatccattttctaattaactataggtattaacatagctatttagtactttccaaaattacttttttgttatatatttgatttcattttgtcaatttatttacatataaaatgtgtttgcgtgtgagagtagtgggaaaacgaatttaaaacctttttttaatgggaaaaaagagaagaattggagcattttgcatgaatttttgtttttttattttataaatagtttaatttgtccatgtaaataaatgtttgtcacctacgtctttacctttttaattatacttattatgtctttaatattagaaaaatgtcaaaaaaaaaccccacaaattagggacataatagaaggatctattgggaatttctctacaaattactaattattatgtacaattaaacatgtaggagatatattgagatcataacctctaaaaatgaggtcaaacacctatgtatggttgtgtgaagaaaaatattgatcaattacccaatactgatatggatagcctacctttgaccgaaccaaaattatagatttcatctgggtacacaaaatccagcctcaatatagccctagttattaaaacatttaggcaaaactcttatatttacacctatgttcgtgaaaaatactcatttctacctcaattcacttttttttttttttgagattattatatgtgaatttaattttataggaaggaatattgaaggctgcaaatcaatatcttca

SEQ ID NO: 55722 - DNA, 594 bp, Populus trichocarpa
  Intron number 2 from transcript POPTR_0018s02985.1 (locus POPTR_0018s02985) derived from phytozome v7.0 (chr-ID scaf fold_18; pos 2594586 to 2595179 reverse strand)
atgtacatgtagcagctaaagcagaaatagcttctcatatttttagaaattattattgcagtgactgttatgattttggtaacgaaattattatgtgtttttttgaaaagaaattaaatgtgaaaataatgatgggttgagttgaatttttttcagatttggtgttatattgaaagctttttaaaacctaaaataatttggcactcagtgtacagctatgaatttgcatcatttttttgtatgaagcaggccaatttgatttgtgactcagtgtccagctaccatcttcaacagtcttaaccacaacaaagactttgggatcatccttagccaagtgtaaaaataacaccaccctcacaaaccaaatcatattttgcctcatcgaagtagttaagaaggccatcatcagattgtccgtgcatcaaatatttcccgatgtcttcttcatgcactttcaattccaaatcaatctaataggaacgttgctcttcattaacttgatgtgtctgtgacaatccaacaagagatgtctattcatggtttgcagtgagatcgtaatatgaattgggtatgctaattaactgctgaccagac

SEQ ID NO: 55723 - DNA, 1065 bp, Populus trichocarpa
  Intron number 2 from transcript POPTR_0013s01640.2 (locus POPTR_0013s01640) derived from phytozome v7.0 (chr-ID scaf fold_13; pos 928993 to 930057 reverse strand)
agctggttctactcctccggtgtctcctttctctggtaagacaataatgcccttcggttttttcttctctcctgaaaaagcggagaataagggtacttttgtcatttatggggtcaagtgtactgcggttattgtttaatttggcggggtgatgcaagttgtgtgtttgtttgtttgattgccgttttagataatgacattcatgtccctttcaacgttcaactatgcatgagatgctattgatctatgccctacattaataattttgatattaatgttgctaatttttgacttggcatccgcattttatttagggttggttggcatatcacatcaagattatgtgtaatggataatggtaggtagacattttttgtgtggactataataatatatagtgtagttcatttttgataaatatcatatgttcatgatgaagttaaaatgaaactatttgctagtcaatataggtatcatcacttggattgcgtgaaatatatatatatatattaatacgattaatttagctaagaactagtagcttttaattgacaaagtcaacatgatcttacaaagaaatgaaaactatcaataactaatgggatgtcactactgaacgaacacaggacgtgggatgtttctgaagtttgggatgttactggttttagttcgaacacaataagattaattactctatgaaaagttggtgcaaggcatcccatattgccacattatgataattgctacttccataattctattgatctgtatgctttgctagtgggaatatatatatgtttaaggttgaggatagtttaattgattctatggtgcttggtagcctgttgttgtctcattaattgcactctatagaggtctagcgagccacatggtttcgttacctaccacctcgcacgttcttttgttacctaccttgcacgttcttttgttacctaccagactgataatctgggagaagtgaggatgagtgaacctggtcactgacttaaaccgattgtattttgttaaggaagcagagagtcctttcggtttcgaagaaggtct

SEQ ID NO: 55724 - DNA, 657 bp, Populus trichocarpa
  Intron number 1 from transcript POPTR_0003s06570.1 (locus POPTR_0003s06570) derived from phytozome v7.0 (chr-ID scaf fold_3; pos 8061231 to 8061887)
tcccattccagaaaacacaaccaccaccaattaaagtcggtatttttccttaccatacaattttatttttctttctgatccttcattccacacacacctgcatcaacccccactgtcttttccccccctttcttttggtttggaagacattaaaacgaaaggatcgcaagtaaagattgaatgaaaataaaaatcttgatttgtgttgcttttttttctctcttgtttgtgttttaggcatggttttgttcttcttagatactctgatttcgcaaccaactggaaatatgtcaacttgttgtgattggttgtggttattgctatatgtgctctcattttctcatcatctgcttggtttcaaggaaaatattttcaaaatcttggattttgtagcttaaaattttctgtttttggaaccctgatttatttttgtgtctagttgctgataaagtttagaattttagaggtaatcccagttccgaaccttaataattaatggagagccttaatacgtgtttcacttctaaaaaagaaaagaaaagaatcgatagcaatgatatgttacattctaaaaccatgggatgttataattttgagtttcaatttgtggtgtaataataaattattcatgtatgttttttatttgtttatgtagag

SEQ ID NO: 55725 - DNA, 972 bp, Populus trichocarpa
  Intron number 3 from transcript POPTR_0019s12260.1 (locus POPTR_0019s12260) derived from phytozome v7.0 (chr-ID scaf fold_19; pos 13346618 to 13347589 reverse strand)
accttaatctcggcaatttaacaacatttcaagatgtaagatcgtatttggggattattataatgtttttctgaccagtcagttgtagagtatagcatgctttacagttcataccatcttggttctttataggacacacactttcagtgatttaaatgctacatcatgataacctataagagtaagaattggaatttttagtcatgcactgtattttttatctggtttacggacatggaaattggaaaaaagaaaaagaataatgttagctccttgcatgaggaaagtcttataccgaaagattatggtcctcttgttttttttttttttcttcttactgagtatgcatccattctcttatcatttaactttgaagcttgataccatgattgacattcagggagtagattgtcttttcacaggtcatccatacctgcatgttataactattacttcaattttttgaagaaaaaaaaagaagctagcctattgcttgaagctaatttagtgaagcaaatgtctgagaagcgggtttcgtgttactagccttgtggtttgttcaagtccatgcacatctcaaatttaaaactttaagaccaatagatgacactatccctgtcctgatttgattttggaagacacatgtctaagactatgaaaataaagatttggattggcagtgttttttaaatgcaaaattcataacattcaagccaattttgttaacgatttgagcttttactgggattcttttttatcatttatatgtccatgtgttgtttcaatgatcagctaaagtagtcatttactgtttttcacatggtatgccttttctttttcccctctttaagatttcctagtgccctgaattgtggtctttcatggcatagagatatactgagtggtggctgatgagcataaaacatgtgcatttcaggaatatctggtgaatagtcatagtcaggagcttgg

SEQ ID NO: 55726 - DNA, 436 bp, Populus trichocarpa
  Intron number 1 from transcript POPTR_0006s08880.1 (locus POPTR_0006s08880) derived from phytozome v7.0 (chr-ID scaf fold_6; pos 6524003 to 6524438)
accgcctgctgatcaagcagtaccacccttgccaagtaagtataaagaaaataattttttgatgttttgttgtttgtaagaagtaccatcacgtgattctggcgatcacgatcgaaggcagagatccaaaaatgttattccatcgaggacttgaaggttcttaattttatatgatccgaccattcggtcctgattttaacaactatagtttccctcgaaaaacaaggggaaaggatgatatacctaagattctatcagtaattcaaaaccattatattcggagaatcttaaacattagtttcctagtagtaatatttttagtttgctaacaattatggcatattttaattttcttttcttttctttttttcttacacacgattatgacatctatgttttccatttatgaatgctttactttggacaagtttaagga

SEQ ID NO: 55727 - DNA, 765 bp, Populus trichocarpa
  Intron number 1 from transcript POPTR_0104s00210.1 (locus POPTR_0104s00210) derived from phytozome v7.0 (chr-ID scaf fold_104; pos 7898 to 8662 reverse strand)
aggtgaattgtctaaatcatgcatttttaactaaatcatgcatgtgccacatcatgcatcagatatgataaaaattctcatcataggtaccgtttatgtaaaatatatatacaatcttttggataaatatctataattttactatataccttagggatattgtattttattatggtttttagaatgattatcatttgtagacattgaaagatcgatgttttgttttcgtttttcttgtttctcttccacttctaaaccatgattttttggagctacctttctcaacccttatccagaatcttccccaagtcaataattctgaaagtaaatttaatacttttaatcttgggcagcaaggtgaccagtcgttggcgagggatagctagcaaatctcttccattttttagtggaactccagctgatttgatctaaaattaagttcgaataaaactgaatctattcataagaagtatatcttaattaatcgtactacagctcatcgtttgtgccaaatgatgtgttttctcttttgttttttccccttaaggatgcataaaatatttttaaattatatactttacgttgatagattattgatcattaaatctttattagttgttttttctttaattactcgtatgtaaatagttttttaatagtctttgaatcaatgaacatcaagaaataggaaatttggagaatgagaatatcactactttatttaatacttgtgttatcgtttctcacatgcattcaggtacaaag

SEQ ID NO: 55728 - DNA, 851 bp, Populus trichocarpa
  Intron number 1 from transcript POPTR_0006s10580.1 (locus POPTR_0006s10580) derived from phytozome v7.0 (chr-ID scaf fold_6; pos 7919394 to 7920244 reverse strand)
actgtttgggaggtaataaaaaaatgatatgcacgccattcaatgcttcttcttcttcttcaacttggagttttatttctcatatgatccatccataatcaatatgttttgatagttaccacatttcttgcgttggtttatttttctttttgtgattacagtcttaattaatttatgatcaattgaggtatgttattttatggatcaaacttttgttttctcatgcagaaaggtgacaatatttttttcatgaagatgaaattcaaaatttttgctgtaatattgaatttgttttaacatctcattgccttatgcattgttgttcttttttcttgttgccttgcccatgttttcaaagttttatttggatgttaattactttgacaataagattttaggtttccagagaaagttgcatttctcatgcattttgtcgtttgctcgccatgtatttgttggttatgatctggtatttttattatcaacctgcagagcacaagagatgaaagaaacgttgaaaaagttgattaattactgcatttattgctagccagttggtgaatagagatctgaaatgcattgttctgacttgaaaagaatttcgtgagaaatatataggtttataattagcattgcagggctaagaacaaaagaatttgatttcagttagctaatttggggcttaaactaggaaagacacaccgcgcctcttcatttatgctcaattagatgcaatttatttgctctatattactccaagcatcgctcattttgaatgctagtaaataatcaatctcatgtattcaactaaactttgaagcttgatccaggaatttactggtgataaggat

SEQ ID NO: 55729 - DNA, 1016 bp, Populus trichocarpa
  Intron number 1 from transcript POPTR_0003s03390.1 (locus POPTR_0003s03390) derived from phytozome v7.0 (chr-ID scaf fold_3; pos 3779645 to 3780660)
tgtccccacttcaggtggccaacgacaagctttaggtgggcaccctcgcatttcatttgcaaaggggcatttgacgagttgtgctttacagtatgagaaattgtgtaccgaacagtaaaaaagtccaggaaaaaagctactgatttcctactcttttttttgtttaaaagttcaatttactatttttcttagtagtattcttgtacgatagattttcgccaacattccatccttctattaaatcatgtcacgacaagtggccaggcctagcgccattagctttcttctctctccaactatagacatcctgatcgctgattaatacttaccatcaacagtcatggtggccttaataagattttttttttggggtaaaattagcacagtcaacttaaaaaggtatgcactatttgaaaaaaaaaaaaaatatataatttgatatcatcgcgctttagatgagtgatatccactagaaagaccacaattaaatttcacccttctgaagcatgatatttactaaatatcaccctcctaaagtatggcaacaattaaaatttaaatagttgaacaccaacaaaacacacagacgttgtctttgtctcatgaaaaaaccatcgacgccctcacctctctcttaaaaaatcagttaatcatttagattttgctcttaaaagagccaataatagatgttggtcaaacagatagtagtaaaaataaattggttaatattgtttaacggtggcacattgcacactcggttgagtaccgagtccagcagtcaaacttaacatttgttcaattataatgtatgcaagtatcaaaatgcaaatggtatttacgtgagggatattataaaagattagattcatttgagataacaaagttaaaagagccacacgcatgtgttttgacctttgtccaaaaaaaccaccaacaacttgatgcaacttttattgctatagctatatcaaccctagtaatgaataatctttcaataatggatacatgcatataag

SEQ ID NO: 55730 - DNA, 511 bp, Populus trichocarpa
  Intron number 1 from transcript POPTR_0018s10440.2 (locus POPTR_0018s10440) derived from phytozome v7.0 (chr-ID scaf fold_18; pos 11363450 to 11363960)
gtattattgggaggtaacaataatttaacttttttttttaattttcggattaccatcattaattatcgtgttattcttttttaagtgctccatgcaaaatccaaaagatatgatgaatttcttttgctattttgaggaacaaatcatgaggtccctctgcaaatagaaaataaattagtttagtctatattataatcagtagagaagaagactatagctagctagcgtccttcggtcactctgcaaatagaaaaataagttattttagtctatattgttatcagtagggaagaagactttagctagctagcgtccttctaagcttgttgactagaatttttgaattatcttgcattgtgggtctcgccagtatggagctttaaatttgattccaatttagtgtttctggtttaatactgttcgtaggttggttatgaaatctgagaaaacaaattttagtgttggatttttgtttttcatttttgggggtacagttctgcagattggagat

SEQ ID NO: 55731 - DNA, 862 bp, Populus trichocarpa
  Intron number 1 from transcript POPTR_0003s18830.1 (locus POPTR_0003s18830) derived from phytozome v7.0 (chr-ID scaf fold_3; pos 17759387 to 17760248 reverse strand)
atagacacaggtaactgcaattcacttatgtttctcatactacctggttcagtggccctgcatgaatgaaagccacctcaagaacatgcctcaaatttcagttgcattcacatgcacacacatatttattccataaatatgtcaatatggttcatccttttatttgtgctaccttcatatcacaaattttttaactcactcttgtagcacaaaaaacaagaatggtttttaacatgaatcattgttttgatgaactactttgatgaaagtcacattatatatatattcattgagtttatatttcaaatgtcttttgtgactgaacacccaggacgctgttattttacacttcagcatcaataagaatagtgtcttcgtgggggaaggccacctgccatattataactaaaagctcaatggtcctccaagtaaacaaaacatggtctctttttttaaacggttcagggtctggaggattgaaagtccaaggacttcaactttaaaaactcacctcatgccttgctcctttatgtggggctggttttgagttcaaatctttttgagggtgtgtattaattttgaaagagggaaggctacaaaatccagtgagcctttcgatgaattggaaaggcattataaaaggatataaattttttcaagtataatttgaacatttaaattgtatgtcagtacaagttattagaataattagaagttttctgttaacgtgaaataatttgtttcccatcattttgtacaaagctttttgttgtgtcttgctgcaattgagtcttatccaagggcatattgttagacttgagaaaatttttagaatattacacgtgttctttgttttagggat

SEQ ID NO: 55732 - DNA, 829 bp, Populus trichocarpa
  Intron number 1 from transcript POPTR_0003s09990.1 (locus POPTR_0003s09990) derived from phytozome v7.0 (chr-ID scaf fold_3; pos 11139023 to 11139851)
gaagccttttgctcttgaaatcagtcaagcatcatgtaagtacgtggatattttttttttgtttatatcataccgtaattattaccgcacttttcatatacctgcatggttaaccatttaggttagcagtcgttgttgctttcacactctctctttctgtctgttgtttttttttttctgtgttcaggggatatgctagatctgtgtttttgatagacttctttccaaaagaaagaatgttttgcttctcttctcttcggttttttcgcttatgaatgaattcgtgattttctttcttttttaatatcaatgacttgaaaaagggctgttttcaagcttttttctcgataattgactgaacgggcaggatttcttttttcagataccaacaaattttgactttattttgcccaagtctgattgtttcatgagaaaatttcttccaggagatgaagcataaggttattgatagatttagcaataatttgttaaagattcgcatcgactgaatcttacagacttgcaatgaacggccttttcaatttctctttgtttattttgaaaaaaaatgcactttattttattttcttgattttctcgtcaacaaaaacagagcagacacgaaacccattactatttatcggctatacagaagcttcctttgcttcgaaaaggtcttctaagatgaagatacattcaaaaaacaaacttgaaaaagtctgcttgccaaaaatactaaaaaaaatacaagcaccaaaagtctaaactcgtttctttgttttgtttttacccagttttaaaacagaacccatttgttgaatcaagaaaa

SEQ ID NO: 55733 - DNA, 1039 bp, Populus trichocarpa
  Intron number 2 from transcript POPTR_0014s04770.1 (locus POPTR_0014s04770) derived from phytozome v7.0 (chr-ID scaf fold_14; pos 3676055 to 3677093)
atcaacacgcttcagcaacttgtaaggctgcgttttctcttcctgcatatatagatatcattttgcacgcactaatagttacgtgtgacttctttaacatccatatgcatacatataaagagagttcaaggactacagtctcctcttgaaaatggatgatagtttttgtgtgtggagaccggagagaataatacacatgttcatgttgttcttgccattaattaatagccccaaattgatagttctatatgtatagatatagattttggattttgaaaccaatcacttgtgtagttttttaaattgtaacgcattacaagcatcgcataggaatcaactattacatgattaaaaaggactcacaaaggggctttattgcaaaaacaatacattaaatgactaaattgtatttctttcttaagaatacgagtaaaaattacaaacaaagattatttgtgacgcaaacacagggactgaaataaaattttcaaaacttatatggactaaaagatttatgaaagcccccgcacattactaaacaaattttacaatcaaacaaagtattaaactccaatccttacatcacatcaaataccaagtaaataaaattcttattaactctaggtagttccagtactgtcaattttaattgtataaaaaatattgatgtagtcttggtatataaaagtagtttgcaaatatcctaaacattgaatggacataaaaaaaaattaaaaagaaaactttatgcagtaggaatgtaagatcaatatgcacaaaattcctataaaaataatcaagagagcctgcctgcattctttattttcgatgtcaagagcatgaatatatattgctgcacacattttgatcctctgctaataatgtcaaaacacttttaacagaacattaactcattttccttttctctttatatataaatcactatctgtgactatgtacataaattttgtagttgcagctcccatttgaaatgactgatgaaggatagacagggctaccggttcatcacccaccagtt

SEQ ID NO: 55734 - DNA, 956 bp, Populus trichocarpa
  Intron number 1 from transcript POPTR_0013s01620.1 (locus POPTR_0013s01620) derived from phytozome v7.0 (chr-ID scaf fold_13; pos 916592 to 917547)
tggttagcactctctctctcttttcctctcttgataatgaatgggttgattatcatcatatctgatgtgtgtgtttatgcttttaatgtgagatgatcgtgtgagttttttaaagaagactgttgaatgattccagtaaaagagacatcttttagcttatctatagacatggatcatttgatgattggttatggcacggcacgattaatcaaatttttcataattttagtttgattgttgaaggaattgtaatgttcgaggtgaagggattggtgtttttattcaattggaaggaatggtaggattgatcttttcgattggacagaatggaagcaaggattacaattattactttatgatgggaggaggacatctatcttgttactagtcacgtgtttcttccgggagaggatggggcaaaagctcatccttgtccactcattgattaccgtcaaaaccttggtagagcattgcccgattggtagctacacttcctttagagtggagaatctgaggttcaaatccattctctgcagctaccaaattatcaaaaggatagaaatttgaacattgtgagtggtttttgaactccgattaggtcggattggcatgtgcttacacaagtccaaaaaataaacagagagccttggaatcatagttagcttggaactgcctcgtaaatttgaaaggatatgtgctggtggaagaagttaccaagttcttcagttatggcccataaactatgtgaaacacatggcaaccattcggttgttgaatattttggttgtttgcttctaacttcttttttactgctcatttgcagtggagcactgtagtcatcatttatcttcttaactccacaatgtggcaaagcactttagtcatcatttgtcttcttaactccactttgggcccctgcatatctaatttttgctgtcttcttacaggtgacatac

SEQ ID NO: 55735 - DNA, 812 bp, Populus trichocarpa
  Intron number 1 from transcript POPTR_0013s11990.1 (locus POPTR_0013s11990) derived from phytozome v7.0 (chr-ID scaf fold_13; pos 12662764 to 12663575 reverse strand)
gcacttgctggctgtgtctctgctcgggtaattccaaaaactaacttcccacttttcataacaaataatctaggattgttacttgtgtacatatatttatgtgcatacatgttgatgggtcactataacatagattcttgctatgcagcccgtaattgtgtttatttttagctgcgatgttacccttcaggaagtcaaatatggcccattttttttcttagccaagtggttcggcggttgaaagaatgattgttgcatgccgagagatttctgacctaggaaggggggaacccatagaacgggaactgccttggcttggtgtgttgagcatttaacccattttccaacataggttactgctacttcatacacaacttaggttactttggtctaaagaatgtttacgtaaatagtgtgatgttgagattcttactttgatatggtaaggattttcttttgtgcatgaggaacagcttgtgaaaagattggtatcaaacaagttgatgaaacagtataaaagcttcttagcatgctctatttatttgttaggtgattgcatcattttggaggacccatcttggatcatacgcgtagtgtgattgcacaaaattagtacatgacaagctttgcttttgcttactttctatcaaatctcaaattccattggcgtgtgacgatatggtataaccagcaaaagtgaaccaattaagtggcctctttccctggaatatcatttcccccctcttcctttttcttgggttaaagctcacaaatatctacacgtatctgttgggatatactgcaggtaggga

SEQ ID NO: 55736 - DNA, 458 bp, Populus trichocarpa
  Intron number 2 from transcript POPTR_0003s17580.1 (locus POPTR_0003s17580) derived from phytozome v7.0 (chr-ID scaf fold_3; pos 16912947 to 16913404 reverse strand)
actggaattcaggtatatgtttttttaccagcctcaacttattaatgttttttctaaaccccatccccattctttgtttctttttataaaattggaagaaagaaatagtcttctttattttcttgataactcgtaatataatgataaatttttacgaagttctgcttaagaaccaccaacttaattggtagagtgaaaaggaaacaactgttagtctgcataatctcatcttgatcttggtgaaatacataggaactcaatgaaattcaaagttgatccatcatgattctgaggctatttgtattttggttttatcttgaagcataaaattgtaaattttgcttcctgtctaaaagcttcaagtgctaattaatgtcgtggtatgcattatatatgatatttacatctgctcctgatcatataaatgtgtgtgtcaggcaacacagcgtttacgcaag

SEQ ID NO: 55737 - DNA, 482 bp, Populus trichocarpa
  Intron number 1 from transcript POPTR_0013s00220.1 (locus POPTR_0013s00220) derived from phytozome v7.0 (chr-ID scaf fold_13; pos 18650 to 19131)
ataactgggttccgcttcgttcatcatctcataaggttagaggcttttcctttccttatcttttctctttctaatgctctggtaatggtcatttttcagcttaaaacaatcaagtctgggtgaagaaatttcatattttagttgctaaaaatttgatctttataattgtttttttattatattagttgatcggggagtccatcctttgtgatcataatactttgtgggtgcaatttaggtataaaatgaacaaaaaattgtatttttcaaaatgatttctttgttgtttttgtttagtaacttattgcacttaaaggtattaataatctaagggaagatgacaagtattcagtaatagggcattagattctctatgatcaagttttcttatctttgaatacttgaggtactcatttagaaattctgatgttttcatcatcatcgaaggccgtattcacaaaaatttctcagttccactgcca

SEQ ID NO: 55738 - DNA, 372 bp, Populus trichocarpa
  Intron number 1 from transcript POPTR_0018s08790.1 (locus POPTR_0018s08790) derived from phytozome v7.0 (chr-ID scaf fold_18; pos 9709613 to 9709984)
aggcagttgctagattggaggaagttttctcttcggtgagttgggaatagatggtctattatctttgtgaataactttgatgcctttttatgcgggtaactttgctttgatttttgagtgatttaacaatttaatgagcctatgcatgtgtttgattgaatagctgagttgttgctaagaaatttcaagaatccagtgtgttgagttaattaggactgtttagcttgattgaatgattcgtttccgtttcatttcaaaatctgaaaaacaccctgtcttcttgttcataagattggtcaatataagttcaacttttaactcctcactcatgatccaggctgccctccaaattggaagatatatagtgaccat

SEQ ID NO: 55739 - DNA, 913 bp, Populus trichocarpa
  Intron number 1 from transcript POPTR_0014s08650.1 (locus POPTR_0014s08650) derived from phytozome v7.0 (chr-ID scaf fold_14; pos 6425379 to 6426291)
gcaggtccgtaatttcaaatgtttcgttgcatggtcccaacagatttatcctttcattgaaaaagtactgtaatttagttttgtttttcaactgacagtttaagcttctgcgtaattcttgatatatttttttcatcttggattactttttatctaaaatgagtgcaatattgttcaaagatcgatcatgtgagagatctgtacaaaactattggattgcgtaatttgttgaatatcgggttgagattaattactcattgccaaatgttcagtgtcgttaatatattaactcaagaagatgcatgatgatgcggaatagctcttaatcattgaaattacttacatttttcaaaaggaagtgcgattcttatatatatataaaaaaaaaaaaaggcaagaaagaaagaaaggcaagggagacatgatttctatcttcttacaatgcatggaagggcatctaattttaaatacatgggtaaatctcgaaaaatcctttgattatgaagaattcccctactggatgatattcccaagaaaattgagtggcttttaaattgatgtataattttcttgtgtgaatggttatttatctaataaaaatgtgtttgagaatgtgttacgtaatagttatgatttaaagtattttttatttaaaaatatattaaataatatttttttattttttaaaaattatttttaatattaatacatcagaacaatctaaaaatatagaaaaaaaattattttttttatgaaatataattttaaccacgttactgaacacatcctaaattatcgtactgcatgtatgaaaaatttataaatgtggatttttattttatttttacatgatttgtccatttgaatgtttggatcagggtgatcgcatcagggacaataccagaccctggct

SEQ ID NO: 55740 - DNA, 1015 bp, Populus trichocarpa
  Intron number 1 from transcript POPTR_0013s04020.1 (locus POPTR_0013s04020) derived from phytozome v7.0 (chr-ID scaf fold_13; pos 2650742 to 2651756)
tcaatctcgccaaggttcccactttttctttgctgggtagtcttttcttgttttcaataatgtacgttttggattgctaattttgttttttttatgttttggtataatggataatttattaatgtgtaatttgattgtttctatctttacatgtatgtttttgtttggaattttttttccttttccttttccttttccttttgataggatctttggaagttagttttatactttttatggatcataatcaaatcctgcattttaagtagaaaagttgttttggtatacttttattttattaaaaacaattcaatttatcttttgaacttactggatttgttttaatctaccaatatcattcaagtgatcaagtcttgtgtgtctttgctcaacatttccattgttttgtgatcaataaattttatggttttagactctgatatgggggaatttttggagcatcaagtaaatgcctctctgtagcaaaaaaaaaaaaaaaaagcttcctgctttttagtttactgtcattcaattgctatagcatatatagctcatctgaaactttcctgcctatatatagatgagttgtttttacttttcttgtagaaatggttttgttttctggtcatagatctcttaaattatatgataaaagaatcgtggttagatcctttttaagtggatttaaagttttccttcttcgtccgtatgttaggattaattatgtggttatccatctggtacaactctttgaaatgggatagtagacaaaacttaaataattaaattgagattattttgtcattattttccttttcttctttaatgcggaagtgatgtcattcttacaagaaaatcatgcctacaatgtgatttaataggacatcttaacgattactgatcatgtgaacattataatgttgagactcgtatactcctttagattgtacagctcctggatctgtgtttatgatttttattttaatcatgcattgtgattttgttgcagaggtac

SEQ ID NO: 55741 - DNA, 631 bp, Populus trichocarpa
  Intron number 1 from transcript POPTR_0014s05490.1 (locus POPTR_0014s05490) derived from phytozome v7.0 (chr-ID scaf fold_14; pos 4107250 to 4107880)
taggaaagctgccataaagaatcatcctgataaaggtggagatcctgaataggtagtttattaaaaaccgctttatttgagttgtgtaaggagtatgtgatgcccattcggctctgaaccatatttgagttgtgcctggtagccaagtgctagaggcgctcacatctgcgtctggccgaggcaatggtgcattggagtcatgacttgtcaatcacatcatgatgattctaaatgaatagttgctgtcatggtttttcagttctttctttttaaacctctgggtgcttgtttgctatggttgtggatgctatttgcttttaggaagtcataacttttatttcgtattataactaaaactaggttgcaaaaatatcgatttcactttaggaaagtctgaatgtctacgatccatgtacaagaaatatgtgacatgtaaagattaaaaatttggttgaagaccatgcatggatctctgggtgttgaatttccttcatcatcaagataaaaacacagtgctaacaagtttgcaatggtttgtgttttgttacaatcatctatttatcaacttctagtgctattgttgcaaaatctgaaagtaaaggtgttcattagcatagtgtgattgatctag

SEQ ID NO: 55742 - DNA, 779 bp, Populus trichocarpa
  Intron number 1 from transcript POPTR_0013s08300.1 (locus POPTR_0013s08300) derived from phytozome v7.0 (chr-ID scaf fold_13; pos 7367902 to 7368680)
ttctccccatcaacccacgtttctcttccatcgtactctcactctgtcaagtgtatgaacatgtgtcttatcacttttttcttttttcttttttacggaaaaagctgcagtagtatgtatctttttcaacaaataacaatctcagtcctgttcaaagtcatgctgcagtactatatgttggcctacagatccaagctgttcattatgttgccgggatctcctcacctgtgttaggtcctttaactatctcagtcgattaattgcacgggatccacgggagcctagtcataagcttacttcttcaatcaatagctatcatcaataatcaatagcaagtacactatatatcttatccagtacggtgtctacacttgacatcttattttatatttgccttcttaaacgcctcattctagttttctttactatataatattttttctgaatttaagtattgaaagattttttatggtaaaagaaaatttatttttataaaaaaaatgtgaaacaactaatcacaaacagcttatcaaaaaagaaaagaaaaactaagcacgaacacacgagccaaatgtcaaatgatatatagttccttgatccactaattgggcaggtaaaagtatgatatttattattctctttaaattttttggatcaattaatgcattatgcctcaaatatatatgtttctcactagaaaactgtgctttttaattttttttcttcttcggataagtaatctttgattcaaatagtgaaagtgtggatacaggttattg

SEQ ID NO: 55743 - DNA, 955 bp, Populus trichocarpa
  Intron number 1 from transcript POPTR_0014s13300.1 (locus POPTR_0014s13300) derived from phytozome v7.0 (chr-ID scaf fold_14; pos 9799867 to 9800821)
agcgtagtcccgaaacccctaaaacctcctccaaggtacgattctgattcattttacctaacctaatctagggcttctatttccgatctgttctgttcttttcaatactttggttgttgagatttatttatttattttgaagaaaagtggagccttcttgatagctaagggtagaaatgctacgaccaagcgaaatgttgtgatttctcttttttatctactaaatgcaacacaaactgttttttcatttgataaaaagaaaaaaaattcaattagtattttttttgagtttgataaggaatagtagttgaaattgatgatatgatattttattgacatgctggtttacgtgttaatcttgtcgtttggagcctcgaggtcctcatttctcgatgattttttggcactgtacagtttttcttatgatgaacaatctggaaatcttgcaagatttatttttctgctcttgcccttaattttgtgtcttcatgtcataaactgtggctataagtagggagaatgtgagctgtgtgtgtcaaatggtttcaatggataataaaaagacgcactttttttcttttcccgttgtttttccaactcaatttttagtggtaaattgagttacccatttagtttccaaagctgatgattgcctttcctagtggcaatctaactttttaagatgcaccatagagagagcaaaataaaatacatgcttgatgataactgtttccgtcacatagatacattattctcattcccttttgatttgagtaattcaatatttcagaatctatgtttcttttagatatatgaacctaatctgcttaaacagctacagatttgttaacttttgattatgaatttgaggaaaataaaaaggaaagagatggtagttaagttttaagttgtgatgacagaatccacgagttgcagtgcgatcaattgatacata

SEQ ID NO: 55744 - DNA, 903 bp, Populus trichocarpa
  Intron number 1 from transcript POPTR_0018s02150.1 (locus POPTR_0018s02150) derived from phytozome v7.0 (chr-ID scaf fold_18; pos 1916349 to 1917251 reverse strand)
gaatatcagtgatcgtcattactgggctgtaagtttatccatcaacggtcaaaccccactagcactcatctttctttgtctttttaggttgttcattgatgattatgtactgttgttgttgtagacgcgtagggtttcaatctttcttgattaccagttgacaatttctagattggatcttacatttctaacatgttgtcagcatgccaatatgctatgcagggaaagaagtaaatgtaatgtaggtgctttagagactatgtatgaaatgaatgtcataattgtttgtgatggaggaaagatcccaatttgcattcattaatagaactggaaaaaatatgcagagtttagcaacattcaatcattaattgctgatttctctaatcttttaatcaagaaaaataccaataatcttagaatcttgttgaaatcagtataaatacttttcattacagtttgttgaagataacaaattgctagttctgatatccgatatcgttatgagaatgattgtgatgaggcatgctgttgatatggtttgatatcaagcagtgtttaatgctacttgcttgaaatgtgccttgcatgttatctaaattcttgaaccagaataatagtcttgtctaggcaatgattcaagttaatcaaaataaaataacagcattaatcaataatctaccttctagcaggtgatgaaaagttatcggtggatgttgtgctcgaggaaaacaatgtagagttattgaatggacattctgtgttggattttacttgtttgatactaaccacattctaattgtgtgtttagcctggattttcagatttcttcgagagttctctggtaactgaaaattttgtttgaatgcagtctgtaggtttcactgcagctcctctgtttgctat

SEQ ID NO: 55745 - DNA, 981 bp, Populus trichocarpa
  Intron number 1 from transcript POPTR_0013s02650.1 (locus POPTR_0013s02650) derived from phytozome v7.0 (chr-ID scaf fold_13; pos 1573489 to 1574469)
ggtcgaggatcctacactcctactaaggtattctctcttatagttcattcccttttcactcttgcatttgtccttcttggtttgatcagatgttgagtttttttttattcctgagggtgaggaaaggagttttatagagatgtcttgtcataaatatgttggataattggctctaacctaactcttatatcagctcttctcttcttgagataactgatgcagacaaaagctaaagacaacaataaacaaagaaagaacacaagaattttaatgagcgaaagggaatatagatgtgaaccccaagttcgcaggttttattttctctataataacaattctcaagtcccccctctttaggaggtttacaaagtcttaaatagaccagaaacccaacctcaactaggaaacaaaataaaaatccaaaattacaaaggaaagaagcatgaaatccgaaaataacaaggaaaatcacaaaaactgccaaaaccggggtctcagggcgagattttcaaaatctaaagatccgatggtcagagtactgattttttggctactctaagtaaaacagtttccggaaattcctgtaaaaatttgaacgcgattcaatggtcggatcaaaagttatgacttttttgagttgttattctggtatggcacgatcaaacctcctcttgggccttgagctgtttcactgctctataaatgtatatgcttggccctccacgtaatctgtctaggacaaattctcatttagttgtggcagactcacacataactactcagaattacccgttatcgcaagcccaactaaatcttcctttagtgaaggcttataatttgggtttttaagattcttagtaggttgggtttttggggactattgggtctttccttttccatttgattctttccttggacatattactcttcaaattcatgctttcttcacatttcttataagttccttttaaatgcagtgtg

SEQ ID NO: 55746 - DNA, 551 bp, Populus trichocarpa
  Intron number 2 from transcript POPTR_0018s01700.1 (locus POPTR_0018s01700) derived from phytozome v7.0 (chr-ID scaf fold_18; pos 1554369 to 1554919)
gggtaagctttttgattcccttaataatacagggcggccggcctgttataattattttagttttcgcgaatttttttttattgttatacgttataacacatgtttgtttactttgttgagaatttttcatttttcttgaaagtctttcaggaaaattacatacaaaaagaactgttgaaaactgtgtttattagtaaaagctgaagctttttacaaatattgacacttgatggggaaggggcacttcttcttcttcttttttgtatattttggtttgcctagctttctgggtcactggaatacatggattttaagatgtctgtgtggtttgacttgtcttttttttttaaaaaaaaaaaaggtttggaatcttaattatgttgttgtgtttgcttgtcttgtaagcgagctttatgtggagtgaacaatagaagcatgtattggcttttcagatttgccattctttccttgaagtaatggctaattggatatagtatacacagggctgttcttttgaataggatttgtttttttctttttttgtaggaggt

SEQ ID NO: 55747 - DNA, 403 bp, Populus trichocarpa
  Intron number 1 from transcript POPTR_0013s02350.1 (locus POPTR_0013s02350) derived from phytozome v7.0 (chr-ID scaf fold_13; pos 1406758 to 1407160)
tcaacccagttttactcagagaaactgtaaagaaggtacatattttttagctcaaaatacggtacaaacccaccaacctctcctttttctttttggatgtgtggttcccagaaaactggagaaaaagatgagagaattttcaagtctgggtctttgattttcaataagcttacttctcggtctacaaatttggtgcattagcttggatcactctggttatctgagaattttcagattttcagtcatttttagtcctaaagctcttttcttttccttttttttttctcagcgaccaagcacagaactttctttttctgaaactggggttttgattatatatgttcctcttccactagaataatgggtttgctttgttttttgtaaattctgtgaaggtggaaag

SEQ ID NO: 55748 - DNA, 745 bp, Populus trichocarpa
  Intron number 2 from transcript POPTR_0278s00210.2 (locus POPTR_0278s00210) derived from phytozome v7.0 (chr-ID scaf fold_278; pos 31008 to 31752 reverse strand)
ttctattgtttctccagattcttaatttgtttcaggtgaagttcggtcggaaacttaaggttagcggttttaacatagcatagacagctgtgccatgtaatctctgtatgatgcaaagatgaggttggagatctttatccatgaagaattgaatttcttttatctgttgatagtattgatgctgggcgcgttggggtgagatatgagggacgaatgattacatcatatatgaatttggctaaaatttgtaatcatggagagtgatactgcattacctatttattgtcatgaattcccatttctcatgattggattgaggtccttttcgtttccttgatctaattgatatctttttaatcatttggtgagcttaattatagttcctctttagcttgatgccttccatgctcggttgaattgctgcctctgaattttgaaattcgaaggcatctgtgaagtatgctccaagttgctactaccatttcagacgcctgctcattacaagccttttatttaccctgttaaataatattcattcattcatctctttgattgatatattcattttcaaccaattgttctaagaacttgtaataattgtatattgaataatgaatgagtttgtcgtaagtaatgatttaaatacttacctcatttcctttcttatctcaaattctttgtggcgctcatgaattattcaaaagaccaaaattcaccagcctgctaccgaaaaacctattgtact

SEQ ID NO: 55749 - DNA, 889 bp, Populus trichocarpa
  Intron number 4 from transcript POPTR_0014s06500.1 (locus POPTR_0014s06500) derived from phytozome v7.0 (chr-ID scaf fold_14; pos 4935044 to 4935932)
cgacggaagtacaattgtggcctcttgttcggaaggtatgtgctgatctttttcctgggttagatatcgtatcctatgtgttctaataatatttaaatgggcatggatgggttgatgatataaatgttctggcttactattggaatggtatgaatactgggatccatatgtttgctaaccttgttagactaggaaatgatgcctaaaatttggacaagggctgcaaactaagtgattatagaataggtatggtttttaagcatgtctcagatgtggagtctttgcatatgagactggatggttagataaaatttaatggtcaggaaaagacacaattatcagatatttgactttaatggtttctgactttgttttggatttgtaatgtttggaacaaattttattcttttgccttacacattgaaaactgttccatccatccataatttaaccttaattgtccatcacttgcatatcacatggtttcagaaatgacactccatgattttatcatgaatgtaaccaacactttccaaaactgtggatttctgtctgattagctgccttaaaaatatattaattaaggacgccggacagcgctgacatctgtgcatgggtgtggattctggtgaccaagccactactaagacaacatgatattgtgattttttttaattacatgatagccaccggaaatcatcattactcttaaggaataacctgttgaatttgtgattttaaattatcaaactgatattacctggagcagaaaaacccaacctcttccattcatacttctgttgtaattgtttttctttcttgggtttcagaaagcaatgctgattgtattttctatgctactttccaggtactgatatcaaaatttggc

SEQ ID NO: 55750 - DNA, 427 bp, Populus trichocarpa
  Intron number 1 from transcript POPTR_0013s11750.1 (locus POPTR_0013s11750) derived from phytozome v7.0 (chr-ID scaf fold_13; pos 12421262 to 12421688 reverse strand)
aaacaggtaagtcttatattttctttgtaaattctctctgttttttgagttatctcttgtggtttaattatggggttagtttatatggtttaagatgtgagctttttgtttatatggggttagtgtatatatatatatatatatatatatatatatatatatatatatatatatatatatatatatatatatgaagcttttatcactgaattatgttctaagacagaaaatgtagcgttatatgtaaagtaaattctaggttgattatagtgattagtagggaagaatggtttttgttctgaaattatgagttagggaaatttttatgaattttttttttagaagatatgaaactcttcagtttggactgattttgttttttcttttgggaaatctttgtttatattatagcttctccaaataattg

SEQ ID NO: 55751 - DNA, 946 bp, Populus trichocarpa
  Intron number 2 from transcript POPTR_0006s03410.1 (locus POPTR_0006s03410) derived from phytozome v7.0 (chr-ID scaf fold_6; pos 2190754 to 2191699 reverse strand)
aagcagattagtcagtttgctgagagactaatccggtatgtatttgctgtatcaggctagtcaatgttcatagtaagtacatatgtttaccttatcagaatgtacatggaatgaatctggattaatgctggcatttcatagaataggaaacagttgatttctgcttcttaacggataccaaaatcctcaatgtgacgatcttcgcaagtcactgaaagcttaataactcatttacagatgtagtataggacctcattgttagttaatcatattgacaaacttcacctgatatcttcatttccccccctttgaaattcattccacattaataccttactaatatcagtgcatgctattaaattcataattagcaacctccttaagctgttgtgttctgtttttgtttgacaagggccacaaggccattgcctcggaagtgctacgcggtgttgatggctcgaaagggtttaagcattttgacatatcaccacaagtttctatagcacttgtatggaggtttggtgctagtatacttcattctggttggaatagatattcggagaagaaggttgagtctgcataccgagagagttcaaagcctttccacgtgtcggatattatcctgaaactatgatatctacataacctatttaagaagatcaaaaagattagaatgtgagtcaatggaagatctgttcatgccattttacttcctatccgatcatattagcatgatatatcttaaaatagcatttccataaccaattcctttccatacatatcttacttgaaaacacaagcttttctgcctggcaaaatctacagatcacattgagtctgcagatgccttaaatagaacagcagcttattatcaactacattcgtcaagattcttcttcaaaactaatgtttgtcatctgttgtagtgattggaagaacaagaccg

SEQ ID NO: 55752 - DNA, 423 bp, Populus trichocarpa
  Intron number 1 from transcript POPTR_0014s01220.1 (locus POPTR_0014s01220) derived from phytozome v7.0 (chr-ID scaf fold_14; pos 1197113 to 1197535)
acagtggttttgttaagtatttacttgcgttccccccctccacttttttttggggggttttcttattttgtgctattaatttgagtttggagattttcaagaaaagtagctataatttgtttgattttttttttaaatctgggttttcctatttttgtgttcttgaattgattttggggtttaaaattatgggttctttgatttttttgaagaaattgcgtaacccggttgatttttgaacaaactctgtttctaggtgtttctagttttgtgttctcgacttgattttagggttttcaatcatggttctttgaattttttaagaaagagggaactcggttgtagaaattaaggaatcaatgaagtaattcattttttttgtttttttgaattgatacatgcagtgaagagtgcaagaaggat

SEQ ID NO: 55753 - DNA, 1003 bp, Populus trichocarpa
  Intron number 2 from transcript POPTR_0003s11920.2 (locus POPTR_0003s11920) derived from phytozome v7.0 (chr-ID scaf fold_3; pos 12643619 to 12644621 reverse strand)
agacttgtcctttattacttcgagttttcactaaggtacttgcaatttttttttaatagagatttcgacttcgatttttagtgttctataatgctaagaaaggtgttttttttttcttttcatttttctctgctcaaagtaatttaaagctacaactgcatgcataatgtgttttctgaaatgggtaaataacgaaagtgcttttgtttttttaaattctagggtttagttgtttagcatctggttatgccttattttgaaattaaggcatttgatttagggtttagttgagaattggagtgatgcagtctgtgtaggtactagggtagagaagctgtggattctagtgaaattccaggaattgatttaaatgtagtgaaaattcccttaggaaagctaccaaactcattggaattggttcgtgagatgtatttcatgaattttaaaagaatttggatattagatattggtgatggtaactttcccttccaaaagaaggctctaaaagaactggaggcaggtagccagttcaaagaacattatttctttgaaccaacaatgtatatagctttgggtgattatattatagtgcaaaggaatttgctttgctattacctttagcgtgaagtaaggtttagttaaggggttttccctcgttttctttttcttccccttctcctttatcaagctcttcaaggatcattctgccattcaatttagagttagcgtgagcaatctcacctttggattcataagaaatagcttggaatcggatcagagatcagtaataacacagccaattttttgaattgtgatttattaatgaatagataccacgaacttcttgttgaaataatcaaatattatctgacctcgtgaataagcatcaagcttgaatggaatcacttactaaattgatgaattcactttgtatctgattttcattctaattttctgcagattggaagtcatcataagccagaagattttgctgtgagaggca

SEQ ID NO: 55754 - DNA, 522 bp, Populus trichocarpa
  Intron number 2 from transcript POPTR_0003s02280.1 (locus POPTR_0003s02280) derived from phytozome v7.0 (chr-ID scaf fold_3; pos 2370135 to 2370656)
gcgctgattggcaagaggagatctatcaaaaggtaatttctgtgatttactgttcattagatgaagttcatgcatgccatagtctgggaagatttcaatggaaaagggtctcctgagattggtccaaggaatttgattcagctatggttgggattagttaggaagcattgtaagttccatgaatgcatcaactaacaaatgattaatcattgataagatgaatgaaggtaaaaatattcagatttctaggtcaagaggattgctttcttggttctggcacgacagttttttattgcaaacctctccctttcgattttttcccctatatttgttgtgtggtgaattattattttattatttatttccaacgggtcctatcgttgtgtgcccttttttttatttttttatttatcaattccctaaagtttgtttgtgttagtttctttctgaccggcacctgaagaaatcaagtgtatggccaataatgttttgctggttatttgtacttcctagatcaaagtt

SEQ ID NO: 55755 - DNA, 707 bp, Populus trichocarpa
  Intron number 1 from transcript POPTR_0018s03250.1 (locus POPTR_0018s03250) derived from phytozome v7.0 (chr-ID scaf fold_18; pos 2866079 to 2866785)
ttgattccagtccagataggcaaacatctcaagaggtagtaataaatattgatcaacttacaaacccaaatcaagaaagactagcagcttttgaagtagaacatgatcacaattgactttcagatgataccattgacagtttgacactgggaaacttatagacctgtagatgtagttgtagcattgtaatataattgtaggccatcagaggcctggcaattcatgggaaagtccaaaggaacatgcaggaggcaatactatagaatacatattactctgtttgatttcctcgtttgtgacactcgaacttcaaattgtaaatatagaattactatatataacatatttatagctaggtaggattaaactgagtttcagaattattaaattattatcacaaattatagattttcttcagcaatttcccaagatattgtgggaatgcaagcagttgcataccttgtttgcggccacataaattccagactttccagagaaattatgttgtgaaaacgaaaacaaaagcattatccaaaattaagttaccatgttttaaagaaacccccctcatatttccaaccatcttcaagtttttgtaaggatttttatcaaattgtttggaaacaaattagaggatgaagaaaaggtacccttcaatgcatgttctgatcttcttgttcctttctttaaagatattgttcatagaa

SEQ ID NO: 55756 - DNA, 325 bp, Populus trichocarpa
  Intron number 4 from transcript POPTR_0006s05510.1 (locus POPTR_0006s05510) derived from phytozome v7.0 (chr-ID scaf fold_6; pos 3890059 to 3890383 reverse strand)
ctgtaagtgcttcctgtttttgtttttagttatttttaaaggattaacgagtctaggattacaggacactctctgggtgctaaaatttgctgtatataatttatagcatttgattttgagggcagaaacagtctgccattgcttgcaaaaaaacttgcgagttttttttttcttattaatgtgaaaggaacaaaaattaattcattacattgctctgaaaataaaaatgaatgatttacttttttggggaatcgaaatgttctcttttcatcaagcattgtgaacctcattgcttcttttcttgttgatcaggatcttgcagggg

SEQ ID NO: 55757 - DNA, 537 bp, Populus trichocarpa
  Intron number 2 from transcript POPTR_0006s05510.1 (locus POPTR_0006s05510) derived from phytozome v7.0 (chr-ID scaf fold_6; pos 3890635 to 3891171 reverse strand)
ctcaatcctctgcaaacgagaagagtctctacgaggtaatgaaacatttacatcttgcttggctggttaatgatgttttggccttatatttgactttagatcagtggttttttttctctcgttatttcttaaaattctcatatgggtttttctaggtttttgttttatttgtgctctggttgcagtttggctcaaattctattgaatgcttgtatatggtctaaatggtaaattagggtttcttgtttttgctgcaactctgttgattcttgattggataacttacaatggcattattacaaatgttgaattggtgaagctgcggtatgtaaatcggagttggggaatatgtttaagagtagggagaagacattcttaatcctactgaattgtttcattaaaatatatttttaatattctcgccttgttttgctttgtgattcaattagctttgtaatttgtaatgaagtgagataaccaaatgaaaacccacttgttgtaggttcttggtgttgagaaggcagcatctcagcagga

SEQ ID NO: 55758 - DNA, 618 bp, Populus trichocarpa
  Intron number 2 from transcript POPTR_0013s01320.1 (locus POPTR_0013s01320) derived from phytozome v7.0 (chr-ID scaf fold_13; pos 736336 to 736953 reverse strand)
ggagtttcgcggtgtgcacagggtacttttttttttaagtgtttaatgagtgactgtgaatgttgtcgtggtttggttggatgtctcttgtaaatggaatggttttctctgtgttttaagtagcattggaaaagtagaatttgatatttttgatgtgctgtcactgaaaactggacccatgatcactaatcattgcatcaaaagacaatgttgcaactttgttcgatgatggctgtgtttcatattgaaaatgctcttttgtgtggttggaattctgtgaagtgttgcatatgaaacatgaggagcatttcagcttgctttgatggttttaatgccatctcatcttttctttctttttacttggataaaagaattggttagagaagaaatcataatgatgcttaatctttaaatttgcagcttttccatttggattgatttattttgaggtgttttgatataaatattaaataataaagattatcttaaaatctcaatgcggttaatcttctatggtgttcgtttttcttttttattttcagttaaggaaaagtataattaactcatagtattgtttttacaggcaattatttgtggaaaagtgggacaagcccctgt

SEQ ID NO: 55759 - DNA, 979 bp, Populus trichocarpa
  Intron number 1 from transcript POPTR_0019s12230.1 (locus POPTR_0019s12230) derived from phytozome v7.0 (chr-ID scaf fold_19; pos 13326121 to 13327099)
aaagctcagatttgggacactgctggccaagaaaggtcaaaccttcttgatctctgtatctttctatttttctaagatgggtttcttcttgttttgtgacatttgcatttgggtctatcagatctatatgccttaagtgattgatgctacaaagttttgttttttctttatttttttatttgggtttttgatactataagttttttgcaaattgatggtggaaaaggggcttagtagattgccattatggtagttgatggacttctgcatctgtatttgttgacatggatggaaaccatactacatgaaaatgggcttagtagatctagtctctcatgccgaaaatgttaggaacagaaatgcctaaatgttttatttggagatataaaatttgcttgagaaaggatcaaagtttgcacctttctttacaaagtggttgatgttttgataacaaatggctgtttttgagttgctgctaaactctgatttggatttgtaaaagactggagaacaagaaatatgatagtccagtgtttccaattgatctctgtttttgattttctatcctcattctgcatccagtccaggaaataaaaacatcattttgagagagatagagtatgaccccatctattcctcctgtatgaattgttgttggcacatgtagaaagaaggagagtaaaagaaaaatggttgcattttgctttgattattgtttcacgtaattgtgcagaatgtaatagctttgtgtgatcataagaccttttctctcactagtgtctagaatataaccacgttttctatggttacctactctttttcttgcttttcttattgaacaaaaatactttcaagcatgatatcttttgttgaaactgaattatttccaatccttgtatcataagggtgcctattttcatcattgtttctattcattgatacagataccgtgcaattactagtgcatattatcgaggag

SEQ ID NO: 55760 - DNA, 728 bp, Populus trichocarpa
  Intron number 3 from transcript POPTR_0013s03920.1 (locus POPTR_0013s03920) derived from phytozome v7.0 (chr-ID scaf fold_13; pos 2568308 to 2569035)
atctggaaactcatcacggcttttacagttttaaagtttaaaaaaggtctctaaaaaagaagataaatttgagtcaagtccttgaatatggatatgctcgccatggtctagggtagctagctaataacttctcatgtatgtgcattagatgtcaatgtagaacaaattactttacgtattagaattcccatggacatcaacagacaaattcaattaattaaatatattttcacatatatttatgtaggtgacaaacactgggactggagcacaagctacagtgaggattgttgaccaatgcagcaatggaggtctagacttggacgctggagtattccagcaaatagatactgatggaaggggcaatgctcaaggccaccttattgtgaactaccaatttgtggattgtggggactagagcatggccctctagttctatgatgaaaataagagaaatccgcacctagataatttcaattcccaataatgcaatacatatatgttgaggtttgaataataataaaattattaatgattgcaaatcagtgttattcccaataatacaaatcaggtttgaataataaaacaccatcatttttattaattcaggttaatttgtttaattcattattttgacctttcatcgatcataaactaaattggatttaatgtatttattgtacaccttacatgggttttaaaatagaatttaaaaaactttctgcgag

SEQ ID NO: 55761 - DNA, 578 bp, Populus trichocarpa
  Intron number 2 from transcript POPTR_0006s14320.1 (locus POPTR_0006s14320) derived from phytozome v7.0 (chr-ID scaf fold_6; pos 11643984 to 11644561 reverse strand)
gcattgttgactccttgggcaatattgtagctcaggtatgtgatttatatatgttccacaattggtatggagatcatttcatgggtaaatgacacgttttgtccgtcatcgtaatcttttttttttttttttatggttaatttcttctcttatacaattttttctttttataggttctttcctctaacttaattacaattatgtaaaggatacataattgtgtatttttcagtgaaactctgtcagtttaagtgtcatatgtttgatgagttattcattaaactatatattagaaaatgacacgctgaaaagagacaagaaaaaaagaaaaagaaattgaattgtttttttaattatatatgtgttagattctgataatttaagaaaacactgttcttccttttttcttattgcttttttctagtctcttttctcaatttgattgaaccgtaaggcacactccttgacggaatcatatatttatgaactttttaaaaagacaaagatgctaacctgcatgtgaattgtttttcttcaacaccacacagattggaatcaataaggaagaagaccagttg

SEQ ID NO: 55762 - DNA, 950 bp, Populus trichocarpa
  Intron number 2 from transcript POPTR_0022s00550.1 (locus POPTR_0022s00550) derived from phytozome v7.0 (chr-ID scaf fold_22; pos 226658 to 227607)
gcttctgagcaagtggaccagaataacaaggtttgtgattagtttgtccatgctaccttttttttatatatataatttggaatccaagcatttaacatgtgatctgatttttgaaatcctacaatctgattcttacatgtagatctaattttctgatcataacataactaaaatacataagattttacttgaaattcttatgtcatgcttatttgataaactttattccacaatcacaatccacgctgtagtgtcatgggtttccttgaatactttgatgctatggtatattaggttctccttcatgatcatagttgagcttctgcacttgactaattatggattaggctggcaggttgtatttctaatccaaatatgaaaaggagattatgaatgtctttgaaaacatttggatttgggagatgaagtgcacaacataagtgttgtttggtgttaacacacgagatattgatcacgattagatttttttagggaaaaaacttgtagaatgaggtttgcagtagcttgatttcagaaattagacataagaaaaggtatcccctatagaccattatggtcttcttggctgcaaaacaacaaaacccgttgtcaaacaggaacgcaatggtattataatttttgattacatagcatttgttatataacagcagtcttttgattccatggcattgaggcctgtgctaatggagcaaaccatatgacatgaagtgccaaaattgaaactgtcactggagtgcaaatgatctctaaattgccattatatcaacaaaaatgatttgcctgttgggtttctatgtaaataccatgtaaaccacatgagtgtgggcacactcaattggcatatttgtttatattataatttcaaggcatcttatctaaacacttttgcttcagcttggagttagggagcagaggctgaggtttgccga

SEQ ID NO: 55763 - DNA, 998 bp, Populus trichocarpa
  Intron number 2 from transcript POPTR_0006s14740.1 (locus POPTR_0006s14740) derived from phytozome v7.0 (chr-ID scaf fold_6; pos 12098789 to 12099786)
gcaggtcaggttctttaaatggtcaaaacaaatgttttgtttagttatttagcttgttctcttaggaagaaatactttactaaattggagtatgtgaaagaatctcatgctatggtagtgaatattcattggcagcaaattagtgtgaacattcatgtcagggagttaatttttcctttttattgtaagttatgatttgtttgtacattgtatcataaaatgctttccatctgttgattcttgtacaattagataggaccacttcgtccccaactcgtccatggtaaatttgtcaaccacagaagcaacctcaagccagcaaacacacatgtatgcacaccctttgcactttagtgctactgatggagaattgggtgttggattctgatggatatgactttagttatcacctgccttgaacaagtttcctggaaacatgggtaaaccatgagattcttatgtgatagctgaggcctgaaatgaatgcagccatcagttgctgcataagtggtgtataaagttcttaaaaacttgcgtttctaacttccaaaaattacctagaactgctaaaaacaagtacttctagtttagattgtaaatatatgtacatatttaaaaacctgttcttatttcatttcaatattgaattatccttgtacagttctaagtgtctcccatccttttttgagtattcaatattttttattcaaattacaagctttaggtaacttcagctttccttacagtggtgatttgaacctgactggttgtttcagcatgagattatttctctctgtgtcaaaaagcttcatctggtagtttcatggtgaaaaattagtctattttgtgtatttcatctcgatctacctatccattttgatgtgattttaaattttgtcacattttcttatgtaactgaagcagcctagctcagtggatcttgttttttttttcctgggacagctaaacagtaatctcaaaggcgagccaccaagaat

SEQ ID NO: 55764 - DNA, 904 bp, Populus trichocarpa
  Intron number 2 from transcript POPTR_0013s06670.1 (locus POPTR_0013s06670) derived from phytozome v7.0 (chr-ID scaf fold_13; pos 5387255 to 5388158)
catcagaagccaatcttggttattgtgccaaaaaggtaacatttatttattttctcaactattattgttgttgttctttgtaaacgttaactggaggagaggtttgaagagttaaagaagttctattatttttagagatacatatgaagtatgcctttatagtttttaaatacaaactctccataacttcctcctatacataagctattcaaaaatcaaaaacattatcacaatcgtaacaaaatatcagttacaatcttttctgtttcgactagatactattgttcccttggctgccactgtgtcattagaatcagattcagttttatctccaatacgccccctcaaccgaatgggtagatcttggacatgaagtttggctctcaggagatgaaaacggacagaggacagtggttttgttaataaatcagcaagctgatttgtagtggagagaaaggagtcttgaagctttttagctaagacttgatcccgaacataatgaaagtgtatttcaacatgtttagttctgacatgaaagattggattagaggacaaatgggtagcaccaatattatcacaccataattttggacttgtcaccaggggaagctgcatatcatgaagtatggattggatccaatgtaacttttctgctgtgttgaaaagggatttatattcagattcagtcttgcttcgggcaacagtttgttgttgttcgcagctccaactgataagattggatctttgaaaaatgcagtatgccaatactacatttgtcatctttgtcgtcagcccaatcagcatcactatatgcttgaagagaatgatctaatgtactttgtaaatgaagtttatagcccattgtatgttttagataccgaaggattcatttgacagcttgcca

SEQ ID NO: 55765 - DNA, 655 bp, Populus trichocarpa
  Intron number 2 from transcript POPTR_0014s01790.1 (locus POPTR_0014s01790) derived from phytozome v7.0 (chr-ID scaf fold_14; pos 1671381 to 1672035 reverse strand)
ttctcctcctggtcctggtcatccaaaacccttgggttagcttggtgaacatactcatttctcaaaaatgatgtagcccttaatctctatctggtgttttgtgtacgtgccttgcctgttttagtgtctgcgtatagctagctcatgtatcctgctttgcttggtttgaattttcttgtaatttgatgatgttcttgggatttgctatccttcaacaataactctaatgtttatgcagtgaattaatggagtaagatcgctttcttccctgagtagagtaatgattaacagatcttgctgcttgttcgttaattatattacttgcttacacttcgttatccatatctgtggcctgaaagagatgctcaagctcgtctcctaatctatggttggtcactttaacctaccacgcacctttttagatttgttaaaagcttcgtcttgtgctcttgtatcctttttcttgtaattttaaaatctaatactggaaagcttgagttacaagtcggaagagttggtttcaataccggattaatggccgggttttgaacaagttattgggtcaacatgaatttttaactagatcagtgaaattttttttttgttttgttttttttcagcttggaatagtctagatcctaaggtgaccagttaa

SEQ ID NO: 55766 - DNA, 758 bp, Populus trichocarpa
  Intron number 1 from transcript POPTR_0013s02380.1 (locus POPTR_0013s02380) derived from phytozome v7.0 (chr-ID scaf fold_13; pos 1423685 to 1424442 reverse strand)
ccagattgctcctcttggtagattattgacaggtatgtcttagttcaatttgatttattttatttgcgttaggagcaaactaaatgttgatgataactagaaaaatataaaaataaattagattaagagattgataatatcttcactcaccaatcatgaacttaatttcttcatcatgaagataccatttttccagtttcttaattaaaaacattatttttaataaatgactaattaagcacaaaatagtaagtttataacatcatttgagtagtgtttgtttattatttggaataaaaaacaaagagataattaggataaagaaaacatgtctcttaattatattttttatatttccaaaaaaacaaattcatttcaaaattttcataaaaagcaatttgtttttacatctttgtttatatattccttttatgtttatgttccttttatatttatatatatattcctattatttttttctgaactaaacgcacaatattgatgtttgttaaaaaaaaattatatgttccatgaaagaaagttaatatgcaggaaataatgttagcattgtatttaacatcttgaatttgtgctgttttttttttatatatagttggaatttgtttgttaatatgcaggaagccaaggaattcagagacattccatggcacaatattcaaaagcaagaaaacccattgacaacatcttgtatcatcaaagggtcgcctatgcaacagtaatccattcctcagaagctt

SEQ ID NO: 55767 - DNA, 907 bp, Populus trichocarpa
  Intron number 1 from transcript POPTR_0018s12980.1 (locus POPTR_0018s12980) derived from phytozome v7.0 (chr-ID scaf fold_18; pos 13436621 to 13437527 reverse strand)
aggagggaaaggtccatcatgataggttttctttatctaattattagcctttcatttcttggctaagaaacaaagggacaaatgcttcggcatctggatgcccatcctccattcttttcctcccttgtaacatatggtatgcaagtaatgtcagcaaccaatatacattgctgaattcacggggaaaccatggtagctgaatttttttaggtggtttgcttgtaaaatattactgcttttttctcctaactttgattggcagcatagaaataaagtggagatgcattcctggggttgtgcaatgggtaacttaattgtactttgacctcataactgccctttgaagtcctcataataccaccaccgagcaatcccctcctcttgttcacggtaatgaccaagaaatcctttcactagaggttaagattacattgacttgaaatatactgtggacaatattatttaaagaactcacctgaatgttaagtttcctttagcataaggttattaatgaggattatttcctagaatcaatgtatagcattacagtaaaacattgggactatgtgtgtggttctccgtatgacaacagaaacagcacagcaattgcattgaatctgaatttattcaagttgcagaaatcatgcaatgccatttgacttatctagaccatattcatagtgggaaatgcatctatcatcttgactttcataatgttgcacttttattatagctgctgttacttgaatgttttggcacatgcttaacattgaacttgtcattatcttaacgtagcatgtatttctagtgcattgttggttgtctgtgctggtgagtagtcaactaacctgccagtccatgttgttgtttagtttgtacccaagaaaggcgggacccctaagaaagg

SEQ ID NO: 55768 - DNA, 1005 bp, Populus trichocarpa
  Intron number 4 from transcript POPTR_0003s17390.1 (locus POPTR_0003s17390) derived from phytozome v7.0 (chr-ID scaf fold_3; pos 16744334 to 16745338 reverse strand)
aatctcaagaagaacattcaaatttattctttcaggtatgtactgatctctgcagcgccattgggtgtagattgttctgtttaggatagtattcttaggtttttctccatgattagcatgtggtttcccactcttgatctgtgttttttttagaaaagaggcttcctggaacgagctggattggagccaacatgactttgatggtctttgtttattgttatagaaactaaaatgacactggcagtctttaattgtatgttttctgaacttttagaaaccagtagtgtgttattacttagtaaggacaacttttgcagaatataataatatttgaatgcactcaatcagttgcaggcctatgtaaatgttagttttctcaatgcttaactatgttatatcattagctatacattgaatgacaatcttgcatattaagttgtgcatatccccaatgggaatttgtaaagaagaaagtgagtcgttcgctataatgtctgtctccttgctaaaagctttgggcaaattatttaacttgcatcaaccaacatcttttgaactacaggttaccaaaatgaaaaaggtcatgaacttatcttggagttgctgcaaagcagccaaccatagaagtgcatatttagtatgtgagaaaattactaatgctgatctgatgtgtctaataagaaactggtcataactacttcttgagtaattcatatcgtttttaggtgcttaatttgtgctgtattagttaactttccttttgtgcaatatacttacaagttctccaatgatgaacatcctctcttcttgacaataatattggggtttatgcttttgtaaaatatgggccttttgagctgaaatgtgatttttttgataagatcccagtgattattatcatatattttctgaataacgagtggttgcttttggttttgttttttgacgtctttaaacttatcttttgcagcttcttttggatttatttagtctctctgctgccag

SEQ ID NO: 55769 - DNA, 427 bp, Populus trichocarpa
  Intron number 4 from transcript POPTR_0006s11290.1 (locus POPTR_0006s11290) derived from phytozome v7.0 (chr-ID scaf fold_6; pos 8575123 to 8575549 reverse strand)
ggactgcctacatctcatttggccagtgggtaagtatcaagcatctattagtctattgttattgcctgtacttgacgactggggctgcataactttatggtacttgtgttgttaatgaattagcatgcatacactcttatatatatatatatatatatatatatatatatatatatatatatatatatatattatgcttcaggtagttttcttgctgaaataagcttgggtttctctcattactaactcgtactgtgattgtttactctctcttttgactatctcacccaacaaacttgaagttaaaaaatcagggaagaagttttttaaccgtcaaacatgtctttttttgttttttttcccataaagttgactggttaggctctggttgatgcatgccaggttggtgcaatcattttatacacat

SEQ ID NO: 55770 - DNA, 623 bp, Populus trichocarpa
  Intron number 2 from transcript POPTR_0019s05550.1 (locus POPTR_0019s05550) derived from phytozome v7.0 (chr-ID scaf fold_19; pos 5927891 to 5928513)
aggctgctggcatttcaaatccatacagtatattatttaatgggatttaatgtttttatttatttattttacgctgtgatatttgtagtatagtgaagaagaattaattggattatttatgaggttttataagatatcaatttttatttatggggttttgttagaaatcactacaggtaggcgcgcttgatattattatttagtggatttgatatttaaatcagatgatgaacgtaaaaatatttcgttcgataaagaaatgttgctgtattgtggctgaataggtgtctttttcttatgccatttgagttttggaaggttaatagggatatgaaatttcttgatatcataaactttggaagaaaactcttatctgggtggttttcttttgggtctttattggtagttctagcttgccttgtgctgtttggctaatttatgtttttcttcatgtgactgaaagcattttctttgaattctccaaaaaaaaaaaaaaacacttgttttgaagtctctaaccttctattgtactttaagtgatttatttttttggcctttgaatgattgatgcttaacaatgctttctacaattacagttcttgaccctgagaatccagctctgg

SEQ ID NO: 55771 - DNA, 851 bp, Populus trichocarpa
  Intron number 1 from transcript POPTR_0014s05240.1 (locus POPTR_0014s05240) derived from phytozome v7.0 (chr-ID scaf fold_14; pos 3972435 to 3973285)
tttgtggtggttctgtttctcgagctcctattgaggttctttaacatcatctctctccttctctttagatttctttttatgaatccatccatcaacttgaatttaagtttagtactaaagaattctttctgatcaattagctgactgatgaaaataatttagcattaatggttttgtttttaatgggattatctttagttatttgttcttttctttggttgcttagaacatgttagaataaagtgaaaaacaacgaatggaaggaaaaggatagaatcttgaaatgggtcttcgatgttttctcttctattcttcttttttttttgggttggatgcaaaagttttgaagtcaatatctcacgaacgtgaagttcacttaacttatattacaagtaattttctactgtatcgtgacaatttctggttgcaagttacgattattcgatgaatttataagttgattacggcggttgagattttttcttctagaaatgcattaaaacactatttttttgttttttaaaaattatttttgataatagtatatcaaaatgataaaaaaacataaaaaaaactaattttaagaatagttttttcagtttttttagaaactttatttggaaagcaattctaaacggccctgagttattcttatatatttgtgcttggttatatcaacaacaaagactaaatcccaaatcagttgcggtcggtgatatagatccttttgtgccattcatgtgctgggttacggtaaaacaagggagaaaacaaaaaaactatcttggaaatcaaaaattgactaaagtatcttgtaatggagtaattctgagactgattttgactttcag

SEQ ID NO: 55772 - DNA, 787 bp, Populus trichocarpa
  Intron number 1 from transcript POPTR_0006s00530.1 (locus POPTR_0006s00530) derived from phytozome v7.0 (chr-ID scaf fold_6; pos 275591 to 276377 reverse strand)
gagtcctgattctcgtgattgggttgatagggtattccctttttggccttttcttggttttctttgcatcagttcgtgaaagtttcgatctttgtgttttattggttttggggtgcgtgtgtttttgcttgatttgattggtaatggaaatgcaattatgaatcctgaggttgaaaatgctgttttatgggtttatttgtttgttttgtgtaagaacccagaatgattttgatgcactgtgtaaagaatctgttctaaaattgctatggcccgacagtgaacaggatcttgatttaaagatgggtttttgggaaatcatgtcaaaataagtaatccctcattaatctttgttctgtgtgtttaaatgaagtatgaagagagttgaaatcaacagaagcggttcaatcaatacagctttaaattaggatataagaaaaggctatccctgagctctaccttgtcttgcatattcgttatcttgaattctttccaacaccacatggttcccttgttctgtatctgcgatgctccaagtactgcattgggaaaatcttgggcataattagcaggcctaatgatcctgaaagcaacccaaacagcactttcgggagatgggtttatatattgttataaattgtatcgaagccaacttagcttttcttgtttgcgaatctgggatggatattttgtctccggattttgctaaattaatatgtctgagcttaggatttatgctgattaacttttgttttttttcctaatttttatattcatttctatgttgcag

SEQ ID NO: 55773 - DNA, 862 bp, Populus trichocarpa
  Intron number 1 from transcript POPTR_0004s22390.1 (locus POPTR_0004s22390) derived from phytozome v7.0 (chr-ID scaf fold_4; pos 21307294 to 21308155)
tacttcaagcagctaccttcctttctgtttcttgggtactccactggcctactcttcacaattgttaggttaagttaagctgcaaagttttcatttcttttttttcagacttttattgccattttcttgtcttggctacaaaacagactactaatactaggtacaacaagtttatcaagtttgagacacatgatactatttgacaagttactaaaggaagtatgtgtgtgtgggtttgccttccttttgctctctgcctctttttttttttttaattattattgtatcaaaatgagggtgatttttggtctgattggtggtttcttcgtttagttcagcatttgggtttttggggtctcttcttcttcttttgccattttgctgtcattttctgttctatgaacataaggtatatgaaaaaaagcgggttgctttttgataatctttttatttattcctataaggcttgttacaaatgtaatctgataatgggatctttgtactgttgaaaagtgctgccttgctgcttatcattgtgctacattatttttattttcttcttaaggaaaaagcttccaagcaagatgggcgatggggtttctatttgtttttgttattgtttcatttcagaagtaccttgggattatattgttatctcacttaattggaggcctttgatttaacaattcccaaatgttaagaaaatttacttgccttttccttttctacagtttctcctatacttgcctgtcaatgttcagtgcataaccatgttatgttggaatctgaatccacaattaactaattgatgcttgaaactttcgatttcttgaattgctgatgtaggacctgttattctgac

SEQ ID NO: 55774 - DNA, 415 bp, Populus trichocarpa
  Intron number 1 from transcript POPTR_0001s10890.1 (locus POPTR_0001s10890) derived from phytozome v7.0 (chr-ID scaf fold_1; pos 8441414 to 8441828)
agtctatctgtgcttcatttttttttcctgccttgcaatgcacctgaaatgaaaaatcatgatgctacttagaaatgttttgatagtctatagaatgcagccagcaatataggagccgaaagaaaatgtcaggactaagattgttctcatgcctctgccaagagttggaaaagaaaaccccaattataacaatgttttgacgcatgattagaattggaaattatgtttgtgattattaattttcttggtcataggtccatcttcctggtaatttttctaccttaagttggtggatgaactcgtaagcctagtattgttcaaaatgattttcaattttttcactttgaccttttatcagatttaactcttgctgaatttatcatgttcagcttcaaaatcaagaacaattagagcc

SEQ ID NO: 55775 - DNA, 303 bp, Populus trichocarpa
  Intron number 2 from transcript POPTR_0001s10890.1 (locus POPTR_0001s10890) derived from phytozome v7.0 (chr-ID scaf fold_1; pos 8442133 to 8442435)
ccaaccttggctctgaagtgcttgaaaatgtgagtcatattcttttctttgctaaatgtggttcacctattttagagttagggtgtgtttgatattgtggtatggttgtgatttaacgtgttttttgtttagaaatacattaaaataatattttttttattttttaaaaattatttttgatatcaccatattaaaacaatttaaaaatataaaaaaataatttttaataaaatcaaaatcaaaatttgagggaacaaaccctaagctgtgaatatgaaatctttgaacgtgtacgcctttcag

SEQ ID NO: 55776 - DNA, 506 bp, Populus trichocarpa
  Intron number 1 from transcript POPTR_0011s10570.1 (locus POPTR_0011s10570) derived from phytozome v7.0 (chr-ID scaf fold_11; pos 13047487 to 13047992 reverse strand)
cagccaaggtgacattcttcttctgcccttcaaccttttcttcttttttcaagaaatattttccgactaactcaattattgtcctggaagttcttttccgttagtgaaattactagaaccgataagaattgcagataatgttggtaaaggtccctttgaaacaagagaactgattcatgattttcaggacgttcagatttgtttttgattcaagattatcgttgctagattacttcctcttctttgataacattaaagagtaactcaatatcaaaagaaaaacaaaaatggcaattgcaagcatttgtggatgagttaacttcaagtaaatcgaaaactttggctgcatgggcaccaacgagctttgttgtacttgaagtttgatttggtgcttatgctttatcttttattaccgcaaataatgttgattttcatttattctggttcttttcagtttggtgattctcttctaaattttgatttgcatgtgtagcttggactagaga

SEQ ID NO: 55777 - DNA, 537 bp, Populus trichocarpa
  Intron number 1 from transcript POPTR_0011s07130.1 (locus POPTR_0011s07130) derived from phytozome v7.0 (chr-ID scaf fold_11; pos 7871937 to 7872473 reverse strand)
gctgaagataaggtatgttctatctctgttttttttttactttttttttcctgggaaattattacattatcccaggaaaaaaatcagacattagagtgttggctttgtcttatgtttttgtttttctaatgttgggttttagaaggtgcgaggtggttctaagaagctctgatgcttttttttttttaaattctcagcatccaagcaggttttctcttgcattactgtatggattttttaagatctgggttttctttattttcctgcgttttctcagctatcatcctttttttttttttaacaaaaaaatatcttttagcttctttgatgagtgaaaatagtcctgttagaatagatctagatggtgagctcataccatctaatttgtatttttcttatcatttctccttcgtcatgctccaggatcactgtttcctctagctatgcaattgttttttttttttccttttataaagcttaactatagttttcatatagatccaagatctctgatgtccatatttttttttgtaggaa

SEQ ID NO: 55778 - DNA, 678 bp, Populus trichocarpa
  Intron number 1 from transcript POPTR_0015s10030.1 (locus POPTR_0015s10030) derived from phytozome v7.0 (chr-ID scaf fold_15; pos 11069035 to 11069712)
tcattgtcatacaggtgaaaaacgcaagcaaagtctccatcttttgatgtcatctgtctccgtttttatacgggaacttaattaaatttggttaatgggtgtaaaggtgaagtgggtttttgatgattgattatactagattataatgcctagcattgtgatcttttagttccctattgtctaaagttggaatcttttagctgaaattttaccctttgtagtatttggtttgatggattttgcatgtttttgagtttgatgttgatttggttggtatccaaggaaattcaagggaattgtgtgtgtgcatgcgagtgcttgagggtagagacattcaagtttttagttgtttaagaggggttttaacttatataattaactgaaaaacacggttaagtccctggtaagaccgttgatacgaaaaaaactaagggaaatgtttttttttttccttctttttatgtattgagttaatgagaaggaggagccttacattttctgatttatttagtgatcttcttccctaccgagtccttcacatttgagtggatcgtagtttaaatctcatttatggcacgtcaatttggttcagacacatgctaaacctaagttgaataaacttttgataagtatgggatgataagctatgcaactgaacattattggtaggaagtaagg

SEQ ID NO: 55779 - DNA, 905 bp, Populus trichocarpa
  Intron number 2 from transcript POPTR_0011s01110.1 (locus POPTR_0011s01110) derived from phytozome v7.0 (chr-ID scaf fold_11; pos 618887 to 619791)
ggcatatttgaaagactcatctactgttgtatgcctactccaaccacattattagaccttacaatattgcctacatattcttgtttgaataccatggacatacacatacatatttatgtatataatttgaactctaaattatgttgcaggccttcctgttaaacgtcaccaagaggtaaaatcacaggtacaaacttggtgcctggcaaagaagagagatcttgagagcggtcgggggaggaactcaggagatctggggagtgtctcgaagaggaatcaaagaggcggcatactcaaatatttaaaggtccctgaaggtattattgagctacctttatatatcgagattagatcaagttctccaatgcaatgaaacacatttcattcatgtcagcattaaggaatcataagaatttaaatttcatggcttgacccgatatttgaatcctgtagccaatattagttcttatataactgagtcgcagtttctttttttagtggacacgggctacacaagcagagtacgtagttcttcccaatttttgacaccaattgagcttacatctcattgtcacttaaaaaggtgtattagtgaattaatataaatttactttttaagataattatttaaacatttacattgagatgatttatttacaaacacaaaccttatgcttgaaacaaatgttacaaagaggtttttgttcacatcctatttttagatgcttacgcaaataatccttgtgcttccactaaatttagttttcaccttttactatcattattgacatttctttccaattcataataatgtctagctctcacccatgtttaatttcattccctttcgcacgatcatgatgtaggatgttggctacaaagaatctggaaccggaaaagaaagc

SEQ ID NO: 55780 - DNA, 1021 bp, Populus trichocarpa
  Intron number 3 from transcript POPTR_0009s13650.1 (locus POPTR_0009s13650) derived from phytozome v7.0 (chr-ID scaf fold_9; pos 10832609 to 10833629 reverse strand)
cggatttataccaggtgattttctttgattaattgatgaattgtataattaatgatgcagataattaaatacctgtttaattaataatagtattttccatttttatgtctatttaatatgttgtttcacagatttggtagttaataattaacatttatcttgattttcttgtcaaaaaataacatatgtggatatgtaactgaaaaacttgtgattataatgtaaatgaggtagcgatttttcgtgtgggtgagtggagaggtggaacatgcatggaatattccaaggatcacacaccacacacgcacacgtgtccaggaacgcacgctcattttcctggggaatggaaaaactaactatatagtttgtggatagagatgcaagttcttaggacgttacaaccactgacacgactaaatcacaaggcttgaagttttaaaatgtgtctgcctgacctgtctagtcaatcttctcaataattttacgttaattgcaatgaaatgacgagttctattaatgcaagtatagtgtatagtgttcctgtctcgttgtcatccatgttggtatcgagcgctcacgaatattgataccaacggtgtccttttaattgatgaataggtttctaagttttgcagggaagaatttggagagattttcttctagtattttatcctacctatataggaggaatttgttgatggatattgggaggtggacactatcagatgtactatcatggattcacggttgcagctctgatccttggcaggatacccaactatatttgccaaactatgaacacaccagcaaaccttaaattccatgattgttacatcagtcggtacattcagttcaaaatgagtgtagttgttgatatacaatgagtggtggtttgaatatgaaatatttgaatattctgagtataattgttgggtttccaaacacaatgagcaatttgattcatagtcaacaacattcatgttcagcttgcaggtgttgttgcagtggaggtcactggggg

SEQ ID NO: 55781 - DNA, 916 bp, Populus trichocarpa
  Intron number 1 from transcript POPTR_0004s10650.1 (locus POPTR_0004s10650) derived from phytozome v7.0 (chr-ID scaf fold_4; pos 9162389 to 9163304)
atctttaccaggctcgaaaatccttaaaaacccaggtttgttttctttgtgctttctacatgtagtgataaactcacgtttttgagattaatccatttgatatctatggaaaaggtttctgggttttaattttcagcctttttgattcatgttttcatgatcagtgctttctttttcttgtttgccggttcttttttagaaacgttcactgttacggggatttgggatcctatggctgattttgtttggttggtagaaaactgtgtttgaattcatgtaggcttagagaaagttccattgtttgttgtttagcagatattattttattatggtgtggtgtctagtactatgaactggacatgttcattattagcattgataagcttctcgttatttgttttttttgcatttgacttacctggttgtccatacttgtagctgttatctattgtgcttctctcaaggtggtttgctttgctttggtttatgtttgttattgttattgttcttatcagttctaaacagctacgctgctacaagttatctattgtctttctatttattgaattatataagttcccgtcattgtgattggatgtttgctactaattaggcatcttcatcagttatgaaacattcttgtatacatttatacttgatatttaactcttataattgctatacttgttttggtttttaactaccagaatggttgctaacatgctttccatggtttggctgatttgatactcgttttattttcataacactctagttactagtgagatttgagtctttttattttaatttgtgtttatgtgttcaatgtgtaataactaatagtattagttgtatgatttttcagctgtttcagttttggttgtgcaggtgatctgagattggttagtggattgcc

SEQ ID NO: 55782 - DNA, 938 bp, Populus trichocarpa
  Intron number 3 from transcript POPTR_0015s10640.1 (locus POPTR_0015s10640) derived from phytozome v7.0 (chr-ID scaf fold_15; pos 11512492 to 11513429)
aggctggaaaagttctcctgaaaaggtttcatttttacttccatctttacttgtttcattcattgctttctgcttcttaactttgctttctgcttttgttattttgtggtatttcattttcttaagggcgcaaagaaacatgctgctggatttattctacttatatatagtagtaccaactgaatctgtcaatctttcatttttatgttgtttgtccattacaactttaagggtatcggttttccgtctagttggtttcatgtagtgatggtatagtcattgtaggtgaatgaatgcttttcgagaggagggttttgtattgaaaaatatcgagtttggaaggttgttttcagttagttgttgtttggctgctgtcgacgagtaaacctaaagggaatctgatattgacttctctgttattgaagtgattctttgaggttgaaatggaaaaaactttttatgcaagggctacttggccattctttttttttttttggtgggaattttattgcaaggcgcctcagaccttgtttcttggcaaatgttcacacgctttcctgatatggtttcttcggaggaattcacaagtgctcttccaggagtcatgacctattttttctaaccatcatgcctattctaggctgtgctgtatatttgaagttagaaatggtagttaatctttaaagctaactatcaagattgaagatgttgacttgtctatttcttcactggcatcgatccatcatatgattcgtttcatgtcatatgttgaactgctaaggtagtatatgtttgcaagtgttcttctttaagttattgagtgtacatgttatttcttgaggtttcagtgatagatagattctaattgcattagagctcattacgattctggatcattcatgtctagaggtgaaggaaaatttgagaagcaatttcgc

SEQ ID NO: 55783 - DNA, 902 bp, Populus trichocarpa
  Intron number 1 from transcript POPTR_0012s07910.3 (locus POPTR_0012s07910) derived from phytozome v7.0 (chr-ID scaf fold_12; pos 8901798 to 8902699)
cttctttgtcatctccagccgattctttttacaaggtactccttttctcttgggctttttttttctgttattttttgggtttttgtctcgatcatggagtctatgttatacggcttccaatgatgaattattggggaaatcactaccttcgttgacaaaagaggaagatattatttgtctgacataggaattgtaggaattggcccagattttctttgatttcggttaacgtggagatattacagctcagttggtattgggttcgctaagttggcttttggagactgattttgtgttgccacatgatattggtgcttaaattgggttctcggggcagtttttgttttatgtttttttcccgtatttatgaattttttcagtagcaagtttgggtttggtttgtgtatagatatttgtcatttagctttctgctgtagttgaaggttgcatgaggttatggaatttgaatttcacttgctttcttgtgattgttgaccgaacaatgagctttgttactttttcgctgtgcaaagtgtaaattcgaatgatttatctctcctgatgatcacatgctttaatgattctgtatgttgcttccttttctgattgatggctcggtttaccattgttgatatattaatgcttaatcaagtactcaatgaatggaatgagaaaaaaggactagcaagcggcgatctttaatccatgaagttcataatgatatccttattatgataggagtggccaattaatgatattccattcagcaattatttattctgtcaaaatgcatgctaaatttttttctatgttagcagaacatttactgaagttattggtatgaagattgacttttagtaagttacctaaagtgccctgtcacttattccccctttaacagg

SEQ ID NO: 55784 - DNA, 1035 bp, Populus trichocarpa
  Intron number 1 from transcript POPTR_0015s06340.1 (locus POPTR_0015s06340) derived from phytozome v7.0 (chr-ID scaf fold_15; pos 7004926 to 7005960 reverse strand)
tcttactgttgtggttgtctttgaattcagcataggtaagtttgattggtttctctgtccttttcttttccttgtgtttgtctgtatggtttggttgattttgttatatgggttactgttaaatgtttgtctttgtgtttctgtgtatatgtccggggtattctaatgaaaacggtcttgagattcttctgtagtggtacttttttggagtattcattcaatttgtgtgtgtgtttatgctttttgattttggattgtgaaagaatttttctgtgtatttgtgtcacgcatacattgatgtaaatgtatatagattctaattgtgtaattcaactctctaattcagtttatgggtagtacttttggtgaaattcattttgtttcgggtttaattactgattttcattaaggatctaagtaaattcttgtaagttcatatgcacttccctttttttatgcgttgagcattccattaattttataaaaagaccaatgagaataaaaagaccaatgagtttgctgatacatatatcactataggctcttgtgaattggatagaatttgcatcgcctaattctattaaattgagaaggttgcaagcataatgagaatggaaatatcatggggtgatggtaatggatattgataagaatctttggtctaattgaaaggatttatagtgccaacttataaaattatcccaaacttctcctttagacctttccagccatcattttgttcacagattcaacaaagtttactggtcttgagagcaactaataaatgcaaaattgctgggtaagccttctttacttttatagccttgtgctttgaaattgaagctcaagttggcttaatcccaaatgacccaaccatcttagctttacatggtgtggccttgagtaaatcttttatcagatgcattttaatcattgtcaaacataagtaaacacagtcatttcagtttcatcgcatccttttttttcttaattccttcaggagctacccttagcaaaggattgaaccgagggatt

SEQ ID NO: 55785 - DNA, 927 bp, Populus trichocarpa
  Intron number 1 from transcript POPTR_0009s10940.1 (locus POPTR_0009s10940) derived from phytozome v7.0 (chr-ID scaf fold_9; pos 9241032 to 9241958 reverse strand)
ttggacctaacaccggtgtccctcttcattacaaggtattagctttacttcattaactttttagtaattctgtgtatgatatgtgtttgtgttgatgggttcaagttggttttttgattggttgatgaaaatacagtcttgtcccccttgggttggtagtgtttactgttgttttgtttttttatcagtgatcaaacatcaaggtgtgtgttaactatgcttgtacttgattaaagacatctttaggtgtttaaaacctgatggtacttttgggaattttaagggtactaaagtcttttgattttggatattgttaggtatcatggtatttgattgtgatgattgtttcacttttctacttttggttgtcgatgctaagttttgaaaacgaaaccttttcgggtttggtcattgagacgtgagaaagaaagaagcttttctgggtagaagttaggttttcagttcacgatgaaaaagtcattgttgtccttgattgttttgagaagtagtagtcgtgactttgtgccttttttaattacttgattctaaagaatcttcaagtattcttttcccagtacttcgagatactgcagcaatgatggtttctggttttggaccactggaaatgccatggcaggcagtttctatttgttttcctttttttcctagcttcaggttgaggttttattttttattttttggtggtaaataaagttcttgtgctttggtattgatatcttattattgttcatttttctcaatcgatatttctaggcaacctataggctttaattttttattgattgcccattgcatatgacagaagttattatttttctgtgcacagcattggctataaaggcctacgggaaggaaagtttaagattgttgcagttgattttacttgttattttgtggatatcaggg

SEQ ID NO: 55786 - DNA, 752 bp, Populus trichocarpa
  Intron number 1 from transcript POPTR_0012s07510.2 (locus POPTR_0012s07510) derived from phytozome v7.0 (chr-ID scaf fold_12; pos 8422254 to 8423005)
taggtctgtttcccccgtctccctcttttttggctaataattagtgactgaaatgttttttattttttgggttttatttatttattttccatattgcataattccacctacctgagaatgagattattgactgggggactatgtggaattgatgtaaaaagaatattaagagtgtagttttccagcttcttttaagaaaatgaatggcaatgtggttactttttttttttttaacaaagaaagaaagagcgtagaagagatgaggtttttgctctttactctgttgcccatgtagtagagtttggtattatgcaggttgagtagattcttagggtggtttcaagcccattattataagccagaatttgtgggactgactgatagcttaaatgtgaacagtaagcacactgaggccaccaggaaagtggcgcatatgctttttttagataatcaaaacaggctgaacatgttatcagttaaactctcaagttggcagaacacaaattattagagacattgttataacttcaatttacttctatttttatcattaagtcgtgccaaatttcttttacaatctgaatatgcctaagtggtttttttttttaatactaaacttttgtttctaagcttgtatgttttgtcttatgaattgttttagtactttatgtatcagaaattgccaccatgtttattttttgttttttggatatgcagatcgaggatattactctgtggagactgtcactctt

SEQ ID NO: 55787 - DNA, 640 bp, Populus trichocarpa
  Intron number 1 from transcript POPTR_0011s06825.1 (locus POPTR_0011s06825) derived from phytozome v7.0 (chr-ID scaf fold_11; pos 7498821 to 7499460 reverse strand)
ctaagaggtgtaacaggtatgttagtctagttgtgacattgattttgatgcaataggtgatgagaatgatgatgtagcatcttggggccatagggatcagatttggcagcctaggaatcattggtttccttgtattattatgaatattttacttagtttttatgttgttttaagtattatttgaaccataatattttagtttcggtttttaagttcagttgggtttgttttagatgttaagcttgtgttggataaaagtctagtagtttgcaacccaatatggatccattaaagttaattgtcttaggactatataatatttttcttactgtgaattttagcagctttcagattaataatattattatgttttgcttgaagcaaacatgctctttgttgtgacaaagaagaaaacttgatttatcaaggtataatttaccttgtggcgtcaattcatgaatttcaatatatctagttcttagttacatgttataactctagatcaaagttctcaaatctaattttcagttttcttagagaaatatcatcttcgttaggattttttgatcatgtaagcaagagttacacatcaaattttcttctagaactttaaaagttgaaatctgcagaataaaagcac

SEQ ID NO: 55788 - DNA, 696 bp, Populus trichocarpa
  Intron number 3 from transcript POPTR_0012s11650.1 (locus POPTR_0012s11650) derived from phytozome v7.0 (chr-ID scaf fold_12; pos 11997414 to 11998109 reverse strand)
cgagaggcgaggtacttagtgctttgtattggtgctcttattttagctttgttttgccaatagtggcttgttacatgttgtgtttgatattgttacatctatccttttttgtttctaataaatcaacagatctatccatcactcaacttttaatttcatctgccatgtcgtaaaacttcgagtaatctgcagtattaaggccttttgttggtgagatttgttaaagttaacagatgggggccagcccatgttttgccttttaaatgactctgtagtttcacttctcaccatctccaatcatgagtgcaacactaacgggaggatctataagaatttatgagtgctttatgttgtattgattatgatttttcttatatatattgggaatagtttgattgttgaattttatttttttcaattcctgtgatattcgaaactggttccaatctcaaaagttttgtatttcttatcgaatgctgagcccaaacattactgaatggtctcaatcccttttagtggcattactttacggtttcaagctgtgactgcatgcatatagaaggccagataaacttagtaagaaatctttttgagaacttaatgactcatactatgcaaaaatcttggtactacttgtaatctgggatgtgtgctgtttcaggacaacactgcgttcgagagacaaagtgccttgtt

SEQ ID NO: 55789 - DNA, 612 bp, Populus trichocarpa
  Intron number 4 from transcript POPTR_0004s11420.1 (locus POPTR_0004s11420) derived from phytozome v7.0 (chr-ID scaf fold_4; pos 10039173 to 10039784 reverse strand)
agctgcggaaaaaagtaagattcttgcacttctgtacgctatatttgttcatgttttcgaagccgtacgaagtcactaatatagcactagcctgctctactaaaacactagcttgagtgccctggattcttggctctaatttctatgataaaatagcttggattttggactcagtttatatatgaagaatcacctttctacccgaggtgtcgtcagttcagtgattagatttgtcacttacaacatgaaggagttgattcaaatcctgacaaattctagaatgcctttggattttgatcttgaaacgccctctctaatgtcagttaggcagtattttgaaaacatttctatgatgtttttgaacaatcacagagtcttcttgacatttcccgaaggtgcattttgcatttccttctgtttttcaatcaatacttctacatccggttaaatatttgtcttcaaaagtactctagaaggatatgaacatatacactaaaaaaacgtacagtcagttgtgggtgggatgtgaattgtgataaattcatcttcgttgtcatctgacacaagcttgtcacaggaaaaggaactgcaggagcagaacaacatactggc

SEQ ID NO: 55790 - DNA, 937 bp, Populus trichocarpa
  Intron number 2 from transcript POPTR_0015s00600.1 (locus POPTR_0015s00600) derived from phytozome v7.0 (chr-ID scaf fold_15; pos 362347 to 363283 reverse strand)
aggtttttctgcgaaggagaattttattaatcaaggtatccttgtcttattattactgttattattgagaattcaaaaaattactttgtaccttgcattttgttcttgtctattcatactcattattgattttgtcatctttataaattactgtgcttattatttgtcataccatataccttggatatttattttcctgtagttgcatctccacattagaatgagtgctattctgaagtctttatccatagtctagcacagcatacgctctatattaagctgtaattgttctgtttcatgccatttggttattgtttccatgcccattgagaaagtataagaaagatgaacataatacgaaaatgtgattttctctcaaattcgtactcattagtgagatgcattttgtcatgttttctctttcactgcggagtaattttattcacatctctcttctttgtatctattcttctaaactgttttctaaaggcactcttgctctgctgggcaagtggtaggcgtctacatataagcctctttgtaacttatccattccttattgaagagtccttttgataccgagggatgtagataacactgtcataatttttaatatatcagatataaggtttggaatatattccttttactcagccataatctgtatccttggggttactttttgcccttatgtcattggaagtctttaaggagattcttctttaccatctaccagagccatccttaattatgagtaattatatcttaatcgaatgattttggctctaattgcacaacaagttcagtttttgaagtatgcacccagcagaaaacaaatggtaagataagcatttttagctaggatagttaccagttatctagcatttccttaattgcttctacttgcagggttttctgcattcaaggatatcagcaa

SEQ ID NO: 55791 - DNA, 264 bp, Populus trichocarpa
  Intron number 1 from transcript POPTR_0015s00600.1 (locus POPTR_0015s00600) derived from phytozome v7.0 (chr-ID scaf fold_15; pos 363899 to 364162 reverse strand)
tttccccggctctctggcaccagtcttcttctccggtaacaactctttttttttccttttgactttcctattcattgatcttcatcatttgtattgtatattgattgttttttgcatgattcttgttcttaatcattatggttatttcttttgattgttagtcctgattatcactttaaagattcttaatttgacatggatttttgtgggttttgatcattttatgcagttgtttgttaacacaacataaagatataggcttaa

SEQ ID NO: 55792 - DNA, 1009 bp, Populus trichocarpa
  Intron number 1 from transcript POPTR_0012s02250.1 (locus POPTR_0012s02250) derived from phytozome v7.0 (chr-ID scaf fold_12; pos 1880145 to 1881153 reverse strand)
tacccaccaattcatcaggtttgttctttgtgtgtttaatttgttgtgaagatgtgtactttatggtttgtgtttatctggtcttgtctgcttgctgtcttttttttattattatgtttttgatgtttgataggtgtatgttagatcttattggatttgataattgggttttaaggacattggtgatttcaggcgcatagtgatgatgtgttgttttagagttgatgatggttgaattggatatgtttttgggctgttttagtgagaacaattttgggtttttggtgagttgatttcaatggattagtgctgaatttgagcgtgtgagggaatttgacttgaacggatggcattctagtgacgcttttgcaagggttgcaatgctatgagatcctctttgagcattcctgaagctgaggtgattccattctgtgagatccttgatccattttccagaagttaattcttttgcctcgagtgatatctgaacttccctatgttaagattgttgctttcttattgtcctttaatggttcttatcaattgcaacataagctgtcaagtactatatctgctttggaattgaagagaatttcgtttcagttatgttatctggagatcaagcttcacttcttttttctgacttcatatgtgattcttttatgttgagagttttttctggaataatactttgattttttgaagcaatgatggctcatgccaagctgcaaattaagtgggtaataagacgtatatcagtgctatataggtagagatattgaagtatgcagcctaatattggcctgctgcatttcatcattgacttgtcaactttttacctgattcttcttatttatttcttggtcttgcttagtatgcttgcctctacactgaactttctctagttaatcttggaggggaatgctaacatggctgtgttttgctaaactatgcctacaaacctacattaatatatggattttaaccgtctcttccttgcagtgtcaca

SEQ ID NO: 55793 - DNA, 951 bp, Populus trichocarpa
  Intron number 2 from transcript POPTR_0012s10140.2 (locus POPTR_0012s10140) derived from phytozome v7.0 (chr-ID scaf fold_12; pos 10965245 to 10966195 reverse strand)
gcttctaggaaatctatcactgcttcgcgctctatgtatgtttcctctgcgttttttttattatttatttttgaattgcgaattttgattccttctttgtttgtttctgcgttaaatctgaaatttactttcatttctatttattgatttaataattagaggacgcagaggatttaaggaaaaaaattattaagtttggggcattttaaatttgatttttagtgttttattgttacatataatttagttttttttttttttttgtagagattataaattgtgagataggagaagaagagctttgaattgtatagtgtctgttgcttgcaattgtgagctatggaaatgattcaatcaatattagtctggttcatgaggaaaaaaatgtgttcgatggtggagaggtgtgtcccaacaggatgaatttggattctaggttggttcttgatgtcgtgtatgttaatggttctattcattttttaggaaatgaaaggataacaaatttttggatcaatgaaagtgaatagttatggaaggcgatcatcaggagttcttctagtgaatagttatggatgggggtgttgaagaggcatatacctagaattcaactcctctctgcacttcttttctatccccttattattcacgcttctccctactacagtaatgggatgtttgggcttagtaaatcacgaaacgcaaggcatggccttggcctcatgtttaggtaatcaatcttttgtgctacgttaacattgaattcatggtaggagaaatattagtgatctctgattatgtagatagataggcaggtatccagttcacatgacaaatatagatcactggaaggtctagcagcaatggttgctacatcaccattaatgtaatcttctatttgcaactacatcttaaacaggggactaactggagagcgcacagtaaaacggctgc

SEQ ID NO: 55794 - DNA, 714 bp, Populus trichocarpa
  Intron number 2 from transcript POPTR_0015s00970.1 (locus POPTR_0015s00970) derived from phytozome v7.0 (chr-ID scaf fold_15; pos 565293 to 566006)
gttttctctctaaggtaataacattttgcttgttttctctcaaatttaataacattttgctgtggaatcagtgatcatacatttgatggtgttgcctaaatattaactgaggaatcaatgtgaatattgtgatgaatgagcttccatgttataactcttggttttgcaaaagtgaaggcaaatttgtttacagaaaaagtcccaaggaaacaatctaaaatggagatattgaatgaaaggggaaaggcttgtctggttattgttttagttattttgcagaaagaagagaaataatgatgattgataagtgaataaaaatatttaatcagtcaaataattttgaaaaatggccttgttaaagtggattaatcttgttatggaactggttgaagctgaattggaatgattgttattgctcattttcatgaatgttctttagctgtgatgttatcatcatcgatttcttctggtgcgtacgagagggaactttctaatttttacgagtacagtaacagcgatatctcgaaggcgcagagtccttcaatttttatgtagttgatgttgaaagggtggtatataaaaaaccttaaaggctcagagtattcttcatgcttattccacttctaatgttgctggttcccgtcgttttttaatcagaaaaacccttacttcttcccggtttttcgtaggtaccgatccccgccggtcaggttt

SEQ ID NO: 55795 - DNA, 491 bp, Populus trichocarpa
  Intron number 1 from transcript POPTR_0001s37760.1 (locus POPTR_0001s37760) derived from phytozome v7.0 (chr-ID scaf fold_1; pos 36844076 to 36844566 reverse strand)
tcaaatccaatcctttaaattccaataattcagtaaattaccttcacttatcttttctttctttgatcgatttgttaatgaaggagtgatttgatccctttctttttaattattattgttgctgttgttttagcttcagaagaagaaaacccttttcatttccttgtttctcttggcaagcaatcataagatctaatgtaaattattgctatgattgttaggttattttgatcccttcctttctgttttctctttgaaacaccatctaatctttatttttatgagctaaatttaattatggggttttttagtttttttcgtttacaactcctcctcgtttttttatgtttttttttttattctgcagttaattatgtgtcttacgtttgtgtattattcattacaatttgggggttatttaattctgtatattttgatgatttgcataagttacagaccctgtacttagaaattctcctttcgatccacag

SEQ ID NO: 55796 - DNA, 456 bp, Populus trichocarpa
  Intron number 1 from transcript POPTR_0015s05850.1 (locus POPTR_0015s05850) derived from phytozome v7.0 (chr-ID scaf fold_15; pos 6180477 to 6180932)
gttatccttaccctgctcaaggtatttatttatcttaatcatcttcaaacatcttcaaaatccttcttctttttttccttttctcttccccttcctttcattttcctttcaaagatgcaagtttgaggagcatatatataggttttgtttcagtttctaattaattatgatatttttttatcttcttgtttaaactgttaattttcagtctatgcacaagagattctctttagaggatcattcgagagttcatttatgccacgaagagtttttttattactattcttttctgattatctgttgtcataagtaccctgagttatatgattccttttcttatccttatgctattttggtttctttgattttgaagattatcttgatatcattttatggtttaatttaatttcttttttttttgcccctttggcaggttattatcaaggacctccagtg

SEQ ID NO: 55797 - DNA, 462 bp, Populus trichocarpa
  Intron number 2 from transcript POPTR_0015s12230.2 (locus POPTR_0015s12230) derived from phytozome v7.0 (chr-ID scaf fold_15; pos 12577532 to 12577993)
ggagctgttcaaggtatatctctattttttttgtttgaattatttgattgagatgtagttgaggtaatcgggttgctgaaaatttatggtattttttttattggttgctgaatgaaaattaattttgtagttttggtcgatttttgttctttgtattaatttgttgaagtgttttttgcatcgtggttgtgatttttccccctttagtcgggtgttggggattcttttgttagtttgatttggagactagttgaggtcgcttggggatgttttatgtgtggatgattgtgtgtactgtgatttgtaataaagtaaagagtaaagttttgtatactttatattatgttgcttggtgccaaattttagttttattgttaaaaactaatgtgctctcttgttctgttggatatgtgtgaagattctccaggtgcttctgcgacccaagctgaaaaggaggaggtg

SEQ ID NO: 55798 - DNA, 641 bp, Populus trichocarpa
  Intron number 3 from transcript POPTR_0015s12230.2 (locus POPTR_0015s12230) derived from phytozome v7.0 (chr-ID scaf fold_15; pos 12578013 to 12578653)
ttggtaatgtgagggtttactatccttttctctttattttgtcatatttatatgttttacatgactgtgtacatgtatgatctgtcaaattttttccctgtctctgtttctctctctgttggtgtttatatattttgcagtgtcaaacttagtctttttccttactttcttgtgatgataaatagatggggtttaactgtatttcatataaagcattcaagtgaggatttgatgtattaagaagttttgatgggagatacaatgtagattcaaaacttgggtacttgatgccattcaacatacaagtttagttgctcagtgaattgtacttcatgttttgttttatcttttctctcattcatgaacctttggttctccttcacaccttctagatattggtctagtgtcatggatcctggttcatgaattcaaattcttatcaattgcatttgatttcttttgtctgtttctcattaattaggcttgtattgttttgtagtggaaagttgcattcttttgcgtattccatgtttcaattagtaacaatctaaagaaccttgtctgacagaaaacattgttgctgtttacttgtgttcttaacatcaggtggattattcttgtacccctgaagaagtgcagca

SEQ ID NO: 55799 - DNA, 672 bp, Populus trichocarpa
  Intron number 1 from transcript POPTR_0001s45010.1 (locus POPTR_0001s45010) derived from phytozome v7.0 (chr-ID scaf fold_1; pos 45329445 to 45330116 reverse strand)
ctgggtctggcaaaacactcgcttttattattcctgtgagttggttttatttttattttgagttttatgggtttggattgcttgcttttgttgccttttcatgcaaaaagtggggggggggaaacctagtgtggttcttattttgagcttgtgtggttcagtggcagatatttggcgttgcaaaataggaaaaaaaaagaactgggaatagaatggatttttagggtcgacagatgccttttctggtggcacggaatggaaaaaaattgataattggaaatgaatgggtgctatatctttctcggctttaagtttgacgggttcggcttgttttggttgtttttgttatgattctcttattaaagttagtacagtttagttttgtgcttttgtactttgattgacagattaattatcgggaaaagaatggatttttaggaagtaattagtgtagtttagtttttcttttgtcagtttgaaatgagaattaattgaacaatacagggatgcttaacttgagcacttaaatctgaaggttagactattacttgtttcgcagttcaatagagaattttttggatgattggatgatggaattgatgtttttatgtttctacatatttattgatttatatctggaattcagattttggaaaaattatataaagaaag

SEQ ID NO: 55800 - DNA, 1025 bp, Populus trichocarpa
  Intron number 3 from transcript POPTR_0009s03130.1 (locus POPTR_0009s03130) derived from phytozome v7.0 (chr-ID scaf fold_9; pos 3814766 to 3815790)
aagaagattgtggggacggctggagactgcgagaggtggtctttctttcaacagtttgttcagtgttgttacaagcaccagggtctctttagcataggtgctaagtttagcagaaaccatcgtggagatctttaattttgaaatatcatgtgcactaatttatatggactcataatatttacactattagctctaatggtggtgaattgcagaaaatagccatgttgctacctgtaaaaaaagttggggagggacagagagatactgaatgatgcaacaagagaatacacagtagagcaatgaatagaggagaaaggaaaacttttttttttttgaaacgaagattgaaaagggctgcacgcactcctatgtgcttggttttgaacgaggggagaattgattttaacagggctcaaaccaaccaacaataggaactctcagcacctgtgatgggtcgtgaggatggtccctcaccttttattttcttttggcaaaatcaccttaattaaaagaagagctgactctagttaagtttatctttggcatttgtaattattctcacctgtacgaactcttccatttcctgcctttctgctctactctctgtacaccccaactaggaaagtgtcaaccctacagctactccctcccctacctctgaaaatccttctcttcctttaacctctgttggcagatacaatgtcaggcgtttcatgtgcaccttgtttaaagacccggacccagttctctagaagcactttatctctgaacctttgcacctttctcccttgggcacacctaagccaccctcctttaactgcactgggttcatgcacttggcattacaaattatatttgatgctagctgtgagcctttgcaccttgttcccttgggcacacctaagcctccctctttcaactgcactgggtttatgtacttggcattaacaaattatatttgatatttttttttcccctaatgattgtgctggacttttcttgatagattggtggccgaaatcaat

SEQ ID NO: 55801 - DNA, 652 bp, Populus trichocarpa
  Intron number 1 from transcript POPTR_0011s09635.1 (locus POPTR_0011s09635) derived from phytozome v7.0 (chr-ID scaf fold_11; pos 12015865 to 12016516)
ctgacgacaatagtgatgatgacagtgatgatgacgatgcatttattataaggaggcattttgatatgaaaaaattaattatatgcacagctggagctataaacatgtattatattaattatatgtataaggaaccatgtatggtttcgtataacacagggatgcattggttgacggaggttttaagaggttattagaaacgaagtgttaacatgttcaggatggacgcaaccactttgttgagtccgtgcactgaattagaaacgcacaatggcttaaaaccgtcaagaagaatgagtgttattgaaaaggtggcaatatttttatttacaaaagcagttggggcgtcaaatagacaagtgcaggaaatatttcagcattcaggtgaaattattagtagatgttttaaagaagtgcttaaatcattacgtttgtttgttgtggaagtcataaaaccagtagatccacaatttacgagcacaccaagagaaattgctatgaatccaagatttatgccacatttcaaggtaagatgaatttttttttttaaataagtagtttaattaaggtgttcaaatgagtatgaaatatgttataaatgtttatgattacttaatgtttttgtggttgtagaattgtgtcggtgcaattg

SEQ ID NO: 55802 - DNA, 598 bp, Populus trichocarpa
  Intron number 2 from transcript POPTR_0004s18860.1 (locus POPTR_0004s18860) derived from phytozome v7.0 (chr-ID scaf fold_4; pos 18600516 to 18601113)
atcgcctgcctgaatattcaagccccctgcccaaggtactttctatatattaattaatgttacctttgttttttcttattaactcttgatattaaaggaagttcttgcgttaatttcttacttttggtgggagatgattaagtcaatgcaaattatttacacatatcatcacttcataatttaaaagaaaaggcaaaaggaaattagaactagttttaaaaaaacaccccttaacataattgttaggctaattctgatatcctaggcatgcatgttgtcaagaaacttcacagaattgttgtcattttagagaaacaacatctcatcactatagttaaaaccattcaattccattttattataaagtacttgctgtttttgaattttcctgggaacctctttttttttctccctgttgacaaagaaaggtgttaattagtgttagaagaatgaacaccttttttattttaaaaaaatctgatataatgatcttaattacaagtaatttgtcactttattcgaaagtgcctgtacctgtcttaattttctgatattgaatgcaggacatagtattgtgcaagatatataggaaggcaac

SEQ ID NO: 55803 - DNA, 834 bp, Populus trichocarpa
  Intron number 1 from transcript POPTR_0012s14970.1 (locus POPTR_0012s14970) derived from phytozome v7.0 (chr-ID scaf fold_12; pos 14658282 to 14659115 reverse strand)
atacccaactccaaactcctcttttatactttcatgtaagtcgtatccttccttcctctctttccttatgcaatgccactgctaatgctgttcatgctgccttgttattttctgtatttattaacttcaattctggtggttctttctcctcttgctggataatattgctttttcatggaatttcttgttctgagaaatgggtttcaatggaattgctaagtatcaacgttcacttgagagagtatgtctaaattgttttgtgttcttgttagtttaaacattttagtattttgttggctctcatatatattgaacgagcaatcatccttatctaaagagtcttactgtgacttcagaagttataagatgatggaccagttttagctgtcagagtgctatgcttatcgttgttgaactctaaccagtcttcaacagttgtggccttgtttatcttgcaaattttgatttttgtagtttaatcagatagtttagactaatatttgattctgtaatgaaaatacaacctctactcacagcagttaagaattattgcggaagaaagggagaagatatttggtttagaaagggaaagttgacaacttttcttcttctttttaaactaggttttctggtttgcatttcatgtgtttgctattgtgattaatagtagttttagtgtctctcgttgtccaattattttgcaatccaaagcatcctttgtatggattttatttcgttgcttcctctgtgtaatggctttaaattaagaggtgtgtatgtttgttgctggcaattgtgtgtttacttgattagtgtttgcaggttgcttgttag

SEQ ID NO: 55804 - DNA, 970 bp, Populus trichocarpa
  Intron number 3 from transcript POPTR_0009s06410.1 (locus POPTR_0009s06410) derived from phytozome v7.0 (chr-ID scaf fold_9; pos 6197295 to 6198264 reverse strand)
cttttgtaagttacatttttttcctttcctttttgggtcacggtcacagttcattactctagaaaagtagaagttacaattcttaaaataaataaaagctatacaatcatatcatacaggggttagaattcttaaaataactaaaagatgtgttatgttgtcagtggacatcttctgtattgatagttgtttcagtacattgtcaaaatattttttaaaatgaattgaattgttatgttgtcagacctttatctccgagatattacagaaggccaacaacaatgtattaggtatctggacttagaggttccaacactttgagcttattattgtgatgcacggttattacagtcttggtccagctaaccatatagcttttgaggtggaaaattctgcaaatggttcagtaacttggctgttcaacaagcaaaacaaccatgttagttattttggcttttactggactagttgttaaagcaataatatattagcaggtgttattaatcttagaggagctaggccttttatatgcatgattgtacttgtctctaatcttgcattgctgtaatgtattatttgttgcccaaggttgcagtgcagccgttggtgttatgtgtggtgtttgatattttattctttatggatcttccatgtattggcctaaacttttgggttgagtgccctaaaaaggaatttaatatgcatgcacattttatttcataaatgtcttacagaaaatcttcactgtgtatacctaaaaatctgaataactgcatgtgggcaatgacacttcttaacatggactgaagtacccagcaatcggttggaaatgagaatgcatacatgtgtgtgtctgcaattgtacgcattttgtttctgagatcacttactaaataatggtgattctcatatgcggtctgtaacctaataatctgagtaactgcaactgcatgacagtgcactacagggc

SEQ ID NO: 55805 - DNA, 856 bp, Populus trichocarpa
  Intron number 1 from transcript POPTR_0014s05210.1 (locus POPTR_0014s05210) derived from phytozome v7.0 (chr-ID scaf fold_14; pos 3963173 to 3964028)
gtccctttgtttatctcgggcaggtaattcctggttcctatgattctagttcttgtaagaatttagtcaacaccagatattgtttttatagctgttttcataccctggtataactgttagagagagtgagagactgatgcagttatattgttgttacaatttttgtggttcttatgtcacattttgtttgattgtttctttctttctttccttttttggtttctaggagacctaaaggtcttgtgatcccaaaccccaccatcccatacccaagagccttacacaactcgaacacaggacatgctcaatgagctatctgggtaccgtcaagccacaacttgtggtggtgtttgattgtatcttaatgtgaaatcatcataaattttgtttgtgatcaaacatagttgaagatgaggatttgctaaaaagaccacttgcatttgttcgtatgtataagcactgaaatgaagatggagttcaattgcttgcttgagctatcagaagagattctaacaaactcggcaaatttaaactgctgtcactgatgttttgaatatgcagcgactagcatcttggtggtagacacggtgcttttatcaacatatttaagctgtttcctgtgttattattgtgcactcaattgacttctctttctagctcaaactcacaataacacttgtgttcacacaaatgatctttgtaggtttatggtagcggttgatagtcgataactaactgctgaaagtcataaactatttcttgtattacttctgctataactaactgctgaaagtcataaactatttcttgtattacttctgcttagcgtattcattatataactcatactttgcag

SEQ ID NO: 55806 - DNA, 477 bp, Populus trichocarpa
  Intron number 1 from transcript POPTR_0004s13690.1 (locus POPTR_0004s13690) derived from phytozome v7.0 (chr-ID scaf fold_4; pos 14108754 to 14109230 reverse strand)
agaactaatctcaatctcgcttcttcgcagccgtaagccgatgccccccccccccccctctctccacactctcgctttcatataccttgcttcgtttttatattgttcatagagtactgttcttatagagaccatagatccttgtatcgatttattaacagattagagtatttagttatcttagtttgagaggctttatgtcgttttggcactcaaattcatgaaaacctttttgtctgcttttactgtcatattagtttgaagtgtgaactttgaatcttgttgaaggacattttgaagagattacgatgttatttctgtaaaatttatagaatgtagaatgttgggtcattaacagcctgggttttaagagttgaacatttaaactttgtttagtatttggaagatttctaactaaagttattgttttttttttctttagtcatcaaggagaaagactagagagccaaaggaaga

SEQ ID NO: 55807 - DNA, 577 bp, Populus trichocarpa
  Intron number 4 from transcript POPTR_0001s22050.1 (locus POPTR_0001s22050) derived from phytozome v7.0 (chr-ID scaf fold_1; pos 20644473 to 20645049)
atcagacactgttgttgctgtacataccgaacaaggtacttctgttgattgaaatcgttcgaattctaagcttagtttttcaagattctaaggtaattaagtgcccatttcttggatcttgtaactgcaacaccaaatgatcctgactggttggttgcacagcgagacaaagagataaaaatcattgcctcttggatcgccgagtacaatgctaaactggccactagaactggcaacagcattggctaacagtctaaattttgatttttcttcaagggaccaatatatagatgaaccaacacattggaactgtaataatacaaataacagaatcaaaattcacagttacttcaaactccatgagttctactgggacgttcctaaactcagttggcgcaaaacagtagcctaaaactagatgcttttcttctgttgttgaaagtggaaactatattacacgttcctaaactctgggacgttttgtctaagacttaattacacgttgcgtttcagtgtttgctttgtttttctttaattctgtttagttgacacgtgtggccaagacacattagctgag

SEQ ID NO: 55808 - DNA, 644 bp, Populus trichocarpa
  Intron number 1 from transcript POPTR_0004s23390.1 (locus POPTR_0004s23390) derived from phytozome v7.0 (chr-ID scaf fold_4; pos 22134750 to 22135393 reverse strand)
cccctacaagtctattttcccttcgatttcaagaggtaaaaagctgtcccacttgttaacttttgatttattctaacatggattcgccttttcctttcctttccttctttttacagttttcttctctgctgctgcatagcatctgcttttgtgttaatggggtttattagcttcttcttttaataccagtaattaacgttttagttcagttccttacatttttgctatttatttcttcatatcagattctgggttgctctggtatgccatttttgtccatgtgctgtttttgttttgaattggtttgctctagctatttacttcagggctgcccttgattgcggttgtttctgggaaaatcaaaacgtggtactttttagcatagcatctgttctcttccatgtcttgacttaacaactttaggatgtaaatgctatcaaattgtccagctcgcgaaagatgtaacaagcaatggtgtcactgtacttgtttatatcaatctcttttgggaaatgaagtacgaaaaacaattcttaggtttttggtaacccaaaatctaattggggaataccaccccctcgttttatttatttttctgccaagcatctaaacatatgctcatctttttttgcagttttacgtca

SEQ ID NO: 55809 - DNA, 760 bp, Populus trichocarpa
  Intron number 1 from transcript POPTR_0011s04740.1 (locus POPTR_0011s04740) derived from phytozome v7.0 (chr-ID scaf fold_11; pos 4715969 to 4716728 reverse strand)
caaaggagaacgccgatcctcaacaggttcgtagtttagttctagggttttcttgtggtggtaatgctattgtcactatctatttgtttgaatcattgaagaatttgaggtagtgtagttgattttgtggtgtgagttggttattattgttgtatgaattttccgaattaaggttttatactccattctagaaatgagacgttagggttttgcttttggtagtttaggtgatttgaagctagggttttatattctatttagtctatgttggcatgatttcccgctaatgctgctctctttgattagcttttttgagaatggggaaaaattacttgtaattattgggaatttatggtactgattgtggtggtttgggtaaataaaatcaagaataaaaatttgaaaatgattttgatgttatcttaaaaacagtaaatgctgatttaagcaaatgggagaaaacttggagtttatgactgtctccgtttcattcttttctgtagcctgttgtccttagaaatgtaatcaagttgccactctgagtttcgcttcactgtttgtttggcagttctttgtataattagacagagtttttatgaatcaatgccatcgttgctattgcttggttaatttggagcacaggttaatttgaaattgtagtaaaaccgtgtgtttatatgttgatctcactgtaaaaatgcaagttctaatgtgtagattttaacttagcaacttcttatttggtccaaacttgtaggtt

SEQ ID NO: 55810 - DNA, 528 bp, Populus trichocarpa
  Intron number 4 from transcript POPTR_0015s00300.1 (locus POPTR_0015s00300) derived from phytozome v7.0 (chr-ID scaf fold_15; pos 144749 to 145276)
cattggtgctttctgagaaagtccagcgttccaaggtaggtttctgatttgtcttgtttatcacttcttgttcatctgctttaattatagatatcatttaacttcctaacttcaaagtgctatcttggatatattattaatagacatagtttttatgtattgttaggtcttctctctcaataacttgtagaaattcaaataattaaggtttaaagtcctgggatgagagaagtccagttctgggaagaagcaaactacgcactgccggctgcttatttttgtattgcttagttatttggtctcttggtgagtccttagacattgttttctggaccatgtaccaccctgcttaataatgggcttgcttctagtttggtggttctgtgatttcaccacaaaatatataaatctatgtatataaagaaatgagtacataaatttattcatgcatgcacaagcacattagtgattaattaaaagttttttggtacaggcacttgttgagtgtgaaggtgaatccattgatct

SEQ ID NO: 55811 - DNA, 907 bp, Populus trichocarpa
  Intron number 1 from transcript POPTR_0012s15130.1 (locus POPTR_0012s15130) derived from phytozome v7.0 (chr-ID scaf fold_12; pos 14754198 to 14755104 reverse strand)
tcttggagcagttaaccacgatcgttgctcaacaggtatttttctgccatctgcaataacctgatttacctagcagagataagaaatgtaaaggtcaagccttttttcttcctatcataaaaaagaatacttttaacttgaaaaaataaaaataatattttaaatcctcaaatatatattgggattttattaaagaatcttctttttcttgttctattatttttcacaattccaaaataacctaaaagaaaatatgtcattgctaatataagaaaaccgaaaaaggcaaaacaagagtacttgccaattctctttaaactgaactattaagggtaaaataatcaataaaaagttcaaaggactagcgagtgagtatttggtgcgaattaaaactatatagttaacacacaatcttattatcatggctttatttctaaatggacttcacaaatatatacatgcagatccttttattcacttgcctttatacatccatatatctatagtttaatgtaaaatgaaaaccagattttatgtcggttcaaaggagaaatccttctctcgtgagaacattgaactctttccatacctacaggtttaacgttgtaccatttaagattcattttataccttcctgtaaagtagcagggtgcagacagatatcatcataatgaagataaaaagaaaaaagagatattattatttttaataaatattttataaacaaattattaatattgtcaatccatttcacaataaaatatattaataaaaaaaaattaatctatccgttgccaaaaattaagaaattgtattgaaattatagaaatgtttcctctgcttcaaatttcttatcttttatacactaataggtacaagaagaggtgaacctaggagggggtgtgaa

SEQ ID NO: 55812 - DNA, 980 bp, Populus trichocarpa
  Intron number 1 from transcript POPTR_0004s17160.2 (locus POPTR_0004s17160) derived from phytozome v7.0 (chr-ID scaf fold_4; pos 17495911 to 17496890 reverse strand)
agcaaaactgaagagaacactgaaaagaaggtactaactttttttgtgatcttcttttccaattttgacaaccatccatctctcgaatcaatgaaataatgatgcccggatgctcagaatcgtttcttgatgcagttttttagtaacccaattgaaagattttgttttctgatttgcttaattagggtttagcctttcgtcatgatcgaatgtgatttttttttttttttgattttgatttggatagttatagttactgtaattagtaaaataattgagcccagaaaggtaaaacttgtttttatgaaagctctatattgaaactccataaaaaaaataaagctctgttttttaatgattggttttttagtgtggccaggatttgttagtgtaaattttattgcagttgttgcgaaaaaaaaagctcaaaattgtttgttttgtagttttttaaccaaattgaaaagaacactgttttgtgactgatgcttaatttagtgttaatggggtttgtgtagtgattgaatgtgaattctttgtttcccgttacttaatttcctagaaaggtaaaatttgttttcttagaaagcaggtttttggaactctgtaaaaagctctgttttccatgactggttgagtgttgataggagatgttagtgtcaaattttattgcatatgtgaaatgacaggttgcttattcttaaattaatgatcttacttagaaaccaaaggctgtttttttatcccagccttgaactttgttgttttaacttttatctcaattgggtgttgtgtatggtcgtgaattttgggtggtttatgctaatggtatttggtttcgagtgcatgcttgatgtgttgtttatcattatacttgtaatgataaactaggaatcatgaggcattgctttgttagttctgttactttctttgtgttattgtatatggtctggcacagattttgaataagaagctcaaag

SEQ ID NO: 55813 - DNA, 617 bp, Populus trichocarpa
  Intron number 2 from transcript POPTR_0004s11540.1 (locus POPTR_0004s11540) derived from phytozome v7.0 (chr-ID scaf fold_4; pos 10306027 to 10306643 reverse strand)
agctattaggtagtctaaactcatataattagagggaaaataatagaactttgatcacttcactaaagtacttgaaggatgttgttttgcctttttctttctcgttttgcagctaatattcctataaatggtagaattttcaagtgcacttaagtatcttgtttgactcctgcaaaacactgagaatgcacataatatacttgattgatgataggtgatgctagacaagtgtaagtcctctagaagggatgtcttctaggctcatgtatagaagacatggtggatgattgatggctgaaactccaatttcaagaatttgtttcttgatttatttgttatccagaattctgtataatgttctcatttgtctttctaattcatatgatgaggaatacaagtcactcaatattttctttttgataattgaaatttcattagctaaaggcacaaagtaggagatcaccctactacaaaagcatacaaacaggaaataatccataaaacatcagatacaaataattgttaaaagatactccatgattgtgtgttagtggaatttttctttaattcacttcaaactcatcttcagatcctatttccacacttgcaggaatcta

SEQ ID NO: 55814 - DNA, 986 bp, Populus trichocarpa
  Intron number 1 from transcript POPTR_0004s11540.1 (locus POPTR_0004s11540) derived from phytozome v7.0 (chr-ID scaf fold_4; pos 10306652 to 10307637 reverse strand)
gtcgaggtaattctttatttatttatttattttactctggtaataaaatggcattgtatcttcagctatcaaattgtttttcacccttcttatgacagtgggttgttttagttttctatgtaagatgtttatcatgcttgttactccagttgttttggatttatggctggccttggttattgtctcagttttttttccatgtttcgtgggatttatgtgaatcttaatctggaacaatcatttcttggctataaatagctgtttcttcttgttggaattggaaaagtctgaaactgttttggctttgctggcagtcagagctaagttttcaggcctaatggtgctgtattaatgtttaccgatgcatctagttcctggtctcatatattggttcatgttagaaaacattaccatcgctcacaaccgagagtgtcttctatttttctttttatttctttatgggattagcaatatgaaaatccatttgccttttcgattggacttttctgttaaaacaattgaacaatcttcattggagtgtgttttttttttttttttgccttcgttttgttagaacaacgtcccctgtcgtcgaatagttgaatatgaagttttgacattattggagagccattatcctttgttacacaaaacaaatccattttaccttttcacttttcactatctacgtgtcttaccctttgcttgttataatgtgagtctgcatttatctaattcttgtcttcctttatccctctctttaatacagaattctagtgcattcaaagtaaaagaattggttattgttgtattaatgtggattatgtttgataaaggaaggtaaattgattaacttgatgacagtacctggtagtggcattgctgattttgtggaagtttcaagataacctgataaacaatgtttgataattagtttgtgttgctttgtagggtaggagacagttggagtggcgcttgccttaatc

SEQ ID NO: 55815 - DNA, 598 bp, Populus trichocarpa
  Intron number 2 from transcript POPTR_0011s02780.1 (locus POPTR_0011s02780) derived from phytozome v7.0 (chr-ID scaf fold_11; pos 2713099 to 2713696 reverse strand)
ctagagtataagaaaacttcatccctttccaaactgtgagtttaatcaattattccattgatttttttttattgtattccgtgtttcagatgatgaaatatggatttgttttttttttccatgtaattatatttttgatctatgaactgacactagcattgaggacactttaatgaagaaaagtgtttgtcgattttgaggacatcatccaaatgctttcttggtgtttatattgaagattttaacctgtgcaagatgattgttcagtgtggattgcctggctccttggataactaattagttggttaagattgctcccttatgatcgtataactgatgatttgctagagtagattggtaactgtcatttaattgaagtttgctgatactaaagtcctccttgttacgttttttttttttttggttccagtcaagagaatctaaactagcaatgtgtgattggatgttgattgaactacttagcttctacttgtggcacgcaatggacaatgtttttttcaaatattttcttatgctaatcaactgaattatctgatatacagtcattcagacaataatctgcttgacttggaaaagg

SEQ ID NO: 55816 - DNA, 691 bp, Populus trichocarpa
  Intron number 1 from transcript POPTR_0014s01280.1 (locus POPTR_0014s01280) derived from phytozome v7.0 (chr-ID scaf fold_14; pos 1250494 to 1251184 reverse strand)
caagtaattatatatattttttttgtttcatatgattgtatagtgattaatttacttacaattaatttatttattttaatgcttagcttgttctatgcattgtgactgttgcatctctttaaggacaaagggtaggaataattacattaaaagaaggaaagtcttagttcttcagtccattcattgtagatttagtttttcaactcctgcctgtctttcagagctgcgagagttcgtgtctgaagagcatctcggttcgagttcgagtgcagcataacatttttttaattatctatttttaagataaataaatcttaatttccttatcaaggttattattagctagattgattagcttttagggaaagcttttgagttttatactacaatgattcattttggctagctccaaataagactagatccatcctcacatttggatatatttctgtaacagtgaagaaattgaagagtgctcctgtttaagataaaaaaagatagcaactagaaagatcacattaaacagatatttgtgtgatacttttttgtttggttaatcgatatccattatggaagttattgcttgattgtaaattttcatagagaaactgagctcaaaagcatacaattgtttgctgctgatttttctgtaacagtaaaaatattgccggttgttaagagacagcatctg

SEQ ID NO: 55817 - DNA, 974 bp, Populus trichocarpa
  Intron number 4 from transcript POPTR_0004s00800.1 (locus POPTR_0004s00800) derived from phytozome v7.0 (chr-ID scaf fold_4; pos 364279 to 365252 reverse strand)
ggtcttagtccaagtgaataccagtggtgaagaatgtgagtgaattaaatatgtaggtttattgctgatggccttaattaatattgctgacttgggataactaagtaattttatttgacattagttccaaggcagcaccattacatgtcttaattagttctgttctatattttgtgtttagataacatgatattgactaacgtatgcttgctcctcttggaggtttgagtaatgtgttcataattcaatggcttttctttagcttctataagtgcataattttaccttaattttgtcttcattgtggactcgtgaaaaaagtcgtagtttcattttgtttggtttagagcatggcttctatatgaaatgacctaggattttgcatttaaaagaaaagttcataactttgttccgatgtcgagaaagtagccaggagttatttgcacttggtgtttaaaccttaacattgtaggttgagtggcatttaggttctgatgctgctttctgttctacttttgagtggctttcaggttctgatgctgcttctcatgctactgcctctgagctatgcatctattattatttaggagtctcttttaaaacaggttgtctagtatatgaaaatttttcaccttaaatatcctctgtagcttttttagcatgcagccggatacctcctctggaatctggttctgctaaaaaactgttacctgctgaacagtctccttgtcgttccagtcatggttgggagccagtttgttcttggggcaatttttgattgtatgatttacaacaatttgctcttatttggcttgaatttctttcaactgccatttcctgttttgttgtagaattctactagtttaaggatctcgtaagagcagttgataatgatctactatttttggctgttgttttatatatgttgtattgttgcagcaaaatctggtgttgagccctcaggttgtgtggaa

SEQ ID NO: 55818 - DNA, 765 bp, Populus trichocarpa
  Intron number 1 from transcript POPTR_0009s15440.1 (locus POPTR_0009s15440) derived from phytozome v7.0 (chr-ID scaf fold_9; pos 11945025 to 11945789 reverse strand)
tcgattcccggcccaattttcaaaacatttcagcggtcctgaatgtgtgtggctgtgaaggaaagaagataaaatgtgaatccctattggattcctctttagcccgcacaaggatttgacgaggcattttggttgctttgataagatttcccatgaaaggataggtctattttcgtatattatgcaataagaattgatattaagttgatcttactttagtaagatattattaggatatgatttatattaatttgaaaattttcgagcctgggctttatttttattaatttaatattctaatatcaaaagcttataagatttttattattttttaagacgtactaatctatatatatgaagccaaaattatgctattatctgaatcatgcgctgttccattcatatttctctcaaagacaatcgagatattcagtttctttgattaacacaccatgtattgcaccattaattccttctccaacaacatccacacgcacccaaaacccatacaaaaaactagttagcttacttttcctggcatcccccagttaggtgctcgactgccttctcgtagacaagaaacttgggtgcctgtactaatttcttcgcaagaaaaaactacaatccagggatatcatgcagacaccggatcatcgcttggaaagatagcattatcaaattcactattaattctgtcctctcacatttcaagattccaaaattgcctgagaaccaccatatccaaattcattgaccaccggcctc

SEQ ID NO: 55819 - DNA, 410 bp, Populus trichocarpa
  Intron number 3 from transcript POPTR_0009s01900.4 (locus POPTR_0009s01900) derived from phytozome v7.0 (chr-ID scaf fold_9; pos 2373084 to 2373493)
gcttcaaccagcatcagaagggagctctctattaggtactaaaacaaaccatcacatgtactgtatgattcctattttttaatctgggttctttttattagtttgattgcttatatgatcagaaatgatgagttgaggcatttatgctggtttttaatgttattgttaatcgaatatgattagtgctacaagatatatatgcacagaaaatataaagaccagatttttatgtattcgggatgttagtaaagataaccctaaactttaattgagcgaaaatttaatgtttttcttcgccttctttttcggaatcttaggttcttcatgtcggatatgaattttcatctctgatgcttgctgtttatttgaatgcagtcccaagacaaaagtactgtgaatccattaacaag

SEQ ID NO: 55820 - DNA, 900 bp, Populus trichocarpa
  Intron number 1 from transcript POPTR_0009s01050.2 (locus POPTR_0009s01050) derived from phytozome v7.0 (chr-ID scaf fold_9; pos 1178553 to 1179452 reverse strand)
tgaaggcgtcgtcattttgacccaggaagccggtctgtcactcttgcctctctctctcttctttttaatgttttgttttgaatgttgttgttggttgaggttgacttcttgattctttgttgggtgataagaaattagagaaaagagtaaatgggtatgcttggtttttgtttttgggaaatgggtttcttttttttttaccgagaaagaattttttgattaattgaagttgtttcttgatggttgtgctaaccgcattatcatttttccttgttaagtttatatttgatgatgctttttttttttgttgtctaattcagattatagttgaagttgttgattctgaaattagtcagcaagcagggacaatgaggctggagcttggaactagatatgcaatgttaaaaattctttgttccagatatgttgtcatttgatttctgctttttaaaacataaaatttgaaaaaagttatttcaaaaattatacatgacaaagttatttcaattaccctctatttttttttttttcacagactgtctggttgatggtttaatttttttaacctgttttgaggtttggtttttattctttgatgtttaattttgaaaagtagttaaaaatgttgtttccgaaaggagttatactgtcttgtcgaagtttttgaatttcaaatctggaaataggagatgcctgcaatcctgagacttgaattagctaattgacagggtttttgttctttccatcactgaaaagcttgaatattcaactatccctagtcagataaccactgtggtttaagttgagtggaggttaatgtggagagtcataataattggagccctgattgtgatttacatattatttgcattttgctttcgataggtcctacaactgtga

SEQ ID NO: 55821 - DNA, 781 bp, Populus trichocarpa
  Intron number 1 from transcript POPTR_0011s04430.1 (locus POPTR_0011s04430) derived from phytozome v7.0 (chr-ID scaf fold_11; pos 4413226 to 4414006)
aggagggtcatataataacttgtcggattgcacaggtaatatatcgtatcctttcttctaggaagtaggtccgaaggtcttaggtgtgaaatgtgtttaaaattctatcaaaaatcaaggaagataaatcatcattagaggcgaatatttatcatcatgagataacaaccaataaattgaatttgttactataattcttacaagttctctaccctttcccgtgtgttaattcaaaccattttctggatatcaacagtctgtttatttgtgattttggtcctcttccaccttgaacacagaacaatggatccaatgaaggcctgtgagccggaattatagggacttaaccagttagattggctggcatctgggagctgtgcatcatacgcctaaatgctagcttgctcaagcaacaaacccgtgaaatcatgattgcagtcctgaaatttgcttcccccatttactagttaattcttagttttaaattgtgtttgttagtgacctaaatatggcctttcttgcctgaaataaaaccgtaaggtatttacaaatgtctttcagctcacacaatacccgtttaagaaaggtacatcaaagtatgaaaaatcaaaaaattgttacatgatggataagcgagcttactttgccttaaagaaatggtcaggagatgcgtttttattttgcaacaagactatgagtcctcttgtttactcacagctgaactttcatgactaaaagtcacctttcaattagcagaatcttttagggcctgaggcagcac

SEQ ID NO: 55822 - DNA, 497 bp, Populus trichocarpa
  Intron number 3 from transcript POPTR_0004s05750.1 (locus POPTR_0004s05750) derived from phytozome v7.0 (chr-ID scaf fold_4; pos 4504124 to 4504620)
accatttggttagtctcgtttttcttttcttcttttacagttctgaatatagtagaaaatctttcactttacagttaagtccatcgtgagaacccagaaggatcaagaggtccctttcgtcaactttgttgtgacccacccactcatttaattggcttcactatttacaaggctgtgctgtatctaaattctccgaatccaagtcaaatcaaataaaaccggtgacttcaattctgtatccaaaatgtaaaaataaaaataataataagtgatataaatgcaaatgtgatagtactagtaattatagagcgaatgaatggaatccatgaagtgtttgtgtgtgtttacaatagtttggaggggcaaaaattgtacaaagtgttggattgactattgagttattccaaatactccttgttttgatgatttgtcatgttataatcagatcaaaaactaatggaagtgtattttgtatttgtcagagatttcttagcaca

SEQ ID NO: 55823 - DNA, 583 bp, Populus trichocarpa
  Intron number 1 from transcript POPTR_0011s04150.1 (locus POPTR_0011s04150) derived from phytozome v7.0 (chr-ID scaf fold_11; pos 4199593 to 4200175)
taaactcgatccagcttctaagctttactttccttgtaagtctctctctctctcttaatttttagaacgaacttaaattgctaattttgaagaaaaattgagataattaagtttctccttcgttgtccttattaacaaggatgaatttggttaaaactcaaagtcaccgcacgtaattgactttaatttcttcaaataaaaaaaaagtaaaaaaaataataatttcccagatgctttcttttctttacttaaataaaattgaaatattaagaagagaaagctcgaaagttacgatcttcactagcttgttacttcaaaattcatgcagtcaaatgatcaatgtaatttaatgatgattaattaggatgttgtattttaaagaaattccttataatcaatgccctgactcattgaatcacatagagaatcagtaattttcaattggggatcattgttatatttacaactgcattcgttttgggaactatttgcttttgtttgtttccaattgtgttcctgattttctgatgctgttactctgattaatgttttaattatgtttgttttgcgtgctcttttttag

SEQ ID NO: 55824 - DNA, 314 bp, Populus trichocarpa
  Intron number 1 from transcript POPTR_0004s17060.1 (locus POPTR_0004s17060) derived from phytozome v7.0 (chr-ID scaf fold_4; pos 17412934 to 17413247)
taacttcttcgataacataaatcagtaagttcaaaaatttattctttgatctgtgtctccctttaacgtcatcattcattctaatttctatgaggtttcgtatgctgtatgttcctgatcttgacattcatctctggcttaaaaaccctatttttatagtaagattttttcaaatttgaacttgtccatagaaaagtttgttactttacttaaattaagttacttttttttgcttagattaataatgggttgtgttagattttgagttattcttttcagctgctaaagccattgaggtttgtttgctcgaatca

SEQ ID NO: 55825 - DNA, 723 bp, Populus trichocarpa
  Intron number 2 from transcript POPTR_0009s12580.1 (locus POPTR_0009s12580) derived from phytozome v7.0 (chr-ID scaf fold_9; pos 10238670 to 10239392 reverse strand)
ggggacctttgaaggctttagtggctgccagtgccgtaaatgggcatctgtcatgtagtcctgtgtagtatgttaggctacggtattgcaggtgcagctagcatggtcaatatttgaatattacactagctagttaagatttgcattgttttattagagatttctacctgaattaatgatagcggtgagtccaaaaagctttgaatattcaacctccaatggaagagttttcagccctagtgccaccactaggttgtatattgtagctgaattgactaaatctaattagtttaaatttatattcaagtgatattactttttttaaaaattctatttggattttctatgttggaggtttgcatatattaaagctagctggttcagattttactgtaataagttaagtttatcatagttctctttgaagttttttattaaactttcttcatctcttagatggattccagggtaaagctaacatattatcccgcaatttagataggtgtggcttatctttaagagttttcaatattttgagggactatctttcttcttctcaactcaaactgcatcgattaaccattcttttatgtaattaaattggtactgcactcgcatttgattataataagaaggaatctgagatgttttcatgtcttacgtagccttttacagtctcatgacatattgacaatgtaactttcactttaggtcataatccaa

SEQ ID NO: 55826 - DNA, 961 bp, Populus trichocarpa
  Intron number 1 from transcript POPTR_0015s03850.1 (locus POPTR_0015s03850) derived from phytozome v7.0 (chr-ID scaf fold_15; pos 3759944 to 3760904)
attctgtgtttcgtggcaggaagatcccaagcaaggtcagtttattttgtattcattccattagttacttaaaacatatagaattgttacttcttcttcttataatataaagaaaatgctaaggtgatattcatggctactagctagcgatagatcatattaatgttgacaaatcagtttccatagaaagttggaatattgcccttttttatatagaaattatacaacatcatttgatttagtaaggttttctataatgaaatcaaattatttcaaaattaatatattataagtaaaaattaatcatgaaatcaacagtgtaatatattactaaaaaaattcccaataagatatatcatttaaaaaaaatatatttttaatagattcacgacgacaatgagagttgttattaattgataatatataaaaatatatttttatatataactagattgtattttaaaaagttatatagaatgatcttgctacacaaaaataatattaaatgcaatgtttttatatagaaatcatacaacatcattgttattatataatgcaattgttattaattaataatatataaaataaaagccaaataatttacaagttcactccatgcattactttgattctactccttttccaactgagaagaaaattcgacctttctacgttccacgttctctcattcctttcttcatgggtttcttttgtttttgttttttttttttaatggcaaaagatgccatgataagagttgggatcaaccataaagcaatgaatactgagtgcccacctgattttattcaatagcaggctttgcagtttagccttcaattgataaagacccaagaaatgtcaaaaagcccttctttgcaatcaatgatcgatctccaatacacctcaactaataaggatttatttttcatgaacgcaggaggtacagtggggaaagttttca

SEQ ID NO: 55827 - DNA, 771 bp, Populus trichocarpa
  Intron number 1 from transcript POPTR_0015s08170.1 (locus POPTR_0015s08170) derived from phytozome v7.0 (chr-ID scaf fold_15; pos 9430326 to 9431096)
gaatatcgtcattgcactaagatttataaaaaatagttagaccgcagccgtaatttggcatatcaagacagtggttgcctcaataaagtgaaaactgtactgtaaatatctggatgtatccatatttatggtcttttgggccattaaactatcaagctcacaaactttggcaggaaggtgtcaaacagctagaaatcaaattttgttataaaatctataattatatatattgaatgtacattagaatttcttaaaatttcattattcttgagtttagtctattaatttttcatgacacttagattttttagtatcctttaatgtttttattttttcttttataaatagactacttgtcttgtattttaaggattgaaaaaatatataaaaaattatatgaatctctttttagttttattttgaatatgcatgtttttatttgttatttatttttttaacacgttattagtttgtattgaaatcttggcatgcatgaattcctatattacgtggcttgtatcaatttcatttccccccattattgtacatattttatggaatatatttggttcgataacttattttgacaatttttctttcatttttattcatcaagatttaaagttcctgaagaattagtattgtaagttcatgaagaattaaataaatcaatacagttcttgaagaactaatatttctaaagaactaaataaatagcatgactttattgaataagttgttcctttttttggatattgtcaaatctaacaa

SEQ ID NO: 55828 - DNA, 753 bp, Populus trichocarpa
  Intron number 1 from transcript POPTR_0012s14770.1 (locus POPTR_0012s14770) derived from phytozome v7.0 (chr-ID scaf fold_12; pos 14524470 to 14525222 reverse strand)
agtcgtccaggtaaagaagagaaaaaacaaaaatgaccataatgctatagcattaaatttaacaaattcctttaataaatgatttaatttgtatctatctaaatcattaatggatttaagggggtcagctaatgatttcttggagcaaaaatgagttctttgatgatataacttttacgatcgatgagatgaataatattttctatgaaaatgttgacttttatgctgttttatcatgtttttatcatatgttttgaccgccttttgcttctttttttaacccttaaagtgctctttccagtgctgataacgatttgtcttaattgataagttttcttgttagctcccttagcctcagcaaggtccaacatttggccatccttgactctcaatcttctacctccaagttactataggtccatacatatatatcactataaagcagcttcatgatgatcatctctgccttgccacaagtgtaatatgacttatgtttaattctgtcttgttattaatttctacataatttagggcttagcaagccccaaatggtaattgtagagtagattccttaattgtgtatctgttggttctaaaagctttttttgcaaggaattctaagaaagttgttacctttgcgcgcatatgaatatagtcttgttctgtttgatgaaaacatattttactgagctaataaaaactatcatcattttatatttgacacatgcagcataccacacatcatcagaaggt

SEQ ID NO: 55829 - DNA, 960 bp, Populus trichocarpa
  Intron number 3 from transcript POPTR_0009s08020.1 (locus POPTR_0009s08020) derived from phytozome v7.0 (chr-ID scaf fold_9; pos 7432369 to 7433328 reverse strand)
tcagcaaaaggtatgttttttttggcccatgttcaatacttttcttgttaattgctttcagtttgagattaagtagccaaggtatggatttcatttacaccactcagcactcacttgtcttagagcttctaaatctgtcaattcatggttcctgataccatccaatcaaattcacttcccccgcacagcttcataaaagatgttcgttgaatccccttagtgctaattttttgaatccacgtgctttatcataccttgcaatttttgtatgcacgaggactcaaatattggatgtttcatcaagcataaagttaaatttctgatgttatgaccccatggtatttgctctgtgttttgcatagtctcgtggtccgaacgataaaattacatgtcagattaaattttgatgaaattaacctgcatggtttgggcatggtatgcaagtagtctattttacttaagaatttctgagtatattttccgatagtatcttgttagtggaactaaatgacatctgtggtgaacttgcatgtacttccgaagcaatttcaaaggaacagagaaactttatttattaggaaaccaaagggaaaaacttaggaaaatgtggagaattgtatatgaatgcaacgagagtggtgaaatattttaggcattttgactgttcactttgtttgttgaggtggaaagggaagggagtggataggtttagactgttggcggaagaggtgctcatcttgtttggtaggatagttgtatactcaagaaaggaatggaagaattcatcccttcagttctttcaatccttccaaattggaaaatacggaagaagaggcatgaatggcatgaaagttttctgattttacctcatctgaatcctttattttttacctccttcccacatttaaacaactagaatgatggatagtttccacccgcaacctttccactttcttcttt

SEQ ID NO: 55830 - DNA, 1012 bp, Populus trichocarpa
  Intron number 1 from transcript POPTR_0014s10510.2 (locus POPTR_0014s10510) derived from phytozome v7.0 (chr-ID scaf fold_14; pos 7830377 to 7831388)
acgttgatcaggttttattcaccaatcctagcgcctattgtacaacaattttaactgatcaaaaccagaaagttacctattgcttcatgactatctttattgctttgttgtttatatccttgtttttatgttgtttatgatgtcttaataatgggtattcagtgtttggaaaggtaccccagtatgtatgttacctattgtttatgcatgtagttttcccttttaagtttcaacgtgggcatccaataccttcctatgatgtattgttgtgtaaaacctgcccctttgtaaaattgtgattaatctcttatgaaattgagagtctcttttgagattttaaagcataaactgtagtagggcaacacccagaggcactatgttttgataaaccatgagccttgtagctagcagaaaaactgagactgaaaaaagatgctcatgccttttcattacaggacgtccaatgcagttgacccatttcttttgcaatatgtttagtttgcatggtatcctttacatccaatccagttttcatagaatccactacaatcagttcagttttgtagcattctttacattcggttcagctttcatgcggtttcctgtggctatgtatttttgcctgcttatgaaggactattacagtcttcttaagcacttggttcagcttttatagcatcatttacagtatttttcgactgatctttttatctgatatgttacactccccatcttgtgcttttgttcactggccaaattgctctggagtgtgaagacttggttaaatatcaagcatattgatgcattcatgtgaaattttgaaggacatttgactttgagaagatatgctaacagtgtatttgcaagtttatctgggagatttgtttgtgaaatttttgttcctcgttttacaattgttctcaaggattactggtggttgtgaaaggaaagagtgcaatatctactttccatttactttcagttgctaatgtttgatttcagctgcaggaga

SEQ ID NO: 55831 - DNA, 673 bp, Populus trichocarpa
  Intron number 3 from transcript POPTR_0012s08380.2 (locus POPTR_0012s08380) derived from phytozome v7.0 (chr-ID scaf fold_12; pos 9469081 to 9469753 reverse strand)
agaaaggggatttagatcagtatattagactgcaggtaataatttcatgtcataatattaatgcctgctatcatacacatatgtctagcatacttccacttggcccatacacttcatgtatagtagtgtgccagttactccttagctattcaactccatactctttctctgtttgtgtactactgaaattttgtttttcgttagccaaatttaccagaaacttctgccttccttctgatgccctttgtaatacatccaattcatgcatcattttccatgaaggtaaaagttgttcccctttcttaattcttatcgagggaaatgacataataataaccccccccccctttttttttaaatcccaatcccatcttttatacaaaacatcttccctcttggattttctgcacacgtccaactgtcttgttaatgtctaaaatcttgcatcagtagtagcctaactaatgagttaggataggaaaaattcaaagaatagtcataatgcatccgatatgagaccttgagaccttttgcattctacatttacaagaatacgagtagtaataattagcttgtgacatgctttaatgctgctgctggttttcatcctttgtgcttacctcgtttgtttttaacaggaagaaaatttcataaaaggtgtgagagaattggg

SEQ ID NO: 55832 - DNA, 600 bp, Populus trichocarpa
  Intron number 2 from transcript POPTR_0012s08380.2 (locus POPTR_0012s08380) derived from phytozome v7.0 (chr-ID scaf fold_12; pos 9470040 to 9470639 reverse strand)
cactgcctcagctgcagctactcggggattgtgagtttttctgcagactaatcgcgtcttattttttttatagtgctgctttgcattaaaggtcacaaaactttgacattgttatgctaggttgtcattacatttcatggcgttgttattcgagaagagcttacttacattttccctctttattcttttgtcccactgtgcggtcatggaagattgttttgtgcttaatggattcctggttcctgatcttcctaaaataagtctgcgtgttttgatttgatgcatgcttctcagatgaagttagtcaataagttctaagtctccgttgcttatttaatgggggtacttatctaagaaattggaatagagagaggtctttgatttctttcttttttcccatgacaatattgttctatcaataaactgcaattaaactccttgagtgttgccttcttaatgtgcactttgctaattactaattacaaatttactgtgtttactcctctcttttgagagttacatggctggtctgatcacctagtgaagtttcaatctgtcatcacagatccagttgggtgctttggggtctctcacaccagc

SEQ ID NO: 55833 - DNA, 493 bp, Populus trichocarpa
  Intron number 1 from transcript POPTR_0012s08380.2 (locus POPTR_0012s08380) derived from phytozome v7.0 (chr-ID scaf fold_12; pos 9470716 to 9471208 reverse strand)
gtctctctctcagtattcagctgctttcagctcaggtgaacaatcggctcccaacttttaactagttttatgaatggattgatgattgtgttttgctcaagctctttgagtcaactttgtgtttatttttctgatccatttatatagatattgatcttcttgtgttgagaagaggctcaaaatgggttttttctttggcccccagtctgatctctattttgttcctactctgtatttgcatattgtatcaatcttattctgtttagataaaattataattctttttatagggaatttattcctcttttaaaaatgtttaatgtaatttatttgattgttctctttctccaaaagcattacattttaaagggctttgtctattattgatagcttgaaagtgcttgagattggattccatttgtgatcgcatatttattatggttaatgcacatggtgataatttcagtttttttgctcggatcaattcaggaac

SEQ ID NO: 55834 - DNA, 415 bp, Populus trichocarpa
  Intron number 1 from transcript POPTR_0004s08390.1 (locus POPTR_0004s08390) derived from phytozome v7.0 (chr-ID scaf fold_4; pos 6922652 to 6923066)
gtgttagatttcgagcttgtcaaattatctctgaggtatttttctcaatgttttagggtttttacttgttttactattgataaaattgtggattttaacaggtatcaatgaatttaaaccttaataataattttaaaaatcgaattataattctaaaatctgaaacactgcttgttagtaaatattttaatgaattaaaatttgagttttgcagtataattgagttttgtctattctcgtttataggttttgaacacggcttgtttttcgagatatgcttatgaataaaattctagtttagattttagaatctgggacccggggttttgactcttgtaggaaaactgttgcattgctttcttctttctgtttatggtatttttgctttttttgtagattatattgagactgccag

SEQ ID NO: 55835 - DNA, 692 bp, Populus trichocarpa
  Intron number 2 from transcript POPTR_0015s08020.1 (locus POPTR_0015s08020) derived from phytozome v7.0 (chr-ID scaf fold_15; pos 9301790 to 9302481 reverse strand)
gccggactagtctctttgatatcaccgccgatacggtagcaacatcgcatcacatcccatcccatcccatacatgctattgtgctttgtcatcaactgaattgttctaagcctttgtgtattgagttggtttgtttagattttttaaatcatagaaacttgatatcaatcctaatcttgaatctcttaattttttattcactgaatttttaaggctttgtgtatcaatctggtttgtgtttgatttcttaaaccagacaattttgattctaatcgagatgaataattgaatatggatttggttgattggaggtcttaatccaagtcagttgtagatatcaacagcaccgggaaaaagaagaatttaagaatgcttatgccttgacattatttgtgtaaaattttattagtttcttataaaatattttcttggttgttgagatcaacaaggaaaagcaatactgatatgaaagtgatcattttttttttccttagaactgaaactattgactttgatgttgcccaggtaattgtaccagttgttactatcagttgtttttttctgtacaatcatacattttgttctatgtcccttgttttcttctccaagcaattggtaaaaagctttgagcatcgtcttggtttttacttttatcagttgacttcattgccaaaggaagagcagcaagctca

SEQ ID NO: 55836 - DNA, 800 bp, Populus trichocarpa
  Intron number 1 from transcript POPTR_0009s11990.1 (locus POPTR_0009s11990) derived from phytozome v7.0 (chr-ID scaf fold_9; pos 9867912 to 9868711 reverse strand)
agtggaagctgcaacaacacaaacgaagaggaaaggtaatgcattgttttcttaagcatatgcactgttatattaaagaacgcctacaatgtgtcaggcactgtagatagtggatccaacatgtgttcattaccaaaatcacaccaagaaccataattctaaaacttaaagtctcaatgtcgaaatctttatgcccatttagtgaagttaataagaacaaactgcagatggcaactggcaatctccatattgactcattgagagtcctccaggatttcatggcagggtaggtccatgtgctaagagtgaaaagggaaactttagctctaaaggggtccatcagtgtgtcttcgttcccaaaagccaacctcctcaaactcctttcttcaataacttcttatcctgttcctagttaaaaatcaagcacaaataggattttgtgttaatcctttgacttttttttcatattttgtaggtgtaatcaacattaagaaattattccaatataataataattctagtttttaaaaaatcttatgttgtatataaattttataggtgtattttttgttaattctttatgttgatatttacttatttttgtgatcataaaaaaggaagaaaaaactacaagaaaaataatagttttttttttttaatgaaaaggtcacttcgaatatagagtcctatttctaagaggagaataaataaaatcaagttgaccatgtttgctttatatataggcttctgaagtatctcaacctgcagtgaagtccaagactcggacaggctacctattt

SEQ ID NO: 55837 - DNA, 567 bp, Populus trichocarpa
  Intron number 1 from transcript POPTR_0009s05150.1 (locus POPTR_0009s05150) derived from phytozome v7.0 (chr-ID scaf fold_9; pos 5310465 to 5311031)
tttcaagctctcatattcttacatttgaagccaaggtatgtattttatcatgtttgttaggatttgatgatgggttttgtttgccttggtgggtttttgacaatactaggtttgttagaaaatgtaggtaaagagtgggattcttcgagttgtgggggtgtttagtttgatatttattgaaattatgctagaaacaatttttgaattgttttctattattagaaaccaggaaggagggtgtgttagatggtgctgttgtttttgtttggattttaactaatttctctctgttttttttttccgcttcttgaaatttttctttcatgattgatactgtttttatttgatggctcaaaaatttcagaaatgttttttaatggatgttttgtttataatttggtggaatttattccttaccgaaattttctgtcacttgttgtctctctccctctccttgtgtgtaatggaaaacaacctaaaaacctgtgcttgtaaatgtttttgaaggctttatttgtttacaattgtgtagaaaagagagactttgtggaggctctaaagagagag

SEQ ID NO: 55838 - DNA, 727 bp, Populus trichocarpa
  Intron number 1 from transcript POPTR_0004s20820.1 (locus POPTR_0004s20820) derived from phytozome v7.0 (chr-ID scaf fold_4; pos 20205244 to 20205970)
acccgcggcatcgcgcgggtcatgtaagtagtagcattgaaaacatgtttttttatttatttaatatagttaaataatgtttttgcatcgaatatatgaaaattcagcatttttactagaaaagaaatgttttaataaattacaaattaaaaggattaattacagtgatatttcgcattgcgatcaagttatacttttgaaaaactttaaaaaaatttattttaaaattaaatttttattttttataatatcaaaaataaattttaagaataaaataaaaaataatatttttatatatttttatataaaaaaacattttgaaaattgttttttaccatattcccagacaagcaaccttcaattaaaatatgttatcaattcaatattcattgaaaggattaattagttatttcactaaatatctggtgacgaaatataatcaaatagttcaccttactattttcaaaggttgaactgttgtttcatcatttttttatttttttattaaattaattttttatttttttatattgttttgatatattaatattaaaaataaattttaaaataaaaaaataaatattattttaatatatttttttaaaaaaaaaacttcaaaacacaattattttaaaaattcatttagtattacattataattacattttaaagtattttaaataacctcaaagatttatcaagaagtcttctgtaaaggacaagggat

SEQ ID NO: 55839 - DNA, 476 bp, Populus trichocarpa
  Intron number 1 from transcript POPTR_0015s12150.1 (locus POPTR_0015s12150) derived from phytozome v7.0 (chr-ID scaf fold_15; pos 12543810 to 12544285)
cagacagggttcttaagaggtacttgttctaattgcgaacgccttctcatttttgtacctttattggagggttaggttttcttttccttctaatatggattccttggtgataggttgtagtcataattgaatgcagtgatgggctaacatgttttctttgacttaagaagcaagagaagaagctaatttatgatattttagaaatatttttgtttataaatatattaaaataatattttttttaaatttatttttgttattaatatattaaaataatttaaaaaaaataatttttttttatttttttttaaaataacttctgaaatgaaaaaacaaatattcttttaattacaagaaaaatctgtagtttatgaacatattggcttatgtttgaatgatgtaaactacttgcattgatggacattacttggttttcttggtgggcctaaatggatgtgatttcagatttggggttg

SEQ ID NO: 55840 - DNA, 702 bp, Populus trichocarpa
  Intron number 4 from transcript POPTR_0015s08470.3 (locus POPTR_0015s08470) derived from phytozome v7.0 (chr-ID scaf fold_15; pos 9737780 to 9738481)
gtcctaaagaaagtattatctcttctcttttgttgtttctttctccaatttgatatattagcttttctttttgtgtatctacttggtacatggtgctttaaaaattgtacagacagggtgtagtccatgtacaagcatgctgttgtaaatctatgaatgaactcgggaacatcatctgttttaccaatgacaaaacaatttcttggtttgttgtatggattatttgattccaataatggcatggaaataacaattgttttaatcttctgtccacatggatctctggcatccttcagttattgttttccttgtttaagtctatttagttttgggagctcggggagctttcttccattgttaattttgaatgagaaaaatatgaagaggtcatttcatttagtttcaggacttcatgattgatgtcgacatgtttgatggcttctcactaactgaagtactgtaaacattgagtttagggtgacagaatcttatggcatatttatgtaagaccttgttacctattggagtttccaattttagtatttatctttgttctccttttaccttgagaattctgagatgcaccttttctcttgcaaacctctattggctgtttccagttttattcttttatttttgtattttagtaatgtcttctattttgtattttgtgttttcttgcttcgatgcttacaggccttt

SEQ ID NO: 55841 - DNA, 413 bp, Populus trichocarpa
  Intron number 4 from transcript POPTR_0011s15960.1 (locus POPTR_0011s15960) derived from phytozome v7.0 (chr-ID scaf fold_11; pos 17954371 to 17954783 reverse strand)
taaagcaatctccgaccttttattctccaagcccggtaactccttgatcctttgttcatttgtcttctgttaagtcaatactcttttggtgtggaagagttgacataaaaataattaacagacattttgattgcgtccagacatcctgttttttcccctgaagctgcagaaatagcattttgaaacttgaagcatgtttattatttgcccctagaaaatacaggtcatctcactctaggaattgtattgccacctttacttctccagtaaagggcatttggatttttttgcgcgcctctttcaaatgtgaaatcagttgtccaatctcaattatgttcggccattgaattacaaattgagtttatgactttttttttaacgtacttgatgatttgtttttcagttctctttgc

SEQ ID NO: 55842 - DNA, 600 bp, Populus trichocarpa
  Intron number 2 from transcript POPTR_0011s15960.1 (locus POPTR_0011s15960) derived from phytozome v7.0 (chr-ID scaf fold_11; pos 17955140 to 17955739 reverse strand)
tcttggatcttgaggaattcccattttgggatttggtttgttcttctctctgtaaaatgtttttttttcccttatatttgttagaagcttcatcatttgtctttctgggttgtctatggtggacattctgatatcagaattttgttttttgttttttaatctctggtatcagacatgccctgacaaacaattgctatgtctgtgcatattttttaattgattttattttttatgtaacaaatggagttctgaggagtgatttcttgtgtttactggtttttttggatcttgaaattcttctccttttctctcttttaactggtttcagattgtaaagaattgaattgagtggtaaattttcctgggtttttgtttttccccatttgaattgtattttttttttacttgtagtgtttatccttttgctctctttgttttggcttcaaatacttatatagggcccagctggtcttccttttggttctgattttacctttcatgtcttttggtttcttctttttcaaactctatcattgctaattgtttgaatttgatttcattgcagcagactggagcacaaaatcactgatactgaaactt

SEQ ID NO: 55843 - DNA, 1008 bp, Populus trichocarpa
  Intron number 1 from transcript POPTR_0004s23450.2 (locus POPTR_0004s23450) derived from phytozome v7.0 (chr-ID scaf fold_4; pos 22174950 to 22175957 reverse strand)
tacaattggctctcctatcgtcctggcaacaacaggttagggtttacatttttttacctgattgagggttttatctagcattctagtttcgtatagggtcgtctagggctttctatgtgttttgaggtagttttgccgctattcttttatgttatccttgctccatgtatggtagggtttgattattacctcgaatgaagttggatagacttggtaatttttttaacaaggggattggttgggtgcgtaatgggcaatcacctgaaattagctagctgaattttgtagaacacgagactcctgactgtttggcacatgcctttttttatctgggttttttttatgtttaagaatttgatagcttatgtgcttggatttaccttgtttaattaaaccagggaaaacaggagagtgctaagttatctatctgctaatccttcaacttctgtcatgatcgatttgtgtttctttctccttgctcatattctgaactataagtagctatcaagttataggcttcctttgttcgactgtgaaggagtttcttttttcccctaatagtggaatgtggtacaggtatcttgtttttcttattctttgaaaagaattaggtagtctgcaattgaatataggttcttactgtttttcatatcccctctttatatgtctcggagaatcgatgaaatatttggattcttggagggaatttcagtttgcaaattgtcatggcatttctctttttgactgttttatagcttccttttcaaaattttattagactttagacggttgtattattgcttttctaaagagttgattctcggtgaaagttcaaccctttcttcaagtcactgatttctataatcaaattatgacacgtgaagatagatggtttcaacccatattcatgttttgagtgaactgtgtgattgatagtatttccttctgattgtttcttaaaattgtttcccagccagaagcatcaatcatattctagagcctatattg

SEQ ID NO: 55844 - DNA, 449 bp, Populus trichocarpa
  Intron number 2 from transcript POPTR_0012s10770.2 (locus POPTR_0012s10770) derived from phytozome v7.0 (chr-ID scaf fold_12; pos 11460323 to 11460771 reverse strand)
tttggaactatcattggaagaggcccgccaacttggtagaatttgttttctttctccttttctgacattgattttagtttgagaactttgggccaaaagtggtttcttcatgttggtgtaggtgtattttgaactataatatcctcttaaatttgggatgaaaaattttgaaggtcatgatggaatttcacatagaactgttattgcaatcataacataatatgtgctgttaagagatacaatggtatcgccagagctttcctgtaattcaagccagtttccacttcctgtaactcaataattttccctttcaacggagcaatgattctgttatgtgtgtttgtgtacgtgatactttgagaaatgaagtgctcaatgctaaccaagaaatctgacctccatgaatcttttcaggtcataattatattggatccgagcacttgcttctc

SEQ ID NO: 55845 - DNA, 1012 bp, Populus trichocarpa
  Intron number 2 from transcript POPTR_0004s11490.1 (locus POPTR_0004s11490) derived from phytozome v7.0 (chr-ID scaf fold_4; pos 10232345 to 10233356)
gtctcgtgttaactcggatcttcaccttcaggtaaggaaatcaaatgtcatttagttgtgtaaaagatttcaagttttaatcagggttggaaaagggtggagtttttcctttttgcatgtgaattatctataaaaatcacaacttttttttttcttataaattagaatagagagactcaatgatcatcaaatgaattgtggagttgtaaaaaataaaaaataaagatgactgactgatccctgtttgtggatttcaagatgaaaaattgtatttggtttgatggaaataatgaaacaaagaaataacggagacaaaagagagaatatcttataagtttcttattaagacagaaggatggtgaatttcttgttaaggatcagtaaagtttagtgtttttttttttattaacaaatttttatcacttgtgttggctgaggatgaattctacaacctaagcagaggaattaattaggctacacttaagcagaatgcatagtacaaagctggaaaagaatgtctagattgtctcgactctagagaacaactttcaacttaacagaagcaatcatctgtcatggactctattgaaaactttacttgataggctacatatatgcttggggtttcgacatatggttgtgagaaaaaaatttagtggcaagatacagtaggagagtccataaaggtgtgttgagattcaattcatacaggactttctggctttctattttgaatcgtactttttaatgagttatatactatctgaagctacacttatgcattttttctctccacttataacaaaaacctcactttctttgccatgcattcaggcccactgcctgtattcctatcacaatcaattagtatattactatgcctaatgattcttttacactgcaatctatttttcttgactttctattcgtgcattattttcattcagcctttttttcatatccttcttttaatgcagcttgaaagtgttcaccgttgctggggttattggaa

SEQ ID NO: 55846 - DNA, 681 bp, Populus trichocarpa
  Intron number 1 from transcript POPTR_0015s12970.1 (locus POPTR_0015s12970) derived from phytozome v7.0 (chr-ID scaf fold_15; pos 13109303 to 13109983 reverse strand)
gcttaaaggtaatgaatttaaaagttttgatttttggctcttttttttttaaagttaattttgagaaatggattatgtgttttaattttgttagcttgtaatgcaaaatgtagctctctcaagtgggttaaagttagcctacttggcaaaatttgtgttcttctgattttttacctttcttattgagaatctgtaattgtccatgtttaattgcgattgagaaaagttggcataaagggaggctaaatgtttagtttttggtgttgtttttgtggtagttctgggaaatgaatcatggatatgcctttttttttaagattaaaatgtgaaatttattaactctttcaagggggttggttttggtgtattaggcaaagtttgtattggggttttattttaatttgttggtcttaggatctgtgcttgctgctttttaactataatcatattagtgaatgatactgagtaaatctgaacaaagctattatctttgttgctgttgattcggttgatactttctttgcatatgaactcttttgttggatgattattactgcatttccgtgtgaaagtgagaatggttataaaggtttcatttatgtgtttttaatggactgataacactttggaagtagtttgctttcagggattgtgggagctggagtagccggggtcattcta

SEQ ID NO: 55847 - DNA, 668 bp, Populus trichocarpa
  Intron number 1 from transcript POPTR_0014s19200.1 (locus POPTR_0014s19200) derived from phytozome v7.0 (chr-ID scaf fold_14; pos 17039701 to 17040368)
gacaagttaaggatcgaagctcactttatcacctggtaaggggttttagactcgattacataagttatattgaatttgattaagagtttatgcctaaattgtacattctaggttatggttcatgagaaaatgaggagaaataagaactttgccctgtttaatgaaattaggatggaaaacaaattagaataatgaataattaaagacgaaatcctaaggttgtgaagggtattggtgtcagtcataggaagaaaaaattgggaaattttttaaagcaatgaatgaatattgtaattatgaagggtattgcttttacaatgtattgtaatttagcagcaggagaccatttcatgcgtccatatgttaggtagatgcttaacaccttaaaactaaagcattatttaattatgattgtaattttcttaaaatgtattgtaatcctattttataaatgatagattattgaagaaactagttaccctggtaaatgaaactagttccctgattagtgggtaattgaagattttgattccctagttaatgggaccagtgccttggttaatggaaagatggagatattggttccctatttaatgagataatgttatgattaatgggtaattggagaaaatagttcataagattgcttggatggattgttagtgtgg

SEQ ID NO: 55848 - DNA, 787 bp, Populus trichocarpa
  Intron number 1 from transcript POPTR_0004s08360.2 (locus POPTR_0004s08360) derived from phytozome v7.0 (chr-ID scaf fold_4; pos 6899195 to 6899981 reverse strand)
ccttgcccaattcactctccagtatgtattttcttgtgtttttaacattttttttcctgtccagtctcactgtgatgcttttgatttctaaactcactttctagctgagaatctcatggttttgaataatgggtcaatgctgtttttatcaaccttttcttcttttggtgaaagtttaattctttggtgcttggatgcaataaagattggtaatttagtgttcatagttaatgaaagaaatatggaatcattgtaccgatgggaataatggtgaattatgaaatttaagccttaattcctgttgttggctttgtgccaattttttgacttgcttattgtcaattgtcatgtctaaagtttatgaaaatcgctattaatattttgtttttgatgtggtttatgacttcactactgtttttaagtggtattgcttacattttttagacgttagtgtcgaattcatttgctttatcaccatttgttatgataaaagagagaaaaacttaccaaggaagagggtgttattctaaattgttctgttgtgcagttgtcgtatatagaataagacagacctctccattctttgtttcgttggtttagagcaaaatatactctgttaagcctagctagcattgatatgaactcttgctgatggcatttaaactatttcaacctctgaagtattttgtttgatagcgtgttataaataaatatatcagctaacctttgcagttaataacttttgcagtccttaccatccttgtaatgttctttcaggtaaaacaaa

SEQ ID NO: 55849 - DNA, 400 bp, Populus trichocarpa
  Intron number 1 from transcript POPTR_0011s07490.1 (locus POPTR_0011s07490) derived from phytozome v7.0 (chr-ID scaf fold_11; pos 8335543 to 8335942)
gcaatcaacatgtaagtgatcaaacttcaagcttcataatttagttctttcattaatgttggcttttgtattttcttttctctttgtttgattggcttctttgtgttagactagtgtgactctgcagtctttaactttgcatgctgatcatccgaactttgttttgttttttccctccttttatgcttgttggctgtgtctctggactgcttttattcgtgattatcagtggtcattggaggttcgtgactccagcgttctccagcttatggattctctttaattactttgcttggctcatgggttttaattatttcttactctttctctttgatagttttgttattgtagaattgttgataaatttttaaacttttcagtaatctgactgcagctgatt

SEQ ID NO: 55850 - DNA, 714 bp, Populus trichocarpa
  Intron number 2 from transcript POPTR_0009s05740.1 (locus POPTR_0009s05740) derived from phytozome v7.0 (chr-ID scaf fold_9; pos 5755990 to 5756703 reverse strand)
cgaactattgtggaagttgttcaggttggtgttctgattgtgtcctatttcttttggttggtttgttgcaagtatagtttattgctttgttatagattttcagtatgagatgatgctaccgtctcgagcttgatgggactaaggattttcctgatagtcttttgaattaaaatgatggtggatcccttggtagtttgatgttttgtgtgtactgttgttaatttttacccttcttcttcattaggcttaaaatacccattttaagatatgcttccttatgctgataatggcttaacatggaaaccagctgatttcatcaatacttcaccacaaacgagttaatattaaagttcccggatagccagtgtctttccattttgatttgcatttcaatcattttgataggatatgtaaattcttaggtttctttatttacttccttttctttttccattttctataaatttattgttttagcctgccagcttttagatgtttatgaatacaggatcatttacaatcggaattttctatttctgcattgtatttgcagtaacagaagtttcaagaaagcatcatatcatttagttatttggtttaattacttcaaatgattttcataagttctccattattggctgatggtgcttcatattcaggcctttttgtcatttgaaataattggattttcttttgcgtgcatttgctctgtag

SEQ ID NO: 55851 - DNA, 507 bp, Populus trichocarpa
  Intron number 1 from transcript POPTR_0009s05740.1 (locus POPTR_0009s05740) derived from phytozome v7.0 (chr-ID scaf fold_9; pos 5757213 to 5757719 reverse strand)
ctcctttcaagtctccaaaccaacagcatttcaaggtggttttttctcccacttttgtaatctaacatgtcactattttgtgctgtaaattttcttgatttttgtggtttcttgatttcttctggtaattatgctatgccatgcagatgtgtttgcttattttattaccaaatttggtgtatgccatattaggtagtctttcgtgaatacttgttgcctgaatctgcttttctctgtgtcgaacataaatttgttctcaattttgtttctgggtttcattcagattcaaagatttgtaccaaaaggttcagactttcatggagttttttattccttaaaaaatattgacttttttttcttggaagcaaaataatgtttatacagtgattttgttacttgtgtttgctgcagacggatataaaaacgttaaccttttgttttgctttactgggcattctttaaatctttacagatcgtcattttttggaaaagttgaaagtttgagat

SEQ ID NO: 55852 - DNA, 910 bp, Populus trichocarpa
  Intron number 1 from transcript POPTR_0011s12670.1 (locus POPTR_0011s12670) derived from phytozome v7.0 (chr-ID scaf fold_11; pos 15379229 to 15380138)
aggagacaaagattttgagtttctagtaaccaattgtaagtacacttgtttaatttacatgttttttttttcctgtaatgttgtcttgtttgaacatgacttttgagtttttgagacaagaagttgtttcaatttgagtttgaggttcggtcttctttattgtttctggaaatttgtgttttaatttcatgttttgatccaaattaaggttcttatgctgtcaaggagtcctttaaaaatcacaaatcttgagcttttggcatggattttggacttctttattgaacaagagttttctttctttttttatttctctttaatatttgttttaatcgcaaaaccccaaattagaaacttttggtatatataataatttattgcaaagatggcatcgtcttaatttttttttggcaattttgacctcataatcatcggtcattagttgttaagaagggaaatcagggagtctaatttaagtttgtgggtcccatgttgatcttaatctgatgatctgaagctgttatgttttttgtttttaatttaaaattgttgtatactgaataacaagtctcctagcttttgtctcaaattatagagtttgttgttgaatcagggctttctagttttttgttcagtttttgagtcagaaaagaaaaacccaatttatgtgatttcatttctttgcagagttcgtgtaatcgtaatcagtggtttcttcttttaccttttgggccttgtaggcgtcgattcctagttgttaagggaaaaccctgactgcaatttaagtctgcggtagatgatacaatgggatttcttctttaaaagtgttgttaaccgagttccacattatgagttactgccgtgtaatttttcaggatttatattttggaagaaaaattggacataaaaa

SEQ ID NO: 55853 - DNA, 722 bp, Populus trichocarpa
  Intron number 2 from transcript POPTR_0011s04170.1 (locus POPTR_0011s04170) derived from phytozome v7.0 (chr-ID scaf fold_11; pos 4209506 to 4210227 reverse strand)
tcttgcttggttttggtataggctttgccaatcaggtattcttaatgtcttttttgtctctctcttttttatgattctcgttttgatttttagttgctagtgattgtggggttgttttgttcgggattatttattaactttttgtgttttagcattagagaagcaaaaatagaaggtgctgcatgttttattttttctgtacatgatttcattgttttcaatggaatctttctgggttttgagtactgaagcatgtcatctttgttttcttgtatgttgttgagttgtttctgatccggatatgggcttgtagtcctttttaagttaaacaagattcaatgctttgtttggttcctgagaaaaaaagtagggaaagagttaaaaggaaaagaaaaaaggtgattccaatttccgctaatgtagcaaatagcaatacaagtgaaagaattcgactgaatgataagaaattagacaaagtgaggtactttgttattttattatcttttggaagtcacggttgccttgtttttcttttgcatgacatctctgacaccttttctccacaaaaagttaacttgttgacgctacagctttgaaccgaaaagttgcaacttgatagcggcttaattgttaatctaagcaatagaaaacagggtgatcagagatttaatggttttgatttttgcttgtgattacagtctgtgccactctacctctcagag

SEQ ID NO: 55854 - DNA, 827 bp, Populus trichocarpa
  Intron number 1 from transcript POPTR_0009s14150.1 (locus POPTR_0009s14150) derived from phytozome v7.0 (chr-ID scaf fold_9; pos 11153819 to 11154645 reverse strand)
ctgccttccctactgcttgtgctcttgaagtaagaacccccatctttgtattttgactcttttttagtatggtttttaatttgatttggtttttgaatttttttaatgctgtttagttaaatttttttttttttttgaggaacttaatcaagaaaggaattgaatttgatgttgttaggttcttaatgatgtctaattagtgtgtagggtcaagtgggttaggtaggttctttgatcgcactcttaacatttttatatgggttttcatgatgactgttctgctttagatgtcaaatagcaaatatgaagtttaggttggtgttagtcttgttttttagtttctcatccagaagctgtcagagtaatcttactggaaactctaatcttgggttagcaggactgatgatgctatgatgtcctattatgttgagcaactttatgttttaaggtgttgaatattggatatgtgaaacggatattgttctttttgtggaattttttcatttaaggaaggatccagggtgcttctcttaaggtggaaatattttgatttccgcttgttctgcatagcagaatcagagagtaaatatggaattgcttttaactgctggttccaatactgaggaacaactctgtttataaaaaggagaaggctaactcttcttaagtcacttggagtacttccattgttggaggaaagggaaagtgttgtagaggtctgtcatctatgtatgcatgacaactttgctgatttgcaatcaccttccttgtggtaattgaatccattatcctctggttttgacaggttcattcagcttcgttgattc

SEQ ID NO: 55855 - DNA, 857 bp, Populus trichocarpa
  Intron number 1 from transcript POPTR_0011s05240.1 (locus POPTR_0011s05240) derived from phytozome v7.0 (chr-ID scaf fold_11; pos 5112496 to 5113352 reverse strand)
tatagaagctttaagtacttttctattgaacttttttttatttattttacatacatgcgttcatatattatatatgtgcatatatggtgtgtaataatgctatgcgtcatggtgggattgatgatattttttttttttgacgacttaagagctatggcgtagtttgttggttctttgatatataaaaagggttcttcgaggttaatttttcttctttttttcatatctgatattgttttgaattgcttgggcaattggaagccaattcttttgttggcttttggtgaaatttctcttatctttacaaggtgcttgtttgctttatagttttatttatgttgtgaatttctgatgctgttattgaagaaggtggtcctgggaatatgcagataaatatggtttaggcaatttgattctttatttagtatatattcagcatggggctaaagttttgtgttcttatatacttttgctctctgtccatatatttgcctgtatttgtgaatttatgaacgttctgatgaaggtctttctagagaatggggtagatttttgtttttgggattaatcaactagagttttatttttttaatggctttctctcatgggatgttattctttttctctgagaaaatatggttccaatacgcagaacaattcattcaacatgtttcaagttctctgttctttgcttcctcattcaaacatttgtgccctgttttggatttttcttcttttacataacaaaaccatcataaattccttgagaaaagtttaccttttcgtgacttctttgaattattggcttgtattttctttacataatatcattaataggttttgttcttgaaggttgc

SEQ ID NO: 55856 - DNA, 752 bp, Populus trichocarpa
  Intron number 1 from transcript POPTR_0004s04710.1 (locus POPTR_0004s04710) derived from phytozome v7.0 (chr-ID scaf fold_4; pos 3458318 to 3459069 reverse strand)
gttctttcggtgatcatctcctttccactctctccgtttctttctttctttctgtcctttctttttttagaattgataataattagttaaaaaattgaatttttttgagatgattgaaagattgattgaactgatcattttgaagagaagaggaatgattttctagggtaagttgggttcttctgtaatttggactaaagggaagcaatttgaattcttttgttatgggtttgtttccttacagaagatttagatgttggatcttgcatgcatggcatggattgtagcttttcgtgtatttgggtttaattttgctccggcctaaaatgcaggattttttaggacaagatgcctctggggcgcaagtttattgccagtggtaatatgatctgactgtctggattttgtaatgcgtaagttcttctaatctcttgctttagtttgcaaatattttttggagtatgatttttttttttggcattcagtggtagagaactgggtgaatgttatgttttgcggtgggggagggtgggagcaggttgtttctaatgaccaattcctagctggcctttgatgaaatgcacatttggtggtggtgttttaatgaccattttgttgtttcctgtaaatgagatctagccatctactgcctagatggagagacaatcaataatgctgcttgtttttaagttctcttatgcatagttattaaaccaggtttggggatcaacttggggaaaggcacgggtcgg

SEQ ID NO: 55857 - DNA, 1040 bp, Populus trichocarpa
  Intron number 1 from transcript POPTR_0011s11810.2 (locus POPTR_0011s11810) derived from phytozome v7.0 (chr-ID scaf fold_11; pos 14606706 to 14607745)
ggctacggtcactggttttgccttcgtaactcaacctcgcacttcttttcatgattttttccaagtaataagtcgggctcatatcttagttcttgccttgtatttcttccttgattccatcttcatcccatttttcacttctgtttctagaattgtttaaaaccgacaagatgtgtctgccagaattgaaatgtgagatattgtcaagatttttgtgctccacatgttgctgtgtatgataagattgaccaattaaaaaacaacaaacggagagctagcctttattgccaaatcaagactaggactccataatgttcgcttacaattctgttgtggtatggtcaccatcatttgtcatggcaataatgaatttagcagcacgttatcattggctttagaaaaacaacatgtaaaagcccagcacattagctacatcaaggctgggctgagttttatttagatcgttgattgtatagcctctagagcagtagaagaagcctgttgaaatggcaagagtccaggtgggttgcatgtttgttcccagatcacccagtaaattaaggacagagtttccataggcactaggcaggtggtggtgatcagaattcaaattgtgttgtaattgaagaattggtagtgcattgtgtcaaaacactgtacagatcatgataatattagtataattagctaaaaaaactatcatacgcttcattcaatcataagttgtcctcctttttttaatgatcaaggtatctttggacaagctttagcttttttatcttaaaattaagtcttttctctttctgttcttagacgggtcatccacattagaattggtgcatttaccagatattttttttctggcagactcagttttgattccaactacttacaacccttaattcaggttttatcttcatggtctcggtgtcctttgaaagcctcttttgagacgatgatattttgttgattctcgttttaccctctcctgttgtttttctttttttccaggtagggttgagtggagcacttgaaacact

SEQ ID NO: 55858 - DNA, 422 bp, Populus trichocarpa
  Intron number 3 from transcript POPTR_0014s16750.1 (locus POPTR_0014s16750) derived from phytozome v7.0 (chr-ID scaf fold_14; pos 12836274 to 12836695 reverse strand)
tacacaagtggcagtacaggccagccaaaggtttgtccggtgctgtagtttctcacattttgcataactgattggaactcaatgcatggtaaatcttgccaatggaccttactgtaaagaagatgaatcagaagatcactctctggttgcatatgtccaaacagaaaataggcttgagtccagtattttatttttcaagacacagaaaataatgaaactccaagtggaagttgttcgtaagaatgcaaaggcttaattttgtatattgggacaagtaggaatgtagtaaagagcattgcatttttattctcctttacttttttcctactagtactgaattccaacttcattattacttcatcactacaattacatgctttcttttgatctgaccctgcatcctggttgcaacctagggagtc

SEQ ID NO: 55859 - DNA, 469 bp, Populus trichocarpa
  Intron number 3 from transcript POPTR_0011s09720.1 (locus POPTR_0011s09720) derived from phytozome v7.0 (chr-ID scaf fold_11; pos 12109216 to 12109684)
tgaggatcctgagcttcttgcgagggagacagtctgtatgtactagccaaatctttacgataactttgttaattttttatttcattcagctaatgggttccttctgcttcttattcttagtatcattagtaaacagaaaatgcttagattttatgttagtaagtggtttagccccatttatttcttcttcaactttgaccttttgttttagattatgaaagtcttgccagaaaagttatctgatgatgaatgttgtaaataccttttgttgttgatttcatttcagttgtgaagatgttcgctcattgtaatagttcttttatttgcctataaaaaaggatacagtcatacaacagtcttgttttatgtatgatgaatataatatctttaaccttactgataattcaattgacaattgtgtttttgctaaccttggatgcagtcagtgtaagtgaaatagaggcattat

SEQ ID NO: 55860 - DNA, 232 bp, Populus trichocarpa
  Intron number 4 from transcript POPTR_0011s09720.1 (locus POPTR_0011s09720) derived from phytozome v7.0 (chr-ID scaf fold_11; pos 12109727 to 12109958)
ggctgatcaataaggtttgtttattcttcaagctgaccatacaaaattcgttctaggcatagcttgctttgtgtttttgtcttcatatgaatctagtggttcctctaacaatgccacgtttcattttctccatgtaaatgctacttataattattccaaaatgcttatttgaatttttctctaatttcctgatataggaggagtttcaattggcgttgttcaagacaaacaa

SEQ ID NO: 55861 - DNA, 576 bp, Populus trichocarpa
  Intron number 1 from transcript POPTR_0009s01990.2 (locus POPTR_0009s01990) derived from phytozome v7.0 (chr-ID scaf fold_9; pos 2555757 to 2556332)
cccaagcagatcaaagtctggtttcaaaatcgcaggttaagataaaagaaaataaatttactcataatcattttgtttgtttgtttttattgaatttttttgggcgatcaggtcttaagggactggattaatgacatttttgaagaaaaggtttacactttaacattaattgcgttgatattttttgtataaatatttaagttcacatgaatgagtactggcgtcgctttcttttatttatttttaggtgggagaaaggctagatccttactgcatttgggtttaatttcctgaattttgtttgttttgctagtctcttcctttttctattaatgcaagctttcctgtattgggtcatgatttcacaccgggtttatgtactttctattcataggaaatgcattagtgtacgtggtttactccaatatgggttttgattagttgaatttgggatgtacgaaaagagaatcacagtgtaaaattcttttggggatgaagggttttcttgggcactgagagaaggtggtgtttgggggtgcaggtgtcgagagaagcagagaaaagagtcctcaagac

SEQ ID NO: 55862 - DNA, 1039 bp, Populus trichocarpa
  Intron number 2 from transcript POPTR_0012s08980.1 (locus POPTR_0012s08980) derived from phytozome v7.0 (chr-ID scaf fold_12; pos 10055520 to 10056558 reverse strand)
aatttgttaaagttctggcaggtttgtctctctttctctcttaccaattttcagtgaatttatgctggcattttctgtgatgttaaaaacctttttttaacatttcaatatttgatcttttgaagtgtctggttggtaatctggacgtgaaatcttaatttgtgtgtttcaggcaatttaaatacgagtgctaattacttaattaattaattgattgattgtgaatgtgcattgctacttttaaatgctactatgatttaagtttgtgactaaaaaaatcaaataccgaatgctttaaacatgcagccgtcattaccattttcgatggaaactttatgttctgggagggctgtattgtttgtttgcagttagcgctattgtgtttttctagttgattttactggtgttagcattaacctctaatggaagacagaacaaattcattcccttgtgctgaatttgtgtatttgagtaactcttaatcaggctgtactttaatttttatttccttctggaagcctaaagttgcaaagaaataacttactcccacttcccaatcatctattttgacgttttgttttatttaccatttgtatgcttgagttcataaattaccatgctattttggaaacccttaacttaagaaatgatataaactagtggcacaaaatgtttagaagaaacaaatatatgctatttggaagatgaaatgctatggttttcatatttcgtctgacacaaaattagctgaagaagggaagcaaggacatttttatttttttttatttttaaattgggactcttggtttgttaataagaatgctggaaaagagaagagaaccgttagtgaaaatttgtgtttttatctccaaaaaaatccattctctgcttcaatttttatttttgttttcgtgagatacaacgctttaaaactgatgtccatttgcttcttcttcttctgatgtccatttgctgcttcttcttctttttttttaatttgtgttctcttacagttaaaactcggaaagaggctaagcag

SEQ ID NO: 55863 - DNA, 690 bp, Populus trichocarpa
  Intron number 1 from transcript POPTR_0012s06226.1 (locus POPTR_0012s06226) derived from phytozome v7.0 (chr-ID scaf fold_12; pos 6314849 to 6315538)
aggatatagagcttctttctgttctctatcctaaggtaattgtttgaatttttgggtatgtttatgctaaatctttaataaactcatgctgtgttcagtttaccttttaaaatgcacaaggcgcattgattgcaaaaatatttctagcagtttaccttttaaatgggttgatgcttttattttctgcaagcttcagttttcaaacttgatactgtaatttttggcaccattagtttttttggttaaaatatcctatgaccctgttgattgatgcgatgccatttaaagtttgagagtgattatcatctactgatatcgggacggtacggatatggaaaagtaataggacacacacaaatgagtgttttagtaacaggacacacacaaatgagtgttttcgctcgttactctaagttcaaaaccatagaaattaagaactcgccactcaaaaaataaaatatcaaatcaccactttagagatgtgtacaagtccactcctcacaaagaaaacacaacttgatatgttgctaaaagttcatgtcaaagacttcaatttagtttttttgccaaaacatctttagtacatgaacaaccctcaaaatacaataaagattcaaataaatgactttgacagaaaactaaactaatattaatattaattagcatatgtttttgatttcttatccagat

SEQ ID NO: 55864 - DNA, 613 bp, Populus trichocarpa
  Intron number 2 from transcript POPTR_0015s00650.1 (locus POPTR_0015s00650) derived from phytozome v7.0 (chr-ID scaf fold_15; pos 388640 to 389252 reverse strand)
tttcaagcttgcacgtactaacaacaggggtggtaggtacctttcttcttcatctctcatattatacttttctctagaatcccttttgtttatacatttaaatcttgattttgattttgtttttttaatcaattctgatatttcatatcttaccatattcttcgaagattgaaacctttatacaagttttggatgccgttggactttttgtaatcaaacattataggccatgttctagagatggagttgtccgatttgatctgcatttgatgtttctggtttcatcatttgtacagtcaccattgcctaaggtttaatgtctccaatttggaaaaaatagggaagaaagcttgcaaacttgactcattcctctgcttcctgttttcttttacaatatttagaagaattctcccatgttttaaaaaatagaaataaaaggttttaagttttgttgaagaaacaaaccgggcctagatacgaatggattgcagatgaaacaatgagcacagttttcctatgtctactccagtttttgtcgaatccctttgaacataccatgccattgtctgatatctcagggctactgattgccgtgcgcaaggagcatttcaga

SEQ ID NO: 55865 - DNA, 976 bp, Populus trichocarpa
  Intron number 1 from transcript POPTR_0011s14260.1 (locus POPTR_0011s14260) derived from phytozome v7.0 (chr-ID scaf fold_11; pos 16731175 to 16732150 reverse strand)
agagttctcctcacaagaagatcttggtgttagaggtaaatttcagaagcaatggcttttatttttagttatttttaatagttttgaaatggtttttttgagattttttttggaataatcttgaggtgggttttgatgataaagttggaatcttgagtgaaatttatgatttgattttgtgttatctttgagggattgaattaatactatttgctttgatgttgtagaaaggtaagaataattttgaagttatcttttctatgttgaatatgtgctttttaatggaaatgatgatttgggccaatgttgtttcatggggtttgagttatagtatgtatgtattgatgttgtagagtaagtcagtataatgggcgttgcaataacagatcttgaagttgataagagataggttttgtttagttgttttgtcgagggactttagattggggatgttttgttcagtaggtgttgtattgggaattctcggtttcctaatttcctcggaaaatattgctggttagtaaatgagtagatgtatggaactttggttaatttggtgaagggcttgatgcgattttctcttgtaggctccatttctaagaatgtattagcttagagttatgctttagattctaatatgtgattaagctttagttcatgtcaggcattatgttgagatattggctcttttggattgttggtgtacattttgatgacgaggatttatcatattgtgaatgtcaatctaacccttggatggttgtaaattccttttccaaagcagttcttcagtcagtaatggttatagaagaacatgtattactgcgactaagttgtttccattaaatgcttcgttctctgttttcggtgattgttttataatttgatgttgatatctcaagtgcatgttcagtgtctgttctgttgttagattttagtttgcagagatgtaagtgccttttcttttttatgacag

SEQ ID NO: 55866 - DNA, 728 bp, Populus trichocarpa
  Intron number 2 from transcript POPTR_0004s21200.1 (locus POPTR_0004s21200) derived from phytozome v7.0 (chr-ID scaf fold_4; pos 20429702 to 20430429)
ttgcggcggttgacttgtcgtgtaagaattattgattttctctagtgggattagtttttagtttttttagttaattttgttatatgattatataattgaaattgaattgatctgaagaattttccgttgcagtagtaatttagcaaactcttatgaagttcacaataataattagaggccgaatcagaaaattcacttataaaactgtgcaaatgttctcaattttagtcgtacttgtgcaatgtatgagcatttattttatatatccaaaagggtggaagatggaaatgataatcgaaattgctgttttctgtgcaaaattaatcacattggaggtgtttgaattgaaaccggtgactgtcatgcatgtgaatttgcaaagtggaattgaaaacgcagcaatgcagtatagtgaatcgtttgaatttgatatcgttttgttgctgaattgattggcattctattgtgtttgtttctactcaagtattcatctttactcttttttttcctttctttttgcttagttgtgatttgagcgtgtagagaatgagagcgcacatagagggtaaaagtgatagctgttgaagttcttttgattatctcatactatactgtaggctaagatctttctaatctatgttttgattttttctaagaggtgacagcttttgaatttgttgagtttgtctgcagcttcagaagaatttttggagcttactaaaagtgca

SEQ ID NO: 55867 - DNA, 895 bp, Populus trichocarpa
  Intron number 1 from transcript POPTR_0004s23550.1 (locus POPTR_0004s23550) derived from phytozome v7.0 (chr-ID scaf fold_4; pos 22233020 to 22233914 reverse strand)
ctcgaagggcagattcatttgagaagctggataaggtcagtttggtgtatgtctccatgattctcgttgattttgtcttgtccattgataatttgagtgaattgttaaaaaaaaagtggtttcattttcccctttccatgaacttgaaaataatagctaattggtatatacatcctgttggctatagcttgcgatatattcaataactcttcgatgtttaaatgtattctcagcacaaccttaaccaacacccctcatgttatacctacaatatgtgtatatgtgcaagcatgcttgcggccgcatatatcttaggtccctaatggacaacctagttttgggtgcattgagagtgcagtcatattactttgttcaaattcagttgccttttggttattggttaaaagatggatgctgtctttgtagagatttttgttttctctggaaatgtaatttctttctgaattttttacccttgactactttgatattcttgcaagaataaatgttctgtttacccctgaaagtttttgaacagtaaaattgacaaaaatggtgaaacatgctagtccgagggatggaggcgctgttatgttactgcaggcaacgagtcatgtctcttgcaaaatggcttcttccctgaagcaagtattcttctaggttctgttggacaagcactcctctcagatttgtttgtttcaatcaatttgaaacttaaagtttctcagcaacttggcatgttttttatttgatatgcaatgcttggtttttgagcaaccaccatttagctgttaaatgctgtctactccttggtttattgcccagttctttaccagtaaacttttctgcaaacaatgcagattggacagggaacatatagcagtgtgtacaaagc

SEQ ID NO: 55868 - DNA, 702 bp, Populus trichocarpa
  Intron number 1 from transcript POPTR_0015s03450.1 (locus POPTR_0015s03450) derived from phytozome v7.0 (chr-ID scaf fold_15; pos 3007618 to 3008319 reverse strand)
gctactgttacctgcaccagtctaatttctattaggtatgtttatgcttgttttttgttttaatttctaatatggctttcttttgtttctacttgtttgcttgctttctgggttgttaacggagaattgatgtttctgcgtgcacgctcggaaaacacaagcttctttctcttctttctggttcttgatgaatgttataaaataaatcttgtttcttgtgtaatttccttttagtaaaaagatcctcttgtttctacttgcttgctcaagattctttcctttcttttgggttatataaaggaagtgaataaaataaatcaatctcgattacagttgtaggtttgagggttctatacatgttattatcgcaacacatccaaattaattagggtgacataatgattgtgttttatgctctttttctcttgtcattttctttctttcaaaatattctataataaaattactgtattcctgctttggttacacaaatagaattttgaatacctgctttacggtgatcccttttgttctccaattgtgattttattgaaatcaaaatttcatgtgcttaaatcgaactgcactggatttctttttgtgttgaatgctgttattttacaaccatcactatctcacatgttttttgtttcttcattttatgcaggaatctcaattgattgctcagcatctcctttattt

SEQ ID NO: 55869 - DNA, 739 bp, Populus trichocarpa
  Intron number 1 from transcript POPTR_0004s03610.1 (locus POPTR_0004s03610) derived from phytozome v7.0 (chr-ID scaf fold_4; pos 2504584 to 2505322)
ttaaccatcgttcagaaggtaagaatgactttacttactaaataatctggaagctgtaatttatgtttggatctgaacatggattcaatgattgtgtgtatcgccatgatgacccaagctttccaccagggtctagtttctgtctcgattttccaagcatttagttttggcttggatgagtcacatattgcagatgctatattaacttaggctgtccttaattaccgctatgggttcctcactgtgttaagacttgagaggcattaaattcttgtgcattgcattataaatattaaaggatgacattccgacagagacaggcctgagttctgtttcttttcttgtcaacttccacgttgttacatatcgagttttggttttccaatcatggtgcatttgatatcattctcataacaagattgtaaacacaatttgattttattcactcaatttatcatatcatgtgaaacgtggatataacttggaaggtgggggttaggaggaggacacagcttacaagtaattttttcgttccaacttccatgccctctaggaatttttttatagcaactgttgttcagtttgagtcaattttcttagagccatactcctgcatgattagtttcattctagggtattttgtgcttcgctgtatggctgtatcttattcatagcaccttcctcctctgcacctgttacatgtttgaacgaaattacaggcttgctttggccaagaagg

SEQ ID NO: 55870 - DNA, 483 bp, Populus trichocarpa
  Intron number 2 from transcript POPTR_0001s16500.1 (locus POPTR_0001s16500) derived from phytozome v7.0 (chr-ID scaf fold_1; pos 13293641 to 13294123)
cttataagaaacttgcactggttagaccttaactaccaccctcttctcttttaatggatcttttctacctaattgcaaaacaagcttgctagctactcatgatccgtctgtttataaaatctttgtgctctgttattgggttgccaggacaaagaaatgaatttctggctgggttcctgccatttgccatgcgcaacaatttgaccactctgtttttcatttcttgtaatttaatcaaatgggtcacaaagttttaatctttctagtgtgaaacaaacaaatccaatgctattcgggcctcctccttttctatctcttaaaagggtatgatttcttcttctcttcttcaggagatagtcgcttcaacaagactgtctttttcattcttttctggaactggttttgtgtgaattggagtttcaaggagtgtagtaatattttccaggaaagtaagaaaaagctgtgtttttgtttgggacagaa

SEQ ID NO: 55871 - DNA, 835 bp, Populus trichocarpa
  Intron number 1 from transcript POPTR_0015s07790.1 (locus POPTR_0015s07790) derived from phytozome v7.0 (chr-ID scaf fold_15; pos 9088142 to 9088976 reverse strand)
aggtgtgtgtgtatatataaataacagaccacaagcttatctattgtgatttttttttttgttgtggttgctgagaaaattgaagaagagaaataaatgaaaaaggttttttttttcgttttagttatgcaaagtaaaatttagctctagcatttgtcagaattaggcttgatcgagatagaatttattatctgtgccctagatttctaagcaaacaagcagaacatgcaattgaattttggtgatatttctaaatccgatgagcaattggttattttaggggggggggggattgtaatgtttacttggaaaaattcaggtaagcagcctctctcatttctgaataattatttaattacttaatcaaagaatatgagctaacaaatacatgaagttgactttcatagtcaccacagtttatttgcggagaagtttccttaattcaaagcttttaggaatgctaataagtcgggcttcatcccttcatagttgggtttgttaagatagatggtcaacatatgtaaatgctccacagattgtataactgattagggaaagatacgtaatcctcatattaaacatgtttatattatgtacccaatgaacaagagagttttaatttgcttgattgatgcacgttagtaacgatatttacttgggacataattttgaaaccaggggagtgagattttgatctcttaaaattcaaaacgccatgtactttgactttcatgctcttaagtttgtgcttcttgttcatgtatatgatttagcaattatgagttgttttcatgtggcaggttatctttcttgcattagatacctgcattaaaaa

SEQ ID NO: 55872 - DNA, 585 bp, Populus trichocarpa
  Intron number 1 from transcript POPTR_0004s12770.1 (locus POPTR_0004s12770) derived from phytozome v7.0 (chr-ID scaf fold_4; pos 12039401 to 12039985)
cctttcaagaaagagacgccaaaaagcgagtacatgtacacatatcagcactaataatggttttggtgcactaaaagaaacaaaaatcaacccacacacgatacattgtattctccatgcacccaaaccctaaccaccacctgtacatgctcaaaacattacacgtcaagctaagagccataaattcatagaaaaaacgtgaaccttgctgtgaaggaatgatagtcaatgttcttataaccgagtaaaaggactagtattttgtggattcgacgtggcatataaatttaccgttagaatcttaataaggtcttatctataccgttggtaataattaaagctgttttttggcattaagaaatccaagaaagaaggatcctaatctcatagagacaataaaccacaacaaagaattttagctaatttcttatcctagaaatgttgcattatgaggaatttcttaaacagtttttctttgattgcaaccaatggaaaatatatagcatgaacaagttcataggggtcctaggtgtctacaattaccaaagagcagcactgaaagaaagaacgctttccaccaaacca

SEQ ID NO: 55873 - DNA, 426 bp, Populus trichocarpa
  Intron number 1 from transcript POPTR_0009s14190.1 (locus POPTR_0009s14190) derived from phytozome v7.0 (chr-ID scaf fold_9; pos 11174341 to 11174766 reverse strand)
gtcctgtaagcccctttacacagtcttttgcgttttagactatcagttttctcagcttcaaatttgaagccaatatattagacatattgagtcttgtttcttgttagtgaaagaaaaggtcttgagctttcgagaaagttttgaactttggtttttgtttcagagctggagaagagaagtagttgattttatcagggctaggatatggtttagttgagtttctattgctttagagctattaaaataatgggacgtggtggatagttaaaaaagttttgaatttcacacaatttgaccaatcttggtggttcttttgttttgttttgggttttgatgaaattattcatggttgcgtggtggatgtttatgaatttatatgttgatttgattaattgcagcattggggtccgataagtagcagaaagg

SEQ ID NO: 55874 - DNA, 858 bp, Populus trichocarpa
  Intron number 1 from transcript POPTR_0011s03360.1 (locus POPTR_0011s03360) derived from phytozome v7.0 (chr-ID scaf fold_11; pos 3504836 to 3505693 reverse strand)
tcttctcataatttcactgattctgccttcttaaggtgcctttttatgtttccttttgttttactagctctttttgattggtaaagttcaattcttttttccttggtaacagcatgttggcagccttcttgttgttttgtttagaaatgtgggtttgatttgtgaaattagtatactgtgctgtctggaaacactaaattgtgttgcttatgagaagactagagatgtcagtagccaaatgagttttacaagttctgtttaatagcaactaatctaaagtttgtataaagaataggacttagtggatttattgatatatttttgagttttgtagcaatatgattgttcttctgctgttacaggttacctcctttctgaggttgtaatgatagcatcatcaaattctctaaaatgtttggaatattgttaattagttattgttttttaaatataagaaagggctgtttttttttttaattttttttattcatgcgttggcatatttattctggttattggtattgctatcaatggtttttttattactgggatttggatttacttcttttcagaaatgtgtagctaatatggttgaatggctcaatgtactttttcactgggactcataattgcatgattagaggttttcaatatgaatttaattgctaattacttgctttttagtatatctttttcgatgctgctccaggatgtttagcaacactacatctatgaaaagttatgatttctggcatgctgattttgatgtaaatgaataaactaaatctttttgataggcatgctaatcatcttctctctctaccccttttgttttcagtgtggaattcaataattcat

SEQ ID NO: 55875 - DNA, 946 bp, Populus trichocarpa
  Intron number 1 from transcript POPTR_0001s36320.1 (locus POPTR_0001s36320) derived from phytozome v7.0 (chr-ID scaf fold_1; pos 34864747 to 34865692)
ctgccgccgccagagggcaggttgaggtgaggctctaactaacgtgttcaagttgagatttgttatgccatttattgaactaattctgattacaatcttacattgttaatagcaagctgatctgttgtttttctcttcctatgaagtgaaattagaggctccacacaattcataaccttgtattgcagttgacatcaaatttatactctgtgtgaagtttcttttctttctagtggactttctgttgaatttttaagtagtatttagtattcaaaatggcgaacaaaaaacaggtgatattgaagggctcatctagatcctgtctatcattaatgtacatttcctgttaattttattgttgattgagaagtaaggtttttttttttccctttatccatgcttagtgtcccaagaagaggcatgaaaggagtacaacatacctcagtttttgatctcccagtgagactgtaatataaccatcatgtgatgaatattttgacaagtgttcaattgaatatgtgtggttccaaattagttatctgaagttaaatggataattgtttgtactatagattttttgcatgtatgcccataaatcttgtaacacgatgatccaggatacgcatcatagagtttagttcatacatcaaaccaagcaactcatttaaacctcacagtgagtaaattcccatattaaatgctcatcatgggtgatgataaacagttagatcatcgctcttggttttgaaacattatgcataatgccattattatcccctgaaattatcttgtgaaaatattatcaatgatgagatcatgatgtgttcttttgtgaatgagtaaactccaacatcccaatttggcaactactggatcttttaagcttataagcatttctgctctttatgcaggtagttaaagatcttatagcatcctttgaaatcat

SEQ ID NO: 55876 - DNA, 1000 bp, Populus trichocarpa
  Intron number 2 from transcript POPTR_0004s22120.1 (locus POPTR_0004s22120) derived from phytozome v7.0 (chr-ID scaf fold_4; pos 21062880 to 21063879)
ctcgagctgtactacaactgatcagttactctctggtaattacaacttaaacaagtatttctttcgattgttctctgcttctagtttcatgcgagtcgatgcttccttttccaggaaaggatacaagagagaatatcatatcatatcatatcatatatctgcgcgcgttaactgtgtatcatgtcgatgtgtgtccttcaatgctcaaccaaacttatctgtgttgtttaatttaatcgtgtaaaatgttgtctgccacccatatgagatgtttgtttctccagttacgagactctttcctctttttatacttcacatgattttatgtggattggattactgcattgttcagcggtgttccagaaaaccgaccatatataatagtaaaattgattttttagtttaaagttcttttgaggatattaatatgagttttaaatagaatttaattactaaaaaataatcaaaagcaaaccagagtgtctcatttgatcttttagaattgactcttaaacacttcgttgcaaatatggatgctgaagtaatgatcctgttctactatgtttggaatattcctgctggagttgattttgacccttttgcttttattactaaaatttttcttcgggttatccaagtcttggatattcaacctcgttcccatggctgctgccgaagctgctgttatatctgttggcgaatatcagatatcagatgaagccttttcaattaggttattcgtcttttaaaggcacaatttataagcatccatcacttattatttttttcttctaccaaatattttattaaattcgtttgactaggataagggaaaataaaaacagaaaatctggctaatttgagggctgtttactaaattgattttgcaatagccatcccaatgagttattatatatgcttgggatttcaaataagtaaataaatcatcttttttcttttttcagatctcatagcgaacatcaacgaatcagcctaggca

SEQ ID NO: 55877 - DNA, 523 bp, Populus trichocarpa
  Intron number 1 from transcript POPTR_0001s10670.2 (locus POPTR_0001s10670) derived from phytozome v7.0 (chr-ID scaf fold_1; pos 8297375 to 8297897)
ctcttcagcttctaaaacctctcgcttctactctggtaacttgttactccttgcttcttgtactttttttttttgtaactgtctatctttcttagctctgatttaaatgtgctctcgcgtgtcctccaagagcttgtgttattaatttaattgagctttaattttgatgtgcatttgaggtttatgagttagattgcttctccgttttttattatgtcatatttttggtttttatattcagattgtttgatgtgtgtagttacttctgttctattgtggttacggcttgaatttctgtctctttgtttgttactgataaatacatcatgattaggtacacttataagttaaagatgaatcttttcttgaattttcctgtatattttttcttcctccaatacaaatatgtcgtatttgatcaatttaagttgagtcacaaagctttcttactgacccttcaatactttgagttttcctctttgtagaagggagagctgcagcggcagtggtggcagtttcactt

SEQ ID NO: 55878 - DNA, 992 bp, Populus trichocarpa
  Intron number 2 from transcript POPTR_0001s10670.2 (locus POPTR_0001s10670) derived from phytozome v7.0 (chr-ID scaf fold_1; pos 8297963 to 8298954)
gtggatttctggggctcttgcaattcctgctggaggttcaaataaaaatcctttcttatttattgtccatcgtgtccttttttttaatcaaactggagtctttttcaatcactagactgctgataggttaatggaactttaatattttggttcatccgtcatgattgagagtcatttttctccaggatttcctgctagaaaaatagaagtttttctatctgttaggaattgaattcatacttgtttcaatacaagaggatgcgtagctcttcaacattacatgaaagaaaaagatggagtgttggctggaaaaccttttgttattgtggatagggaagagggggcatgtcccttgctcaagtttttggcactgtggcttccaggacctcttcgacaacaataacttcatgcttaagtgtggtattgggttaaatcctaggcatgggatatactctagacttgattgcttccttaaatttcccctgacattgtacttgaatccctaaatgcaaaaatgttttagtgtttttatacttctctgttggtcctttcagcggtttttgttaatggtctttttcatgctttcacccagccacccacccttctctgtgtcacatgtattaagatctttatctctcctggttgtctatggtgaaaattgatcaccaactaataatgaaatgtgggtaaagcaacatataactggagagaacttttattttcgagatacctttgagtttcatatccttgtctatctcacaaaccaaaattgacataacattgcaaggaacatagctaccagcgcgtatttgctgtattttttgcctattatctctgtatttcttgaagatattgataattgaggatgcgagtaaccatatcttagtgtaactctttgaattctttggttggttgatattgttaattaatttccccccaaaaaaaatatctgattttaactttcccttcttcgctaaatgtttacagtatac

SEQ ID NO: 55879 - DNA, 959 bp, Populus trichocarpa
  Intron number 1 from transcript POPTR_0015s08730.2 (locus POPTR_0015s08730) derived from phytozome v7.0 (chr-ID scaf fold_15; pos 10057674 to 10058632)
accttctcctgcaaatcctgcccatcaaaacccaggtcccacttccatcttttattttcatctcgtttttccttaggctttatgaaggaatgattgaagcgggttgctttcctagtgtccagacttgtaatatgctgatttcaatgtttttttgaaatgggtgatcttaatggggtatttgagacttggcatgagatggataagagaggttgtgcacaggacgttgatacttgtattctgacgatcaatgggcttttcagttacaataaagtagaggatgcatgttttcaatgggttttagttctgagaaggtggattatacggatgatgattctccggagttcaatttagaaaggttttgccttgataatgggaatggtgagaaaggaaagatcttcaagtgtctgcctggtttggcaataagtcaggatggggagcattgggctagaattgaaggggaacatcataatggagctctgtttaagattttatatttttaaattattttgctctaaattaaattaattatttctaaattaagagcaaaatagtcaagattgctaattcaattcatctccagggtatttcaaacataagaattgtaataggttgaattcaaatttgcttttgaattgaattcaatttcacttgtgatttaattccaaacaggctgttacggttactgttattttttgagcttataggttattattataattattatgtgatttgcagctcaattaattaattcatgtcttaactaccattgcaattgattgcagtgtcttttgtttatggattactaatcaaagatgattggtgtaaatggttatgtgcaacttgaatgatttgggagacgaccaatgggttatttgtttacagtgtcaaatcacttcaaatttaggattatattaagcatatggtaatggtttctttttttatgctttgagctacagaga

SEQ ID NO: 55880 - DNA, 483 bp, Populus trichocarpa
  Intron number 1 from transcript POPTR_0004s15810.1 (locus POPTR_0004s15810) derived from phytozome v7.0 (chr-ID scaf fold_4; pos 16356495 to 16356977 reverse strand)
gagcgggaaatcaggttccagtttcaatgttattggactaggtaattaagtaatgtatattttgctatttttttataaacatgattggtgatttaatctttgtttgataatgcggtttaatctgtttttaaattgttttttttttttacattatattagtgttttaagtgtttttttttatttttttgatatattaatgtcaaaataaaataatatataaaaaaccattatttttatatatttttaattgaaaaatcccatgtaccaaacgtccgaaattacataatcagttcaataaacctcaaaaaagttaatttcttcttatgtttttataaacactgatattctaagcttatggtttaattttcttttgatgaaaaaaaatgaattggaacatacttttgatttttgattaattttaatttgattttttgttttttgtttttaggcaccgcaacaacctccaacagatcactagttcac

SEQ ID NO: 55881 - DNA, 548 bp, Populus trichocarpa
  Intron number 2 from transcript POPTR_0012s03530.1 (locus POPTR_0012s03530) derived from phytozome v7.0 (chr-ID scaf fold_12; pos 2770515 to 2771062 reverse strand)
gctgctgcttctaaggtactccctccctctctctctctctctctctctcttgttttcttgagtttaagatgtaaggtttttatgcttaattatggagatttttttttttgatgagttagttttatgaaatgtttgcatctattaattgggttattcaagacttgaaatgggtttctttatatgatgctgtaaatggcaaatgaataattaatgatattctctttctctgttttttttttggcttctttgactgttgattgctggatgactccattagaagctttgtgttaagatctgtttggaattggatttaagggatggtaatttaagatttttttaatattaaaaaaagagaaaaaaaggaatgtggtttcgacgttttggtagagctgagttggagtttctgtggaaatatcttcatttggcatcatccattgcatgttctctccccttgtttcagtttctttccgataggaatttatcaataatttcttgctagtgtaaggagaaatattgggctaattcttttggtatggatacaggagcaa

SEQ ID NO: 55882 - DNA, 625 bp, Populus trichocarpa
  Intron number 1 from transcript POPTR_0015s13880.2 (locus POPTR_0015s13880) derived from phytozome v7.0 (chr-ID scaf fold_15; pos 13631316 to 13631940)
aagcttcatttcgacaaaatcgccgatttcaacaggtaatcaaaatcaaatcaatcaattatttaccgttggttacccagaaagctcgagaaaatgtttatttttcttggtttcttggaaacttggcttaaaatttgatctttttttctgcacgcggtagatctggttgtcattattgtagatctgttatttagggtttgatcttgtggatctgattatgatttgttatctattttcttcttgattgttgagtatcataaattttggtactttttcttagggtttgttgaagaaccctagttaagtctgaaacagcctttgaaactcgttgaaaatgtgtgatttccaaaaaaaaatcaagactttatatttgaaaatggagacccataatttcttaggtggttaaaggcatggttatcctacaaaataatgaaataaacttaaaagttgtagtgtttgggaataaaacttgactttttcaatgttttgcaaggaacccattagaaattaatgatgttagagttataatatgttgtttattggagcataagtttgctatagcatttgattgaagtgattttgtagtatttatctcatatatgtgaaatgttggtggccatgcaga

SEQ ID NO: 55883 - DNA, 551 bp, Populus trichocarpa
  Intron number 1 from transcript POPTR_0001s23420.1 (locus POPTR_0001s23420) derived from phytozome v7.0 (chr-ID scaf fold_1; pos 22758485 to 22759035 reverse strand)
aaaggtaaaaaactaacatgttatagagctttttttttctttaaatttttttctagttttgctaaacctaatggctgcagctgcatttatgcttattgataaaaagaaatactgtcttgagtttttggtgttactgttatgtcatttgtttagcaaagggaagaataactgagaaacagagccttttcagctacattttttggaaacaaggaagtccttttttcatgtgtttggaatagttttgaaaacagaactttcctttctctttaatattgtttttactttactttaatggatattgtgtttactcaaagccaaactgctccatgatgaggaattcttggctttttaattctgtgtttgtttgtttttcctccaatttattaatttctcgcattttgactgaattctgcaattcccattttgtatcataggttatgcaaactaaatttgttgtctataaatgctttttggttaattaacttttgtaattttgattttatatgttgagtgcagtgaattttctgatatatttgatttggagcacttca

SEQ ID NO: 55884 - DNA, 533 bp, Populus trichocarpa
  Intron number 1 from transcript POPTR_0015s08010.3 (locus POPTR_0015s08010) derived from phytozome v7.0 (chr-ID scaf fold_15; pos 9291574 to 9292106)
aataacgacatcattttgatatcgatcatccgcaggtctgaatcttgaacacacaattggatttgtttgtacgttatgcagttagtaattgttggttcagatctaatcaatccttttatttattcatccatgtttcattcgtttttctttattgattatcgagaattattaagctcaactgattccgtttcattggtggatttatcatgttttttcgtgaaatctatttctaagattagggtttttgagatgtgattttggtaattttgaaactttcgatcagatttttgtgtttattattaatttgatctaaatctgttttgcttagttgtattagtgaattagcagtatctgaattttttcttcttcgattaggtatacatatatccttcccatgtggatggtgattttattcattcttttccttttatgaaattatttggattgcattttttgggcaacgaacaacaaaattttgcttgactcttttttgggttttcttggtaggagaaaagaacagttttgattacaaa

SEQ ID NO: 55885 - DNA, 987 bp, Populus trichocarpa
  Intron number 1 from transcript POPTR_0015s01470.1 (locus POPTR_0015s01470) derived from phytozome v7.0 (chr-ID scaf fold_15; pos 904090 to 905076 reverse strand)
gatatttcttttacagtaatcttgtcaaaactcaattttcatggtttttagttttttggattgtgggatctttaaattttggatttttttctttacagtgtttctgtatgtattttgagggtttatgcttagttctttattttgcttttggtgtcctttattgattattataataagttatcgatcattccatatcctattatctctttaacgattgctcttgcttcttcttcttttttgcctttttgtgattaaaattttatacgaatatatggtatgtagttactgaagcaaggattgagtaaagtagcaagtcgcttgattgttagggaaactcctatgatcagatttgatgagaaaattgagttgccaacagcaattacatgctgtcatattaaagactttgtgaaactgatctaattgatttggttcttgtggtttcccagcatgtcattttccttgcattttttatttattttaaaattaacacactggcattgtttggtatgtgaatatatggcagaaatttcaaaaaaaacaataacaatggtttcgtttcttttctagaattgcaagagtcatgacaaaattctccagtcttttgaaattctcacgcgtgtgtgctcaattgtgcacaatttcattaggaaataggagttgaacattatacttggctatcactaatgtattttgagctgtctgtgattttttccatttcgtactaaactcggaggagatggaaccccaaatttcttaattattctagtttctctgttatcaataatgagtaactttccaatattgaacacccttttttcttttccatttggttccaaagtctccttttcatataatgccattctttgggccttccaaatactagttctttttctggattataattttgtatgctgaagacctgtcctatagcttattgcaagatgtataaaaattgaactgcaggtgatggtgaggttttagagtctc

SEQ ID NO: 55886 - DNA, 276 bp, Populus trichocarpa
  Intron number 1 from transcript POPTR_0009s04270.1 (locus POPTR_0009s04270) derived from phytozome v7.0 (chr-ID scaf fold_9; pos 4724578 to 4724853)
ctcacttctccaggtccccttctccttttctttcttctctttttattttattgcccccctcccctctccgctcatatatttaatgggtttcttttccctctttcattgcaattatttgtttccatgtaattaattaccgttggattacacggctctgttttgttttttgaattattgcaaaaatcaaattatttaggttattgtacaattcttgcgtgaattagggttttcttttttcctaaaaaaatgtggcagggagtttcgcggagacggagc

SEQ ID NO: 55887 - DNA, 948 bp, Populus trichocarpa
  Intron number 1 from transcript POPTR_0004s03190.1 (locus POPTR_0004s03190) derived from phytozome v7.0 (chr-ID scaf fold_4; pos 2142013 to 2142960)
atactgcctttttaaggtgtctttttatgtttccttttgttttatgaactttttgtgattggcaaaattcaatttccctccctttattacagcaagtaggtagctttgttgttgttgttgttttgtttagaaatttatgttggatttgtgaatttagtttactatgctgtctgaaaagactgaattctgttgcttattggacagtatgacttgcaatagcaaaatgggttttgcaagttctgttgattagcaaccatgctaatgtttgttgctagaatagaacttggtgtatttgttgatgagtttttgagattttttagcaatatgattgttcttccactgttacaagtcacctcctttttgaggttttgatgatagcatcatctaattccttccccaatatagttggaagattgttaatttgttattctattttcaataaaagagagatcttttttatttttttatccaggcgttggcttatttattcaggtttattggtattgctgtaagtgggttatttagtactgggatttggatttacttcttattaggaatgagtagttaatatggctgaatggttccatttaattcttattaagtgtgatattaggttttcattatgaatttaattaccaattactggctttttagtatatctttctcgatgctgctataggatgtttagcaacactgcaaccattggagggtttctgctaagttgtgtgcttaaggatgaggattttgatcataggaatagccgtatatgtcttatttgcatgtctacatttcgtgtgcatgcacacaaagttcaagtttttgctttctggcatgttagttttgatgtaattgaatcaactctatctgttttatggatgttctaatcattatctctctctatcctttttgtcttcagtgcggaattcaataattcatttgagaattcag

SEQ ID NO: 55888 - DNA, 695 bp, Populus trichocarpa
  Intron number 1 from transcript POPTR_0004s19690.1 (locus POPTR_0004s19690) derived from phytozome v7.0 (chr-ID scaf fold_4; pos 19471877 to 19472571 reverse strand)
agcaggtggagtacagccccttttcttctctttatctaatttgatgtgatcttatattaaattgtaatcttgatggcgtatatttgctaggaagacatcaccttttcttcacttgctttttgcttatcctcctctgtatctttctttttggatgtagtactgtcattgttaagttctttgtgttcttgtgtttttgctagagaacatggtccatttcttatcttattgtgtttgtgtgtgtgtaatttgtttggttgatgtgaaactgttcaagagggaaagaaaagaaagggaaaacattagtgtctttcaagagttcaattgctttctcaataaaatctaccaaaagaaaagagtagtgtacaattagaattgaagcacatccttttcctcttgtgaagttttcctccttttttcttggcttcatgccatatatacaagtaggataagggtgagtttttggttcatcattgacaataaaagaagaagtgaagtttcctactaaaagagaaaaaaatattgtaaatattttggatattttgtgactaatcttatggaaatggacggtttgcttcattattagtgtattgtctcaattttttcactgattcttctttccaagaaaatgctaaaatgttttgtatattctgggtaattcttttgttcattgcaggggatattggacagtcattttg

SEQ ID NO: 55889 - DNA, 615 bp, Populus trichocarpa
  Intron number 3 from transcript POPTR_0001s41700.4 (locus POPTR_0001s41700) derived from phytozome v7.0 (chr-ID scaf fold_1; pos 41403333 to 41403947 reverse strand)
tgggttgcatctgtgattgatttcccagtgctttggtaagctaccctcgaaaattgtgttttagaatttggttttgtttgtaattgcttatgttttgagttgatgaactggctgggtggtatggtggatggaaggttcaattttgctgaaaatttgacatgattctgttattccagttttgcatattagcttgatagttagattgctgaactcaactaacttctttgcgtctgtgttttggagctagttcagttaaagattttgtcatagcccattctaaatgcttgatatttcataacccaaagcttaaggcattaagatatttctctttctgtgttttaagattgcattaccatatcacatgttaggagagtctctgaactttagtaagccttttaaatttcaaggtgcattcccttctttgttttttgctcaatctccaatggttcttcttttccttttgcacgtcaaagatgcttaggatgtgaaggtttctaattaccaatggctgccttgcctgttcattcatgcacatttcataaataattcatttgcataccaccctcatagttgctgataaatttgattttgcaggttggcaaacatcatcacaga

SEQ ID NO: 55890 - DNA, 833 bp, Populus trichocarpa
  Intron number 2 from transcript POPTR_0001s12410.1 (locus POPTR_0001s12410) derived from phytozome v7.0 (chr-ID scaf fold_1; pos 9620173 to 9621005 reverse strand)
aaacagaaggtaaacaaaaagttagcatttttatctccggatatgtcaccttttcttgcctgccatttctatatttatctcatagttatcttagacttaggtgtatatgattattttggtgcctgccaagggatttcatgtcagcaaaagctcagatttttgcaataatctgtagttcctctcttctgtattgattgtccacggttactctccaacatcttacttttctttggtgatgcggagcatactttaaaattgtggtttcagaaggctttttaaaacagatgaggattaagggctggccaaaccattcagtgaacttgattccatgtctaatatgctcatctattgtttacatttccttttcctcatttcataagataagagaacagtcaattaaagactataaaaaagaaatgaaagcatttcttgctaatggtatatgagatttgagaggtccaaagatggagaaaagaacgatagctgagtagcctgctcaagaaggcgcatcatgagtcagcataccagaataattcaatttgcctgagccaggtgaaattcttccaagataccatgcagacaaagaaataagaatagaataggaccttctatcagagattcttagctcaactctgataagaggcaacaaggaacaatccaacagaaagtaagcgtcagcccccagcaagattatttaagaaaccaccaatgaggagtggaaatttcctcgtcttgcctttctttttgatagtttctctttcccctcatgagtattactaaattatctactttttactaattgtttgatttcccattttccaggcaagttgata

SEQ ID NO: 55891 - DNA, 1017 bp, Populus trichocarpa
  Intron number 1 from transcript POPTR_0001s12830.1 (locus POPTR_0001s12830) derived from phytozome v7.0 (chr-ID scaf fold_1; pos 9953533 to 9954549 reverse strand)
caacgttacgttgatcagtttaggcttgtagccgggtatgagaactttttctttaaatctgtttcatctttcattttaattttaattttttgttttggtttaacgttgttttgtgcataatccaggctaattaccgcgttcaaaaagtttttaaagaaatgaatattttaatgtgtttataggaagttcaactctggggcttgtctgtgatgattttgtcttttctttagaagaagcgatgttaatactgttattatggtgtaattaagcagattctttacgtaaaattttgttgataaacatataaatagacctggactccaagcatcgactcctctttactctgttgttgtacaagtctttggttgaggaatgttaatcattatagaattacgtggctatgttcttcctccaaaatccaaatcgtgatactcatatacaatggacagacaagatgtctctcttacttgctcagatggctgtccaaatcattcttctgtgctgtgaaagactttcagtgaagggtatatatatatttttgactagagctaccttgtccttgtatgcagcactgattttagtaggaaagctacatgatgcgaaagattctgctagtttagtcatgaagaatgatttcttcataaaagaaaaaagtttttcgtttcaacaagtgacattaagggctgattaaaaatatatctttctgggaagcttccgtctgcctaacaaaattctcaagcttagtgacagatccccccttaaattatgaactttctgggatctgaacagtttgggaatcatagtagctttgctgtcatgttgttcacattgatattgacaattgacttggtggactccttgacacatggcgctttaagatcagtgtgtgcttcttgtgttagtcggctttttaggaaaatgttagatcttactttttttctactgctattttctttcatcgctccattctgattgctctatgaaaaacaaggtgcattccttacaaacttgacaaga

SEQ ID NO: 55892 - DNA, 615 bp, Populus trichocarpa
  Intron number 3 from transcript POPTR_0004s01900.1 (locus POPTR_0004s01900) derived from phytozome v7.0 (chr-ID scaf fold_4; pos 1169654 to 1170268 reverse strand)
gagatatcgccgtcgaccaatatcatcggtatctggtactgacatgatttttatcacccttcttcttgtctttttttcatctgtctctaaacatgcagcatttttcagaataactactgtaattaggcctaataatgtagttgaatatgatatacaaataaataaattaaagaatagatatcttaccaacttttatctcacataagaaatcattagtcgtatctctgtggatttatcagtcatccatgggagttttttaacaggcattggttaggttaatagatcccatcactaaatgccagaataactaaaaatattgattacagtttggtggatgattagtcattaatctccagaagactcaaagggaattgctggaagtaaaatataaatattgactaagccctatattccattataatattatgggctagatatgcatatgctgccaaataggatgaataatttaaagtgctactgctcaggtttcaacagtgatgcagcaactcattgaatttttgctttctgattattataaaacaagattatgtatcagattctgaacatcaagattttggctaaagatttgtatgttgacaggaagacattgatcta

SEQ ID NO: 55893 - DNA, 474 bp, Populus trichocarpa
  Intron number 3 from transcript POPTR_0009s04960.1 (locus POPTR_0009s04960) derived from phytozome v7.0 (chr-ID scaf fold_9; pos 5178434 to 5178907)
aggtcttttttttttaatcttgccttcttatcttagttacttgggatttagtcgacctgcattgatatgggaaccactaaatttcgaattgccagcttagattataaagatcaaatgaattatgtgaaatatatgcaaccgaatgaatgcatcaaacaaagcaatcaattgagcacaagatctttaaacgaagaaactttccgagtcaaaactttttgttgactcaatttattgttgttaccatactgtggcatttgatctaggagattgatgaaaaattgttgagttagttgactgcaggcctcgtccatcttaaattaatcatagacacttgtcttcctatcttctctgactgtaatggtttgtagagcgcaaaattttacatttgatagcttggatcagtccaacatgttctaaggttgcttaatggtatttgcaggtggaatcgaccctagcatcagacaaagcactaga

SEQ ID NO: 55894 - DNA, 757 bp, Populus trichocarpa
  Intron number 1 from transcript POPTR_0012s00400.1 (locus POPTR_0012s00400) derived from phytozome v7.0 (chr-ID scaf fold_12; pos 131705 to 132461 reverse strand)
gcctctctcaagcaagcccaagtaatctctttctgttagtattactgcaaaaagggttcaactttttatttttattcttacatttgaatggctctgctttgaaattggagaagatcaattacccgaaatgaataacgtaaagagattttgatttgcctaactgataatcttttttcctcagataacatagaactagctagtttcatcatctagttacaaggagattactatgaaagtttatgagttatataaaatagagttttactcctagctgtatcagacttaaattgtccgaacgctctcctcaacatgattgcagagcggcttataatatttgctttatgaccccccccccctctatttgttataatgttgtatgagcttggaaattggaatactaggttgacgaagatcccttttgtataatctaccaagtagtttttgctcctaatatcgaaaaagggtgaatctttgcttgatccagatgagttctatgtctcacatgcctttttcttgaaacgcggttgagtattccaggggagaatgtagtggagaggaaaaaaaaatccttcagaattggtttatcattggatttgtgtttggagtcaatgtacagaacttgattgattctgaaccctacacaatggcctgaattaattgtggctgctggatccattaagagatgttgctaatgtttaacaaacgatatgcttcatgtacaggctttagctggtggacccttaatacaagcacgcaa

SEQ ID NO: 55895 - DNA, 899 bp, Populus trichocarpa
  Intron number 1 from transcript POPTR_0011s11890.1 (locus POPTR_0011s11890) derived from phytozome v7.0 (chr-ID scaf fold_11; pos 14667880 to 14668778 reverse strand)
cttctatctttgtataaattctcgacctttcctggtcttttgtaattttgtgccatgtatgtcctgtgcactgtgtgttggtttttgcagagccagagactttatgggctgttttcattttacttatcgttacacacatgggttttcatgttttttttagttgcatttctccttggcttaaatgggacacccggtgtttgttcacttatgtatcaagtggcatttgacatagggtttcatagtggtggtttaaaccttgatgataattcggtggcatttcgaatcatttggttaaagtgctacattgatggcttcctgcaactgtaacaattttgctggatcattgtacttttatgcaatcttcctattatttgtaattctatgaaaaagttttggttgcgggatataacctaaagtcatctatttcttgcacttcatgatgtaagcaatttttcatgtcatatatgggttgggaacaacattctagagatctttgctttttatgcaattatttgtgtatgcagagctagcacaatttcctactatctgcttcctcttttttgctactttgcgggtcattttgggtgaacactaattttgaagataatttcacttttctgcaatttacttacagtacttcaccttttgtacccaaaatgttcttcttgcagcatatatgctattgtcctagctttgagattttgattaccttcatgttgacctagtggttcttttaagttacacttctcatttggttaggctgactcgcttctcttccataataggtgttttttttttttttttttttttcctgttttggatttcggaatggtattgatagaaatgtcaccgaattgttttcttatcttctttgcaggttgttgctactttggggacct

SEQ ID NO: 55896 - DNA, 531 bp, Populus trichocarpa
  Intron number 3 from transcript POPTR_0014s04800.1 (locus POPTR_0014s04800) derived from phytozome v7.0 (chr-ID scaf fold_14; pos 3708073 to 3708603)
tgcctcaatcatctccccttcaaggattggcacatgtatgtctccatttttctttataattacttgcgtcccatttctatttttcatgaagagataattaccgaattctcctgactaatgaattgcttcttgtaaaactgtacaaccatatgtttttacagaatactagcttcttttttctttttctttttcttttatcttggaaaaaaaacatttatgtgataggaatgttagatcaatatgcacaagattcctataaaaataatcaagagagccaactttctttattttcgatcaagggcataaatatatttctgcacacattttgatcctctgctaataatgtaagaacacttttaacagaacataaactcattttccttttctctttatatataaatcactatatatctgtagctttgtacaaaaattttgtagctcccatttggaatgactcaggaaagcattcttggcactcaagaggcatggctacctgttcatcacccaccagcttttcagccaggaacaaca

SEQ ID NO: 55897 - DNA, 884 bp, Populus trichocarpa
  Intron number 2 from transcript POPTR_0012s07670.2 (locus POPTR_0012s07670) derived from phytozome v7.0 (chr-ID scaf fold_12; pos 8585635 to 8586518 reverse strand)
ctctttatctggtgcgttcatatctccatttttccttattcttgttttgttgcaattatgattaagacatgatttttaggaactatgttctgcttttcattcttacgtgtctatttcactttatagaattattctataccttaattagtatacagctactgttttgagaatttcctgtgtgattttggtggagagagtatgatgtgatgttttcagtgactaattcggactatttatgttttttctcaacaaagtactgagattaagctaagtgttggacttggtggtgaaagaagccccagctgcggagggaaaacaattttgacgtggatttgtattcaagtccttgatttttgtatcttacgggttttagctggtttttttctttttgtgaagttttcttgctttgattttgaaacaagattttatgtctgttttttttctctctttcgatattctaattgtttaatttagaaaatattaaacaagtgaactgaagcagaaatgtgatgaacttctatcatgaccacccatattccacatcaactctattttaaaagaagatgaaaaaggaagtcttcaacatggatggctttgaatcaaagttaacccttttgtctgtctcagaggttgcaagtagctgtaaactcctctaaagatggagatttagacttgtatttatcttcagagtcccatcaacggtacctggagttcttgaaagagttcatgcacgtttgttgggcatttatccagtatcataattcacatgacgtcaaactgttgtcaagtatatttcatcttataaagttctaaagaatttaagggtctgtttttcaccttcattgttggttttgaaggctggagaaaagaggaaagaagaagag

SEQ ID NO: 55898 - DNA, 884 bp, Populus trichocarpa
  Intron number 1 from transcript POPTR_0011s10690.1 (locus POPTR_0011s10690) derived from phytozome v7.0 (chr-ID scaf fold_11; pos 13275018 to 13275901)
ggtcatttttatttgctggtggcctttctgggaatgtctgtgctctttccatcccttcatggcccgttctgaaatcatttcctgcccataacaaaccagtatcttgcctcacagtcaacaattaacagtgatgaagtctgaaaaaacttcacttggaaatggacttttcttggttattgaggtttggccagtatgattctgcaaaacaagttccttcacgagaatgatatttaagttagttttttaatttaattgctaaaaaaaaacgaaagaataaaaatggacgatgtagcttttgtagatgtgtacattgagtttggagtgtggttttgcttaaatatatattataataattttttttaaatttttttttttatattaatacatcaaaatgatttgaaaatactaaaaacatattaatttgaaataaataaaaaaaataaaaaaattaatttttttagaaacacttttaaaatataaaaataattttttagaaatacttttaaaatataaaaacaaataaatattggataataatagagatagcactatcacattgttatgttgcctactgtacaatagcttgcccatgcatcgggagctacacctcacctgggcctggccaggcgagatgatgtgctgggctgagctgttacttctttcttcttcttttttccctgcaaacttcaactggtcacttctaatttctggcggtgatgatggtaccgtgattgtgaagccaatctttcagatcgtagggcaaacaaaagatgagaatattagcaatttcatgtttcatagcttttacgcaaatgatggtccagctacggctgttgtaaggggtccagccactctaccgtaatttcttgctcaacagattgcac

SEQ ID NO: 55899 - DNA, 645 bp, Populus trichocarpa
  Intron number 1 from transcript POPTR_0014s03200.1 (locus POPTR_0014s03200) derived from phytozome v7.0 (chr-ID scaf fold_14; pos 2562691 to 2563335 reverse strand)
ttcagtttcaactactcccaaacgcatcccttgcggtacttctttttgtcttctcttttagattgcatttgaagttatggatttttacttcgttttactgtattttattctggggttttcttttcgaggtcgaatttgattagtttctgctttaattttattggtttttgagcctgctcagataaaggggttatctttgaaacatctactggtgcagccttgaagttttaacatgttgtgtgtgttgttttgttcattgtttttatgttatttgctgatgcacaattgtggatgacaacttcaagcaatcacgcatgttttgctagggggttaaatcatgtttttattggtttgttttcttgggactatttttcctgccttttttctgtgtagatgttggattggaaaagatatgcttgacactagaagtaatgagccttgacacgattaagaaaagaagcttgccttggggttcaaatgctaccatatctgtgtttatgcatctggataaattgaatgctgctgtttttttatatgtagaatacgttgtgatatgtggtggatttcttagtttgatagtttgtttatgctttgaacttgtattttgtgttgcaaaccaacgcagatttcaggtctccttttgca

SEQ ID NO: 55900 - DNA, 167 bp, Populus trichocarpa
  Intron number 4 from transcript POPTR_0009s05040.2 (locus POPTR_0009s05040) derived from phytozome v7.0 (chr-ID scaf fold_9; pos 5224619 to 5224785 reverse strand)
tagccaacctaaaaaaggaacagaaatacgatagagtaagacacaaactcaaaattcaagaacaaatccaattaattttacaacttgggtaagtaattattatatacgatctaatacatttcataatctttttttcttctttttttggctttaacagaagcaggctg

SEQ ID NO: 55901 - DNA, 385 bp, Populus trichocarpa
  Intron number 1 from transcript POPTR_0012s13910.1 (locus POPTR_0012s13910) derived from phytozome v7.0 (chr-ID scaf fold_12; pos 13858002 to 13858386)
ctccaggtacgtaattatctttgataaatatatatcatatctatctcatatatatgttttcaatctttctagcacttcaactaaaatattattcgttaaaatgtagtagttccataccatttgcattcaagctacgtacgtgggagagaataaaatagagaggacataatttttaacaatccaatttcttcttattattatgattattaagtaaaaaaccacaacaatataattagcctagaaaactatttcacgtgttgactttagtcagatcagattttgatatcttagacacagcttttaatcgctagctagtgcaatttcttatgctttccttttggtcattccagcaactcccagcacatttaagagctgaagcagcaaa

SEQ ID NO: 55902 - DNA, 904 bp, Populus trichocarpa
  Intron number 1 from transcript POPTR_0004s07420.1 (locus POPTR_0004s07420) derived from phytozome v7.0 (chr-ID scaf fold_4; pos 6120335 to 6121238 reverse strand)
tttcgattgaattttctccatttctctctctacaggtacttgctagcctattttattttaagatttacagctatagttacattaaatggaactcatttcttgatttagtttttttttttaatgcaatttagttgatgtattggttaattgagattttggggcggctgggttttttgttttgtatgatgtgcttggtttgttgggtttttgatgatggtaaagatgcagacttttgaagatttcagctttagagcagtaaatagaattacgggttttcctttttgcttccttttactgattgtttaagcagtgaaaaggattttttgggttcttaataaagctaaagatgccgaagttgaagttcctcaaattctgttttattgaaagtttatagggctctgagtttattgagatttgttatagcagcatcaaaatcgagctcggggtttcatgggcttttctttttatgtcttgttattgattgtgtttggctgattttgttaaatgtattgatttagtagataaaaaaaggtttttttgggttcccaatgaagttaaatttactagttttgaaatttataaaagagttttagagcttaacaatttctcggggtttctctctgatgtatttttattgattgtttacgattaatgttgttaaaaatatgttttaattttgatttcgggtttgttgccttatcaatgaagctaaagaaatgaagctaaagatacagactttgaagttttcattttggtacacattaatagccagcctaaacaggattttgtagcctcttggtttttgtgttctatttcttgttattgattttttatgttccattttgttaacttcatgatgttttttattttgttgcaggaatacgatttgagaaactttgattat

SEQ ID NO: 55903 - DNA, 998 bp, Populus trichocarpa
  Intron number 1 from transcript POPTR_0014s04510.4 (locus POPTR_0014s04510) derived from phytozome v7.0 (chr-ID scaf fold_14; pos 3485720 to 3486717)
gttctatcctctcctgtctaagccatcttctcctcgtaagtctgcttctctctctctctctctgctcctgcaagtgcctcgtgtttatgttttctgggtttctctcaattcccccctctctcaagcatggttattgtccttctcttagtagaacaaagtcgaatgatataattttgtttgtgcttatgacatctacggatgaactttgctagctctttcttcttttttgatgaatccccatgcaaactgatgcttaaatttccttgcgatactaattttaccatgttgttcttagcttcctagtcttcttgtgttagtacactagcagtaagtaggtgtggaggaagtgagacttgtggtgggtgctaatgtgaattattgtggtgggtgctaatgtgcttgttgtggtgggggaatgcttattcctcaaacgtggaagtgaaacttgtaattggtgctaatgtgaagtgatttatacgtcttaatttggaaataattggatgtgagatatgatatcaatctaagtgttttttatgttattaaatgagatctcaatagtataattttatattaatttttaaaatactttttaaaataatttttttttaagtttgaaacttgaaaaacttcattatttactcgtgattattgatttaattaattagaatgaaacgataaggtttaaatttgtaatttttgatcattaagcatctaaaattatattaaaaaattattttaatttaaaaattaaaatttttagatgaactcttaataatgtttttatattactttttctaaaagtaataacatatgtggaaaccaagaaagttgcatttacaataatctgaggctacaacgttggaatatttaataatttatagtttacttttgccccttggcaaccatacaagtccggaattgatttgattttttccgtattcctgtatcgatatagtttttgcttatgtgagctttgtggcagacataaaccttatacc

SEQ ID NO: 55904 - DNA, 630 bp, Populus trichocarpa
  Intron number 1 from transcript POPTR_0011s00740.1 (locus POPTR_0011s00740) derived from phytozome v7.0 (chr-ID scaf fold_11; pos 372977 to 373606 reverse strand)
agctctgtggaatcacccagccggtcccaaaaccagtcagttttcctttgctaaaaaacttttcttttctttcgctgaattatacattccaagcttagctattcagaatttcttccgatccgatccgatccgcgactaaaaaatttatcacctgcgattagattggattcagatttgtgtgttctacgttaaacaatccaatttaattcttttaatttcattcctctgtattttattttttttatcaatcttctctgttttcttagaattattttgataaatattggattgattttcatcccattatatattttaatcggggaacggctataatatgatggcccaaatcagctaaatggcttttcatcaagagggattatctcaagtttggcttgcagcctcgtgatgggttttgtcctgggtagataggtggcacctatagcttataaactgtataagccatcgactcctggtgcggtatattggtattattagtatatataagctaaaagaatgtgcttttaagactctgaatatattggctggcgaggatgctgtttgattttgatttcaataaatattgtttgttgggttggtttttgcagttcatttttgggcacctacttttaa

SEQ ID NO: 55905 - DNA, 518 bp, Populus trichocarpa
  Intron number 5 from transcript POPTR_0014s13160.1 (locus POPTR_0014s13160) derived from phytozome v7.0 (chr-ID scaf fold_14; pos 9675799 to 9676316 reverse strand)
ccaaaggtaccttgttactgtcagcggcagtaagcagattttgctgttcttttttttattatttatctttaagatatttttgttcctttccactaaagtaatttcaattgaaatgtgctattatgcattagtgtagggatcaaatcctatttaaaaatcccgtgataaaaactgtgttttccatgaatgttctttgtttgatcattggcattgaattttgtttgtaagattcaacattttgataggacttgttttctaagtatgggtgtaggcctctgttgtttctttatatttctgtgaggttatcattgtaagctgtagacatctcgtctttggattagcttactctatggaaggacagctgtcttatatgtgtaattttgaatatttttatgtcatttcaagccagaagaacatatgctgatgctttgtgcttatgcacatgcccttttccatcctctataaaccatgcaatggtgacttttccaattattctctaggtaaaagagttctatctg

SEQ ID NO: 55906 - DNA, 491 bp, Populus trichocarpa
  Intron number 2 from transcript POPTR_0012s13540.1 (locus POPTR_0012s13540) derived from phytozome v7.0 (chr-ID scaf fold_12; pos 13656075 to 13656565 reverse strand)
gaggtggcattcttgacacgacaggatctcttctggtgattgccaacactactcatatgcctttaaattacgaatatattaaaatctttcagaatatttcttttaggacatgaaataaaatccaacattttctaaaatttatgaagaagtacctgctggttcagatttttcttaggttcgtcatcttcttgatgggcgccatcctgtttttcaaagtttatttgagttaaacaaacactaaattaatggaaagggacaacgatacatcctgtttttcttaggttcgtcatcttgaattttttttctatcaaaatatatttttgtaagaacatacgcactgcatttcccaatataataaagcgaatcaacttcttttaataaatataataaatatatgctacttaactaaattcagtaagaataatatttatgtcttaatttgcagccctaacaatatgattcttttgtatggaaagggacaacgatacacc

SEQ ID NO: 55907 - DNA, 445 bp, Populus trichocarpa
  Intron number 2 from transcript POPTR_0001s33770.1 (locus POPTR_0001s33770) derived from phytozome v7.0 (chr-ID scaf fold_1; pos 31926041 to 31926485 reverse strand)
caaggagctgttggtgttattcctactgatactgtgtatgtatgccgtttgcttgactgttacatatataagcatcaatggaagttttgtggtttcttggtgggctttttatcttgaataatctcttctctgtttttttttttttgctacgtgggtgtagtaaactgtatggagttacttgtgtgctttttttccccagacttgttgaactgaatttatttggatatgattacatatttttattggtataaatttgaattttaaaagttatttccattgaattgggaagtttgagatgtacaatattggttcctttgcggtccctgcatttttcattacagtaattgtagatttaaagttgagtgatttaattgtcactgattgtgaattttgtttgtgtgaacgttttgcatgtgatcatttactttctttgttgttgttaggt

SEQ ID NO: 55908 - DNA, 337 bp, Populus trichocarpa
  Intron number 2 from transcript POPTR_0012s12100.1 (locus POPTR_0012s12100) derived from phytozome v7.0 (chr-ID scaf fold_12; pos 12382399 to 12382735)
cttgacgaacgctactggaaattgcctgagaaagggtaagaaaacatcttctcttttttcaatgaatttgatggaaaattcaacttatagcgtctgaaattcaatatttacttagttatagaaggaaaagaaacttagttttgtagcattccatacataaactttgctaagcaaacacagacatcaaatattattaaagaataatataaattatattttaatcctcacctaacaacagttaagtttttggactaagataatcatttgacaactatactattcaaacttcaatattaatgcagcaaggtggagccagcagagctacttcaagtgtgtt

SEQ ID NO: 55909 - DNA, 392 bp, Populus trichocarpa
  Intron number 3 from transcript POPTR_0001s35320.1 (locus POPTR_0001s35320) derived from phytozome v7.0 (chr-ID scaf fold_1; pos 33678981 to 33679372 reverse strand)
ctgccgccttgtatgtgttgtttacttcttctctcttttccttttttttttttttgttttttcaaatgtttattatatttagttttgtgcaattagttgttaaaaacataattttggctggtggatgagtcaatcctagattagtacaaaactatattttgagttattcatcaacacgaaactgctactgtttttttttttttttttgtttaatgtcttctgaaatgaagtggcttggtacaggtctgatgcattttttcacattgttttctcttcacactgaccttgccaagtattgaataaatagaggaaaacaactttgaaattattctatctttatgttatttgtacttaataattgtagggaaagtcgagggatccttacgaaatac

SEQ ID NO: 55910 - DNA, 643 bp, Populus trichocarpa
  Intron number 1 from transcript POPTR_0015s13780.1 (locus POPTR_0015s13780) derived from phytozome v7.0 (chr-ID scaf fold_15; pos 13569761 to 13570403 reverse strand)
ccttcgataccaactgttcggtgagtgtaatttggttttctgcttttttcttacatacctttatgactgcattcactccttggggcttaggtggtcttaattctgaaagaagaaaacaaattctagtcgtcaactcttaactttagagtttgttttagcaaatgaccattggttgtgcaaatatgataaaaatgataatctatctcaatgtatgtatgtatacatttcaaaattaaatttctggcagagtttatagataattcacatgactcagttaaagaagcagtaccaggtagaacttacaaaatggaatctacccttgtagctgaacgttttcaacatggtcactccttgcattgcttatgatgttttggaatctaagaggttattgttgaactatttgtaagttgttagtgcaatccactttaattgtataatatgacctggctttatcgtgcttggtatttgcattgaaattaggctgttgaaataagaatattaataaattgcttttgaaattaagaagtttgcggttccagagtcatatgcaattttctgcttgtgaaatttttgaaactgggtgtgtgatgatgtatggttttatttggcttgtttgcagtttgagtttgagccagagtacttg

SEQ ID NO: 55911 - DNA, 473 bp, Populus trichocarpa
  Intron number 1 from transcript POPTR_0009s16680.1 (locus POPTR_0009s16680) derived from phytozome v7.0 (chr-ID scaf fold_9; pos 12626627 to 12627099 reverse strand)
aggtggttcctggtgttgttgaaagccttaaagtaatcaacctttattgtttgtttgacttagtgaattgttttgttgtttattgtgttaatcattagttaatgatttgttaatggttttgttaattatcatgatcattgaatatttgtgacccactaaagggacatgttgatttgatggaagggattttcccggaagtgattccgggaagaacctaaactagtattattctatagcccctcatgatcaatagtctctcctgtgataattatgttttgcttattcaagtttgagttttaggtagattgaaatcttatataactgatttgacgattatttgtttcattttgaataattactttttgttgtgtgtgatttgttcgttattttttttttatatatataatggtgtgttgatggtgacgaatgtgtttttaggtgataacaaagttttgctcggagagaattgcgaa

SEQ ID NO: 55912 - DNA, 726 bp, Populus trichocarpa
  Intron number 1 from transcript POPTR_0804s00200.1 (locus POPTR_0804s00200) derived from phytozome v7.0 (chr-ID scaf fold_804; pos 7601 to 8326)
cagttttgaggtttaaccttgcgcttgtttcaagcatggtaaaaacatgatggtctgttcatttgtttcaggttaacctttccttgctcctgtggtgattgtgtggccttgtacatcttacttctaatagctcaaaatttggtggaatgtggagatctcttccctacttgcacatttcctttttattttttgtggtgatgctttagaagagtgtcttttaatggtagattctcttgtatcatacaagacagcaagcattgttttactgtggatgtttttaatactgcattgttatcgaggatgaattctgctgagcttatttatctagattttgatctattcatcgttactggctcttctgaactggagaaaccacttctaattgccctgtcgggagaaaaggaggttgtgtaacttaccctaaaagactagtaaacacaagctcatgcacgcacacgtacatggacttacttcaaaagcctttcctaagaatgtacttgattttaatttagttgttttgatcatatttctcatgatccttgatcattataagaagaaataatggagggatcgccaaaacctccagtctcattgcgggacaaaatcctcagcttggagcacactattaaagaagcatacaaaagaaagccaatctcacactggattgttctagctttaagcaccgcggcagtgctcatttcctgcgtcaagccttctaacacgggc

SEQ ID NO: 55913 - DNA, 1034 bp, Populus trichocarpa
  Intron number 2 from transcript POPTR_0015s14100.2 (locus POPTR_0015s14100) derived from phytozome v7.0 (chr-ID scaf fold_15; pos 13829817 to 13830850 reverse strand)
gtggaagggccattccccttagtgttgatcataaggttagttttttcagtcggaaaacatcatggaaatcttaatgtatgtatgaactaatccaggccgtccattactggtcatgatttgatcatggtgactgttggaaatttgtcttcattgcaaatggggattgcgtgtttctgatgatatgaaacacatggatttgccaacttgtcaaatgttacctattgtagataccaggtggcatcttgttgcgcagggtggggaggagggacatttcttggatgatggtctctagaccaggtgtctatatttgcttgtggaaaagtcgtgcatttgacatttggcgagcatgaaggaactagctatgatgttccatttttgttaaaagaatccttttgactagaactttagaactatttgcatgattttagcaatatcatgatttgtaattttgtattgtttggacctacatgcaagtatgagacagaattccaatgcttggcaaggcaacttgacgtttgcaacatactgttcctgagtgcttttactacttcttcttcttctttttttaatgcagggtttagcccctgtttggttagaacaagattgtcaatgaaatgaaaataagactccaatctaatttcatatgggatttatatcttaattttatctgaagtagaatttatttgctatccacccctatttagttattccacttaaaaataagatatcctattttttgttaattataatcttgttatcggaaaattaaatcatattaaacaaaaaatgagaaggaatttcattccatcaataattccactgcctagtttgtttgcacatgttatccatttttccaatagatggaaaaaattcttgttacttcctgagatgtaagaacattttaaatctctctctctctctctccccttcggtttaatttgacttgctctctctttatctttttggtactctttaatttgattaatgaataaaaaaaataaattcccaacatttgttgcagccggataggcaag

SEQ ID NO: 55914 - DNA, 675 bp, Populus trichocarpa
  Intron number 2 from transcript POPTR_0015s09960.1 (locus POPTR_0015s09960) derived from phytozome v7.0 (chr-ID scaf fold_15; pos 11028720 to 11029394)
ccggtttattttccggtgaagaacgaggctggtgagtcttaactagtcgttgtcgtcatcatcatcattgttattgttattgttattgttattgtgcttttaaatttggaagttaaaattcagatatggggaatttattgggtgttgaaagttagtgttttgttaattacttttggtatctctagttagtttagatcttaaaaatggtattagaaacaagattaatggagagtttgatatggaagttggaacctacttaaggagctcaaagtcaatgtgattgtgtggacatggaggaatggagatatgagagatttgaaaaggacactgattaagagaaagttatccacttgataggtgcaataaggaccaaaaatgcatcattgacgaggagtgttttaattctagctgatgctgaaaatattttcggttaaggtggcaagtgcaaaggcacacaaatggtaggggtttagaggatcatataacccttggggtggcttcaggcagttagagttgaacgctttgtgagctgggtgaattgagttgtttctttctcaaaccatgtcctagttattggaatttgtgttcttagtttcttcacaaatttgtatatgatgttataaatcggacactttcagtaatactcatttaaagggtcctattgttgtatctcag

SEQ ID NO: 55915 - DNA, 864 bp, Populus trichocarpa
  Intron number 1 from transcript POPTR_0015s00690.1 (locus POPTR_0015s00690) derived from phytozome v7.0 (chr-ID scaf fold_15; pos 406933 to 407796)
ggctcgcttcggcttcggcatccatttctctctcggtatagttaacaacaacatagctcctctctttctctaatttcttcatgttcatgttagggtttcaagatttgatttctaaaccctaacaacttccaggacttgaagattacagcaattaattgaattcttgcttaataactgcgattaagcaactgtaattactggtttttattgatctagtgttctccatcagtatttatttatacattttaaatattgagaaaattaatctactttaattaatattattattattaaaggaaacgaattgtttgaaattgatgatgagaggctaacattagcattttcaaacactccgctaattctcgcttgtgttacttttattgttggggttgcgaaatgtgtatagtgatgtgggctgagagacaatctcttttacttgatgtaacgaagaagagcttaggacgtgctaactaacaagaataaggaagttttcaaatggagtgttaatcaatggtctctaatggctatttagattagttgttggctgactgttttttttttttttttgcgggggggtggggttgagtcagtaactgacttgatgaattcttaagtcggtgaattcaatcagggaacggaaaaaggttttaaaaagtggcgtgaaagacagatgccccctagccttgacccgagggtaacttgcaaagtttgcgttttttgacaaaagaaggggaacttgggggtgtatttgtattttagagggttgtttttatcaattctgttagaaaaaaagtgagctgagtaaggtaagtaaataaatatatgttacttgatatcatgacacaaatgctttctttatgatag

SEQ ID NO: 55916 - DNA, 561 bp, Populus trichocarpa
  Intron number 3 from transcript POPTR_0015s00690.1 (locus POPTR_0015s00690) derived from phytozome v7.0 (chr-ID scaf fold_15; pos 408296 to 408856)
taagagaatcagaaattgaagatttattttacaaggtttgttttaaatgttttcatgtgacgttaagtcttgtttgcagaataatgagatttgttcattttcagtgagttgtgtattcaaccttatcattgttattgacctcagaaataatggctgcttttatgtactattaattatgtacatgcctgcttgctatttaatattatttccataagcaatcttatttgtttctggcattccatccttgcttcaaaacatattaaaagtccacacaggcacatctgtgcttccaatcaggggaatcaaatattgaagaaaaaaacaagcattgctttgctcgttcatgtacttccctgaggctgaatagagtgagtgagtgtgtgtgtgtgtgtgtgtgtgtgtcacttatgcaatgcttgtgtcatttgtattatagcatagtgaaatagctattactggaccatttgtagattgtatatgacatggtttgtatatgttatgcagcttcccagtggtttactatggctaagcttacagatttttgttatttatttttgtagt

SEQ ID NO: 55917 - DNA, 293 bp, Populus trichocarpa
  Intron number 1 from transcript POPTR_0011s09820.1 (locus POPTR_0011s09820) derived from phytozome v7.0 (chr-ID scaf fold_11; pos 12268478 to 12268770)
ttttctatcctcatctttcatctcacattggagaggttagtccttaaatgtgattccatttcttttctttattttttccaaggtaaacttttgatccttatagtatctacagatttggagatgtttctgtatatagcaaagtgagctgtgaattggttatagtgattaataataattttatgtgttgaatggttagggtttttggtgctgtgattgtttgtttcattcattcattgttgcttctttgtgtttattcaattcttgcaggtttttgtgcttcaaaagtgaagtga

SEQ ID NO: 55918 - DNA, 421 bp, Populus trichocarpa
  Intron number 2 from transcript POPTR_0011s09820.1 (locus POPTR_0011s09820) derived from phytozome v7.0 (chr-ID scaf fold_11; pos 12269126 to 12269546)
ccccatctgtttcttggtccgtgtttctatcattgtctttctatctagtttgtttctgtctttttctccctcaagttcattttggtttttttagctcatttcctttgtgtttggttgtttgcaaagctgaagaaaaagaaaggaacttttttcccccttacattcgctttaatgttctcttgaaaaaaaatgaagtatttgattgattctttcccttctttttgagagacctaggcatattcttttttatataccatttttttccctctcccattgttttgttggtgaccaaagagaaataatcgattttataaagctaagatttaatggtattagaccctgttgtacattgttggtgtgactaacctggcccttttgttttgtttttgtcttagtattatccgagtctcaaccgatcaag

SEQ ID NO: 55919 - DNA, 411 bp, Populus trichocarpa
  Intron number 2 from transcript POPTR_0012s02630.1 (locus POPTR_0012s02630) derived from phytozome v7.0 (chr-ID scaf fold_12; pos 2145122 to 2145532)
accgttacttgcgtagtggggtacttggttattctttatctcttttcatgtagttgaaaaaagggggggataccacagaaaataataatatgagaaattttagttatgatagcctatcttgaatgtctaactacgctgcttttatacaggcacagaagaatgtcataaaaagaaaccaactcgcaataccaaaacaaagttaatatttgaatttgataagaaatctgtagatacccaaaactgtctaaaaaaattatgttcaaaatcttcttaaattacatgttagcggctacaagtctttgacaatggttgacttgatttattttttaacctcaagtctacctctgtcactcgcttcatgattaaaagttatctgagtaattgaatgaatgtttcagacagtttcatctt

SEQ ID NO: 55920 - DNA, 423 bp, Populus trichocarpa
  Intron number 1 from transcript POPTR_0004s16570.2 (locus POPTR_0004s16570) derived from phytozome v7.0 (chr-ID scaf fold_4; pos 17004469 to 17004891)
ccctgcctttgcaatcccatctcaaatttctcttcgtgagttctagaatcttgatcttgtttctttattatatatattttatttttagtttgtgataaatacatgcctgtttttggaagtattagctaagatctaggctcggcaaaatggtaaaaacttcattgttttcatcaaaagctcgatcttgttattttttttatcccatgctattatttggaagtaacccatcttgtttttcttgcaaggatggattcttttgatgtttataagtgaatacagtttgtctgccattattgttgttccgtgtgcttaacttactgaattgaatttactttatttgtttgttaatgaggctgattctcagtcttcgtttctctgatcctatcatgtggttctcctaaagcaagattaaaagcaaaacca

SEQ ID NO: 55921 - DNA, 608 bp, Populus trichocarpa
  Intron number 1 from transcript POPTR_0004s18830.1 (locus POPTR_0004s18830) derived from phytozome v7.0 (chr-ID scaf fold_4; pos 18568113 to 18568720)
ttggcctggagagtttggctcgcattcttctaaaggtactaataagttttgctgcatcatgagctagccaatgatctttcttttgcttgtaaaaactaaaataattgatagtttgtgtctttaactagtggactccgtttcatcaatgatatatattcatagcatcatttgaattgctgatctgcttcagaaataatctttcttcaagtctaatttttgcttcaagttccaaataattgtgagactgacttgatttatccaattatagagagggctgcagaatttgcaaatatagcatatgctctagctgatgatcaaacaaaaatgaaccttaaagaatgtcgccactgaagttactggatgttagagtaatatatatgattttttggatattcatttaaaaacttcaatttttttttattaagataattttttaatataatattgaagtcttgataaattaatgattacaagtttgaattttattaattccaatctaattaataaaaattaaatataagcaaattttatgaagattttttcttgaaaaaatatattaaaaataatataaattatgtatggatatctttcctaaacgataggtatag

SEQ ID NO: 55922 - DNA, 478 bp, Populus trichocarpa
  Intron number 1 from transcript POPTR_0015s07880.1 (locus POPTR_0015s07880) derived from phytozome v7.0 (chr-ID scaf fold_15; pos 9158028 to 9158505 reverse strand)
gccgacaggttctttcttttttattttctatgggaaaaaagtttcctgctttgcttgtcatttgtttagaaaagggggggttttaatgttattctctgttgtttgataaaagagaatttgtgggaggaaaaaagaaaaaaaaacaaagaaagttgtcattttttctgttaaatgaacacacaatgatttaattttgtgtttaaagatgatgtctgtcaactctggattcggttattagccattgtttgtagattaggaaaatgcatgcttaattcatgttggctttggaattttattaggcagcaccatggaaaaataaaataaaagaagagagtttctgattccataagggttttttcttcctttttttttaaaaaaaaatggaattttgatgtcttcgttagatttgcacagagaactaatgtaacaaatgtatgtttcaggttggggctggttacaaccataaaggtgtgtgtca

SEQ ID NO: 55923 - DNA, 913 bp, Populus trichocarpa
  Intron number 1 from transcript POPTR_0011s14640.1 (locus POPTR_0011s14640) derived from phytozome v7.0 (chr-ID scaf fold_11; pos 16980966 to 16981878 reverse strand)
taccatctctttaccacctttggcctcgctaaacagtgagttaatccttcttgtccctctctttctctacttctgttggtttcttgaatttctttttatcatgtatgaaatgattggtgtttgtgattgtacgctcaaaaggtatatatctgccttttgacttcctgggtttgctttatttcctgctgctttaattttttgtgttgcagtgttggcctactgtaaatcttagtgttttcttgatataccccagttccagggtctttttttgaaagttttgaaggttttttctagagaagtggaaatttcacacaaggttaactaccatgacgactaattaagcacaggatgtataaagagatactgtgtttaagggtataagatgtgttacactgtgttttaggggttcaaggatgatctgatgtaagttagtttccatatgaaggggaagttgaagttgttacaaacccacaagatgcataatctatgctaagaaatgaatgcgctcaatgcttccttttcacttaagaaatacgtagaatagggaatgtaggggttgtgattcgtaattttgttcgctgcctttttgttctgcaaagacctctctaattgctcttattttctggtattctatttatttttattgaagactgcgcaagatcattcaatcaacacatcagcatattttttttctcatgtctgtacgaagctttaacgcctcttccagcttgtgatagatcaaccttttgatttatgggtaaagcatgtgactttcgtttgttgttttcaaaattttgctactgttattgtatatgctcattttctcatgctccctttatgcattgctgtttctcatttcataaagtcgccgttgttcaacttttctgtgctatttctctagttaatctggaag

SEQ ID NO: 55924 - DNA, 575 bp, Populus trichocarpa
  Intron number 1 from transcript POPTR_0009s11430.1 (locus POPTR_0009s11430) derived from phytozome v7.0 (chr-ID scaf fold_9; pos 9502894 to 9503468 reverse strand)
tacagtgggctccacctaagggctcaactactaaggtatgcttgttttctgtggttgttgtgtttgtttgattttcagcttgaaaaagattgaacttttatgtgttttggtggcgatttttttgtgttttatctacgaggttttctgtgtttaatttggttgtgctttatttaattggggcgacatgaggtatttgaacgaggaatttgttaatgttgtgtgtgtagctggtgattgttttgagttaatgggtgttttgtgcgtaagttgttgagctttttggtttattagtttttttttttaatctctattttgagaaaaaaaaaagccctaaaagaagtaaaatttggtgattagtagcttaatcaagctgtaaattgaagattgtgtgttggcagttatatctgttagaagtaaaatatggtgattggtagctttatggagctcgaatcgttggttaaatcgaagattatgtgtggatagttgctgggttcttagtgtggtttctgtatttggtgaccctttttggatttcttgcaggtgatcactaaagagtccctcttggctgcacaggt

SEQ ID NO: 55925 - DNA, 738 bp, Populus trichocarpa
  Intron number 1 from transcript POPTR_0011s03840.1 (locus POPTR_0011s03840) derived from phytozome v7.0 (chr-ID scaf fold_11; pos 3915557 to 3916294 reverse strand)
taacatcttgttgcatgactagatgaatccaaaaatttcagacatcagatggccaagatctctggtggcagagaaaatcaagagaatgctatgaagcagacatttctttcctattttttactgtgttgaagtattaatggtttgagctaagaaacaattgttcttatgcagtggtttatatgtcccctgagggaagggctgttttcgaaaaagtcaaaggtttttagatttcgatgaaggaaaaaaagtcaaaagattgcaacaataactggctgaagtctgaagggccacaaaaggtcgaacaaaaagaattcaactatccatatatgcttggcacctaaaatattctattattgtacagcaacgacgtctgaaaggccacataaggtcgaacaaaaagaattcacctaaacttaagaattcacctaaacaaaaagaacatgtcaatcatggtgaggcaagtgtatgtattgtgataatatcctataaaaataaaaatgctatcgatctcacaagccagtggaccaggttcatcctgatgaaatatctttatagatggatatttacagaaaacataagaatttctgacttataattgctaaacttagtttctatttgaaaaataacttcatgattggaatgaaaaggacaggaagagaaatattcttcttcgtcgcatgctttctctgaacattcaataagccatttgtaaatcttccattctcatcaataacaagt

SEQ ID NO: 55926 - DNA, 854 bp, Populus trichocarpa
  Intron number 1 from transcript POPTR_0012s07940.1 (locus POPTR_0012s07940) derived from phytozome v7.0 (chr-ID scaf fold_12; pos 8933121 to 8933974)
gaagaagcgcgtccggaaccccctcgttcccgtcggtaaatactaatttgatcgtccccattgcccttttttttatttttcataatatacgtattttatgcgtagacaatatatttgggaatcatagaatttgtttggaatatgattatattgattatggtcttaaggtttgaagaaaaagaaatagctgtttggttggttttggaaatgggattggaattctaattctaattcgaaatataatttactttttttttctcctgaaattaaatttacgtctaatgctgttttaataccaccagataaatagaacaatttatctcatataaagtagagtggtatctcattcttacaaaagaaaggtgttgtagctcgtttctttcgtgatggtaatccattttttagcgaatcaagctgtactgtacaagaaatggaatgaggatccatttccattccaaatcctagcacaaaacaaccatgccctttaagaattttctcctccctctctcaatagaggggtattggtggtggatactttttagattaccttgaacaactatcatctttcgtttttctgatcggtttatctcgagcagatcccatgtttcagaagatacctaatttgttaagggtctgggcatctcactttgtgtttaaatggatcgtttatacgttatattactgctggcttcttgtcttcaaacatttgagcttttgacttgcatattggcagtcagaaattccaaattagtagtgctatttttagctcatgataagaaatgggattcatctttagacagtcctgtatttagcttcagcttgattgactgtttataactattgcaggagcactt

SEQ ID NO: 55927 - DNA, 239 bp, Populus trichocarpa
  Intron number 2 from transcript POPTR_0004s18550.1 (locus POPTR_0004s18550) derived from phytozome v7.0 (chr-ID scaf fold_4; pos 18404061 to 18404299 reverse strand)
caactctggactcccttcaatagcctccctaccaggtgcgtgtgtgtgtgtgttagtttccgcacatgtacgtgtatctatacgatatatgtgtatgtatgtgacttggtgttgcctcttcgttacggaaatgaaaattttgtgtttttttttaatttgaattattagttttttctttgtctttttatttttatcttttggaggacaattctgattttggaaccttttgtggtgtagat

SEQ ID NO: 55928 - DNA, 730 bp, Populus trichocarpa
  Intron number 1 from transcript POPTR_0004s18550.1 (locus POPTR_0004s18550) derived from phytozome v7.0 (chr-ID scaf fold_4; pos 18404476 to 18405205 reverse strand)
gtatttccaaggtgagcttgtccagaatcagcgggaccctttggatttgccttttttgaacctttatagattaataggggtggaaatgggcttgtcttcgtatgacacaaacatggcatcttcttttattttttaattaaatattcaaacaatatcttttagttggtcgaattcatgcattaagattaaaattcatataataaaattaaatagtttataaaaaatattgcttttctaaaattaaaacctttttttaactcgtgcactgcattcagtcccaaaacattctgatttaaatagcatcaacggaatgattccaagtcaaaaagatggatttaaaaaacaaaacaaaaaaaaacgttgtaaagatgcatggaagttgatgtaatgtacacacagcatataactctccccgctaatattttatttgggggaggataacgagcgatggtgcgcactacgcctctaaacaacttacatatttagagagcagcggaaggaaagccaaaaacccatccaaacaaactcacaacgcagcctctctctcttcagcacccactatgaatccataatattagattaattaaaccttaatcctctcttaaccctccccttaatctcctcttaaacctacctccctttttctttaacgtaagaagcgaaataaataaataaaattcgcaacttctctctctgcattttgctttatttattgtttttttttttagtg

SEQ ID NO: 55929 - DNA, 772 bp, Populus trichocarpa
  Intron number 2 from transcript POPTR_0004s20900.1 (locus POPTR_0004s20900) derived from phytozome v7.0 (chr-ID scaf fold_4; pos 20269295 to 20270066)
ttgcttcatttgaccagctcagtttcaagtgagttacaaagactcttctctgctcaactgaccaggatgctattaggcctctgaataagcatttggttttttgcatatttctatgaaaatccactccatgatattgtatgtaattatattttcaggagaaaaatacgttcgtgttcggtcaaccaaacaagagtggttcatttcactagcaatcgcaaaagaataatagaatttttctcagaggtgcccatgtttctcctgattctaggtcctggaaggaatagcaatcgtcatccatcaagaaaactgtcagcacaccttccttcaacttgtaaacatctcagccccacattccataagggtttaatcatcttcaggtatttggtaggtgtcatgggtttggagatatggatcatttttctctgtgaattccattgctaaaattagtctcggtcattcctttcaaccacagaatagtacggaaggtgcaggtagagcaactgatggcagacggtctttggtttgaggtaagcatataaccagaaattgacaatgtcttaaaatccttaacaacttcattttactccccagtttaataaatttttgtcaatccttccaagtatctggatcttcatgaaccacatccagtgagcttgtcttgaatatgtagcttgtcttaggagttgggctctgttaggatctttgttttgcaagatggcttaactggtaagatgaagttatgtgttgactgttttccttctctttggcagag

SEQ ID NO: 55930 - DNA, 813 bp, Populus trichocarpa
  Intron number 2 from transcript POPTR_0014s14580.1 (locus POPTR_0014s14580) derived from phytozome v7.0 (chr-ID scaf fold_14; pos 10667666 to 10668478 reverse strand)
cttccctctgttgagcccttcacattcttgcaaaggtactttgcccttcacttgctttctcattgtacttggtctcagagcgtgctctctcttttcacataaatttgttatctggttatgcaattacgagtttacgagttattacttggtcaagagtacttgcaattcatagctgctggattttgtactcactttatcatctcaactcaacttgttatctctgaaatcatcttgaaccgaattctaaactaggtgggtacacattttctggtagaaacccatgtttttgaagtagttctttctttttcccacaagagtagcgagtttaggataacaaatcaatgttctgatcatttctatattatctcttacttttggttttgccctttattatataatgggtatttcggcagccgaatataatttgacttgcctgtaatttttaactaaaatgatgatattgggttacagggaatgctgtgatgactgttcttttcacttttttatatggaaaaacattagcagacaaggtggaatgttttaaggaggattggaatttgaattttgattctaatgcttttcagtaactcctattgaactttttagttctccatttatgtaggctaagcatcaccttcgctgatactcctagaaatttctctgttttccttgtaacttctccttttctatcatacattggcattttcaatgaacttctgctttggaagtggagttgtgactgagagcttgttgcaaacctatgtttttctgattttgtgattacatttcatgtagatccacagaagactatcc

SEQ ID NO: 55931 - DNA, 279 bp, Populus trichocarpa
  Intron number 1 from transcript POPTR_0009s14160.1 (locus POPTR_0009s14160) derived from phytozome v7.0 (chr-ID scaf fold_9; pos 11159850 to 11160128 reverse strand)
ctgtttttatcgttagtgtattttccttgaattaatcacctaaccaaaaatttcagctgcaacttggtttattattgggccaaatcaagatagggtagatttcggcttattcttatgattaatcttctttggtttttgcattaatctcaaccaataattccaatcaaatacgtcccactaaatatgagtcttttatacgaatataatttctttgtttctgatcaaacctctgttggcatttactatataaactgcagaaggttttgcaagactggaaca

SEQ ID NO: 55932 - DNA, 547 bp, Populus trichocarpa
  Intron number 2 from transcript POPTR_0012s07650.1 (locus POPTR_0012s07650) derived from phytozome v7.0 (chr-ID scaf fold_12; pos 8560768 to 8561314)
tttccataaatctcaacctctttttgtctctggaggtaatgaactcgttttctctcattttatgcaatgtcttggtggtttttgattgattatcataatgattggttcaattatgtttgttttgttttttaatttattttaaattacgatagatctgcttgtgattttatggaattattatactctccctgtaaggtggaagtaagatccaggtactggatttaggattgtgattggatgaaagatgtaatttttctgtactgatagagtataatgctgtatcttagattaaaacagttgtgattttccatccttctgaaatgggcattggtatttatattcaggtttccttcccttccccccacctcacaatgatatatgttgattgtatttgaaagtgggtagatatcatatgcttaaaacctatcatcagagattcaagtaggattaacgcctagtcctgtgttagaacgactgagagacattgctgttcttccctttgcttctgtgaaaaggatgcttatgtctataaattgatgaccaggtg

SEQ ID NO: 55933 - DNA, 348 bp, Populus trichocarpa
  Intron number 4 from transcript POPTR_0009s12470.1 (locus POPTR_0009s12470) derived from phytozome v7.0 (chr-ID scaf fold_9; pos 10177792 to 10178139 reverse strand)
tgtctggataatcatcctgggtttgattgtgtaaggaaatgatgggattattattattattattattattattattattattattattattatagctaagttaccagacttttgttggacttgtattttctttacattttcaggcgctgactgtagtttgttagttcaactatgaggttaatgttggagtattggttttatacagcatgataacttctgtttttaatcttcgttttcagttactttgatacagttgagaaattgtaatcatgcatttcattgcatttgaattacttgccctattactaattgtgaaacttttctgtattaattacagggtggcgctct

SEQ ID NO: 55934 - DNA, 628 bp, Populus trichocarpa
  Intron number 1 from transcript POPTR_0009s10050.1 (locus POPTR_0009s10050) derived from phytozome v7.0 (chr-ID scaf fold_9; pos 8736034 to 8736661)
atcctttcgatcatacagagacgcagaggtattttttgttgtttttatttggtactttggggatttttttaattctagggtttaaggggtttgttggttttgattattaaactgagaagaggcagtttttgttgtttttgaagagtaatgtggggttttctgatgctaacgttagggttttgttagaaacccgtgttcttttttttttgttgactatgtaattgaaatatgggttgttcataattttgttattgcatggcaaaaaggttaggacttcgtaggtttattgtgttttcagggtttagggaatgctttttttttttttgggtggttgtttccttagctgtaagttgaaatggaaatgcgattcttgttcattttatttatttgtcagttaatttgtatatgcttaaaagctggatgatttgagaggaaaactctggatttttaattttttttctgttaaagtgaagtatttagtattgaatctaatttacaaacgaatgaaatgaactaatactttcatgcgctgtttgacgttgtaaaaaatggagctgagtttgttgtatttgttttgggttgtgtttatgtagggggattattattgtgaagttgcgccgtgggcaag

SEQ ID NO: 55935 - DNA, 748 bp, Populus trichocarpa
  Intron number 1 from transcript POPTR_0014s05810.1 (locus POPTR_0014s05810) derived from phytozome v7.0 (chr-ID scaf fold_14; pos 4358545 to 4359292 reverse strand)
gagagaagagaagaaaagaagtcgtccaaattccagttaaaatccccccaccgatctctctcttcttcgaatcaattaaggtttcgatttgcatttaatttcttgaattcctttatagatctgtgcttgtctttgcatcgaattgttgagatttgtttgctacttctattttggattaattttttatttgagtgaaaaacaattaggttttttatcctaattatttgtatcttgtagatcttaggcttctgcctcatgactggatctatttttttttctctcttgataatcaagatctcaattttgcaaaaagacttaatgtattatatttcataagtaatttgttaatgtctgtattggtatctggataaatgcttgtattcgtggtttatatgatggttttagtgtatgatgatatggggaagaaaatactgaaaattggtttttgcaagggctaatttgttgggtagtaaaaatggaacaaaaaattgattgatagcgttgaattttagatggatttgtttgaggttttctgggttttcatgaattttgatagtagccatgctttgtgtgcttcttttgtttacgcctttgatgtatagtagttttgttaactatatattagttcatgatatcgctgatttgtgtgtttaaagtaatactaatgtgggctgaaaagtgagataattaaccgggttgtcgtttaaggggctgaaatagttgtttgtttggtgggtttcttacagat

SEQ ID NO: 55936 - DNA, 420 bp, Populus trichocarpa
  Intron number 2 from transcript POPTR_0004s23240.1 (locus POPTR_0004s23240) derived from phytozome v7.0 (chr-ID scaf fold_4; pos 22022169 to 22022588)
ctcttggaatacctgtaagttggtatcttgattattatggcgcgatgctttgttgttttatgtttgttttggagtagagagttctcatgttaaggactcgattttgtgaagattaagttcctatgctgctcagctatgggtgttatagaggaatggtctgaatggatatcttagttgacattgcctgcaaatacattgaagaggtcttatattttagttgcaaggttttcttgagaattgaaactatgtattatcctccatcttctatattcatccatactgcctaataagattgtttttgaaaaataaaaatccactgagctctctttgttctgtattgcttgatatgtccatatttatctatgatatcaaaatgactttcctcttttacaggattattttgatatcatagatacacca

SEQ ID NO: 55937 - DNA, 828 bp, Populus trichocarpa
  Intron number 1 from transcript POPTR_0004s07430.1 (locus POPTR_0004s07430) derived from phytozome v7.0 (chr-ID scaf fold_4; pos 6132220 to 6133047)
gagaatctgatcgagaacggttagtataatctatgaaacactttcttgatttcattaattatttgttgacgttgaaaagatagaatacatcctctctctctctttttttcaatttgtttttggatttgttataagttgaaaagatagcatatgggtttttttatttatttatgatttgattgaatttctcttggtattgtattatgatataaattgtgatttgttagggtgaaaagatagtgattttatatagtagtaaatagtattaattgattttttgttgtttgtttgacgtgactcgtgcatgattataagcctataacagaaggcagttattttctcgagttaatatagataaattattttaggacaaaaatgatttttaccatgaaaataagttttcgatgcattgggactgggacaaacattgtaggacattcgtcggcaaccatttagtcatgtttgctaacatgaccgtccaagttatcaattatgtcaggttacattaaggaagctggcatgagcatgccatcaaagttgttgacatgtttgtcatcttggatgatcatgttggcaaccatgttgatgtggtagatcatgtgctgcgtatgatgtattgtagtctttgtctctttgaaaatattaaacataattttcatgagcaagaagtcaaccgattggacaaaatcaagtgatgccagtgtactctaaatgtctctccagtcttgctctcttactttttgatgaacacatgtgtttcaaatttgctgatttctcttcaaccaatgactaggcactttcatttcacaagttgagaggccaaacagt

SEQ ID NO: 55938 - DNA, 341 bp, Populus trichocarpa
  Intron number 5 from transcript POPTR_0014s06280.1 (locus POPTR_0014s06280) derived from phytozome v7.0 (chr-ID scaf fold_14; pos 4785355 to 4785695)
ctccccacattgatcgacctgattgggcagttgatgtgagggttttttttttttttttttttattttttaatgttcagtagtggcttttacttattgtttattttagcgaaatttgaccataaattttccggggtgccgaccacttttgatccgtgtattgtccattgactctttatttctcatttgtttttatcatgttacatagccaatgaatgcttcttgtttccattgaacctccctttatttttgtttcacgggcataatgtagtactgatgcacctttcttctttgacaataattcgtagggaatccctaagattgaacccagcagtgatttgca

SEQ ID NO: 55939 - DNA, 412 bp, Populus trichocarpa
  Intron number 3 from transcript POPTR_0009s09390.1 (locus POPTR_0009s09390) derived from phytozome v7.0 (chr-ID scaf fold_9; pos 8330386 to 8330797 reverse strand)
ccagagcttggacaactcaagcatctaaagtacttgtatgccattttgtccccttttgctttaattttcaaggactacatcttgttacctgttatgatgtgaaaacagaaaacagaagaaagttagaccctgagaattacatcccgtttgtgttctgatttttcttttttctttaaaggaaatagatataaattcatcttgcatttgattttttttttttgaacgagacctcgtagagttcaggcttttgtttcatcagaagaatttagtgaagaatcttacaagcaattctaagaccatatatcatcatattaattgcacggtgaataagctgctgtatttctttttcatatgattatataaagtaactgggttgtgaaattcttaaatgtctgcagggagctttatagga

SEQ ID NO: 55940 - DNA, 796 bp, Populus trichocarpa
  Intron number 1 from transcript POPTR_0009s11970.4 (locus POPTR_0009s11970) derived from phytozome v7.0 (chr-ID scaf fold_9; pos 9861685 to 9862480)
ttttcgaggtaatctatcttatgctccttcttaaaatatttatatcatgtgctaattaacttttgatctataaaacataagtgaaggtcgaaggaagaaagaactgccccacatcctttctatgggtgctttatgttgctgtcagtcgtctttagatgctgataggaacgcataataaacttttcacgggggcactaggatatgcataggatttatattattatttaatatatatttttgagtgaaagttttctaagtataaaatttatataaattcaaattattttatgtttattttttatcaaataaataaaaataataagatttaaatttgtgattgattaatcattaaagttttaatattatattaaaaaattaattcaattcaaaaacttaaactatcaactaatattttacatgacatttgaaatcaagggcactctttaatgtctatgtcctttgattggaggttataaaattctaataatggtatgcttatttttatttccttttgagaacctgataaataataacggtgaggaaaggctgtgggcactaatggcctttggattagtggtggatccggtggtgattgcaatgtaagtttagaaggtatctcatggagaaggaaaaaaaaatatataacatcggactaagcaaccttttcctttcttgatttttgccatccatcctcatttttcttttattccagaaattaaatagctcattaattactttttgataattttcaatgccgacagaccgcatataatatcaacaggaaggaaagagtaga

SEQ ID NO: 55941 - DNA, 523 bp, Populus trichocarpa
  Intron number 1 from transcript POPTR_0001s46950.1 (locus POPTR_0001s46950) derived from phytozome v7.0 (chr-ID scaf fold_1; pos 47299203 to 47299725)
ccatccagcttgcttgttatcttactagagtttacatttgcatctcttttatgatatttagcatatcactaaaccaagcatggaggcctggattgttggaatcgaaaaatcagagacccaaaggaacatgtatgaatgaaagtatagaaattcatattaaaactatcaataaatttattatatgtatatgtttgtcttttcaattaacatgtttatatcgtttttatattaggagactaaccaaacacaaccatggtagttatcataaggaatgatagtaatatttgagtttattgttcttccttatgagcacaaggaagggatcatgtaagtcctatgtagagcaaaaggcttgagattcttttgtttcccgaattctaacttcctttgtcgtttaggaagggctagctgaatcattttgcaggattagaaatagggatttctgatatctattttctgctcaatggatgttgtaatctgaccatttctgatatctacgtgtgactcaaggaggacagtggat

SEQ ID NO: 55942 - DNA, 815 bp, Populus trichocarpa
  Intron number 1 from transcript POPTR_0012s11870.2 (locus POPTR_0012s11870) derived from phytozome v7.0 (chr-ID scaf fold_12; pos 12232873 to 12233687 reverse strand)
aaggttggtaaatctcctctgtaatggctttataatgtaggatttgattctttcaagaagaatgtatgattcgacttttcgattgattaatgtgagtttttaggtaatttaaggacatggggtggttgcatttttttgatacgatgtgaagtggccttaaaggttgggttttttatgtcaaaggatgctgtgatttgatgtcgtttgttggctgatatatcgggatttgtcacatgtttttttttcctgttagttcagttgatgtattactgtaacttgaggaagcgatgagaaacttggattcgtcaattgcaaatagatttatgattttgtggactcatgttgatggtttgtaggtgtcaactttgcttaactggagctctggtcttgcaatttttcactgattatgagaactaatagttggttcctatggcaatttccttaaatctcgagcaagaagtcttgctaaatagatttgtggatattttcactgattttgctactgcaaaatgcatgctctttagtggaagatgacaatgaaatttcaatttccttttcttctatagatatatttagctattgcagcatccttttcttttatggaaaatgcataaactaggcgctagggcgaaatgctagatattttgtactctttctttagattgaaaaatagagaacaaaacgatctgttaattctgtgtatttgagactttgagagaatattatacaccggaaagatcaaactggtttgttttagcatcataatatccttttatctcgggactaacttgttgctcatttctgttagggaagag

SEQ ID NO: 55943 - DNA, 415 bp, Populus trichocarpa
  Intron number 1 from transcript POPTR_0015s08930.1 (locus POPTR_0015s08930) derived from phytozome v7.0 (chr-ID scaf fold_15; pos 10280672 to 10281086)
gaggcagtatattttactactatactcagtaagctttacttttttcttgagctcatctctttctttggatgaacttcatactttgatgttagtgtttagttctttttttggcatttcaattaggattttcttgtttatattattacctgtccattctatatgtgagaggaaaaaaaaaaggaaagttttttctttcttcaatgaactaacttttgtagcacaatggacattagaaacatcaaggaccaaggaatatttgagtcaccttcatgtgtgcccagccagatcaagatatccatattagttgatcatttgaataattgatttcaacaaattatcttcaacgttattgattggtgatgtttcttggtcctgaacaggtggacttttacttcagtcacaatttattttgggg

SEQ ID NO: 55944 - DNA, 596 bp, Populus trichocarpa
  Intron number 1 from transcript POPTR_0014s07430.1 (locus POPTR_0014s07430) derived from phytozome v7.0 (chr-ID scaf fold_14; pos 5593442 to 5594037)
ttcactcattggagtctcttgctaatgtaagcctaatctctctaatttagttacataatttgattgtcttggcttgggggttttcttcttggttctttgtattaccttttagcttagacatcgagaaaatcctgggaaaaaaaactggtcttgagatgtgtttggatatgaatttgaggttattgcattttgttgtgactgttgagtagtgttatcatgattttcatggagaaaatcgattaaaggaccttcctttatgaaaattcttgcatattttgctgcttatattgtttatattatccatcgttgatgagagaaaattgatcagggacaggaagtatgttaagatatcagcggtggttttggtttcatctatgtaatgaatttggtttttgtcgtagctgttccagttaagagtctttgtttcatagaatattgttcagcctcattgattgtttaaatagtttggatattaccgatacttggcagtggcatagaaatgtgataatttctggtgaatttgttgtggatgtgctgcatgtttttgaaaactgttttctgatatgggtattcaaaaattttgcacagggattgac

SEQ ID NO: 55945 - DNA, 630 bp, Populus trichocarpa
  Intron number 1 from transcript POPTR_0004s07600.1 (locus POPTR_0004s07600) derived from phytozome v7.0 (chr-ID scaf fold_4; pos 6248222 to 6248851 reverse strand)
ttcttaatcaaaacctctataaagacaaggtatagtggctactttcacattgaagttgtttgtcttttagggcacgtgtgtgtaatacaggcacagtttagatgtcacagttgtgagtttagctagcagcagtcatgtttttggagtgttttgattcgtttatcgagttgaagaatatgtatggaaaaaggggttgctgttttctttttttaaagttgtcgttaatgcttgtatagggagaatcttagttgttggaggcagtttgaattgtggggataatgtgttatgagtattgtatttcaagtcttttgatttgttttttgacgtgaagaatgtgtattgaaaaatgggttgctgattgttttttaagttttgttgttaatagtgagaatcttagttatttgtgtccgagagatgcatgccattctgaattgttggatgacatgttatgtgatactcattgtttctgcttttgcgaaattaatgttgttcaaattatttgtttgtgttgctttgtttgatcatcgtgtacatgttgtacaaattatttttttttcttttatgaatgtgatgaatgtaatataaattcttacaggtgaggaaaatcccagagacgttcccgtcagtgac

SEQ ID NO: 55946 - DNA, 800 bp, Populus trichocarpa
  Intron number 1 from transcript POPTR_0004s09180.1 (locus POPTR_0004s09180) derived from phytozome v7.0 (chr-ID scaf fold_4; pos 7685121 to 7685920)
caatacaaaaacaagatacctggtaccacaccttcaacaaggatgcaattagtcgcattttctcagcccgtttattctctgcagtaatcttctcctccgtcgagattccatatcgttgtgcttgaaatcaacaatggtgcttccagaaattaagataatggccattttgtattcccagtggacgccctcatccataataagaaaatcttgaatcattattatttacagatatattagtatattagctgcgtatgagtttcaataaatttgaatttttttatttaaaattaatttttttatgttatttaaaattaattttttactataattgaatttaattatagtatttatttttaatttaatcaataaataaatagcatttatatgtttggatgaggtaaaattaatttaatttaatttatattttatattaccatcattacctttatcttatttttttaaagatttctaaaaaaaaggtgttttagaaaaattaattttatcattaatatatatatttttaaaattatacataagagatattaacctttatttatttttatagtatttttatacattaaatttatataaaaattaattattaacaatcaaaattctcatcttgatttgcccattgagcaaagcccataaaagtaagagaaattattatttattttacacagcaaaataaataatcatgcaacaaaaaaatttggttgatgtcataaaatatagaatttaagtacagcaagcaattcttagtagcgaatctgccactgcccttcacgtctccctcacag

SEQ ID NO: 55947 - DNA, 869 bp, Populus trichocarpa
  Intron number 1 from transcript POPTR_0004s18140.1 (locus POPTR_0004s18140) derived from phytozome v7.0 (chr-ID scaf fold_4; pos 18131189 to 18132057 reverse strand)
gaagctccaagctcaagaaacgcaggcaattgcaggtacgcagcactaccacaactcttcgttctcaccctgtgtcaaggctttttaaagaaagaaacttcattatactgatagaatagatccatgaaaacagatcttggttactactagatcaagatttcttgctctcttctgggtgctagatcgatatagtaagcttgaattcttgaaattatgtagttaaagctacaacatgtgattcaaatggctcttttgttgtttcttttgaataccttgataatttcatggtgcagcctttcaacattcttggccatccctatctcttgtatagttcttgagattcaatacaatgttttttgaatcttttttatgaaatattctgttgatcatgtaaagagaaaaggcatgtggttgtgtttagaagttgaaagattaaaagtgctgtttggtatcgtggattaacagctattttgttattttttgaatttttttatatttttaaatatactaatataaaagataaattttaaaatagaaaaaatattattttaacgtattattatacttcaaattacattatttatcacacgtccaaacacaaccacaccattgagttttgaaaaatgaaaagatgatcatcatgtccacatggacagttctcataaagagagtatagtcagtgcaaaaagaaagggcattttggtacttctatcataaaatggcagaaacatgataagccctgtggcccaccaaaatattccgatactgtcactggtccgtttattggttgccacgttcacatcctaagatgttttacatgattgatttaatcagacggtggaggtcaaggtgcgcatagactgtgaagg

SEQ ID NO: 55948 - DNA, 636 bp, Populus trichocarpa
  Intron number 1 from transcript POPTR_0004s16830.1 (locus POPTR_0004s16830) derived from phytozome v7.0 (chr-ID scaf fold_4; pos 17180971 to 17181606)
tgggattaatcgaggtacacgcaaactaatccggacaccatgttaataataataataataaaaaacaatagtataacacgacctgttttggtctgttagataaatttgatgtcacaccagtccagtatttaatcattaaaaaaattgaatttttttaaattatattgtattaaaagtttttttttttaaaaagcaaaacacaagttaaaccctccactcgtgatacaaatctttagaccggatttatagtgcattgaatattataattatatttataaataaaaaggctaaattgaacaataaaaacgacgcgagttcaagagaagaaataaatctagtaaagagccatttatttttatgggcaaattgtgctttttaaattttttaattattttaatataaaaaataagtattttaaataaaaaatattattttaatatattaatatttcttttaaaaataaccattactacaatactaaatattacctaaaaatattaaattaaaaattctatttcgccactacgctggaccgagcctcctttttcaattttccctccccatataaagttataaaaaggaaactctcttcaccataaagatttcacccaaaaaaacacacctttctccctgtcc

SEQ ID NO: 55949 - DNA, 702 bp, Populus trichocarpa
  Intron number 1 from transcript POPTR_0011s09710.1 (locus POPTR_0011s09710) derived from phytozome v7.0 (chr-ID scaf fold_11; pos 12097713 to 12098414)
gatttggagcaacaggggggcagtgaggaatccaggtattttgttaaaagctattcatcccaagttatatctatgctgaaaatttattggtattcaagcgttactacataatatgatgcaactaatatgaattttggctgacgaggaatagatttccagcagcataaagaacaggaaaaggatgcataatctctgtgtgatctagcaaatagcttcgggatcatcagtgcatttagaatttcctgatggctatactctggaacttttctaatttagcaaataaaacttttctgcatggcattgggtagtgaactggtgcttcttaatctcttgatcagactttgctgttgcagaaataataattttagttactataaccaaaaaaactgtgctttctgtgcgactttgatggcttttaataaaacaaatattggccattgcaaatccttttattctggattttgccttcaagatgaacaaccaatgtcacaaaggttgctactaaataaacaaattattttatagggaaagcaaaaaaaaatatttaatagtagcagagggatgaagtgtatcaaaatcaccatatttctatgtcgaagattaagtaaaatgacagaactatagtgctaatataatagaatgataaaaatattttttcaatctatttgtattcctattgattaatatatatatatatagtgt

SEQ ID NO: 55950 - DNA, 817 bp, Populus trichocarpa
  Intron number 1 from transcript POPTR_0014s10030.3 (locus POPTR_0014s10030) derived from phytozome v7.0 (chr-ID scaf fold_14; pos 7511459 to 7512275 reverse strand)
agcttaaaaaaagaaaagaaaaaaataagtcactggtacgctgcgaatttttcctttttccttctgtctagttttctttcactcctttattgctctctgccgcaaagtttgtttcctgtatataacgctttgctcaaattcgacggttttttttcttgaaatgattttttagcttgttgatttggaatctgctacccatgttatttcaatttagggttttgttatgctgatttaggccagtctatttgtagatttgtaccaagtagggtttagggtttgattgctattccttgttgtcattctaaatcttgccttttatgtttagtttctggctgttctggggattttttttgttgtaattagagtacgaatttttaagtctgtttatgtttttgtgtgtgaattttcttgaatcaccctagaaatgttgaccaattagagatagaataagacctcgtatatctgcttattgatttaaaagtttgattatttgttgtgtctgattacgttatatatatgtgtgtgtgtgtgtgtgtgtgtgtgtgtattgcgtttagattcaaaatcttggaccattactttgattgggagtaaacagtttctgatgaaagcttattccttagaaagatattatacttgtagttcaactttatgcatttttgcagctatcaagctcttcttttcttttactaaataaaagagaataataatgagcaagagaaatgcagattttaacttaattcagccaagtaacgctatactgcctatggaatctgagtggtttttctgttcctgtttttgtctttgtcaggatcga

SEQ ID NO: 55951 - DNA, 952 bp, Populus trichocarpa
  Intron number 1 from transcript POPTR_0004s21210.3 (locus POPTR_0004s21210) derived from phytozome v7.0 (chr-ID scaf fold_4; pos 20438599 to 20439550)
cagaaatcctctcctcgcctcttctctcctctccggtacgttcttgaagctaattacgtttctcttcttcgtgtcttttggggtttttttttttttttgagttactgttaggtttccttaacaagtttaaatatctggtcatgagctgttaattttgaactgaaaccttaaaaaaacaacacataaaaatcaattaatgatgcaataattcttttttagctaaatgcatcattatagatttgttagtaaggagccgaagaacgtaaatgcaaaaaggttaagagcagagccaaagctttgactaaggtttagctaacctggaaaaaagctgggatttggcaactcacccaatcaagcttcgttggggtctggttctcgtgggttgcttgattaacttgatattacccttctggttctccgtgtcacagctgtatttgatagttttagatttctaattaggtaggtcatgtatggaagaatctgatgcttggggtggtgttgaactacgagtttgtggtctatgaaattctttcggttccgacttgataaatgcctatcccggatgttctcaatttgtgttatatgtgttttaattgagcgtagcctgatttggtgttcttagaggaaaatgagaggagaaactagaatggtaaaacgaggtaatatacttgtttaagaagcttggttgttgagaaagctgaattttttataggtaagttttaaagcaatgttaatggcaccctaaaacgtgtagatcttgtctgcataaaatgtatatatggtctgtatcttataaggatcttccatctttttaaagtttggtatgaagggttctttttagtttggaaagtgtgtactggttattaaaaacttatgtataatgtccatctcaattggtatgtttagtttgatgtgttgccttgaattgttgcaggaaggtggacagactggt

SEQ ID NO: 55952 - DNA, 357 bp, Populus trichocarpa
  Intron number 1 from transcript POPTR_0012s05710.1 (locus POPTR_0012s05710) derived from phytozome v7.0 (chr-ID scaf fold_12; pos 5492520 to 5492876)
gcaagaactgaatctggttgggtttttcggtttaggtaagccaaatgtttcttttttacccattttcttggatcttcttttaaattcagatttgcgaaattgtgttttctttttattgctttttaatggccagtctttggttttttggattcagtttattgatttctgtttaattttaagatttttcaattttaattacttatcttttaatggattctcctggttgccaaacaaattattgtcgttgctcttaaaaagtttgttttaaactgacttcttttgatctgttattcattgtttgcttcttgtttttctttcgtaggctttgattttgttaccgcaattgtttaatagcca

SEQ ID NO: 55953 - DNA, 839 bp, Populus trichocarpa
  Intron number 1 from transcript POPTR_0012s01650.1 (locus POPTR_0012s01650) derived from phytozome v7.0 (chr-ID scaf fold_12; pos 1252351 to 1253189)
tcataggctctgccctcactgaacaactatacaaggtaactcaactctcccactttccctcttcttgaaactagggctagggttagggattgatgtgtgtggttgggatttgttttggaaattaagtagagaattaagttcttaattttcttgtttagctgctgaacagtaactgtaaaactctattttttgtccatgatacatctaatctcgtaaatggaatggcaaaatgggttgtatatagggtaaaccctagactttaatttcacaaaagaacggggtttctaatggttttgtggcttctaattgcactaagatagactggtgccttcggagtaggaaaataatgtctcaaggaaactgtttgttgcagtaaattgaagaatttaatatgttgcctctggtcattttgtaatgtagaaccccaaatgacaaggtagccgcaggcctcttatttgcagatttcaaagcctttttattattgtagactctaatagagaatgaaacttgtccaaccacactttagttgtatcttcaagctcggctcttagattttgatatggttttacctatgccactgtccgtgtttctttacacattggataaaaacagagttttttaattaatacaggagagggcaaccagtaaatgtttatgtttactgtttcaactatccacagtcaaacaattgaaattgtggtcttttgaaattcattgaacaatttttttcctgtgagctatttggggattcaagcttccaggttgggttgtaattgaagaattgtgttttcatctatcaaacaggagaaatactgggaagaccaccctggtgaagcagt

SEQ ID NO: 55954 - DNA, 939 bp, Populus trichocarpa
  Intron number 5 from transcript POPTR_0009s05410.1 (locus POPTR_0009s05410) derived from phytozome v7.0 (chr-ID scaf fold_9; pos 5520075 to 5521013)
gaagagaaccagaaaagtaaggaacactatattgcttgacgaatgccaaatttccttccttccttcttcttcttctttgttttttttgagtgtttttaatcaatttacaaggcagtcgtctaggaaggcttatacttaatggagaactcgtatgtgatatatgttataaatattaatttcatatggctacaccataaaaaattatccactttcttttttcttttcttttcttttctttccacttgtaacacccgttcaatatttgtaagcaacgaataacaattttgaaagttgactcaatgcagtgcagctccgtaatgtgttgatgggttatcgtcactttatagtgccaccttgaaaatcctattgcattactatcatctgtagtaagataatatctgatatgaaattactatgagagtgataataatctttacatatgaagcatggaatggaaacggatggtttggatccatggccgatgggattgcatatgaagcttgttaatttttcaatagcagccaattttaatggcatctctatattttctagctgtcagtaggtacattatcaggtggcatacacattgaaactgcagaagtatccttgacccaagccatagcaagtgcctactatctaatgaaaataaagttcgtgtaacacataatttgactttttaagaaatgaaagcagaagctcaacctcaagtgctgatgataaaaatggctgatcaaaccatctacctaactcaatattatacctcttgctccattgcatgtgaagaaaagacttgtagctaaatatgttactggaagtatcatttactgacccttttgatttagaagcaaagctctagttgctttgaccaaaacttgtggctaaataattgtacatctatttcattactgagaggtttatttatggcagataaaattctta

SEQ ID NO: 55955 - DNA, 872 bp, Populus trichocarpa
  Intron number 1 from transcript POPTR_0004s01100.1 (locus POPTR_0004s01100) derived from phytozome v7.0 (chr-ID scaf fold_4; pos 549183 to 550054 reverse strand)
gaaggttagagactcagttgacgatcatcaagagggtgggtttcgtggggttatgtctttgaacaatgtcgaagattggttattttttgtgtgtttgttgtttgctttatggattttgttgggttttttgtctgcttaatggatgaatgttgcttgtgtatgcagttggaggtgatggggattctgcgaaattgggtgcattccaaggtgttaaagcatcaaacaagggagtgactgttttaaagggtaagtcaaatgtttgtggctcaagttcttcttctttttttgtcgttttaaaggtttatgctctgtaagtttatttccactctgtgcaactcaaaatggaaatttccgaggttgtagttttgttgctattttcattttaacaatgtgagtttgattgcattattgtgtgtatgctaagtccaatgtgagttacttgtaatgttctttgtcctttgggttttgttgctgatctatgcagatggaggtgatggccatagtgtgaaattgggtgggtttcaaggggttaaatcatcaaacaagggagtcacagttctaaagggtgagtcgtaagtaagtttttttttgttctagttagtcttctttaaaggtttttgttttgtcatttatttatgttgtcttcattgatagtggtggattagagaggttatgttaagtaataaagtgtgtgaaaaatgtgaacattaatgccattgcttgttgtcagtcacatgttaagcttgttgtcttgtcctgaataatcatctagccagcttttctttatatttttttttaattaaagtttagttcttttttgtgcttcttgttaggcttctagattttgttgttgaatgttctagtatatgcag

SEQ ID NO: 55956 - DNA, 635 bp, Populus trichocarpa
  Intron number 1 from transcript POPTR_0004s17890.1 (locus POPTR_0004s17890) derived from phytozome v7.0 (chr-ID scaf fold_4; pos 17936923 to 17937557)
cagctttgttcttcttcttcttgtgagttataaaggtaatgatcccacaaaaaatgctctctccattgttactttctagtccctctctcacatttatattcacattaactaagcaacagccctatactaggctcattttgtggttaagcactcatttctttgttaggcttaaagagtttttgaattttaacttcattttgcctaaaagtcccaatctttacaccaagaaaccaaatctcaacaacattttcatgtttgtatgtagttactaattaacattctgatcctattttctcatcaagtcaccattttttctcttctaagaacaacctaaaagaatgccggaggaattcttgctattgtctggattttccttcaagggttttgcatttcgtgcttctgtttgttattacggtccaatcatgtcttaaattttttaattttattttagttttaaattaatctttttgtttatgtttctagatcgtttaatataaaaaataaatcttaaaaaataaaataaaatattattttaatacttttccaaccaataaacactatcattatcacattctcaaatagacctccatgtttttacaggttgtgtattagctgctacgttcacatttgtaaac

SEQ ID NO: 55957 - DNA, 517 bp, Populus trichocarpa
  Intron number 1 from transcript POPTR_0015s06810.2 (locus POPTR_0015s06810) derived from phytozome v7.0 (chr-ID scaf fold_15; pos 7848567 to 7849083)
caaaaaccagagggagtgaagccaaacataagaaggtaatccctagttatttgttttcttactgtgatcggacttgtttctgattgattgagactgaagtatgctgttaacctcgtcttttgatttgatttgtgttaagtgtgaatgagaaaagaaaagagacgattgtaactttatgagttttatcttttcatgtttagatgtattggatcttcttcgtcttttccttttctctgcggtcttaatcaggattgaaggagagaccgagactgaaattgttttgttcgtattgttgttactggacctaggtttctctggttcaaattaagtacttctgaagcaactgattttttactgatttttttttatttaaaaaaatctctggctgattttgctttgtcgcttcttgctgggcaatcaatcattcacaacatatgtaaagctcctgttctcattatttcacggggttagtttattttggttcctgactaaggttttgtttcacttaggttgtacg

SEQ ID NO: 55958 - DNA, 615 bp, Populus trichocarpa
  Intron number 1 from transcript POPTR_0004s15770.1 (locus POPTR_0004s15770) derived from phytozome v7.0 (chr-ID scaf fold_4; pos 16320494 to 16321108 reverse strand)
atccagctattccattccagcaaccctggtattgtagtgtatgaatcctttgaatttacccctgaagaaagtccaatgaggtcaaggttacttgggattttgtgattgctggttcttaccagcttcttcacttatgacaggagagcacgtttctgttcattggataaataaaaaaactgtgtccagattttcatcgacaagtcattttgttctttccacaaagttgaagcttttgtttttgtttaaagcttgcaggatctgatggggagagggaacaaacagatacagaagttagaatagtagtatgggagaggcttgtggagattatggtttgttgatcttcttcaaactaagtaaacaaaggaatcattttttttttaatgatttttaatgaaaacaacttgtgttaaacttttttattatgttcgccaattaaatatattttgggggcaaaagagctgcaaaacttccattaatggaaaccccatacccatctctgttcaaccccattttctcaaaccacatcttctccttactccaaaactatcaaactcaaaccccaacttcacactctttacagcaacaggacaagtaggctttctttaaccatcataa

SEQ ID NO: 55959 - DNA, 714 bp, Populus trichocarpa
  Intron number 2 from transcript POPTR_0011s08570.1 (locus POPTR_0011s08570) derived from phytozome v7.0 (chr-ID scaf fold_11; pos 10218349 to 10219062 reverse strand)
tcgttgtagctgggattgagttcagcaaaagaatagtaagtactactgcatcatatctcaaccttacttttctactactccttcattgttgaagattactgcttcctttatgttttttcaagtttttttcatgaattttctacacaatacattattcctaacggttgccaacatttaataggatttcaaattctgaaaaacaacaaggagaaagaacatacatgcatttcaagaatatcattccaaaaaaaatcaattgctgttattaatcaatttatatttcacaaacaagtgttatttatcaatttaattgattattgtggatgaattgtgatgctcaacattccgtgtctattcaatacaagggtccttgtaatatattttaattggtgatgtaattttttaaaataaatatttgattttcacatacaaaccgaaggaatttttaaccttacggtttacatacatcaattgctgttattaatcaatgtcaagtatgtgggggatctggactatttatcaatttaattgattattgtggatgaattgtgatgctcaacattccgtgtctattcaatacaagggtccttgtaatatattttaattggtgatgtaattttttaaaataaatatttgattttcacatacaaaccgaaggaatttttaaccttacggtttacatacatggcagatagcacaacgaaggtgtcaagt

SEQ ID NO: 55960 - DNA, 755 bp, Populus trichocarpa
  Intron number 1 from transcript POPTR_0009s15160.1 (locus POPTR_0009s15160) derived from phytozome v7.0 (chr-ID scaf fold_9; pos 11768173 to 11768927)
gagttctggggtgagcagcttcttgctcttcttgttttaggaaacagtttttttaatctttttcctgttttttattctaaataggaccatcccttttgttttgttatgttatcgattgtttggtcattttctttctgcgtttctctatactgttcagagctgtccttttgtttctctgtaggttgttttatgaaatacactgtgtgggattagtttttatggggcgtgttgggttttttcgttttttgaatttaagttttgattttctgtttggtttttattttgttttcgtgtttttttgttccttttagtttggagtggtttttttatttttacatcggttttataatgtattgatgtaaggtatgtgtacatgcttatagaacgaaacaaaggaataaggatgcccatttacgtaatagttttgttcctgctattttcactgtttttgttttcggttatgtgatttatcttgtgttggattttgtctctgattgttttaatggtgtgttttgatgaacaatgataactactagccaagtaatatcatcttatgcaagcggggttttatttttctgtatgttttgtggtatggttgatgcaagcgcccacatttctaggatgtcttgtttctattacctatttcttgttgtgtaatgaggtctaggattggtattgtttccatttactaatgctacataactctctttattttactaggtgttgaagtcaaggctggtgagccccttaaagtg

SEQ ID NO: 55961 - DNA, 461 bp, Populus trichocarpa
  Intron number 1 from transcript POPTR_0012s08550.1 (locus POPTR_0012s08550) derived from phytozome v7.0 (chr-ID scaf fold_12; pos 9648229 to 9648689 reverse strand)
tggtcctcactgtcacttttaaaggaaaaatctatgtgggtttttgatgttttcgcttattgtttctttattttagttcctaatgtttcttcttgctgaaatagtctaatacaatgcatcgtggtttctgggatttctttgatttgaattgtagatttaaagggtttttgcgggatttgtccttttttttttttgtgggattccatttatatggcttcacatcatgaaaagggactaattggaattaccctcatcatctgcatatagattgatttattttatgatttgaaattcattagtaaacagagaaaaagtcattgtgattgtatatgttaatcatattgtttaatgtttgtaaacttatcttgattattatttttttcttttttactttgttgaatgtgttaatgtgtctatatctgaaaggaagaactctacatctccaagctagttttctcttg

SEQ ID NO: 55962 - DNA, 395 bp, Populus trichocarpa
  Intron number 3 from transcript POPTR_0015s07490.2 (locus POPTR_0015s07490) derived from phytozome v7.0 (chr-ID scaf fold_15; pos 8763574 to 8763968 reverse strand)
agtcttccaaatctttcactgtgaaaggaagggaggtaataattagtacccagttactccttgttaatatcatattgcctgccttaagtttcgcaacctttgattcaatcatctatcatgcaattagtttggaagaaaaaaaaaaaaaagagaagataatgttggtacaacttcagctttacatagtttcatgtaattattattattattttttggtctcaactcttgatcattgctataaactgactcttgatcctcgctgtgttgttcccattaaggcgaacattcttggtaacaatactgtactccaaagacaagctcttatatccgaacaaaaatgtacctactaattctgcttctgaactttgatcggatccatgtgcagagacccgcga

SEQ ID NO: 55963 - DNA, 559 bp, Populus trichocarpa
  Intron number 2 from transcript POPTR_0009s10650.1 (locus POPTR_0009s10650) derived from phytozome v7.0 (chr-ID scaf fold_9; pos 9120766 to 9121324 reverse strand)
aataaagttttcggcattgtttttcgcactccgccgtaagctcttagcattattattagtattatcatcgtgttttaagcttaatttgattttaagtggatgcaattctagtggttttgattaagaaaatggatattattgaaatctttattttttgtgattgttatctttatagtatttgactttcttttttttgttgctttaagattaacttggtgtttaaatggtgaggtttatttgtactttagtagaagagcgtggatatcattgaaaagtttgaatttattatgattgtagaggtgttgaatttgtgaaaggaattgactacggagtgttttgtttttgaaaattaaaattgttgtgttttatgctctgcagtttggttattagcgaaaagtttggctaagtttttttatttttatagattcttgagagaggaactgataaaattttacgccagtcaaattttgtagcaaaattagttgacgtgcaagctactgatcatgattaatggtgtaatgcaggaaggattcaactgggataccacacatattggaac

SEQ ID NO: 55964 - DNA, 568 bp, Populus trichocarpa
  Intron number 5 from transcript POPTR_0009s11580.1 (locus POPTR_0009s11580) derived from phytozome v7.0 (chr-ID scaf fold_9; pos 9599508 to 9600075 reverse strand)
ttcagcaacagtatgtggcagttcttaggtgaacaaattttctcattgtgtacccattttcagattggcttggctccattttcagattctttagatctctggggtgcagaagccagggagctcaaccaagtcagtgaagccttaacttgcctttttttttttatcatcgtttaaatatgttctgtgatccatatgaaactgttactatgttcattaaaagagtgcgaagatggatgtggacaccagaaaacctgacaaaaaaatgactacaagaaaggattaacttactgaagtgaggttataggaaggttgtggaattctgttgctttttgcagaattcaggtggttttttctggactggaagaaacacatggcttactaatttttatttctttttgttgtttgatgtgattatctgtcaagggcagtaatgacaatgtagttattggtgtctattaaaactacaatttgggacttcttcttacttggttttcggcacatgcgtctgacttagttatgaacgtgaacttcaaatgaatgtttttatcatgctgaaaaaatcttgcag

SEQ ID NO: 55965 - DNA, 837 bp, Populus trichocarpa
  Intron number 1 from transcript POPTR_0009s01320.1 (locus POPTR_0009s01320) derived from phytozome v7.0 (chr-ID scaf fold_9; pos 1585790 to 1586626)
ctcgcatcctctttctagagatatccgcgtatgtttgttgatttttcttttttaaatactacagtataatctatatatatatatagattgattggctggttgatttatttttatgttttattgaccttttttttctaagtcttgttagatgttgattataacgcaggtttttgcttaatttttttattaggctccttaattaatttgatcgcaccaattttttttctcaaggttcttttagatggttctctaattctaagctgcaagagcttattgtaaggattaattggttacctgtaagagtgtctccaattgccatatcttgctttcaatatctaaagataattattttgattttttttttttgtatttctgagtatgattctgatcatatacagatattaaatcaaatgccctgggatattattatagatatattaacgtgcagtttcttcaattgatatattccaaaggatatattatgttatatgattactagtcttgcacacatcacaccagaattataaattagtctcaccacaagcttattgttgctagcatagtgtacctagacaagtgcctatgcgagcagctgtgtctgtcatcagtgcattctggcaaccgtgaacatgcaatgtttagactaaaaactttcttttctgaatgaatataagctattgttcacccttctgggattccttggaggaggtaatatcaagtgataagggtttttttattgcttatttgtatagagtttaaatcttggttcaaaaggtaatgttatttgcaaataacttagatcttcattgcagattgaatcattgtcagttacttttc

SEQ ID NO: 55966 - DNA, 1028 bp, Populus trichocarpa
  Intron number 1 from transcript POPTR_0004s08380.1 (locus POPTR_0004s08380) derived from phytozome v7.0 (chr-ID scaf fold_4; pos 6913925 to 6914952)
gactccactgagaaaatcattgctgagtacttgtactgccttctttactctccacacacgcacacttcttcttctttcatttttgtacgtgaatgtatggatatttgtatgtatgtatgcgtgtgattatgtgtttctgttaaagggtttgctttgttttggcttgcttctttgattctttcttgaaacctatctcttctggaattgtgggatttctctattttcttgttcttgtaactgttcttttactttcatgaaagattatagataattagatatgttttgtagcttgagtccttttctttggtcatttaacttcagagaaacgaatgcttttcgaagagtatctcatttattttgaaaaaaaaaaagaaaggttttacttctcctttttgcagttcttgccattcccctgctgcagttgttcatagttttggatggtttttctttatttttgggtgctatgcttgtaatattcaactaccacgaatataagtaaggtcaccaattcgatgatctgacgtgaaccaacaattgtgagtcatctctgcttattccacgacatcattttcaaagaacagaacacatggctctgccctgcttcagctatttacggtgtgatcgattggtgacccaataagatgctcggttttgaagaatcttacgggtttttttttaacaaatagttttttaaggataaactttagtagttcgaggcaaatagttttagccaatattgatatttaattgaattctgtttgtttctaattaattaattttttctttgtttgtatgattaaaaaagggattatttgtggtatcagaattaatgatcccatgttcttgatttttccttggaggttcaagttttgtcaagttcttatggtagttaacatggctaagctcaattttgataaatctttgaagttagaggttgccttgttctgtaaccaagcaagctagtaatcaatgatttgttcaattcttgaacaggattggtggatctggattggatataaggagcaaag

SEQ ID NO: 55967 - DNA, 752 bp, Populus trichocarpa
  Intron number 1 from transcript POPTR_0011s11790.1 (locus POPTR_0011s11790) derived from phytozome v7.0 (chr-ID scaf fold_11; pos 14587957 to 14588708)
tatacgtgagtttaaacttaaagttcactttatttgatttcttttccctttcgccttctcattatataaatattaagaaaattttatttcttttgtacatatgatagagttttaaaaggacaacatatgaacctaaaaaagttttagaataattttttattaactcataaattgttttaatcatgttaatatgtatttcaggttaaagagtttatattgaaaaacaaactccaacaaagtcttaactccaaaagttaatggagcacacttttaatttaaaattaaatatgtaaattaaccatgaatttaaaataatttttccaacaaaaagttaaaaagaatcatgaagacaatcaatatcatgatggtattacacttgtgctagtcttcaacttacaagaaaaaaatattgaaacttacatcacatggtaatgtaaaatatacatgcatgatgcttgccagcttggagattttaaatagagacaaagaaatcaaaaggatcccctaattttcaatataagtgggctaaagatgactcacagagaagagcttattaggagcattaagttcatgcttgctcatgggcggccccgctacgcattctagagccgggcattattgggaaggcatcttctttattgaaagtgattgatttggaatcctgtcgaaaataaaaaaattgaaaagaagaaaaataagatgaatgatgttatttagataagaaagaagatagaaaggcacggcaaagctaa

SEQ ID NO: 55968 - DNA, 940 bp, Populus trichocarpa
  Intron number 2 from transcript POPTR_0009s14700.1 (locus POPTR_0009s14700) derived from phytozome v7.0 (chr-ID scaf fold_9; pos 11451435 to 11452374 reverse strand)
gattcggggcagctacgttgcttgcaattctttgattaatatgtacttcaagtcagggaagattagagatggtagaggtgtttttgatggtttgaatgataggaatgctgttagttggaacagtatggttgctggtatggtaacaaatgggctttatttagaaactttggatttgttttatcatatgcgacttgctggtgaaagctcaccaagatggtttttgccccggttatctagttgtgttgtacaattaaggaattaagcttttccaggcagcttcattgtcaggttttaaagagtgggtttgaatatgataagaatactaggacaacactgatgctagcatatagtaagtgtggggaaatggataatgtttccaagatactcgctctgatggatgatgaagttcgaaatgtggtgtcatggtcagccatgattagtgggtacttgcagaatggtatggcagaacaagcccgtaatctgttttgccaagtgagtagggtaggtgttagaccaaatgattttacctattctactatgcttaagtctcaacctggagtttctccttttgagatacacgcacaagccatcaaaagcaattatgctaagtcaccatctgttgggaatgcactcttaaatgcttatgtcaaacaagggaatgttgatgaagcttcaaaggtttttcaaagcatagacgagaaggatgtggcatggtcggcattgatttctggatatgctcaaataggagacactgacggtgccattaggatatttgtacaaatggagaaggaggggaattaaaccgaatgagtataccttctctgttatcattaatgcatgtgcagctcctgcagggggagaacaagggaaacagcttcatgcctggtcaattaaatcaagattcaataatgctctatttgttagtagtgttcttcttacc

SEQ ID NO: 55969 - DNA, 734 bp, Populus trichocarpa
  Intron number 1 from transcript POPTR_0015s13630.2 (locus POPTR_0015s13630) derived from phytozome v7.0 (chr-ID scaf fold_15; pos 13503327 to 13504060 reverse strand)
tctgcgtttcgctttatacagcttgtcgtttcaaggtcagtagctaattagtctttttatttctttattttttctgcaggaaaagaaaatattgcttgaattttttcaaattatttttgttaagtcttaagatttttgtgatcgatctcttgagctaaaaaaaacaaagtgtttttgtgttttttcttttcttttctcttttgatcttttgatttttaattgataattaaaattaattaagaactgggttttaattaagtaagaatttttttgagttctcgattctgaatgtgagtaattaagtggtggttaagcttgaatagttgtcaatacatataattagtgattataggggttttaagtgataaagttagagtctttttgggttttagttgggtagtgtagttgctgtagctaaagctgagagctaaaaaaattagggtttttgggggataatttaggaaatgaggtttttttgagttgtgattaaaggggggttgattaaaagataattaaatttggagttctttggatcttagttagtgttgcaaatgtttctaaatttagctaaaaattagttagtttttttttttttcctgggaggtaagtttgttcttggaattgtgttgattgagagttttagtttttattgtttttcgtttttctagtgctgatgtagagttatattgtttgttttagatctctacaagaaattgttgaaagctgaaacagat

SEQ ID NO: 55970 - DNA, 540 bp, Populus trichocarpa
  Intron number 2 from transcript POPTR_0001s02390.1 (locus POPTR_0001s02390) derived from phytozome v7.0 (chr-ID scaf fold_1; pos 1815352 to 1815891 reverse strand)
ctattcaggtaaattcaattgcttaccaaatgttgtatttgcgtttttgctcattcttgtcaaagttttgatttttttcttttttcttttttcgctttccttttctgggactgagagaatccctctgttttcttttacttttgttggacactgtaaatccaatctttcttcttctttttttcaaatttccatttatagtggctgagtgaatttttttttaaattctgtttttaaaaaatctcaactcaatctagtcttaattgaatgcagattctacttttcaaatataaactctccttctcctacattttctcaacacccaaacagacaaatttggccaatgaatttgaccaatggtgaaatactctcttcaattcttttatgggttttctacatcctgcaaaactcacttgggtttgcgttttattttctcatgattccattatagacagtttcgaaaagaaatcatgagttccgcgtggtctgacactgtctcttattgtttctttgtgaatgtacagatacggaggtcttcatatc

SEQ ID NO: 55971 - DNA, 761 bp, Populus trichocarpa
  Intron number 1 from transcript POPTR_0011s03430.1 (locus POPTR_0011s03430) derived from phytozome v7.0 (chr-ID scaf fold_11; pos 3532958 to 3533718)
cagttaacacaacagtcagggatccaggttgatgctacgttttctcttcttgtttctcttctcctgcttgccctttgtttctcgatcttctctctcttttcttgccaaactccttgaagatatatgagattttgtcctaatatttctttaatttgttgtttgtgtgtagtgcattagttatcaaatctaatttggggtcgaaaagtctgacttacaagttgaatgaattaatctagattaattatttttatttttattttttaaaaaattaaattagattttgattgagttaaactaactcaattaacttaatcacaagtcaggccagattctgaatggactgatctggtcatcagactagatcctgtatcgcaagtctaaacttagtgtatttacagattacgatttaactcatctcgtattaatattttacttttctcaagaagtctctagtttcgaacttctttgtatcttaaaaaaagataaacacaagtttttatcatcagcggcttctgttctttctactctgacctctcatttgggtctttgagggaagtataaaattgcataacaaaaggattagagttgttaaatttgccagcaagtcaatggagtccatagactgaaataagaggtcagagtagggatatggttatttgggcccctaactgaacttgtgctacactgcaaatttcagagtcacaacgcagtcctttttgcatgcagacaatcaaaagaagattgctcacctaatagcacta

SEQ ID NO: 55972 - DNA, 837 bp, Populus trichocarpa
  Intron number 1 from transcript POPTR_0015s05280.1 (locus POPTR_0015s05280) derived from phytozome v7.0 (chr-ID scaf fold_15; pos 5647633 to 5648469)
gagtacggtaagttaattatgctctgagcttcagtaaactggatatgcttgaagacttctcttttctcaattctggtcctgatacgtctgtcattttgttttaatgtgaattcctgctattaaaacagtttaacattaattactccaattaattacaagaatttggaatgtacgtccatcattcaagtcccttttaaatcagatacttgctttgaatcttgtctttccctatcaagaaaatgggcaatttctgcacgaccattcctagctattgttatttctgatcaagttgctatttcttcttggaattatttattttaactttaccctttttgatgcatatgcagcacgctcctgtaaaatgtttcacaaagaagtattgaagcctgggaaattgtaggtatacaagttctttagccttcttttaattacccccagtgtttcattttatgccttttttgtgattcgactatttgtttgactggatccatcaacgatgtaaaaacatgcatgatcaggacagcccgatgcttttatgttatttgtagtttctgatgagtctgatctgctactgtttaccaaaagtgccattttcccttctcccgaaagttccaaatgacaatctggtcatggtattgaatgctttcatttgccgtctaaaatgcgggtctctagagaatattagttgcagacaagttcaattaactttttttcctttccctcaaaatgatcgatcatatcatgtcatttgtatttttctctttcaaggagaatcatcattgtcttctcattttgttctcaggtcagcaccagcattttgctgtggacctattgata

SEQ ID NO: 55973 - DNA, 894 bp, Populus trichocarpa
  Intron number 3 from transcript POPTR_0014s01100.1 (locus POPTR_0014s01100) derived from phytozome v7.0 (chr-ID scaf fold_14; pos 1027338 to 1028231)
tggtgagtctcctcacattctaaactgtacagttaacttctttgtaagctttttattgatgttaatagtacatacaaaaaatccttgtttcgtggcttgttaactacatttgtgacatgtaaatgcttacgctgcctacttcttcatgatgcattctaattgaacacgtgtgtgtccatttgtgattatgtttggaaatggatgtctgtgcatgtgtgtgcacacatatgagggatagagagtgcgtgcacctacaatggctcaaagcttgctgaaatttttagatttgatgtccctctaaatacaattctttgataaaagaaattttaagaggttatgactgatgaccttaaagctcacatgataatcatttttctcttaaaactcgtttttgtttcttcagagagcaagcctgcgtaaacattgcccttctgttgaacttgcttcacaaggtctgtgacaatcatgagatgaggaattttgaggcctatatttgtgctttcacacatttcctgtgtctattgggaggaggaataaagagactaaaataacatattaaataagtcttgctgctctgtatggataatgtgatgagcaatcacgatggaattgtcctagttcagtgtttatgagtttattggcccaccacatgccttattttattcattgaaaaatgcttatatcaaaatatggaacctccatatctgatacaaatcctcttgagtgcccctattggtctgagatgcctgtttcagtggattttgagattctctggctattgcttttttgattgtatcttgagtgacattctgtatatcttgttttgatgcatgcacacttgtgaaatctactctgttcagagattttacttctagtgttggttgcaggttaagc

SEQ ID NO: 55974 - DNA, 448 bp, Populus trichocarpa
  Intron number 1 from transcript POPTR_0015s07930.1 (locus POPTR_0015s07930) derived from phytozome v7.0 (chr-ID scaf fold_15; pos 9201784 to 9202231)
atttggtttgtttctacttcagtttcttttcattcctttcgtttggtttctcgaaaggctggatttttttcttttcttttttctagctggaatggttagtttaagcctgaaatgataaatgttcggactttattttttttgctgatgaaaatgtttaaaggagactttttcttagattgccactctttatatgtataaactgaatataatagctcttgaaaaaagttgagttttgagtttgggttcttttaaatgggaattgaattttcttctatttacttgctttgcaattataaacctttgaatgaagtttagggttgttatttatggattgaaattttcagcctttttggacttaagatgttaggttaggagatataaatgaatttttccttgaattgaaaatgatgcatgtctatacctttcttttctttgtatttgtgataga

SEQ ID NO: 55975 - DNA, 824 bp, Populus trichocarpa
  Intron number 1 from transcript POPTR_0014s00820.1 (locus POPTR_0014s00820) derived from phytozome v7.0 (chr-ID scaf fold_14; pos 772038 to 772861)
tttctctcatttcctctggtgattggagctgttgtgtacgttttcatcatgtttcctcttccacattcttccggtttatgtttcttcgatttgctgtctgtcttttggtcatacaaccaagcttgtgttctaaatttagccctttagaacacatgttttaggacccattaactctttatacagatagatggagttaatttagctaaattagaagtcttaactatgattgtaaaattttggagagttgatatgtttttctttttagctagaattcattttgatgctgatttcaaagaatctttaaggtctgaagacttgttagtagattagttgttgaaatcgaccaattgtctgaactgattttcatagatgttttagaaagtgtggataatggcagtcgaaaagggaaagaacttccactgcttcttgactgattgcatgcaccttatgatttgcaaacagaagccagaatgcaatccttgttctgccttttggcttcttaccagaatttaatagagctccattgcttctgagtttacctggttaagctattctggtgaaccttgagcttgtctggtcagtggtttgctgatttttgctgagatgttatggcgaaattgtatataatcttatctgaaactactttttccatagatgataaaatgatacagctttttcatgacctcaatgttgtgtaaatatgacctgtcaactattaagcttcaaatcaaaattttcatatggtttcatttgattttatagtaacatgtcttttatgcttagggaatgactttatatggcttttgcagcattggagttgtttc

SEQ ID NO: 55976 - DNA, 901 bp, Populus trichocarpa
  Intron number 1 from transcript POPTR_0001s06670.1 (locus POPTR_0001s06670) derived from phytozome v7.0 (chr-ID scaf fold_1; pos 5108325 to 5109225)
attcacccagtggaccaggtctcttgtttccaaaggtataaagtcgtgacatgctcttctggcattttactatgcacactttgctttgtacatctacctttccttttggcccgttaccttctgattctgctatagaatgtgatttaagtttttattttttatttagatatttcaatttacagtagttttccccttcaaaattttgaacatgcttgagagcattatctgattatcatacctaactttttgcttctgcagctcaagtctgtgactcttagttatttcaatataatgaaacttccttaggatgatttgaagtctgaactcttgcttccttgtatgaagaggcattttatttttgaaaccagtaatcttgaccatatggccttagagttgtgccgatgttggattttagatgggaaaataacaaggggaatgcaaatgaagctgcatgtgataataggaagatggctagtattgagtttatagcttaggagtttcagaagtgattttggagctaatgattctgtatgaatatttgcaattactctggcatatttgtgccatgagcatgtttgttgaggtctgtgtgcgtgagcttgcatgcttgtatttctagggaaatgcaaaattcgttcgattccttttcactttattttggttttgactatatgattaaggaatcccagaccttacaaatccatttatggtttcaatctcaatcctcctgtctttaaagagccaacaagggatagataccatttgtttcaaatcatgtctcttgaagtttctgtttgtgaatggggcatatataaattcctacttcctgtattttagttacttccaggaagagaaaacaaaagaagttaaatttcttttcatttttttttccgtagggggg

SEQ ID NO: 55977 - DNA, 566 bp, Populus trichocarpa
  Intron number 2 from transcript POPTR_0015s09530.1 (locus POPTR_0015s09530) derived from phytozome v7.0 (chr-ID scaf fold_15; pos 10730446 to 10731011)
caactatccgtgatcacggtatgtttttaccttatatattattttttttctttttaattttcaattctctcaagtgaattttgtttgttgggagcaatgtagagaggataagtgattgttgataaatttgttttccgttttgtgttgaaaattagaaatttatactgggtttttcggtgcatgttggagtaagctactactgtttcggtttctgcttccccgatgttggattagtaactaatggcttgctaatgaggattgagttggttcttgtcaattgcttagttccgatttgggattgaatcctgagttggttttatgatccacttaaaacggagtcttgggttcttgtggaggtgttgatcttatttgtaactaagcattggttggttagatgtattattggatctggcgatgtgatttatgtagatacctatctaatttgaggtcttttctgttacaatttaataatcttgtcttttacgtatatttgtgagaattggatgatgaatttccttttgaattagatgcttgtgtggttctgaacaggtgtcttttatttatat

SEQ ID NO: 55978 - DNA, 762 bp, Populus trichocarpa
  Intron number 1 from transcript POPTR_0004s03920.1 (locus POPTR_0004s03920) derived from phytozome v7.0 (chr-ID scaf fold_4; pos 2779702 to 2780463 reverse strand)
ccaaggagaacgccgatcctcaacaggttcgtagtctagttctagggtttttcttttgttgataatgctattgtggcggtctatttgtttgaataattgaataatttgaggtagtttagttgattttgtggtgtgaattggttgtttttgctgtctaaatttgtgaaattagggttttgcttttggtactttagttgatttgaagctagggttttatatcctatgttggcatgatgtaccgatgatgctgctctctttgtattaatttttttgagcatacatttattagagggaaaacactgctaggaattattaggaatttatagcactgttcgtggtgttttcggtaaataatagatgatagtacaatgtgtgaaactgattttgatgttccttgaaaacagtaaataccaatttaatcaattgggagaaaaattggagtttataatctgttcccatgctgccttttctttctcttgattgcttcttgtacttagaaatgtaatcaagttgcactctgaggttcacttcattgtttgtttggctgttctttgtataattagatggactttctttgtataaatgtcatctttgtgatcgctcggttaatttagagaagaattagatttgaatttgtattgattctatgtgtttttatgttgatttaattgcaaataatgcaagttatggtgtatagattttaacttggcaacttcttatattgtccaaacttgcaggtcgttgaccaagttgttattgagt

SEQ ID NO: 55979 - DNA, 583 bp, Populus trichocarpa
  Intron number 2 from transcript POPTR_0015s01150.1 (locus POPTR_0015s01150) derived from phytozome v7.0 (chr-ID scaf fold_15; pos 707845 to 708427)
atataatttctaaggctttccaggtgaatcacttgaatctttgatgaaactgttgcttgatatatcttctagctatttttatcacaattagcatttccttattctcatgtcttgacttggtcttgatgatcatgaaatttgataattggtagtgccttgttcatctgtgatttagattttctgtgtaatttgtcattagattgaaatggtttcattatatttgtgataaacgatttggattattacctccacatgtgtgaatcgatcctgttcatagtatttgctctcatccattgatggcaccctatgtagaaaatacagaccctttatcagctggttactgcaagaaagtctttgatgattgctgtatcttgaataatgtagaaaacacaagaacaatagttgccattcttttatgtttctaagattgatgtattcagttcatcttagattgctagttttgtcaagttattccatttttattttctgctaaacattggaattatatatctttttatgataggaagtagtgaccagaaatttgtccaattttctcttccataattttgttcatagggaagac

SEQ ID NO: 55980 - DNA, 647 bp, Populus trichocarpa
  Intron number 3 from transcript POPTR_0012s05320.1 (locus POPTR_0012s05320) derived from phytozome v7.0 (chr-ID scaf fold_12; pos 4930721 to 4931367)
ctcgggcagagctgcttgacataattcttactaaggtacacccctttttctttcagcaattttactggctgattttcttttaaagttttttttgtgactttttgcttgttttgttggttgctaaacctaaaaggttggcagtgaatagggtcaacctccttgtagagatccccgtctctaaatatttaaacaatttctaaatattttttttgttcttcactgctgtattttggatataattggtggttacaaatttcttaacttactatttttctaaatacaacttttgtttttacttgtttttggttgaggttagtgtgtacttttactcaagtatcaaagaagtttgcctttttttggtctaatcttggttcaagtttctcatatgccaagatggtggtgagaatctgttattcgtcacagttcctgtttgaatttctttgtgttcatgggttagatttgtgagcttcctactgtctacgctttcttgaagcaaataatcaagtcctcataattttctctactaaattatgtggggagtgaatttgtttgaatcttttattgttttctgtcccaagagaatttataattgctttgcattttctgattgaaggaaacttatagatctgaattattgcagggaggta

SEQ ID NO: 55981 - DNA, 648 bp, Populus trichocarpa
  Intron number 1 from transcript POPTR_0015s13580.1 (locus POPTR_0015s13580) derived from phytozome v7.0 (chr-ID scaf fold_15; pos 13466092 to 13466739 reverse strand)
ggtctattaggactgccattgatactggctgcggggtaattaaactcctgacacataatctctactagtattttttttcttccttaatattatcttattaatttttttttccatatttttaattttctttttcaattgtaataactggaaaaatctgtaactatccataataattgcgggatgtctaaaatcagggttaagagtaaattttagattttctttttatttttggaatgattttaatgattttttgggcaagtgaaacaatgggatgggataaatacggaattagtatgttagatttcgtatcattgcaaatctgagtaatgagatttgatttactactatataaagcgtcaagaaactaattaagaaatatatcttactttcttttattagttagcccagaaaattccaactatccaccaatttcacaatcccccattaattgtacattcttgatttccgatcacttaatggggacaaggggagcttgtttactgcttgtaaaattcaatgggaatttgggccctttttttcaattagttaaagaattttgcatatacgagtgaaagaattttccaggccctgaaattcgttgcaactagtgcaggttgcaagttggggaggttatcttctgtcacgcaa

SEQ ID NO: 55982 - DNA, 728 bp, Populus trichocarpa
  Intron number 1 from transcript POPTR_0012s00890.1 (locus POPTR_0012s00890) derived from phytozome v7.0 (chr-ID scaf fold_12; pos 566093 to 566820)
tgtgccttctcgtcagaactgtacaagcactggatgtgtggcggatttgaacgaatcatgtccgtcagagcttagggttaccactagtacagaaggcaagactgcggcatgcatgagtgcgtgccaagtgactgggttgtcgatgttttgttgtactggtaatgctacatgcaagccttctttgtattctcaattcttcaagactccctgtccacacgcttacagctatgcttatgatgatcaaactagcaccttcacttgtgcacccaccgattatcaagttacattctgcccaggtaaatatgccgttctccaatttgtgtagttttattaatttggtattttgtttctgatcatttcaacatttagaggtagttttgtgcatctgaaagtcggtatagtgttcacaaaccatgaagtttaagttaccataaaagctcaaagtagactgcagatactgctagaaaatacatcataagaatgaagacctgtttagtattttagcagttttaagtaaatgtatgttgggaacttgggatccatgtacgagtatggctataaaaaaagaaaattacagagccatgccaatgatgggaatgagaacatagtttcattctatcatttcttttcacataaatccaccatctttttggttccataatgaatctacttcaaaatcattttgtttggcaggcaacacaacggttattacagaaaacaattctcgt

SEQ ID NO: 55983 - DNA, 784 bp, Populus trichocarpa
  Intron number 1 from transcript POPTR_0001s07560.1 (locus POPTR_0001s07560) derived from phytozome v7.0 (chr-ID scaf fold_1; pos 5679793 to 5680576 reverse strand)
ggaaaagtcgaccttgaatgggagatttcacatcagaattggagaggataaatggactgtcgcaaaaagagcctcatgtgtctctgtttttcttttcccttgttactattttgatgtgaattaaacatataaacatgtaatatgctttatcatgggggtgtaaattatgctgattttgcatgtcaatagtttttaaattaatttgtcacagaataatgtcgttccaggtcaacttctgctgtaacaaaggaggagagaaaaatatgaggattagggtccccacacagaaatatgagaaaaatatgaggattagggtccaataactttagtttgagatttcacgttggaaacactcggtcccctgttttattcatatcatcgtcgtctacacgctattaatcgaagcttggaagttggaaagaaacatcctcactccaaatcctacgaatactcgaattaaaaatatggaaggccaccatattatatatatagatagattgagagagaacttttcattcaatttgcttcaaatgatttgagaacttttcattgtgtttactcttttaaggcagtcttctctgtctcaattggtattttttttctcacaaatatagggagcaacgaaagatcttccccccccccccccctctctctccttccattattgatctccagcagcatctaaatctgcaataaaagggaaggcatgattcctcgtagtgtctctctaaattttttcttgctatttctagtccgtgaaatagcaactgtatcagcactaatt

SEQ ID NO: 55984 - DNA, 849 bp, Populus trichocarpa
  Intron number 1 from transcript POPTR_0004s21240.1 (locus POPTR_0004s21240) derived from phytozome v7.0 (chr-ID scaf fold_4; pos 20450888 to 20451736 reverse strand)
aatagcaaagggtggtctggtctttgatcaaattaaaactctgttcaagttattctagcatcacaatagcttccttccaacatgtccttatcacctctaggtcttcaagaattcgagtccaagttgctttctctgcttgatatttttatctcagaaagctaagagcaaacgactctttaggttttcaaaggttttttgaagtagttttgttcctaagcctgtcttctggcttcaaacaaaagattaaccctaagacttgtccttttggtgagtgcaagttttgtttcatattcaacatgcgataacatcaaccgatacttgagcataaagtgggctggtggctttccacgtcatggacaacctgccttcacattggataccttcttccatcagcaatggccccagcaaggataagattggcagatcataggcgattccacttgaccattcgatagagtaaactagctagctactacaacgtttgattcccagcaaatatttaatgagctgccattgcagaacctaccaaagctctctctcgatggtcccaaatgccaggagactaagaaatccaagtggttatagatgataccgattggtttgatcttgtttggtactcagagaccatgtcatgttgaggaaacacagagcaagtggtgctagcaattggcttttaatggcagtcacatccataacacgtcaccccaccagcatttggtgggctggcaacagttaattatgatgctcacacagcttttaattactaacttctgccgttatctaatctattgctcaaacacatggctaatattctgctacaacatctttatgcagggagagagagagaga

SEQ ID NO: 55985 - DNA, 700 bp, Populus trichocarpa
  Intron number 1 from transcript POPTR_0012s13900.2 (locus POPTR_0012s13900) derived from phytozome v7.0 (chr-ID scaf fold_12; pos 13852562 to 13853261)
acaagtggaagaagaattcaagcttcctgtgattagtaagtgtaggaagaattcaagcttcctgtgattagtaagtgtagtactttacctcttcttcgtttatgacatgggatgaacatatgtctatgtataaaacacctttatatatatatatatataaattcgattgatactagattcaatttatatatagatagattcgatattaaatctaaaactgacatgaaaaataatatatctatgtaaatatatatatatatatatagattcgatcggttgaatctaaagctaaaactcaaattatcatcaattttattaataatttaatttaaaatgttagacttgcaataaaataattggaaatatattgttaaataacaaaaaaaatatatatataaaataacactaaaaagagtaatataatgttaaatattagaaaaatatgacaagataaaactcaactcgtatatttttgaagtttttattcattttttttttatatttaacatttttaaaaatattataagatttgaactcattatctatataattaattactatataaatcacaccttgttaatttattgcaaagttattcactaatgtattccttgcattattgatctttaaattagattttctattttttttttttttttgtcgaagcttttctgatttctgtatcatttctaatgcagta

SEQ ID NO: 55986 - DNA, 533 bp, Populus trichocarpa
  Intron number 1 from transcript POPTR_0011s06130.1 (locus POPTR_0011s06130) derived from phytozome v7.0 (chr-ID scaf fold_11; pos 6210962 to 6211494 reverse strand)
cgaagctcgtccagcaataataaattgtaaggctcttcttttatactctgtggactgcaatgtttttcgtatttatatttctggagatgaaatttagcaatagagattctgctgtatgtgatttcaaaaaatcccacagggtcaaaagaactcctctatggattactagcaagatcttgtacctatttgcgataacatatgctatcatgagtacagagttgcagagacagacacaattacttcagatgaacgtggaattcagacaaaacatattttgatattgtaactaaataataaactatactacatctttaaatcctacgtacctaagcagaatagatatatatccagaattaatttatgctcagagtataatgcttatcattttttcaaggagcaaacacatcttgaatattttccttgagtgatacagtttttttaagcatgttttgattcttagaattcaatctacaaaaccatttattattctaacatactataatttccatgatatacagaagcgatcttcttcc

SEQ ID NO: 55987 - DNA, 646 bp, Populus trichocarpa
  Intron number 1 from transcript POPTR_0009s13830.1 (locus POPTR_0009s13830) derived from phytozome v7.0 (chr-ID scaf fold_9; pos 10942283 to 10942928)
attttggagctgcttcagtgttttttctctaatcggttagtttctgtaacactaatctttttattccattattgatgactatttgctgctttcgatactgagcatgtgattttttaatattttgtgagattttgatgtcatataaaattataggtttcaatcattgattatgttaataaatatgctagtttttttggggggtttgattagattgcagattttagtttaaccaatgggtatcgttttttttttccccaatcttgttacgggttatgaaaaaaatagcattgattgtgtagcttagtttcgaatttcaatggcagcccgtccgtcacttttaattttactgtttaaaggctcgatcttcagggtaatttttcaatgtataaagaagctaaactttaattgaacttagatgctgcccgtcgaatatagttttacagtttaagggtttgagattcaaggtaatttttcaatatggaaagaagcaaagttttgactgcatttcagtgacagatcgtcgattttaatttattagttttaaaagcatcaacttctgggtgcctttaagattattttttttggggactttgtgttaatggtaaaggttttgaattttttattgtattccaatatgtgttttcag

SEQ ID NO: 55988 - DNA, 654 bp, Populus trichocarpa
  Intron number 1 from transcript POPTR_0012s12290.1 (locus POPTR_0012s12290) derived from phytozome v7.0 (chr-ID scaf fold_12; pos 12508327 to 12508980)
ttctggagcagttaagcacggtcgttgctcaacaggtaattacttttacacagtttgcaatgatctaattaaccctaacatgaataagaaatataaaaatgaagtctctttttcttcctttataagaaacataaataaaatctcaaatactcagatctagatttggattttattaaagaaatttctttttattgttttattatttttcatatttccggaaataatctaaaacaaatatctttagaaggaaaaaggagttgtcgatcctctcattaaactgtaaatacatgaatcaaattaatgttacaataattagttcacttaaatggatgaatatttttggctttaaaactatagttcacataatcttaataatggatttatttccaaatagaatttacaaataccaacaaatacagatccttttattcacttgcctttaatgaatctctatatttctttgatccaccgtgcttatgttatatataagtttgacgtggaacaatttaatatattaatacaaaataattaatcttcttatcttttctacaccatattgtgttgaaatcatagtaacgtttcctatgcttgaacttccttatcttttgtacactaataggtacaagaagaggtgaacctcgtaggaggtgtgaa

SEQ ID NO: 55989 - DNA, 320 bp, Populus trichocarpa
  Intron number 2 from transcript POPTR_0012s10480.1 (locus POPTR_0012s10480) derived from phytozome v7.0 (chr-ID scaf fold_12; pos 11238718 to 11239037)
ctgccacggtaaaaataaatcaccacccttctattttttttcctttattaataatgggttttattgttttgttaatttgaggtctccagttcctattctgacttcttaaggtcccaagtttgtgcttttttgaacacaggaagagtcttcttagatttggatttggttaagttgctgaaattggtttattgctggtttgagtttgatttgagagagcaaattgttgattttgtagagctgtagctgaaagttatcttattttgaaaagtgttttggagttctctgattgttggcttatgtcattgtttttggggcaggaa

SEQ ID NO: 55990 - DNA, 530 bp, Populus trichocarpa
  Intron number 3 from transcript POPTR_0012s10480.1 (locus POPTR_0012s10480) derived from phytozome v7.0 (chr-ID scaf fold_12; pos 11239078 to 11239607)
aatctgttggtggacaacctgttgtgtttgattctgtcaagggttcatgaaggatattggaggaaatgactacattgattatattggttcttgggggcctgctataattggccatgcagatgatgggggttctattcttcttctccaccatttgcattttaagtatttatgaaattttgtctttctgtgagaatcttggtactcaaagattgttcatgttccatttttattagagaagtggcccatttctaaaagtagagcatgggttagctgacatttcttctgttggaaatctaggattgaatgggaatggagattgccattatttaattatccagaaaagattttcattctcttgcctgaatcaatggaaaagacttgctcatagcagacggaccatttaattgtctgttgtttctcatggaagtctactaggtattggctctggaatacaatgtaccctttggttttatttttcaatcttgcggactgacatttactcgcaggtacttgcagccttggctgaaaca

SEQ ID NO: 55991 - DNA, 888 bp, Populus trichocarpa
  Intron number 3 from transcript POPTR_0011s09420.1 (locus POPTR_0011s09420) derived from phytozome v7.0 (chr-ID scaf fold_11; pos 11661708 to 11662595 reverse strand)
agacatgtaatatcttatccaattactcaacatcagtttcatggataaatctgtcaacgacctatcaaaagaattaatgactctgcttatgaagatcttggctgtgatattgatgtcctgtgtactggatctggattctatatttcaaatacatatgtatgcagtgtatgtttgtgttcatgtgtatgtatgcaataagcagcaaccatatcattcttagaaatcgatatatatatatatatatatatatatatatattgcaatgtactttatttatttttaatgaacaaatcatttgaacctttttatacatatggataaatttgaagtggtgattgatctagaaaagttacattttcttctcgtttcaaatggttgttttaagttttctagctatttaaggatatcccggagcatgttaaaatttaaagcatgagtacactgaagcatgtagatatattccaaataagcaaccatgcccccccccccgcgcttaaaacaattcattttcaagtttctgtagtactgcaatattcaaacaacatccgtcacatcttttcacttttattcactactctggctggtctttggagtccttggacactttagattttagaatgtagcctttttttatttaattatttacttcgttgtgtttctttttggttcttttagggcatccacactcattgcgtgctttgggttgtgctttttttttcaccctttttgggtactttattgttgatatggaaattcctgacaaaaacttttatatggaaatgatcacttttttcatacttgtagcctgaaactggttatctagaaagtccatgtccatgtgaatttttgttatttaactacacacttattgtgggaaggaaaatttag

SEQ ID NO: 55992 - DNA, 753 bp, Populus trichocarpa
  Intron number 2 from transcript POPTR_0014s04870.3 (locus POPTR_0014s04870) derived from phytozome v7.0 (chr-ID scaf fold_14; pos 3760776 to 3761528)
cgagcgaggaaataatacttgccattcaagttctggtaatcttgttttaaccttttctctctctgttaacgtgctattcttattattcttccgtgtatttttttgattactggatctgtggcttgaattgaattaatttatttactattaattaggttttgagtaacaacaaaattcttcacgctaccttcatgtttcctgatattcaaatttgttgtggtaggttacttactttgtttctaatactgtaattttatgccttttactactttgatttgcattagttgcttttttgttttagttcatggttaaagctataggtgatttatggttactcatcatgttagaaatcgtttttttttccttttaaaacacttcaatctgaagtcgatgcatcaatttttttgtttggatgttaatttcatgctacaatcacattttgctttcatttaattgtcaataatttggatctattactttaatgaagcatatttatgtttctgtggtttagaagaaagattgtaggataatgagcttgaagcatgctcattaagaagtttgatgttctttcctgattgtatggaggattagtaatgaagcatgtggatcgttttctgcttgttgaacttggaatatggttgcatagtggactgtgaagcttcactgttgaagttgtagaaatttcatctttcaaccgtaagtttttattttgtcacagctgaggttgtggcaggatcagcagcctggcttggc

SEQ ID NO: 55993 - DNA, 768 bp, Populus trichocarpa
  Intron number 1 from transcript POPTR_0014s01320.1 (locus POPTR_0014s01320) derived from phytozome v7.0 (chr-ID scaf fold_14; pos 1306783 to 1307550)
tcacctcacatcttctgctcataatagaaatacaggtaccatattgaacaccattaagggttcgcctataagtgggatatgcttcattattcgaggatatgatagtgttatccttggtttcctttgtggaagcaagtggcttctacagacatcatggctttatggggcgcattgcatgaacccatgattttttttattgaactcacaggtgacggggttgtggtttttttgttaacgtctatttgatcaatagcttgttatttggggtatgattcccggtgctagtggtgtcgagaggtcattttggtgaaatctaggagtggtcttgtttaaaagtcttgtcaagataaagtagaaattgttatcatctgtgtcttcctttctgttttggggtgatgggttctggtaattaatcatgcacagggaaccagtgtgctcaaaaggagaaaattttgttttggatttcgtctgtttctccctttcatggctttactttctacctttatggtttgttttcatggcctctcacagactgaaactcattaatgtttcagcctcttcaagttttgtaggcaaaaattgatttttagtaaccttctagacactttccatgctttccttctcctttctacatcaggagatcatgaccttttctattttatattctctgcggacgaagagattttggatttatgttgaagtttctacatagtttgacctgattttttttggtgtttgttttttcaggctacagctctggtatctaca

SEQ ID NO: 55994 - DNA, 907 bp, Populus trichocarpa
  Intron number 4 from transcript POPTR_0004s00660.3 (locus POPTR_0004s00660) derived from phytozome v7.0 (chr-ID scaf fold_4; pos 262495 to 263401)
tggtaacaccacaacgtgagataggtacaaactaggaagagagctgagaattttcttgtatgacaatgcatttattagttttgcagttgttttgcatttatctacatttagttaaatgaggttagcccctctccccatattttaggttattggagggtaattgagatcataacatttgtttttggaacttgccgatgaaaagaaactcgaaccaaaaacttagttttgttctgttgtcaacttttttggtgtggttgccattatgaaatcttagacagttagttgggaagtctagttatactactagctagcaatttttccagattgatcttttagttggatgtttcctgatttaatgaaaagaaaagaaaagaaaagaaaaggtaggaagaatggtttgacctcagttcataaacagttccatcttacattagatttgtgctaacggttaccacttcaaccctgttgaagttacaaagaagagttaaaagaaaagctatcacatacttaagctgattctaactctttttcaagatttttttccttctgccacttcacctagtgttgtgtgtgataggatttatttaatctttttcatggaatgtgtgctatcatgcaaatccaatccaatagaagtttacttttcctgctgttgacattgcatacctgaggttcgactcttgggtgtgatttagaccttgtaaatacagttttagttcttttctttcccagaatatttaaaagtgtgagattttccttatttggcctattgattcactgcttaaggcttaattgcactgaatttccatttttcttggttttttaatgattacaactcaggcatattatattgacatgatgttgtgatacaggactttatcaggacctggtaattccagtgacaaat

SEQ ID NO: 55995 - DNA, 1049 bp, Populus trichocarpa
  Intron number 1 from transcript POPTR_0012s09580.1 (locus POPTR_0012s09580) derived from phytozome v7.0 (chr-ID scaf fold_12; pos 10562905 to 10563953)
tttctgtggttagatatcaaattagtgattctgaggtaaaaataaaaaaatatggatttttttaattattgttattaatttctcaatagtaaattgttcttttttagtgaaaagataggtagctttttgaatgtggggatggatgtgggatttacctttgctgtttaataatcatgacaagaaactgagaaagtagtgaattgctaaatatggataggaaatagcattcatgatcacttttgtactttctcactaacgaggcatctgcagtggagcccgtgatgagatcgctctaacattttgggattttaaatattatttcttatgaatgatcttggatatttttagttctattgttacttattgttacttacagaggtttcgattatggtaagagctgttaattataattgttttttaaagaatttttttttgtttaaaattatattaaaattatatttattttattttttaaattttatttttaatattaatgtatcacattgattgaaaatacactaaaaaaattaatttaaagaaaaaaaattatttatttttaaaatatttttaaaatgcaaaaaaaaaaaacaagttccaagtagaacgctttcagatcttgtttgctgcagtaaatgactaaattggattctttcgttaggtgactggatttgaatgtgtaggcttctatagaaggggtaatttgttgaactaggttgtattgagaaaccgattaagagttgaataaattttatccatgtttgttcttttactgtgtaggatttcttaattttcgtttattatttatggttgcttaccaaactccacatttaagagttaattaatgcccttacttggagtgtcatatgttcaaagcgtgtgaaaatgtaattcttctgagattgatgcagaaattagtgaatatattagcttctatacttggaaaatgatttaggcacaaattagtcaatgactttcttttctaatatttctacattattttcttggcaatgtcagagtgatctagatcattctcagaattcaagaaatca

SEQ ID NO: 55996 - DNA, 590 bp, Populus trichocarpa
  Intron number 1 from transcript POPTR_0001s09070.1 (locus POPTR_0001s09070) derived from phytozome v7.0 (chr-ID scaf fold_1; pos 6944982 to 6945571 reverse strand)
gatcaactttctcaccgtaagctttgtttcttttcccctttccctttttgttcatctttattttgatttaagctttcgagtcagattcgatgctacattgttaactggcccttctgctttttatttcttattattcttctggcgttgctgattattttgcaaagggtggttttgtttctgggatataataagttgttcatttttacgagggttataattatttgaagtttgcttcttttggggggtctttgtaattgtttgatttttgcagtcatgtctgctatttttgtttaagatcagggtgcttttctatctgctttctttcttacactgatgattattgttgttcttggttatgctggtaactggttgtccatggtaattggtttataacaagtgtacatggtatcgtattaaagtttgttccagaataacgagtttgctctagttcagttttttctatttggcttaatttacttgcaatcgaagtgaatactatttttttttttttttgtttatactgtgagtttatgtgtgtttcatcctctcattgcgtagcttttagctatagctgtcataatttttggggt

SEQ ID NO: 55997 - DNA, 437 bp, Populus trichocarpa
  Intron number 1 from transcript POPTR_0004s07140.1 (locus POPTR_0004s07140) derived from phytozome v7.0 (chr-ID scaf fold_4; pos 5908361 to 5908797 reverse strand)
aaggtgaggatcagctctctctttatatatcttctgttagatgacatgcatgcatgcgtgaaattaagaatcatgagtaaaggtccctttctttttttcttcttcttctttgaggtcgatcattaacttattttgatgaaaaacttgcttcttctccataattccgagagtttcgttagcttaaatttgattgttttagccattattgtttctatgagataattcttggcccattaaaccttgacagggacgtcatatcatctttatctttgattaaagtgatgtttagtgcattaatccttgatggggtcatgttataattatctttaattaatagtgatgtttggtgatcactgtttcttgattatctttgtatttatttataacaaaacatgattttgttttgttacagaaagctgtgttgaaattggatttgc

SEQ ID NO: 55998 - DNA, 675 bp, Populus trichocarpa
  Intron number 2 from transcript POPTR_1292s00200.1 (locus POPTR_1292s00200) derived from phytozome v7.0 (chr-ID scaf fold_1292; pos 2348 to 3022)
gtggggaccgaccatagatttcatacgggcccggggtctgatcgaatccaaaacccgattcgctgattagtcgattgagcaaagtcaatttcaaaacaaagtggttttagttttttttttttcaaactaaaataatattattttataaaaatatttgcctttcattttgttttgaattagttttttttaatagaaaaataaatatataggtacttttttaatataaataaatttttaattatatattaaaatacttatatatgtgcattaaaataaataaatcaatacttgattaatagataagtaactaggattgaggtatttcattccaaaaaaaaaaattgaaataaaaagtaaaaaatatatgaagaagattttttaaaaaattaaatattaaaaaataaaattaaaaaaaattaactaaaaagataaaattctaccctgtgaaattataaaactcgtgatgactgtgaggcggagttcgactgcatagaagatatagttatgtgtgttttgtaatttgctttaaataaatgtaaaatagttgtagggagggtgatttgacatggcatttgacgagctcaagagatctacaattttatctcctctatcttcgctggctaatcttctacaccgatgattttgctggtgctttctgcataagatcacatcaaa

SEQ ID NO: 55999 - DNA, 834 bp, Populus trichocarpa
  Intron number 2 from transcript POPTR_0004s05330.1 (locus POPTR_0004s05330) derived from phytozome v7.0 (chr-ID scaf fold_4; pos 4072708 to 4073541)
tctagggaacctgtgccattctttctggcacccaagtaagtcttttctctcatttttctagtctccttgtttagaatagggagtatatagtttgtttgtttttcatgaatcatgaacttgatgcaatttgattagtttaattgaaaggggagctcaatcataggtttaatatttatgactttttgatactttgtcaatttgtaagtaagataatggtagattagaagcaatgtgaataatggtgattggaatgaactaatatatagatagctctgacgatcatgagcagatagaagaaattgtacataaaatgcttgcagaaaaaagtaaacagagttttttttttcctcttagaagaaaaaggaaaggaataaggttgtacaagaacatgagcaagaccctgcgctgctataatatgctgacatacgaaagtgaaacgaagttaacaaatggattttgtttaggggtaaaattgaagcagagttaagcagatacaatgtctgtgttttagaggagaagtttttggttagtagttaattatagcgttaaatatgatcgttgaagttcgtttctctcaaagtggaaaaataggaaaaggaaaagggaaaaaagaaagaaagaactgacacattattagattttgtatgttgtagtaattaggcttggcggccagttttattgatagacaaggacaaattatagctcaagagattgtgttttgacttgtttaaaaatcattacttgtatgaaatacttgttatagagatattgaagcagctatactttgcttttcatgcagggttagcaactatttaggattagaagcagctgttg

SEQ ID NO: 56000 - DNA, 666 bp, Populus trichocarpa
  Intron number 1 from transcript POPTR_0015s04730.1 (locus POPTR_0015s04730) derived from phytozome v7.0 (chr-ID scaf fold_15; pos 4951103 to 4951768 reverse strand)
ttcttcgtgctggctacaaagttcaagctttcgaggtgatcactagaaaagtcttttctcttccttgcttttgaattttgcttttgaatttttgttgtttggttgctgagaacaacatggaaggacatttccatttcgtttgggtttcctggaaaaaaagggatatgatcgagaaaatgcgtcttggagagccgtgtgggaatctcgcaaaagtttagggagaattcagtttttctatttttttgccttgatttacttaagaaatatttttgttttacatagaattatgtaaccggtattttagaaaacaaattcaaaagaaaaaaaaaggaaacgaagtcgtttctgaaatttgtaactgccaagaacgaatgaagaaaagtaatccttttgtatttacattgcttaccctcatatttacactagatattttgaatgaactgatctgggatattatattaataaaaaaatatcaaatatatttttcttaaaaaaataaaaaacccaaccatacctacctaacaagacaaatttagaagttattcggcattatcgtctcttacaatcatttttgcaactcaatgtataaattaactaatttttaataggttatttgattggcaaattaattattttttaattggaattttcttgttctgcagatag

SEQ ID NO: 56001 - DNA, 766 bp, Populus trichocarpa
  Intron number 3 from transcript POPTR_0012s03600.3 (locus POPTR_0012s03600) derived from phytozome v7.0 (chr-ID scaf fold_12; pos 2830238 to 2831003)
cacaaattgggagtgtggtttgttttcattacccaacaattcttgatgcatgtgtattggtgactgtcatgatgtcatacattttttgatggcttatggatgacctttatctttaccctaccctattactattgtgcttgtagcatatcaaaatggtgttctagggatataagaaaatgtggggactcatcaatctaggtagagaggctattctttaaccttgaattgcgtcttgatgttataaaaaatacagcttccgaaattgtgtttaaacaatagcatctaatatgagcttattcagtttcatcatttatgcaagcaattatttgaaatcaatcaccatcaccctgtgacctatcatgtattactttcttccatttattatttgcggctcactttttttttagagatacatgctcctatgtctatgttcctaggtatttttggaagttacactgcataagattccatttttctgctggattattcacgacttgtttgcatcttctgatttcagtttcttttaaggttcatgaaatggatctattcgcagctgcgaattgagtctaatattgtagatttggcatgattctcagtctatagccttggaaagttttctttaattttctattcagagaatgcataaattgatgtttttgtgtgatattcatccaatgctttgactgttaatgtgactttcaattggcttactggaggaactggttttgtgcacatttattcatcctgtggtatcagaatctcacca

SEQ ID NO: 56002 - DNA, 1003 bp, Populus trichocarpa
  Intron number 1 from transcript POPTR_0001s42790.1 (locus POPTR_0001s42790) derived from phytozome v7.0 (chr-ID scaf fold_1; pos 42815064 to 42816066)
aatctaggttctgggcagactttgttgataagaaggtaaattatttttttgtaaataaatataaagcgttcatcttttgtattttctattactgtttggttttgagccatgacctgattaaacccacattgcaatttgattagtttgaattttacatcgccagtacaattaattagcatcacgatatggaatggtggagaagtcttatcattataacaaatttttgatgaactatattttcattcttgtcagttcatgagagttaaagtagatgtttctgtataaggatcaccaaattgattggatccaatggctttaagacgcaccaagaaatgaggttttcctattggtgcgcatttcttgattaaaaaaagtcattagtcgagggccagcttgtgcgcgcaataaataaataaataaaaaaagtcattgattggatactcatgttaaaaaataaataaataatgttatcaccatctttgaatttatactgctttgaatttctaacctctctaaggatgaatggctttgccctcctctttagacagaaatgaagtacatggaccacctttgacttttgtgattccaaaaagtctgtgtggtgaatttttttttaacaggaaattgtttgtctcaagttttagaaaataatatagattaaaaaaatattagaaaaataatatagttgaatataaccatgtttttaaataataattttctatacaattattatttccgtttagttaaacgataaaatatgtaaataaaattttggggttaattttgtatatataaattaatttgcatgagatatatattttgatttttaactaaataaccgttatttctaataataataataataataataataataataaacacagtttttttaaactgttctatttccattggatgtatttgccaaaacatttacctaattatgtgtggtgaccattatactgatttgttatgcaatggtgtgatataaatctgcagatac

SEQ ID NO: 56003 - DNA, 341 bp, Populus trichocarpa
  Intron number 1 from transcript POPTR_0015s03380.1 (locus POPTR_0015s03380) derived from phytozome v7.0 (chr-ID scaf fold_15; pos 2891647 to 2891987)
tcttgcaggaactgaatcttggttttccagttcaggtaagccaagtggttcttttatacccattttcttggatcttcttttaaatttagatgtttgaaattgcgtttttttttattgcttgccagtctttggttgtttggattcagttcattgatttctgttaaatttcaagcgtatacaattttaattacttatctttttaatggattctcttggttgccaaacaaatccttgccattaaagtttgttttaaagtgacttcttttgatctgtaaattaaagcatgcttcttggttttctttgtaggctttgattttggttaccacgattgtttaatagcc

SEQ ID NO: 56004 - DNA, 626 bp, Populus trichocarpa
  Intron number 1 from transcript POPTR_0012s13690.1 (locus POPTR_0012s13690) derived from phytozome v7.0 (chr-ID scaf fold_12; pos 13738823 to 13739448 reverse strand)
gcagggagagatatgtagtagccatggtaaaaagaaaacaaacgcttccaacactttcttacatgcatgtccatacatatatgattaaatggaaaaatattgtttagttttcttctaatatcatctcacttgtgatgttttcatcagtctgtaggaccttcttggaatgtgctgacaggaaggaaagatggaagggtgtcaaaagctaatgatacaatcaacgtcctaccagctccaaacttcaatgtaattacacagctaattcaaagctctgtctagagaggtctaggagtcaaagacttggtagctttatcaggaggccatactttaggattctcagattgctcttcttttgaagctagctcgacttcaaaactttagttcagttcatgaatccaagcatgaatactcagttcgccaagaatctaaagaagaaatgccctaaaccaaacaaggatgataatgcaggagaattcctagactagctcgacctcatcaactttcgataatgattattacaagagagttatagaaggaaaaggtgtcttcggagcagatcaacaagatggattgttgaatcatttgccagggatcaaagtttgttcttcagaggatttgcagcgtca

SEQ ID NO: 56005 - DNA, 894 bp, Populus trichocarpa
  Intron number 1 from transcript POPTR_0015s11730.1 (locus POPTR_0015s11730) derived from phytozome v7.0 (chr-ID scaf fold_15; pos 12283139 to 12284032)
aaggtggtttagctttttgtttttctggaaaggtgggttttttctgttttattagactaggtcaaattctggtcataaggaattggacttttttttagtgattactgttttttttttttaaattgggattttttagcttaattttgaggtttaagtttataatcaatttcaaagtttgaattttttttgttcttagttcctttaggtcggtcagatagggatttttttttaaaaaaattgagctttttttgtgttttagcttttgatagtttgtcttaaaaatggttaattttaagtaattacaattccttcaaaactggagcttgcttgctaccttttcttcttgcttgatctgttacatttcctttctgtctttgatttttctaaaaatgggaaaattcactcctttgttttctacgaagccattaaggttttaatattttatttttgagttaaaagtaattaggaagttattataattataattctgttttcagaaatcaaagcatttgcattaatgatttggttgttggtgggttagcaactgtttatatatatttacgactatactgaatgtaaaagagtcattttcatctaggtgttttttttttttttttggcataatctcttttgggtttgctaacttgacaagaaagcaccaaccttttcgtttcactgaacaagtagttgttttatgggttcatgcatctttaattttgataactgttttccactgtttataatttaaaatgatgtgggctttaaactcccccccccctccccccctccttttttgtaacaatttaaaagatatcaaagtctcttagctgtttgttttgtttgaagaaactgacttttgacgtttttgagttctctacagaagaagggcaagca

SEQ ID NO: 56006 - DNA, 869 bp, Populus trichocarpa
  Intron number 4 from transcript POPTR_0014s17090.1 (locus POPTR_0014s17090) derived from phytozome v7.0 (chr-ID scaf fold_14; pos 13258581 to 13259449)
atacagcgatagatttatctggtgagtgagtggtattagctttttgatgttgtgtttttcattgcctgtgtaaaagttgtattttttatgtcattttgtttatgctaagttccttgaccggtagagttctaataaaatgatgtttattttgattgtaaagtcaagaggccctttattatgtcatatgttaatttttgtgaatgttggacggatcttatagcatatcgatgtttgtatgaattatgagagctcggaaatggaagagaaaaggtgtagattgagttatgttgtaacacccccttctattgatgtctatgatattgatcttataggttgaaccagcaccagtgttttcttctaggtaccagaattatacaggacttttatgttttaatggcagtgtctggtgctatcaacattactttgatgtctcacggatatccatcagtatcttttcagtggttagatatgctgatatagttaaagttgtcaataaggccacaacaaggacaaatttttgcctcttgtcaagtggaatttttttttttgcaacgttacttctagattttagttgctgttggtagtttgggtgtatgatgtgtcagcgcttttgttttgttttgattctcttgtaatgtggtagtcctttccactctcctgtctatgttgcttgattcttttctttgcaattggaacaaaaacaatgaaataaatttctgctagaaccttgcaagcatctatatagattgcagaaaggccatgtagaatgcctatgtgtgctatcatgtattgggtagtgtgtttattgatccctagttccccagcaatattgttctcttccttgtttttcattttcagaaagaccagtt

SEQ ID NO: 56007 - DNA, 443 bp, Populus trichocarpa
  Intron number 1 from transcript POPTR_0011s01550.1 (locus POPTR_0011s01550) derived from phytozome v7.0 (chr-ID scaf fold_11; pos 1091615 to 1092057)
ttcggaattcttcttcaatttcagtttcgataaaggtatatttttctttgaaacttagctgtggttaataatttgtggatttggagaaggaatggagtgactttatggatacacggtttggtaatttaataaagatacatgatttatgtaatctgtgattaattaggaagattgcagcataaaaacttcctgttttgattctttatattaatttggagaagttagaaagttgtttaaattactgtatttcatctttgttaatatataaaagatgcatggtttatgtaatttgtgattcatttggagaatctgatcttgagtcgagcaggccagatcatgagtgaatagaaaatgataaaaaaacattcccattataattttttatatgtttaactggattgaatgcagggagaattgaaaacgattggtaaaggaaaaaggct

SEQ ID NO: 56008 - DNA, 460 bp, Populus trichocarpa
  Intron number 1 from transcript POPTR_0004s19430.1 (locus POPTR_0004s19430) derived from phytozome v7.0 (chr-ID scaf fold_4; pos 19267914 to 19268373)
gttcgagaggtgaagaaaggtaagaatgaaactgcatcttttagtcacgtttcattattttttgttctggatattaaaaagatgcttcaatgtagttgttgttcatgtgtttttatgaatttgatattgtaaaagtccgcaaattgtttggtttagaatgtcatcattgtaagattctgaaagtttttgatggacacccccccctttttctgtgttagtattgaaactgtttttcttaatcgagaagataaattagtatcaatcatgttccattggttacaaatttcatcaaattgaagaggcattagtctttttccacatagcatgctttcttccttctttgattgatatttggatcatgtcgcttcggaaatctaaggattattcatatgtgatggtacttgctttcttaattttgtttgcagtgagtcaattggggttctgatcaatcaaccacgtt

SEQ ID NO: 56009 - DNA, 588 bp, Populus trichocarpa
  Intron number 1 from transcript POPTR_0012s02260.1 (locus POPTR_0012s02260) derived from phytozome v7.0 (chr-ID scaf fold_12; pos 1889340 to 1889927 reverse strand)
ataagtttgtcattgggcaacagagagctaagaaggtggggtttctttattgtggtttggcatttggctacttattgtttttagagtgatttttgcttttagatgcaatagaagtagcttaccaatcagtgccatcatagttttggttattgtggccagcattataatttgaatcagtttcagaaggaagatgctgtctttagattgtctaaattgttcatggttcttgttttgaatgtaatattttgttaaattattagatgctgaagaataacaaaacaatggacatgcttcattgctttaatggaaattttttatatggccttttatcggaggatggctataaaagcataatgttttcataattgtcgtatctttttgaagtgaagaaaggaaaactgtctttattttgaactttctttatttttcataggagtttaggtatgcaaccacacatggacaatgctctgttttgcttgcttgacatcttgtttcattttagtattgtctatctgcctttctactcatttttctaattttgtatcgtgaacaggtgctctctgttgctgtttacaatcactacaagag

SEQ ID NO: 56010 - DNA, 617 bp, Populus trichocarpa
  Intron number 1 from transcript POPTR_0004s17580.1 (locus POPTR_0004s17580) derived from phytozome v7.0 (chr-ID scaf fold_4; pos 17719558 to 17720174)
cgctctcctcctcctcgcttctcctctccttcaaggtaatatcactgtctcctcctctcatttcctagatccagatccagatctacacgcacttgcaaaacgcatccttttctgttcgtgaactctctctgttttttttttcttctctgaaattcttgtgtcgtttatcagttctttttatcgtgtcaatcgattgaattgagatcgatctgatttggttatttggagattttgttgacatttggatggtaatgcttgcgcggattttattatgtttatgttatagctcgtcgttactgatttattgattgaccagctgtttttttttgtatgttttaatttgattttgaaagtgaaatttgacttgatgttttgctttgctaattaaaaaaagtattttccaaatgctaattggtgatagaatttctagttgtaacatttttatgttagataataacactgaggttttgctggaattgtattggaatgaatttttgttgttttttggattttaataatccatgcatgttttttaaatacatctatttgtgttttgagtaattgaatttgtccgtttccttttctatttgtagttgctacgtgtcagtcagattcag

SEQ ID NO: 56011 - DNA, 362 bp, Populus trichocarpa
  Intron number 2 from transcript POPTR_0004s14820.1 (locus POPTR_0004s14820) derived from phytozome v7.0 (chr-ID scaf fold_4; pos 15480725 to 15481086)
aagaaggtttgctccaaaaaaagtaaactaatattttttttcacaagtaaataaaatattatttcttaaccaaacaaaatagagtacttagcttatgactagctctttagcgtacatatgtaaggctcaagctacttaaatgcagttttgacttgtctattatttaagaaaatggggttgtgatcttatggtctcattcctcctcccttttactgcaatggattggttcctaattagaattttgttgttgtgttcttctttgagtttctgatcactgggtcctcaaatttatgtttacatcaggattctctggttagtgatttttttccttttcctttggtcctccacacagttttcttttg

SEQ ID NO: 56012 - DNA, 404 bp, Populus trichocarpa
  Intron number 1 from transcript POPTR_0014s09790.1 (locus POPTR_0014s09790) derived from phytozome v7.0 (chr-ID scaf fold_14; pos 7294564 to 7294967 reverse strand)
aaaatcggtctccggccgaaatagcagtacaagtagaacacgagataactcgaagacaaattttagaaacttgaaaacaaacgtaagatatagaaaaaaacaaaaacctcactcacgatattatttatgaaattataattaatttaacgtcctagctgtcaagtagatagaagattcacagaaacgactgcgaaacacaagagggttcggcaatcgccactctcacaaaaaggaaaagaaatcaaaacgcaacgcaacgctttccgggtgccggcaattacccgtctcttaacttcaattagttttagacttctctcctctcatctcctattttaattaaatctttctaggtttttttgctgtatatttctccgtctcccttccacttgcagattccctcactc

SEQ ID NO: 56013 - DNA, 402 bp, Populus trichocarpa
  Intron number 2 from transcript POPTR_0001s17370.2 (locus POPTR_0001s17370) derived from phytozome v7.0 (chr-ID scaf fold_1; pos 14175719 to 14176120 reverse strand)
agcgggaggagctagaagccgagcttgaggtgatcttctcccccccccccactcctgtaatatgaggaaaggaaaagggaattgtgttttcaatcatgttcataaaacaggagaaatgaacttttgcgttctctgatttttggtttgtcattttgatttgcatgaaatgggaaggtaaatggaactgagtgcagtgtcacatgcacttgttcaaactttgttttgtttggacctaattatgataatttatgatgataatgcatcgcatttttttaattccagtagtcatcaaccaaggtctacttatctcttgggtttaattatatagtgggtaagagatcattctgatttcaattgttttttctattcagggaaagaaacttcttgatatagactatcccg

SEQ ID NO: 56014 - DNA, 740 bp, Populus trichocarpa
  Intron number 1 from transcript POPTR_0012s10660.1 (locus POPTR_0012s10660) derived from phytozome v7.0 (chr-ID scaf fold_12; pos 11366736 to 11367475 reverse strand)
tgtgtgcttcaggattaagttctggtaacccagccttcttgctgtgttgctgaggtgatgtgtgttgtgtggtgttgttatgtttgaattttgatgtgatgtacaattgatttattaaatagtgaggccgttgtcaggagcggaatagtattacgagactcacgagggagtttattgatgctttacctgtttaccaaatggatgggaggactatgcatggcgtaggatcaataaaggagtacttctgtatgttcttttaattttctggtgatttttttgtggataaattacagtgtagcgataggaaagcagtgacttcaaccaatcttctacataaagttgagatgacttacgttgtgtcctccaatcaggagtttgttcatagaagaaatggagaaaatgttaaagtattgctcatagcaggaatccttcatttaagatgaatgtttagttatcatggaagtatttgtggttttctcagaaaagaaactaaaagttaatctcttgttaagatgtcagcggttttatatttatgttacttttttaaaagtttttagtagttccccgtgagatttatttttattccataactttgctataaaatttctcaagaaatgggtttgattattcagttttgatacttaattgggttattgtaagctattaggactattgacggtaagttgtagtctgatttgttatatttatgttctgcagtaaccgatatgagaatataacct

SEQ ID NO: 56015 - DNA, 474 bp, Populus trichocarpa
  Intron number 1 from transcript POPTR_0001s03940.1 (locus POPTR_0001s03940) derived from phytozome v7.0 (chr-ID scaf fold_1; pos 3140537 to 3141010 reverse strand)
gctaccctttcatcttctgctgaacgtatccttatttactcttctgagcttttccttttcttttgacttgctgctgtttttttttttccttttgatctgctggattcttgtttttggtttgttttatagcttccttttcagggattttgttgaacttgagatggtcttcgagtgtttttttactatactgatagctatgcctttgtcagattgatttgtttggcatatatgcaggacaagtgattgaatttcacactgtgagatttggttttctgtattttgcttgatttgtctattgaaagcttgcttcctggtgatgtgctttttatctctaaatatcttggttttttctagtcaaagttgggactttttttcctaatatttgttaaaatataatgatttggaacatatgtaattcctttacttttaatttccatagaaacttcagatttgctgcagaaattatccatagac

SEQ ID NO: 56016 - DNA, 497 bp, Populus trichocarpa
  Intron number 2 from transcript POPTR_0011s07460.1 (locus POPTR_0011s07460) derived from phytozome v7.0 (chr-ID scaf fold_11; pos 8305528 to 8306024)
ccagcaatcagtcgcggtaacaggaaccgatgccctgtacccggggccctttataattcaaatacattggaggccttccattccctggataaaaggatttgctaaaggaggaagcaaacaaggtatttcatttggattgatctaattcttgaattgtaaatgcgggtcgtctgtgatttctttgttcttttcttttcttttcttttttagaaaaaataaagacatttcctttgtctcttggatgagaaatcttatcattgcagtaatggattgacattatcgtaagttgtaagaaattgtgatgtgactacttgttttgttcatgcgaagaaggtatttgattcatattgatctaattcttgaattgtaaatttggccgtctgaaatttgtgatatgtggaagaagatgtgatgtgatttcctaggataaaaatgccaaatgaagattctgtttgttggataactggatttggaaagacattcacactggaagagcc

SEQ ID NO: 56017 - DNA, 753 bp, Populus trichocarpa
  Intron number 1 from transcript POPTR_0015s01590.1 (locus POPTR_0015s01590) derived from phytozome v7.0 (chr-ID scaf fold_15; pos 994996 to 995748)
catcaacgctaaggtatctctctttttctatattttccctcgattttgcctagaaagaaaaaccctccatctgtagagattaattctgctgatatctgtgatcagtggaaattgatagttccacttggaattcgtagccaatttgatggattctgcactattttcttggtttgctaaagtacttttaaatcttaaatttcaactacaatgtttttttctcaataaaagtcatttttgaatcagtttatatatatgtgtgtgaattgagacaccttccactatcatgattaactcttgacacgcaagcaattcttttgggattttacctagctagtgatatcatgacatgcctataaagaaagaactttaataattttccaaaaataagataaataaatatggaataaatgattataacaatattatttcatttagaaacataataattaagcctaattaaacaaattaaaatagctaataacggaattagggaattttttttaccctaggcctcttcttttcctttcgaactaaaaggaaaaaataaaaacaaaatcatcttaatcaaccctttaatatttatatatatatataaagaaacttgaagtcggttcctcattgctaggtcggcaaatatagcatttataaaatcttagttgagccctagggtacataaattctggcccttcaatcctacatctattgcctcctctttcccatgaaatcctctggaaatcaatcctagcaaacgcc

SEQ ID NO: 56018 - DNA, 383 bp, Populus trichocarpa
  Intron number 2 from transcript POPTR_0012s02390.1 (locus POPTR_0012s02390) derived from phytozome v7.0 (chr-ID scaf fold_12; pos 1975721 to 1976103 reverse strand)
tcaaggtacgtgcatggcatgttcttgctttgattaattaaagaagattttatttataactatgtctccagcagcatattagaccgtatataagaatctatcaatagcgcatgcataagcgaaacaagaattctaggattagggttttggatatgaaaaaaaaatagagtaaatttgaacataaagtaattaaggaattttatacttaatttcttggtgggaattttgtttttctatcgattttcttataccaaagctcagtttctcatacttgtttagctaatttttagtcaagctatcaaattaatttagaaaaaaaggcagatccataattttttgaggattcaatatggtcttgtgatatatgtggtgtggtgtaggaa

SEQ ID NO: 56019 - DNA, 327 bp, Populus trichocarpa
  Intron number 1 from transcript POPTR_0009s15270.1 (locus POPTR_0009s15270) derived from phytozome v7.0 (chr-ID scaf fold_9; pos 11856572 to 11856898 reverse strand)
gctggtatgtttcttcaccatatctcttttaatctctcatgcccatattttaaatttattttcttgggatttttgacagttttctgtattgggtgagttcggtttgagtttatttgtcatcgggtttgttctaaagctgtgattgtgtgtagttaccagaattatgtattggaatttgaattatgagttcttttcctttgttaaaatcatgccttctattgtaattcacgggcttttgaagaaaaaaggaatttttttttaacaaaattgattgtgtgtgtgattgactgataatatgatttcttggtgggttttgcaggttctgca

SEQ ID NO: 56020 - DNA, 785 bp, Populus trichocarpa
  Intron number 1 from transcript POPTR_0012s01050.1 (locus POPTR_0012s01050) derived from phytozome v7.0 (chr-ID scaf fold_12; pos 732247 to 733031)
cctggtgatcgaaccgtggtctggtcagctaataggtacacttgcttgtgcttatatttatacatgatggtctaagcatttgtttttgtttaaaaaggagaaccttgtacaagtccctaagctatacattaattaatgtttttatttgagttcctaaaatcatttgtttcaattggatccttaatatatcagaaatcatcaatcgcatctcaattgggattttcttcaaacctcgtcaggttctatctatgttcattataattttcatgtatagttttgatttcatgaattaattgatcttattttaaagagaacttgacatattagagaaggtaagatgattttagatgggaagacttggaagtttaattggaaatcgatgtatagtttcgagaattatataagataatctctcaagaaaatttgaaagcaaaagtctgacgttcttgtttaattatatgaacagaaaacaaaagaaagataaatgggcgatatgtatggtttctgcatgctttaaaagagtttatgcttgtattattcctaacagtttcactatattattaatgtattaaatcagtatttataagttgcaaagtccatgaaaatctgttatagatcattaatggcactgaatcttgacaagggaaaagagaaaaagaaaaatcaaagacatttctccttctttagtcttcacagaagctcttgcaggtgacaatttctgaatttgctcagtgataatctaatatttagaaactctctggtcacccaaaacgcattcctggagc

SEQ ID NO: 56021 - DNA, 1001 bp, Populus trichocarpa
  Intron number 2 from transcript POPTR_0012s08190.1 (locus POPTR_0012s08190) derived from phytozome v7.0 (chr-ID scaf fold_12; pos 9233173 to 9234173)
cttatcatcaggctccataagcttcttggcaacaggtttctcttcttctcttacggttatataaattctgagttagcataattagaatatctggttaagactaatcacagatataattaacctcctgattcattctctcagcttatacttatcaagtcttataaaaagctgtggttttaacaagttaatcatctcattttaatatttgcttgatgcacagaggatggccacacaatatcatgcgtttctgggcagcatgaattcacacacacacacacacacacacacacacatatatatatatatatatatatatatatatatatagcatgtgtgatgatgctattatctcacaatatctactagctaggagatgatcatttatatagcacggggtcttctctcttttttttaaaagacatcataggtaaacaaggacaaaacccattttcgctgctctagctctatcggctgagctaggacaatacattttttgggagacaaggctggccctgtcttctaaagaggagctgtaacccacattagctgcaacaatatattttgaaaggtctaccatgtgcggatatgatttcacaaaagtgcgaaaaaggactctcgtgattcttagcagaggtgaacatgcgcagcttaaattgcaaacttttaatgtgtaaaatcgttttcatcaaaattatcgtatgtagcttgatagcgaaaaatggccatgcttttcttttacctatgcctgtaatctatggctctatatacccatggtttactcttagttcttactttaccagaggacaccatcattttttactgtttccaccatgttcctagctgccatatcttttgaattgtcttctacattattgtacgttaagtttcattgtgggataatttgctttctatgattaagttaacataccaaatatatattcttatactttcatttattattcttaggtggtctttaattgccggtcgagttccgggaagga

SEQ ID NO: 56022 - DNA, 585 bp, Populus trichocarpa
  Intron number 1 from transcript POPTR_0004s12270.1 (locus POPTR_0004s12270) derived from phytozome v7.0 (chr-ID scaf fold_4; pos 11350309 to 11350893)
tgatagctctttaagtggcatctcaactcactgtaaacatctctctgttgtttgttttttttctgtaatgttttgatcaactgatattttatgcagaactatatgtctataggcttgtgtggatattgctttcgattgtttttttcttaattttttaatgttatgttgatttggttcaaggcaaattaagaaaaagcgagttaaaagtgttcccgaatttttatccttttagttagtaccgttaattaaagggcgtgttcaaattgatggaccctttttgaagattgtcatctcatgatgattttggtgtggcatgttgttccttgattaataggtctatcgtgatcagttaccatattatccatgcatcgaataacatgactgcaactagttcttcaatgaactagattaaaattcagaaatttgtcacctttccaattagttcttttgagaaacgttgttaataagttgttatctataaatattaagagacaaatatacttctggatttgaataatagcaagtaattgcccattactttgattttcagtgccaagtaaatctaaaaacgagaagaacaaagac

SEQ ID NO: 56023 - DNA, 628 bp, Populus trichocarpa
  Intron number 1 from transcript POPTR_0012s13920.1 (locus POPTR_0012s13920) derived from phytozome v7.0 (chr-ID scaf fold_12; pos 13860938 to 13861565)
aagcttcaactcaactaaatcgccgctttcaacaggtaatcagaatcaaatcaatcaattaattttccttctggttccctagacagcccgagaagatgctttatttcttagaaactaaactaaatatttgatctttttttagatctggttgccattttttgtagatctgtttattaaggtttcattttatggatctgattcagatttcttaactgttctgttgttgatggttgttcattaaaaaaactgggtacttttttttagggtttcttgaagaaccctagttgagccgaaatagcctctgaaactcgttaaaaatgtgtaacttgcaaaaacaaaataaaaataaaaaggctttatgggtaaaataatgaaaacccataggccatagttgattcagcggcatgattatttgaaaaaataacgagattaagacttaaagatgtaaactttgagattataacttgaattattgaaggtttttgtaagaacccattggaaaatactgatgttagacgtgtaatattttgtttattggagcaaaagcttgagctactttattttttcctttcctttccttttccttttctttttatctcatttatttgaatgtgtgtggtcaagcaga

SEQ ID NO: 56024 - DNA, 735 bp, Populus trichocarpa
  Intron number 2 from transcript POPTR_0015s05710.4 (locus POPTR_0015s05710) derived from phytozome v7.0 (chr-ID scaf fold_15; pos 6055162 to 6055896)
gaaacccgtccacaaagtcttaggcggtggaaaacgtaaacacactaactaatatctctctctgatttattaaatatcttgtttttgtttctttgattcgaagctagatcttttttttaatacttcttttttatttgatgttgttatagaaacttgaaaattgttgcttggtgtagaaattggtattaaatgatggatttggtttctgaaaccatggcgtattaaaagaaaagaaatgatgttaaaatccctttttgttgtttcgaatttggaatttcttatgaagagaatgatttgacaagagatttataagtgaagagcggtttgttgcttcacgatgcttgctagctagcgttagatcactcgattctttcatttttgtttttctaaacacacgcatagaaacattccctttatttgtctaaatgagacgggcaaatttatgcatttccactgttgtaggattgaacattgtattggtgagtagggaagcaagtttgggttgcatttgtttttgttagatgggacttggaaaagcaagtgcatttccacaattataggattgagcaatgtatcggtgagtaggaaagcaaatttgggctgcttttgtttttgctagacggacttggaaaagcaagttttcacatttccactatagattgatcgcttgatttcgtgttctagaaattgtttgtctttccttaatgattttggttttgttttttgcagctgctg

SEQ ID NO: 56025 - DNA, 628 bp, Populus trichocarpa
  Intron number 1 from transcript POPTR_0012s13020.1 (locus POPTR_0012s13020) derived from phytozome v7.0 (chr-ID scaf fold_12; pos 13340904 to 13341531 reverse strand)
ttgtgtctttcagtgagttttcattttttattgttttctttgaatgatttttcatccattttaatgttgctattagttttgattaattccatgtttggtccctgagagaattcaggaaaaggaaaggaaaattgaattttaaaggtcatgttttatatattgaaaaagacaatttaaaatattagtgattaatccatcctgtgctgttgtttatgctatacagggataaaatatcagtgctgtataagcttgatggctgattacttgttttgaagtcagcagagctttctgtttatttatttatttgtttgcttgcttttgtttcatcacagctcccagataacaaagaatccacaacgtattgcaatcaaagggcattatttttttggtcccgatgatttgatattgaatttgaatggaatcgaatttcctaggatgtgaagcttttgagaatttcaattaactgggtttttaaaaggaaaccacatgcttatggagattgtaaagagaaatgtgttttcgatttctgcctcttttaattttgtcgtggatggcctgatgtaattgttttgatcttcttgggatttatgcagcacacagaaaacttgctgtcaataaactaaaggaa

SEQ ID NO: 56026 - DNA, 724 bp, Populus trichocarpa
  Intron number 1 from transcript POPTR_0012s11120.2 (locus POPTR_0012s11120) derived from phytozome v7.0 (chr-ID scaf fold_12; pos 11697663 to 11698386)
actttcattctcactttataaattgagtaagtaaaatctctatctctctctctatgatcattgaaggataatcaaaactctatctacttctctgttcttttctatatactcttcgatcttcatttgtctaattctttttattaatacccctaacctttgggaagggtaaagttttcccttttgaattgtttttctttaaataaacaatatatatgctggttgtgtatgtcattgtaaatgtaaattatatggatatatgcaatatgcttccatcgattgaaatccttttgctggtttgaagtgaacaaaccacttgggtatttctggatggcttgtagtagcacttcctctcaatggagatggtatgttcagatggcttgtaatagtcctttcttttaatggagttagatggccatatctattatattccctgttgaggaggtcagttggaaagacagataattattcagccattttatttaatagttgcagacaaatggaatggtgccttgacctaaaaagacttactaaacccagctttaatcttcatttggaaattttgaggttttttgttcctttcaaattaattattggaaacgtggggttgagctgctcttctaatatgctattattagtgctgtatgagatttatgcaattatagttttctctagattcgtgtaattaaccaaattgatagatttattagtgagaaaagcagctagc

SEQ ID NO: 56027 - DNA, 879 bp, Populus trichocarpa
  Intron number 1 from transcript POPTR_0015s11410.1 (locus POPTR_0015s11410) derived from phytozome v7.0 (chr-ID scaf fold_15; pos 11981351 to 11982229 reverse strand)
cagttaactcagctgaattggaacgattccttaatgtaagtatagaatccctctttcccttttcacaaagtcccaccttttattttcttgagcttgattttttgaaagatttacacttgtggtttttattttcttggtaagaatatgatttagtttttgattcgttaaaggcctcaacgttttggtcattactaccacttcattgttttgttgtctggttaacgtaatttttatcttaatcgttgtactgtattgagttgttattgcaaaaaaaactcaagcttgatcggataactgatttggttggataatttgaataatggggttagtggaaaattttgtgtgtgggattttttgctgatatgatgagtaaactcaatttttgtatgtacagtttcggtatattattggtgtggataatattcttgatgaatttcctcttatagtactgtgttgttggttcttgtttctttctgagggaaggttctgatgcggttttatgttatcacactaaattataaacgatttgatttgcttcgtgaagaattcagaactgtcatttggtatcatgggcttaattgtatgggtaattgtgctattttatgagtaactatgatgtgataaatttgagattgcatgtttgcttagaacggagagttaacagggagactagtggaggggagtgttgtttttttggtaattcgagtatcttaaggaatacaaatgttggggggcgttattttgtaatttaagtctcttaaggtagtgtgggatggttgctgtcatcaccttgctggatctttgatattttacaatgatgtatgtgattctgattttggaatgatttttttggttttgcagcaagagaaggaaagagct

SEQ ID NO: 56028 - DNA, 777 bp, Populus trichocarpa
  Intron number 1 from transcript POPTR_0015s06820.1 (locus POPTR_0015s06820) derived from phytozome v7.0 (chr-ID scaf fold_15; pos 7856215 to 7856991)
aatcggtcaaacccggtcaaactcgtgtaaaatcggtctgactcgttaaaatcgctcaaaccggaccgatttcatgattttgcattaaaattaaaacagccgcactcccctttcccccatgagtccccattcccccgcccgacactccacccttctcctttccccttttcccttccccaaatcgccagtcagattaagaaatcagctgccatgtaatcctctgcaacttgccacatacagtcttatatcttaaggcaatctatgatttgccttgcagtcctttgcagtcctttatttcctctaaggtacgattattatgtttttctctttgctcgttttagaatgaggaaagtgtttagccttctttcattgctagctgactttgatgtcttggtttttgctggttatgtttgaaatagataaaacttgtcagccatttttcttgttgcaaagtaatgcttttgttctcttcttttgatgtttttggaaggatttcaaaacggcttgtgtttgtttgattttaaagttggaaatcaattgtacaaagaattactttagtaaacttcaattccctcaatcaacctttttttttcttttttgagtcttagttgagctatttgactgcatttaatatttatatttgatggctgcaacttgtgttgctttttatcttatatgtgatgatgatgatcattatcatcatattgtgttttactaaggttttaaaaggtcaattattcaggtgttgggtttggtcctggtattcctggtttacaa

SEQ ID NO: 56029 - DNA, 559 bp, Populus trichocarpa
  Intron number 1 from transcript POPTR_0004s15070.1 (locus POPTR_0004s15070) derived from phytozome v7.0 (chr-ID scaf fold_4; pos 15742255 to 15742813)
gctgacgatctctgcttcttcttctccaaggttctttctcttctccttttttttttttttttaaaattgctgtcgtatattatataagtaatataaaatgtgttcttgtgatgtttttaggatctgggctttgtttatttaacattatgatcttcctgtctttgtggattttgcttcttttaatttgccttagcatagaagcaaagcaagacccagcttttatttaatttcttaattaaattgtagaatgagataaaaagggatactttctttcgatagtaactatagctttcctagctttactagatcaaaaaaagaaaagaaaaatcgctctcaagcttttactttgacgtttccattaatacccatctcttgttttttctttatttatacctttacccatgttggcatcggttatagagctaaatcagagttggttattaaattcttgatgcattaaactgtggtttttttagtgaatttctaatgtgtaggtaatttgcgaattaatctatgaatggcaggattcttttattataaaggctcctaagaagtcgcc

SEQ ID NO: 56030 - DNA, 535 bp, Populus trichocarpa
  Intron number 2 from transcript POPTR_0011s16040.1 (locus POPTR_0011s16040) derived from phytozome v7.0 (chr-ID scaf fold_11; pos 18009747 to 18010281)
ttttgaccatcattggcaggggtgcatttggggaggtgtttctcctttcaaatttttttcttaagttattttttctttgttgcattagaaacagtttggtatttatcttatccagtgctttcttaaattatgaatgcaatgatttcttttatatagctgtatgatttttggctgttcagaagtcttgagtgtagaaaaataaattttatgcgaaaaaacttagaagttctgtcttcattcactagtcgtgttgatgagctgatttatattatcttcttggggctgacaagataacttttcatttctctttcagtcgatcgaaagttgttttgaggaaattttcatattgttattgttttgaagttttttaaattctgtccttcctgttcttttgtcattacctcttgccaatgaactccatatggttatattattgtgattacatgtgcaattttcatccaggagttgttaatttcactaatggtgcatatgtggtcactgtaggtgagactttgcagagaaaaaactactggca

SEQ ID NO: 56031 - DNA, 742 bp, Populus trichocarpa
  Intron number 4 from transcript POPTR_0014s10950.1 (locus POPTR_0014s10950) derived from phytozome v7.0 (chr-ID scaf fold_14; pos 8166518 to 8167259 reverse strand)
atattcttcgtattttttatcaagcctttcagtgtcaattcttctgatatgaaagtttaatagtgcatttcatttgtgcaaatacttcaacttttttctgatactgacctgttttatatgcttagagctggaggattttttaatccctttagaatccataattgatcatggttctcattctttttgagtgctgttctatgtaatcagagaaaagagctaccatttatcattgcaaaatcatatgacatggcatctttttttgatatggatggactctttagccatgtgaacttgttttcatttgattttgcatgcctaaaaaatctttgggtggtagacgtatattgcattgcaaatgttcctggtttcaaaacctagcaataaaaaccttggctattaaaaaaagggtccagtggaaatccatcagcatttgcttgcttgaaattttaatagatgtcaaaacaccaacattaaatgatttttaacgaaagtatttctaccttggagttgagtgtttacaatgcttttataagatttcaaatactcacatagtcacatgtattctttggctcttacatcgaaattggttattatttgctatgcttttataaaagtgcaaacactcacatttattctttggctctaaaaacaaaatactggctcatattacttgcatgattaatgttttagttgtcaacgttaatcagggaggaaaggtgttaaaggagcacaacctggtcct

SEQ ID NO: 56032 - DNA, 727 bp, Populus trichocarpa
  Intron number 1 from transcript POPTR_0014s10950.1 (locus POPTR_0014s10950) derived from phytozome v7.0 (chr-ID scaf fold_14; pos 8168060 to 8168786 reverse strand)
actcaccgatcaatcatagtaatcgtcagttatttgtaaggatccatctgctcagccttttttaattttcatttctttttcatcatgcttaattactagagtttgcatgcgattaatctgccggtcattttctgtttgtaaatcgaaaccttgaattcaagaatgtcttgaatattcttctaatcttatatatatattttttttgttttaggtactatgtagtaaatattagtatttgatgtaaggatttttatgcactttcggagtacagtcagttacctctgtttcatatgccagtttcaattacgaaaattattctgaggtttttttttgttgaaaagttggagaaactgggaattgtggaattccagtaatttcatggtatacccacttgcttttaatttatttttttatttttaaatccaaattgatctcctttgtagagaatacttgatcagtttttgtggagtgtggatgacaatcttatgcgcttgtgttaattcgttcccatggtatctaaaatgtgttttaatttgaattaactcatttctcatgacatggtttaaatacaagtggaatcttattgttttgagcatattatttgtgtgatgataaccatgtacacgttagctcttctgatctatttactgttccatttttatttgtttctgtgtattttttgatgatcgttggtgccgcagagtgggatttataaaggttttgaatc

SEQ ID NO: 56033 - DNA, 785 bp, Populus trichocarpa
  Intron number 1 from transcript POPTR_0009s09260.1 (locus POPTR_0009s09260) derived from phytozome v7.0 (chr-ID scaf fold_9; pos 8270412 to 8271196)
ccagattcatttcaggcagaagggaacagtattaggtgagaagtttcaaagtccaatttgcgttctgttttattccttgctgaaattttatttacgattcttgttgttgctttaatgtcttattctttttggtttcttttaagtcaatcctcttattgatgaatttgcacagctgctgttgtgtgttagatctgctactccggttgtttgactactttctttggagaactgtgaagtttgggttctctactgaaggtcatacagcatttgtattgctggaaatgaggattttattcagcctctgttggcagttgttaatatcattgatgctttaacaaagtgaaacaatctttaaaatgattcgccagtatatttagttccatttgtccatgattttacattcatgcatgagcacagtgtttgctggtgatttctgtcttctgtggagattggagctgctttgcaatatgaagtggttcaaaatgagagattgttcttatgtttctgattacttgaggaaaattgaaatctcttctggtccgaagttgttgttgaatgcttgttattctggcttttccccaccaattgggtcttgattttttgtacttggcccctgtaaagtttggtcggcctgtgaagattgttacattaaaaaaataattaaatgaatggtttacagctttggaatagaatgtggttgcacttagcaatatgcatatcgtcaaatttctttaaatttttgattgttgctgacattactgggattttatatgtcatgtgcagat

SEQ ID NO: 56034 - DNA, 720 bp, Populus trichocarpa
  Intron number 2 from transcript POPTR_0015s05180.1 (locus POPTR_0015s05180) derived from phytozome v7.0 (chr-ID scaf fold_15; pos 5534983 to 5535702)
ggacattcttgtgattgcggccgtgttttttccaggttaattatttaataatatttattatagatccatccatgttaactttctcaggttgctgttctttttttccatcgatatttttatttctagatatgttttttccttcctagaggatggtgctcttctttttgattgatggaaccttaattaatccaagtttataagtagtactgccatttattgacagttgttgagcacggttcccaaagatcagttgttgaaggtggttttcttccctcaaattccttccatcgactgctcaagacccaaaaacagtttttatttatttatttattattggttgttcaatctcttgtaagttgtatctattctggtaaatgattagcttaaagttgtgataaacatggttttatccaaatatttaattaatattttcttccactaagtcaattgcatttcaaaagcattagttaattatcactccttcaattctttttactttttgtttaatgcacttattacttgatctcttcctttcgtcaacaaggaccctttttcagtatcttcttaccacaacgtacgagcatgacatctggtccaatttcatcaattggtattcaatatagttattattctgtatttctttataggtgctaaaagggtttttttttttttttttcgtgtttagagttgagagttttattgaacaccaagatagctgca

SEQ ID NO: 56035 - DNA, 386 bp, Populus trichocarpa
  Intron number 1 from transcript POPTR_0015s04160.1 (locus POPTR_0015s04160) derived from phytozome v7.0 (chr-ID scaf fold_15; pos 4190889 to 4191274)
aattaggctcctcccagaaggaagttggtttttagttcgattttgtttgatttttcacaatttagctcttaaaagtgtgtttccccccctttcaatgctgactggatatatcatttgcttcagctgccctttttgtccctttgaagaaaaaactatgcctattttggtgatttatctgtagggtttataattaaagtgaagttcaagcatgtaacatgtttgttttttttctttggttgcattgaggaaaaatgtagtcttttttaagaaatggaatttcttggctttttaagcacataatgaacaattttctcactcatacaactttaattcgtatttgttgttgattcatgtttcttagactggctcgacccttgacaacgttg

SEQ ID NO: 56036 - DNA, 686 bp, Populus trichocarpa
  Intron number 2 from transcript POPTR_0014s09750.1 (locus POPTR_0014s09750) derived from phytozome v7.0 (chr-ID scaf fold_14; pos 7273766 to 7274451 reverse strand)
ggcatttactgtctaaacaggttcttctctctctgcttcaaagataattgtagttggactttgaatctaatttaacgtttctttttctcccgttgactatttttatttcaattgcattttctgctttgaattgatatagaaaagaatagctaaacctttcttttatctcctgttgttgaattttgattgaaattgaactcatgttcatgctccaaggctatatgcctgaacttcataaatttgttgtttttgatactatttcactggaatatttctgtttggtttatcaactaatgtgggaaaagaacaggaattatggtggaaacttggacttttctgctatggagagaaaaaaagaaacaaacaacatttcagatgatttttgaacaaagaacttgtctaagcaaagcttaataatggatttaagcactttatgtgtaggcttaaagagattgcaaatgatatgaaaactataatttattctgtcttcatccaaccaggtagattatagtcatgtgacctaaatctttttctgcatttgttttcttttgtatgcttagcaaccaagtggaggctatgactttaattcctttgaatattttgtttcctctttgttcttgtcaacatgggctccaaaaatctaaagcaagaaattctggctgatctgaactaaatgcaggcatttt

SEQ ID NO: 56037 - DNA, 514 bp, Populus trichocarpa
  Intron number 4 from transcript POPTR_0015s11690.1 (locus POPTR_0015s11690) derived from phytozome v7.0 (chr-ID scaf fold_15; pos 12258877 to 12259390 reverse strand)
agtccactgttacggaagtgaggtgtgtcttgttgattatagcttttttcttatttgttttgcacactatttttgttgatatgtatagcttatagaaatcagcactgttcatttaatcctgtattgttgttttttccttaatttaatgcaacatgcactttgtttctgtaagtatagatagtgaggggataatgtagagaaatgggctgggatcattttgatcaagtaagaattagaatttatgaaacaaatgataacaattctgtcacagagtacatttggtagcctaattttgttgcaagagtcggttttgagcatcctgtgttggggatagtggtagttgtgttgctttattaactatttcgagcgtccactggttacattgtttttgaggtttctttatcttcgtggattagcaaacattatataaatgagagattgaaaatgatatttctgtttcatagtctgtcaagattataatctatcttgtttgaagaagaacaggtatctgcat

SEQ ID NO: 56038 - DNA, 907 bp, Populus trichocarpa
  Intron number 2 from transcript POPTR_0015s02200.1 (locus POPTR_0015s02200) derived from phytozome v7.0 (chr-ID scaf fold_15; pos 1532325 to 1533231 reverse strand)
aactgcttcccctgtcaggtttggataatttttcccattcatttatctttttagttacatgctaattttcttgaatgctgttaagtgttgggttttagcctggatttgtgtttttaggatggaggttgtcatagttttagccaaacactataactttctgccattttgtaataactgagtgatgcacgtcttcactttgtacacaactataaactaccaggtgagagtcatgctactttctttgatgttttatagatgcaaaacttgtcccagagcaaggataagcggataaacttctgtgcatatattttttttttaatatacacttaaataatagcaaggtaataattttttttagaatgtttaattagaaataaaatgatgatatttgctttcattttatcattttatcgtctctctcacatttagaattagaggtttcctggaaagaaataagtgatttgccgtggtatggggaaatatatttgtgatgaacaagttatctttttttcccagttatgaaggattcctctgtcttctattgtagggttttcactttcttttgaaaattggggaaactaagtgttcaatatgtagatggccaaagtgaaactttaaaataaacaccaacatctttcaaaataaattcagaagatagatgagcaaaagatatatctccattactactggaccacttacaactctattttgaaatttccacatgtgggcactggcaaatatttgtcaagtttgcttattgatgtcagacactgagaggacaatttgtcaagcttcctagttctgatgactcaaattgaaaaagttttcctgcttcacttcatcatacctttatattttttttataatcacaggtgttcacctttgggtctgtgcccctcaagaccta

SEQ ID NO: 56039 - DNA, 904 bp, Populus trichocarpa
  Intron number 1 from transcript POPTR_0011s10530.1 (locus POPTR_0011s10530) derived from phytozome v7.0 (chr-ID scaf fold_11; pos 13018621 to 13019524)
cccctcaactgtcgcgtctccggcgaaattctcaggtgggtatccttaaaacccttttaattcaaatgggtatgcaataaattcattcagcacatactgtttaagcctgtaatagattggggtttgttggttgttgcctatggatagatagatagatgtgttcattggtatctacataaactggaagattttgagtatagttttaacacacaacgaagtttactttttttattccttttatttccactcacttttaatccaagcaaagcataagattttttcttccaaaaacaatttgacataggtcattgattcaaaacaatagattttaatcaggtttttttaaccccgtaatctcatttgaattcattatctagaaaaaaatgacaaattatattataatcgaaataatatatgttaattttctaatataatagtaatattgatcctagagtatttttttttaacgaaaagatagaaaaatacgaagttgtgtttatgatatccaaattgtatacccttttcttttcattttttctcatgaaactttttatattaaattttgtttataaggtgaatcaaaattcttaaagatatactttggcatgaaatgctgtattattataaataacgttttggtacatatgctaataataaaatagtctctgaaaattaacaaattcatttttaagccaatcaagagattatattggcagtataattatagctggatagtacaattacaagaaaatttagtgtgatggttaatttgaaatataggatgctgcactgtaattataactctttttcaaatttcaatgacttcgtaacattccttccttgtttactttttgttgtggaatttgcagttctcaatcaataggtatctccttgtctctccaca

SEQ ID NO: 56040 - DNA, 796 bp, Populus trichocarpa
  Intron number 1 from transcript POPTR_0446s00200.1 (locus POPTR_0446s00200) derived from phytozome v7.0 (chr-ID scaf fold_446; pos 7795 to 8590)
aacacttccttggaggattttgatcatattttcaggtatttttataaaccaacaaagagatgtctttttactttagctcttttttttttttgcttttgtttttagtaaatagtgaattttgctgaatgatagcttgaaggtaaaacaaaatgtatgttttgatatgctgtcggaaaattactgaaataaattattacttgatgactgactcggattctggataaagtttggcttttgagaatatttctttcgagcaatgattcaatgagaacacctagttatagtagtaaaattagcagaaaaatatcaatgtttcatcaattagaaaacaaaccaaatattgcacatgataatttaagatcaacaaatacataatgcttgaattgtcagcttgaagctgggaagacaaaaacattgatgttatattctgggcatatgcaaagggtgctcttctttcccttatttttttcccagtccaatatggatagggtgcttgaaaccagatcattaaaggtctgtttagctttacttggacattttagtaaaaaattgataacctaatgttatctaaataacttggcccaggagagggtacttgaaattttatagtgaagttgaacgtgggggcctataaagagttgttttttaaggcaaagaatttgcatcaaattccaactcagattaatgctataatgcatacaagttcctgtttgtatctcatttcaaagcagcatgatttatgatttaactttaaaaacgttgtctttgtcagtgtcaacactagaggtgcattttt

SEQ ID NO: 56041 - DNA, 919 bp, Populus trichocarpa
  Intron number 2 from transcript POPTR_0012s06370.1 (locus POPTR_0012s06370) derived from phytozome v7.0 (chr-ID scaf fold_12; pos 6724431 to 6725349 reverse strand)
acccagaaagtgtgcaagggtttcaagagtggcaggtattttcaatttcaaatttcgactgtattgatattcaagaaaggtatatttgaacatttagtaataattctgttatcaattttcgctctctctctcgctgtctgtttttgagtttgtagccaatccattaatggaggggcaagtattttcaattccaaatttcaactgtgtcgatattcaagaaaggtataattgaacatttagtaatctttcgatcatcaattttcttgtttttattgagcttgtgaccaatccattaatggagggggcagcaaagaataatgggaaagaaaccatggtttttgttattggctttaatttttttctataatgggtcccacctagcatgactttttgcatgctattgaatggaatttcaatggtgtggctggtagaaggtgctcttgtcataaggtaaccattgcagtccaaccttaacaactatgagcaatcttttgaagaaaataccaggaaatacacctccttgcttatcttgagggcagggtttagggcactagccttgagtttaaagacctatttgaaattgtggtagcgatagcgattcaaagggttcttcacttaaaaatgaatcaaaatgaagttttttcatttttaaaaaattatttttaacatcagtatatcaaaacgatctaaaaatattaaaaaaaattattttaagtaagaaaaaaaattcaaaatttttggaaacgcggccaaacactctttgccacagaccaatgattcattggccacatattggcttggtgtttagagaactttaaatttatgcaatgtagcccttattattgatgctaaatatctgtttcatttttcatttggtaatacagtcagaggtgaactttctaggaaggctatcacaccc

SEQ ID NO: 56042 - DNA, 976 bp, Populus trichocarpa
  Intron number 1 from transcript POPTR_0012s07000.1 (locus POPTR_0012s07000) derived from phytozome v7.0 (chr-ID scaf fold_12; pos 7643690 to 7644665)
ttgaggaattcatttgggtctgtccgtctgtcttcctattttcttcttcttttaacaaaaagagaaaaaagaagtataattgttgtactgtaattttgcaagaataattagtttctgccaaaatgtggataacataacattagatatcttatatatatttgagatttcttgtttttgatagactgctgtgattttccttttaccgcgcgtttttgactgattgcctgctgagaaaatgtgaaaaagaaaaaggagaaaattgaagtatagttgttgatttaattatttttcttttttagttttttagctgagaaaacaagaattctgacctgatcaaatatatctgtatactacaactgttggtctatttttaaagtgttgtttcttttcttttcttttttatttgtggcaacaacgtagcacgtgaataatataatattttcttggaaaccaaacatgttattttgattgtttcctcacttaaattttgttttgtttcttttcttcgataagtgtttgatagtttagtagaatctgtgaaaggacaataagtgtttatattgctgagaaatccaatgataaaaaaaacatgaagcaaatttgatgtctctatttttctagcaaaaaaaaacttgatagaaaactggaaaataatctgccttcattgcttactcaagtaaggaatggacatttttattaatacaagtttctgctattttttagagacaaattacagtttccaaacagctgttcctatgattttttcttcttcttctgtgtgtgtattgtgaaatctgttagataaaggttctagaatctagttactgtcgggcctaaactttgcatccaattggagagataggattttgtttcattgatttgctgctctttctacaaaattatccaattggagagatagaatatgtaatacactgtatttttggatctgaatgagagattgttaaaatgcaggcaa

SEQ ID NO: 56043 - DNA, 855 bp, Populus trichocarpa
  Intron number 1 from transcript POPTR_0011s16520.1 (locus POPTR_0011s16520) derived from phytozome v7.0 (chr-ID scaf fold_11; pos 18396810 to 18397664)
caggaaagaagctgaaaattgtgattgcttgcaaggtaattttttttaaagatgtcttttttagtgccttttgtgttgttttgattgaacccttatgagttttgtttattttgcttgtttgatattgcattgggagggattaatgctttgagaaatggctttgggttgttttgattggatatatctatttttttaaatggttttggttagtttgttagaatacaaagaatacaagtgggtttgattggatctggtcttatattcaggttttttgagatttttcttggtgccgttgattttttgtattatgaaaatgaggggcttttcatttttgttttgtttagcttgctgggaagctaaaggcgtgtttatgatggtgcctccatgacttgttctttcatgttgttcaatgacatcgtaatgctggactaaatcctgttttctggttttgctgactgctccatatgctaggctagttctgaattttttttggctggaaacttgtgtcgttggttttcacagctgataacagataatgagaaaatgatcttccgggacttgaagtatgtaacaaggtctatttagattcaagtgtggtttatactcatggttggaagtttggtttctatctttttcatgatttggtttttgtttgcaattttccgtgtttctctttaatttgtggtcatttgattggtataccatcattgttttttctcttaaatttaagttctatctagaactgtcctttctcattgatgctacatttttagttttcctgtctgttttcaagaatcatttaatatatttggtggaacaggatttcaagtttgccattctttgggtggaggcact

SEQ ID NO: 56044 - DNA, 762 bp, Populus trichocarpa
  Intron number 2 from transcript POPTR_0011s04010.1 (locus POPTR_0011s04010) derived from phytozome v7.0 (chr-ID scaf fold_11; pos 4073746 to 4074507)
ttaggaaataggtatatttattctcaagtatagatattattagctagctaacgcatgtatgattccatttgtttttaggagagctcacctattccagaagttcattgagttacaatcagctcatttcttgaacatatgtcctgcaataaaaacacacgcacgcactctcctctaatagctctacttggtatacgaagacatacaattcctaggtattttatgtacataaatgttataaaatccccttttatgaagaaatttctatgattttcgaagcattcgattacttttttctcttcttgtaaaaccacctaatacttgaagcaagcaatacaactctatttaagggatccattattaacttcttatgacatcaatagtcttacattaattggttaggattcaagagactgagcctgctagtatctcataaagactagtttcaacctttctcaccaagaggtactattaattaaggttaagagcccttcatctttgaacagatgagacaataattaggcctctttataggcgccaaccatgttgcagattggtaagaacatggtgatgttcaatatagctattgcaaaactctcactttacagtctaaccaattaacactcactttacactggtagtcgaattgtatatagagcaaagtatgcaaactagcagtattttaccatcaattgaaaaaaataatgactaaaatcagctgcataagatcaataatattttctccttttttttcatccatttcag

SEQ ID NO: 56045 - DNA, 960 bp, Populus trichocarpa
  Intron number 2 from transcript POPTR_0015s04720.1 (locus POPTR_0015s04720) derived from phytozome v7.0 (chr-ID scaf fold_15; pos 4946424 to 4947383 reverse strand)
ctgctggaaactcgtgagtgtttgtgactaaatacttcctttctttttatttataaaagaagaaagttttattggataaaactgcttcaagaagcagtttgaagattctagcattctgctgtaaccaaatactccaaatcgcagcatgtacaagattcaaaagtttttgcaatcctattccttccccattccagtttccaccatgcatagaaaagagtgaaaagcttagttttacaaagataaaaaattaaaatgtcaactagctccatcaatttctctgttaatcaacctgcctgctccaccatgcgagcgtgctcacacacaaaaaagagcaaataaacatacaaggatttctatgtgattcggtgattgatagaaataagtgtacctgttgatatttgagatgtatagttaacatgcaggctagcaattttgtctatttttatttccctaaccagtaaaacacacttgcatggatgtggcaattatgcatttcctggaacatatacaacatgactaggacaaagttgcatgtatacaacatgactaggacaaagtgacatgtttggggcacgaatgcagatctcatctgataaacagctttgagtcatactgtctgtctcctcagagtcacagtgatttgacactctttgtagccaactgtgttattcacaaaacatcacacggtaaatctctcatttctaagtcaggggataattaccaagattaagaatccattaggtggtggtattggttttgcctcccatcacttttccacggtttttcacagctcatattcagaccatgctctttgatattttgcgctgtgtgctttgctacctttataatgatgtctttttttgctctttccaatctgttttttccattatttgttggcgatggggtgattcttttgtcactgcagggttttcaaaaatcatattccccagtttttgagag

SEQ ID NO: 56046 - DNA, 1006 bp, Populus trichocarpa
  Intron number 1 from transcript POPTR_0009s02660.1 (locus POPTR_0009s02660) derived from phytozome v7.0 (chr-ID scaf fold_9; pos 3423649 to 3424654)
ggaagctttcagcctcttcgataaggacggcggtctctctcttttcttttaattttttcacttctttatttctcagatctaattctgtttccgttgttattttaccgttttcgtgccgcttttgctgtttcttagcttgatctgtggctgttctgcgttttatttatttcgactggtcgtttggcagcttttctgtttctgttttttttttaatcttttatttccttgaggatctgttttgaaatgtgctaggttttgatcgcgatctgtgtttgtttagattttggatcatttccaaggttatgattcgggccgggttgaccgaattgtttgtttgtttgttaatgagggggaaatgattggattttaattgaaggaataaatttgggtggaatcatgtaggttaagaaatggtgttaggaatgatctgttaatgtctagattaagctgtagaaaacttgcattggcaaatcgctatcggaattgtaggcattttttttgtgtttgagagcatgggataagctatttagaagagccaaattggtaatatggctttttgaatagtgtagatatagcattttttcatatatgcactccaatggaaaaaaaacctttcagaacctctcttttgcataaaaatatattaaataaactcttagctcttttgaccaacatgtaggaatagctcttcaacttagaaatgctattttggcccttcaatatagctctcaccttggagctagaaaaatgatgattaaagttggaacttgctctgcttttatcttgattctattttatgaatgattcgtgtattttgtttcaatgatactgcctgcaatttgttgagggttgcatatcttggtccgtcctctcctcacacatccacgccggacttgttttgaatcatattcattatttgaacttgatgaggtttagtgctagaaatatgataattgttattgattttatctcaggctgcattactacaaaggagcttgggactgtg

SEQ ID NO: 56047 - DNA, 786 bp, Populus trichocarpa
  Intron number 4 from transcript POPTR_0011s12030.1 (locus POPTR_0011s12030) derived from phytozome v7.0 (chr-ID scaf fold_11; pos 14810335 to 14811120 reverse strand)
gagatctttgccaacagcatttaaattattcaccggttagtatcagaattaagatttcttttctttccacggacacttgcaggtaaggttgattgttgatgtgtaattcctgcaaaggaataaataaattcaaaattaggtttgaattgttgaaatctgcaatttttaacaattctgctggagcttactcagtttgtaaatgaatttatcagtgaactctgtttctttgatagagtttaagtctgtctaatggcaaatgcaatttgcaactttcaactggaagctaaaatttgtcttgcttttgggtttccactggaaataagtggaagatgaaagtgcattctgtaactaactagtttgtagtttcatgctgtacaagttcccttttctatattcttcaattgcatgtaatttataagaactgaaagagttaaaagctttgtgcattgattacaacaacagtttaatctgttgggttaagagcttatttcataactgctggaggtatctctttcacaggcaggcatcattatgttctttttttcaatataacaaacctatggtgttcaattgagtcaactattttgtaaaatccagaacaggattccaattgcagcctttgctttgctgaaaactgaagtcctgaattctggttattgttagatttcaatggcttccaacatgtactttgctactgaaacactgaaaatgttagcaactatgaagacctgctgtactgcattcagctgaacttaaatgatttccacttgtttctgcaggttcagc

SEQ ID NO: 56048 - DNA, 781 bp, Populus trichocarpa
  Intron number 1 from transcript POPTR_0011s12030.1 (locus POPTR_0011s12030) derived from phytozome v7.0 (chr-ID scaf fold_11; pos 14812208 to 14812988 reverse strand)
gtccatctccctttcttcttctgtttctataacaggtttattctgtttcttgattccttcaatggcaaactaatgaatttgaagtgttagtattgtctcttttcttgttctttgctgttgttgtacgggtccagctgtgtttccgtgcgccatgccatgccatgccctttaagtaattctttctttccgttgagagatttttatggggtctttcattgatgcaaatcttgagttccctcttttgggttttgcttcttattttgtgttctctgtaaagaaaactgatgctaatattaataaataaataaatgatggtagttgttgatgtgctatctacgatacaaaaatggtcttttttattgatagttttattcaagttaacttggttgtcaaatgtgaatcgaatcttttttttttttttttttggatttaggatctataatgagattatttgccaatattttagcatgtttgagacctaataagaaaaatatatatttagttgccaataactttcttgattatttaacacctgattaagaaatgaagaattttcagctaattgtttaatctttatttgatttactgtttcattttggccgattttattgatgcatcgtttccgtctcttgagtatattttagttctctatcatttgattcatgctgtgaagctttttgattgttttacgcaagcgacaaggtgattctcatggtttgctctgttgttgtttgttgatctggcagcttatactggtcaaggtccagggttcggaattttt

SEQ ID NO: 56049 - DNA, 535 bp, Populus trichocarpa
  Intron number 1 from transcript POPTR_0015s08910.1 (locus POPTR_0015s08910) derived from phytozome v7.0 (chr-ID scaf fold_15; pos 10264316 to 10264850)
acgtcgcctccgctcctctttcgtcctacagaagcgtacgtctctaaacttttatgctccttttcttcttcagttttattgatttggttattcgttagaggagatcaaaccgatactctaacttgatgcttgaggggataaataaatgataagtttttttttgttatggtatttcagaaagttgggcccttcaaggatttatccgtgttgggtttttttcatttgatttctttacataatcactgttttttaggatattaaagcttttgttttgtatttattgttgtgtttaactcttaatgatcagctgagatgttttatatatgtaagttttaaatgctaaagctttggacgctgttaatttaatcgttttttatctatatttgtgaaaaaaaatagataatgattgtaaaaatgctttgtttttatgaatccatagtcgtgtttggtctggctcattaaaatctgtttgagaattgaggctgagattgtgaaatggctgagttttggtgttcatcccttgtgcagttgacta

SEQ ID NO: 56050 - DNA, 1019 bp, Populus trichocarpa
  Intron number 1 from transcript POPTR_0011s10360.2 (locus POPTR_0011s10360) derived from phytozome v7.0 (chr-ID scaf fold_11; pos 12788927 to 12789945 reverse strand)
ccaccacaacatttcctgcgacaatcatcaaacaggtttggaaaacagtgccctttctctgttttttttttgttagattgtcatgcatttaggcattcaactggggttttaagtttatttctacttccagccttttatcctatcacttgaggtgtaacccatgtttaaatttttcttcttttgatgggttcgtgtatttttagtgttggcaaagcttgtatctttctcgaggcttttatgaaatcttaatatgtaaatatttggtatgttgctgcattttttgagtgtgttgtaaacatttgcttcaattgagtggcattcatatcctgaatttttcctttcattgggattgtgttgttgtcttggtcaagtacagtgctagtttgttactggctccttattttatatggttttaatgtagaaaggttagtgttctctatacggtcatgagcaggagtagtgccgttcctcattacatttgaccaagttatctgcttgatatctttaatggtttccggggtatatagctactctccagggggaaaaaatggcattactactgttgatttcaatttcttttcttttctttttccttgaagattttataggctcacctctcatgtaaattatgaaagtttttccaaattcgctagctcattccaccttttttgtatagccctgtagtcctatgtcatgaaagtctaatcactagatgttaataaggataatgagtaggagaactttatcagctgtagtagagttagtcagcaaaatcaaggagctgaataatgtttttgattgcttagatattgataatcatctttaatactaaagcctgaagggtgaccactctgcatgctccatagatctttgttaaccagtgatttatattctgtaatgcggtacactggtgtgttttgcttgtttgacaatttctttttcttccttcaaatgaatttctgaactaaataattctgttcacaggtttacccggatattactagctgtgctccttttct

SEQ ID NO: 56051 - DNA, 945 bp, Populus trichocarpa
  Intron number 2 from transcript POPTR_0004s13310.1 (locus POPTR_0004s13310) derived from phytozome v7.0 (chr-ID scaf fold_4; pos 12867695 to 12868639)
ctgagaatatcacttttgaaaactcttctcctgaggtaatgtgaactaatctttggtcgcttcctttttttgttgtcaattttgtggtggcttcttgtgatagaagaagatttttgggttcttattgtgtttgaggtgttgggaatttttgtttttatactattaagtatggtaaattctgttacgaattcgattttgtaaagttcccacactaaaagaagcctgaggtgaataacaggaatactggaatgtaggaatataaagttagctaatggatgtatttcttaaggaacagtaggcgtgatgagcaactctcataacaacctcctcattgtaattcattcatcatgatgattactcaatctgttacaataccaaactaaatacaacatccatttcttctagagggaattgctctgctttccttattggccactcttggctacataaactgaaagatagcaaaacagcttaatcaaaatgcagcgtgggaagtgattgaaacggtgtgcacaggtgattaaatgagacgcatcatttcacacaacgttccctttgcttttaaattttccaacggtcatctcccgcaaaccctcctccatccttagctgagttaggttgtgacaaattcattggtgtgatttgtaattttgatttttgttcattattcatttgtttcattgaaaaaatgattttttttttattctgtgcatattttgaaattgaagtttaaattgtatgagcattgggtgtgaatatggtactttagaattctttttttctagccattggttgtgtcaaaaagtatgatttgaggtgttttctatgttgttgaaagtgaaacattttgaattgtttaataaatgatttgaagctattgatatgtgtttttttatatacttgtatccagggttcaggccaagctgtggcaattagggtgactgc

SEQ ID NO: 56052 - DNA, 843 bp, Populus trichocarpa
  Intron number 1 from transcript POPTR_0014s11470.1 (locus POPTR_0014s11470) derived from phytozome v7.0 (chr-ID scaf fold_14; pos 8515524 to 8516366)
ttgcttttttcactctgcgcctccgttctcctctggtaacattctttgttttcttctctttttttgggggatttatctgtttgtgatgatcgatcaatgcatgattctatcgtgtgttttctgcatattttctcgtgggttttgttttggttgattgatttgtgttatttttttaatgtttttagtgtctccggttaggattcacgggaattgagttagtgttgttttatggggtcctgtttggttgcaattgtgtgtttcctttgattcataagtgttcagttgctgctgcggtttgtcaattggttttattgatgggtcattgtgcttggttagatgtcacaccgatttgttcaagttttcaattcactgggctttgacttttatatggttaaattttgtacgatttcccctattgattttcaattatcgagtaatttggtgctttatcttgtatctgcctgcctatcttatgaggttttgttttcctgggttttgggttctttgctgttttattgttgagcttgatgccagcagactgcgtcattgtttgtgatgaggtttttttttatcatttctatctttgaattccgcttactttatttggttttagttccaagatttattacttgtatcttccgttttggaatgacttctctggatgctatgccttgaatgctttactcttctattccctctcgcatcagttttccactctcatggttattctaatgtgatgagaaagtaatatgcatgttagctctttttcagggtttatccaatataattgcttaggtttttgatgcaggttttacgaaagccatctttggaataggtggttat

SEQ ID NO: 56053 - DNA, 638 bp, Populus trichocarpa
  Intron number 4 from transcript POPTR_0014s11470.1 (locus POPTR_0014s11470) derived from phytozome v7.0 (chr-ID scaf fold_14; pos 8516995 to 8517632)
attctcagacacctccaacacaaggcagaaacttagtcttcaggtgttcttgtcatcctgactgcttgaattatggcgacctcttaattcttgcatgcttattcatgcattgcatttgctttaggacgttcactttgaccaaataccaatttaaatgtattgcatttgcttttggacgttcactttgaccaaataccaatttaaatgtcaagtattttttttaattacctttgggaaatcacacacctcctaacagtgcacctgaaggtttgtatctgtgtctgttgcactaattttaacttatatatttatttttaacttaaagtaagaattacctatctcttaatagtgtgctggaaggtttgtactgcttgttggaggtgtataacttaaagaacttccacgtagagtttgcaatactttatagaactactcgcatggtaatttgaccaattcttcatcattacttgcattttttggatcagttgttgacaccaattttcggcttgcgcacatagatttgtttatgtgggtttatttggcatcctttttgtcttcacttttatggaagaatatctaccacattaatgtgtattatctcagtatctcacctaataagtgatctcattattgagtaa

SEQ ID NO: 56054 - DNA, 916 bp, Populus trichocarpa
  Intron number 2 from transcript POPTR_0015s01000.1 (locus POPTR_0015s01000) derived from phytozome v7.0 (chr-ID scaf fold_15; pos 580478 to 581393 reverse strand)
aaaccgaggattgttggcttattatctccggcaaggtcagatctctttctacaagtttcattttttggtattttttagattaaaagtggggaattctgtttggttggtgggaaaatctagtttgagattataagatgagaactttgactttttgtgattagttttatttaccccttttggattttttgtttattgaaaattaaatctgtgtcggtgctattagttttattgcatgattaaggtgttgaaagtttatttgaaatgcttaaaattgcaaagtttgttcctttttgaaccgagtgctatctcttcgttggaaggaaaagtcactgaacataccaaagcaatgctccagtgttccctcctcacctagtagtatgtaagaacctttggtcccatttaaatttgtgaagcgtgtaattggataaatcccttatggaagaggtgaaaagaaaggcccatgagaagctaacatgcattatatttgtcaaaatcttactgtggtaggaattgtgttattaaaagttacttgaactatcctgctttggatatcctggtgaattgacaagtgaggtggcctacccaaacctcccaaggaaggaaaacatgttgataggccttccacaaaataaatgaatataggaaattgatgcctgaacccaatacacatggtcattcgccttgtgtaaaataactctcaatgcgataaccgattgtcatgtgataatttcctcttgcggggaaagcacgagctatggtaattactctttgagatagggtgtgaactgcctgttctgcttttttttctttgatatgaaaaataatgtcattatgtgtctaatgaaatctttacttcattgctactgtattttcttttttaatttttattgacgttttgagtttcatattcaggtgt

SEQ ID NO: 56055 - DNA, 887 bp, Populus trichocarpa
  Intron number 1 from transcript POPTR_0009s12010.1 (locus POPTR_0009s12010) derived from phytozome v7.0 (chr-ID scaf fold_9; pos 9894764 to 9895650 reverse strand)
aaaatcgttcgagtggttgcataggctagcaaggttccgaagaagttgattttcaatatgtaacaagaatgttctgtaatgcatgatgataattatctgtgctgttttatatgtaataaggttgtgtattataggtataataactacacattagaattttgattgattatttcaggattgctgtattatatgcgtgatgataactatttggtggataccttacacggccgctctattcccagaatttttcaatttctgtgggactgcatcagttaatgtctagtgtaaattttcaagattgctcttggaattgcataacatgctcgcttcagctcttcgggcagtcaaattttgaaaaatcgacaaaaatctcaaaatctcaccttaacctgtttgaaatctactatagaagttccataattaatagtagtagttcactgggcccagaattatctggctggttggtggaatggatcctgattccaaatacgggcctagctgagtcgggctaggccataaaggagaaagagctttaaaaacccaaaccagcactggactagtggctcatggttgtttgcagccttgtctactattaaatctataatgggcccttctgaatcaggctaatagcctatcaagaagaagaaagaaaagcctaaaatagcaaaaggcaaagccccacttcttttatacgcgtggaaattttcgaacttgaggcacaaacttctcaactgccaaaaacagaaaccaaaaccaattttactcttaacaatttctgtttcatgcttctattgggttttgtttcgttcttctgttgggtaagaagacaaaaacatacgacgaaagcgttaggaaacccttgaagagggcgaagagtacaactggaa

SEQ ID NO: 56056 - DNA, 1028 bp, Populus trichocarpa
  Intron number 1 from transcript POPTR_0014s11020.1 (locus POPTR_0014s11020) derived from phytozome v7.0 (chr-ID scaf fold_14; pos 8213573 to 8214600)
gcaagaccgagtcatctgtcgtttttgtcaccaaggttaagcctgccttttcaaattccatttcttttgtttggttttgattgctaattcgttttgagtttgatgatgggtgtggttaattgctaatcactgaagttatgctgttttcttcagctttgaataagcaagtgcgcaatctgttgcctcaaaaaggactaatttgcaactgttggtttaaatagaggcctgattgattgctggttttgaatctttaccaagctatgtgaagcttctttgtttttttagaccctcttaggaagtagtaatagtgaagcagctattttttgaacattcaagggtcttttccatcactaaagaagaatttatgacaaaatccactagtttcaggactgtttcaagcatttttgctatgtggcagcgaaggctatctcttaagaataatgacaaaagaaaatgtagagtggtatatagaagctagaacatccatgcaccttgaaagtaaaaggctattgccaggggactggacctcataggtagttttccccggagattttgtagaaaacaagcattttgggcatacatcatttagtttttttttaaagggattattgctgaagcaatgtagagtcagcggattcatagtcaaattcaatatcaaatatcatttcactaggcacaaatcatccccgcgatccaatgtagaagacaaaggactcatcattcagaatttgttagatggagtttgctttcagaaaataatatatggtcaagaacgcttttgttgtattttgggcttaatgtgaatgatattgatttttagtttccttttgcacttttattttttgttgtagtttaaaatctaatacatttaaggtgtggtattgagaagtaatatccacttgtagttgtctacttggtttttcaatttgcctcactgcttttgttcatattttttattgataaatgacacaaagcgctttatattttgctgttcttgcaggctttaggagattatacaaggttgatta

SEQ ID NO: 56057 - DNA, 988 bp, Populus trichocarpa
  Intron number 2 from transcript POPTR_0012s06230.1 (locus POPTR_0012s06230) derived from phytozome v7.0 (chr-ID scaf fold_12; pos 6323900 to 6324887)
ttgttgaggtcagtaaaggtgttttgttttctttgtccatacgcaatgattatcgttagtgatttttagccgaagttgatatagttgcataaccagagttaagcttcccatccaatagtttgttcttctaggaaatcatatctgaatttgggccaaattttctactttttttgtgaaggacagtttgcttttcattggttattgaatctgtttctttagctatattggtggctgaaaggtccaattgcttctgccaagtttctttactgtagcgagtcagtgatgattttcatcatggtgcaataattttgaacttgctcatattgtccccgatcgttgctggcttgcaccttctctttgattcgaaattaatattccaagctctcttccttcttgaaaactttcttttattattttttcttaccaccacacatggttgccaatggtaaattttatctctgaaatcttatcaaaagattttgaagctattataaagctgttgctttatgtaaaggagtgtaacaaactcatacgtccgctcaatacaaattgttatttgtattctgaggtgaatttttagcttgttcttgatgggaatctatggaataaaaccaatctgttaagaacctctttactgtttgaccgtcatttagaattgttcaattgccttggtcaactgcagctccttttagttgtctttgttgtcacatgttgactcagccctgatgctggaagaaaattggacatgtcatttgtttttgtttgattcttattttttcagtattctatttctggtgctgttaaggtgttctttttgggtaatttagtggcattacccatctctactaatttttctattttcccttggttgattttatattttcctgtttgtatttctaatcttcacccacatatgagttatgtgctttgacgttggctgggcgctagagcaggatcggaggcaattagagagagattttttcagtgg

SEQ ID NO: 56058 - DNA, 875 bp, Populus trichocarpa
  Intron number 1 from transcript POPTR_0004s11740.1 (locus POPTR_0004s11740) derived from phytozome v7.0 (chr-ID scaf fold_4; pos 10595381 to 10596255 reverse strand)
ggagacgagctctcgggttgggaaagttttgcaatgttaattaattctgcagtgtcggtgagagagaggagaacacgaccatgagaaaagcaattggaaattgcttttcacaaactgaggtctatccttagtttcgggtgggacccacgtgtaataaaagtgtggttaatatttaaccaaacactttacaacgacgtttgctagcaaccgcagtcacaacgccaaacacccacttcatgtgcctcacctgtaactcgatgatgaaataagtcaaattagtaatattcagaatggatgaaaaataaataagttcaattcctgtaattagttaagttgaaactgatattatatttttgtattctttaggttaaaagaaaaatacatgtaattagtttattttaatctttagaatttaattatgtcttatattttgatgatgaagtaattttaatgtaaaaaattattggatcatggaaaagaacgtaaattatgttgttatttggtgaaggtttaggatggttgtatagtgacttgagattgattgtgtgaatttgtggtaatgtggataactactaaaaaaaatcctggtttttctatgtaccaatgattaatgaaaagatcttaacgtgttcttaaagcaggggatgttcttaaagtagggaatgtttcatcacctcactcgtatatgataattgcagccactttccagcagaaatgcacaggaaccctaaactggttgtttggtaaagttcttagtgggttgttccgataccgacgacggtaaccggtgcatggcggagctgtgtgtttccagtatatatttattgattgcatgggtagattaaccacaaaaaagaagaaaaggcgacgtaatt

SEQ ID NO: 56059 - DNA, 1021 bp, Populus trichocarpa
  Intron number 3 from transcript POPTR_0001s28030.1 (locus POPTR_0001s28030) derived from phytozome v7.0 (chr-ID scaf fold_1; pos 26832269 to 26833289)
gctatcttgaggtgaactcctcctcctcctcttttgctatattgtatggcgttcttgacttgaggtaaaaacctggaaggctgggtaaggaaaagctccttatctatgtactgatgatagatcatgaaatcatgcctcggtgatagttacatatatgctcgagcaatcagctctggcaaaatttagattagaaatttaaagcatcttggaaacgagttttactaatacattagtaattaagtaaccctatattcatagagaataatttgttagcattttgatgtatgtacattaatcgcatatcctcgaatttggaaaatatctgttcgttttaagatatgctgaaatattttgatatgaaaacactcatcctttatcaagtcaaagtaagagcatctccaaggggagatgctattttgaagagccaaattgataaaatggaattttgaatagtataaatatggctatttttaatatgtatactccaatggaaaaaagccatttgaaaagccaattgtaatggagtgggagaaataagtgctttaatttttcttcaaggagtttgctgtcatttttttccacatggctgcatttaattggtttatttttttgttggctccgctttgttggttttggcttttttgagagatgtaggaatagcatttttgggagagaaaaggcattttggcattttgtttagacttttcttggagcatgtaaaacaagcattgaggagccaaaatattatttttatttttatttttggatttccatttagcacaccccttggagttgctctaacaacatataatttgtggatttatatatctaatcctggtttgtgtgtaacttccatagagatttttggaggccttactcttaaagattgtgtttggttatgttgccttgttttgtatatgcatgcaaacataaaattgcaataaggaaaaatagtaggctcacgttgctgagtgttgtttctgaaggcttgtaaactgtgttgttgagaagacacggaaga

SEQ ID NO: 56060 - DNA, 680 bp, Populus trichocarpa
  Intron number 2 from transcript POPTR_0011s06990.1 (locus POPTR_0011s06990) derived from phytozome v7.0 (chr-ID scaf fold_11; pos 7717358 to 7718037 reverse strand)
ggccaaaagccaatcaaaggctcaccttaccccaggtaacccttccctcttcttccaaatccgatcacacacatctttcctttttctttcattgaagtctatcttgtttaaatgcatttggactgattctttctgttccagaaaaagaatgaatgaaaactcatcgtaaaaaaattatagcgacggaaattatgcttccagagcatttctttactgtaaatatatgtgattagttgctgaattatgcaaataaatttgatcaatatctttcaaatataaaaactgaactctatacaaatccattctctggcggcagtttcttcgttgccatagataataagtggcgagttttttcatcgccacagatcttgcaggcatggtcttgtaaatcaagacattgtccagactgctttctgattttgagctcttttttttttaatgcgttaaattatatatatatatatatatatatatatatatatatatatatatatatatatatatatatatatgaaacagattgtaacaacatgtaatcttctcttcttctttttttttatcaagaacaagatagataaaaaatgttgatcaagaatttcaagacattgataaggtacttcttgttttatgttttgttgtttacagaggctactataggtgtagtagttcaaagggctgtc

SEQ ID NO: 56061 - DNA, 884 bp, Populus trichocarpa
  Intron number 1 from transcript POPTR_0011s09130.2 (locus POPTR_0011s09130) derived from phytozome v7.0 (chr-ID scaf fold_11; pos 11292873 to 11293756 reverse strand)
aatatcctaacaaggtgctgcgttcgtttatcacccaaaagctcttagattcttggttttaaattctctcgcagggttttactagggtttgactcgagtttttttttttttttgtatccgttcttttcgtgtctgatttcgttgaaggttttgctggggttttgaggattttttcctctttcttgaattgttatttttgtgtctggttccatagcaggggttttagaatcttgaaaattttatgatcatttaagtgctagtgtttggggcatcatttagttttgaaatcattatatgactaattttctatgttagattgcatttatgtgtcctttgcttgaaatatgcaaattctaataggttactgagagagagagagcaattcaaaagcagtgacttgaatgaatggattgcttttctatcatcattttggggtttcaaattaagagtaataataatggctttccatttatgctgttgaattaacctgtattcctttgaattaaaacatttgatcacatgtccatggcatgcaaaataagctagatgtgtttattgtattggtgccatttgaaggtttttgggttcagcttatggaggggaagtcaagtttgtgtttccttttctatgtaaaaaatatggttcccttttgttattgttgttttatgatttccaagtagcatgcacaagtatgttagctcctcttatctatttaagtgcccaccaatatttctgccaaagtacaaatccttggatttgacttctattcatttcaaatacttgaatgggtttttaatatttgatctcttcttgacaagttcggtttccccttttgaatttttctttcagtgtattacaagtaaggtttgtctgtttcatcattc

SEQ ID NO: 56062 - DNA, 300 bp, Populus trichocarpa
  Intron number 1 from transcript POPTR_0014s11010.1 (locus POPTR_0014s11010) derived from phytozome v7.0 (chr-ID scaf fold_14; pos 8211862 to 8212161 reverse strand)
tttacgcggtgagctttaaaagcagaagctaccgcgtaaacaaacaccctctaaaaaagaaaacaaaaggaaagaaaatggtgttgctgctaaatttgtgaagtatatgccacgtaaacaataatttcttggccttttttttttttccagaaacatttataatcggttaagcttaagaatttttacaaggattcgtgcctttggaggtctattattttgcacaatacatttagtcatagttttgaaacctggaccggcccggcaggtcgaccgggacccagtcaatccgggtctaagtaa

SEQ ID NO: 56063 - DNA, 643 bp, Populus trichocarpa
  Intron number 4 from transcript POPTR_0011s14770.1 (locus POPTR_0011s14770) derived from phytozome v7.0 (chr-ID scaf fold_11; pos 17050227 to 17050869 reverse strand)
tgccggacacagtgcctaaatcctcctgcagaactgtatgcgctcattctctgatcattcttttttttttttgtgatactattttctaaaattgttctggagtgtaattaacagcaattcatcaccacatcattagcaggtagaatccggggctcactgtataccttaatggttggttatggtctactgtactttgagtcatttctgcatctctttgtgtaaaaagatatttatctgtaaaaaggaaaaacaagactaaagcaaagggcttgtcctatacaatcaggcagagaaaatacaagaaaaagacaggtcattttgctagtgttcaaccatgtattgatcatgaattaacaagagcgaccatctgggtgataatactaatacgagaaactgacttttcttttcgaatgctcatattccaggttgttatagtcaggtaattgcttagttctctgcaggaattctgctgttaacaggggtatttgttttacattttttgttattgtgccattacctttttttattgtaagtgcaaatcactgaatagatatacttgttcgattcaacatctgaacttatacaatagtgttgatgaatagaaatttgaattttctgactaatagataattgtcaggccaaa

SEQ ID NO: 56064 - DNA, 816 bp, Populus trichocarpa
  Intron number 2 from transcript POPTR_0011s14770.1 (locus POPTR_0011s14770) derived from phytozome v7.0 (chr-ID scaf fold_11; pos 17051192 to 17052007 reverse strand)
cagaaagagagaggaggaggattttgattttcctggtaagtttttttctgtatcgcaactggcttagtctagggtttttgatttttttttaaaatcagtcgtaatattttttattttttcagaatgggattgcatggtgctacattttgatttttttgcatgtatacttgcctttacatttagggtttctaagtgactgtataccaaatttggaaaattgcgagttttgattattacattttgtgttttagatgctgttattacttaaaatatgatttttatctggattatgagtaattaggtttcttgtgtttgggtgaggatttattgaaattaatataatgtgattgtatagatggattcatttattctatgcctttagttttattcatatgcatatgatatgcattaaattgatatttcatgcagtgatgctattaatttgttgttaaagttcaatgacaaacctttttggaagttgtgattgtgctcgaattctagtttggttctctgtgtatttggcaacgtttgaaaacaggttaatcatcttatggaaattcaatgttgattcctttatggttaagaaaagtaaagaaagtttatttgttcgaagttgggaagtttcagtttattttcaagaatttctgaagaatatggcttgaagggatgccagttgactgtgcaccatttcagagaatagttgatgctgtcgtttgtttgtagttcttaacaatgttgttcgcttgtgctgttgtttttggtttaacagtccattatcttatgcttggcacttggtttgatttggcaggtttataa

SEQ ID NO: 56065 - DNA, 835 bp, Populus trichocarpa
  Intron number 1 from transcript POPTR_0004s20020.1 (locus POPTR_0004s20020) derived from phytozome v7.0 (chr-ID scaf fold_4; pos 19670751 to 19671585)
gagttctggggtaagcagctccttactcttcttgttattagaattaagatagttttttttttcagcgttcactctctttgattctgtactttgactagtttaacgtttaagtgtttttaatgttctttttcctgattttattctaaatatttacatccccttcttatgtattatgtcagcgattgtttattccttttccttctgtgttcctttatgtcgttgtttagagcttttttttttcaatgttttttgtggactgttctgtattttctgtttggtttggtttggttttgttttattttctgttttgtagcttgaagaggtgtgattttgtttttgtaaacagatacatttctgaatgtgtttgtgtgtgtggtatggtaatagaaggaaactaaggaaggggaaagataagaataatgctattagtgtttgtgtagctaataactatggttttgctcttactgttttcattattttcgtgctaggttttgtgctttgtgagttccacaatgggtcggagttagattgcttgtcagattattccactttttgttggattttctctaattgccttaattgtgtgctttgatgaaccacgataattactagctaagtaataaaatcttatgcaagtgggttttattttttaaatgcgttgtgtggcgtgtttagcgcatgctcggacatccaataggaattcttgtttctatttaagtgttagttgttatgtaattggtggttagcattggtgttatttctgttttactgatgctccataattttgattattttattaggtgttgaagtcaaggctggtgagcctcttaaagtg

SEQ ID NO: 56066 - DNA, 683 bp, Populus trichocarpa
  Intron number 5 from transcript POPTR_0012s05840.1 (locus POPTR_0012s05840) derived from phytozome v7.0 (chr-ID scaf fold_12; pos 5654401 to 5655083)
gaaccttcatccaacagtcaacaacagagagaaaggtaagctggcaatacatgatgatatgtacttacatcattcaatgccagctgcatttgtcagaatttgtttccttttgtatgttagctgggagtaaccctcttgatcaaacaaaagagttcttggttttgtgattctatgagaatgactaataataataccattgatttttgttgaatacccaattttgtggtataaaccatgaagctataacaaggtcattctctataaataattgaatagcgtgatctatcccaaataaagtgtgaaggaaaaaactcccagttttgcaacatgtttttacttcacttatggttctcatggtaatcatatgactcattccatgtttcaaagtaatgctagtgagttcctgtcttgtaagttttgttcttctatttttttattgacattttttctttgcttagatttaaccttcccccccccccccccccccaaacttcgtccttacattattattcattagcttgtttttgtgcaggcaataaatcttcataaaaatattccttttatctcagcttgtgttattaaaaacaaactaagcttcttggttttagcttgtttcatcatgctgctttgatgcttgctgattatggttgggttgttgcataactgacaggacagcagagctt

SEQ ID NO: 56067 - DNA, 605 bp, Populus trichocarpa
  Intron number 1 from transcript POPTR_0004s04560.1 (locus POPTR_0004s04560) derived from phytozome v7.0 (chr-ID scaf fold_4; pos 3299451 to 3300055 reverse strand)
aagatctttacgagttcttaacacctgataacaaggtaggttcttgtcaaatcatgaattttggtcactcatgttttttgttttatctgttatcttttgaagtttggatctttttctatgtcgtttaagaatttttcttgtttgagtgcagagactcagagcggtgcttaggaaggacttgaagaatagtgatgttgggtctcttggcagaattgttcttccaaaggtatgatttccttgatgaatgaggctatttttactttttagtgtcctgtgatcgtatgcagattttttgcttgtttcaggttctgttcctttctttcatcatatcctttcttctaaaaagacagaaaacgaggcaaaatagccgaccaatacccatgtttgacttgctcttattgaacactgcaacatgaatgtgatttagactgcccaataactaatctcttcctgactcctcggtttgtgcacaaaacgaaaaatgctaaagattcttttccttttccattttcccgtgtttcttacagagatggtaacctctaatattcaagttttttcttgcatgtcaatccagagagaagtagaggaaaatcttcctgtcctaa

SEQ ID NO: 56068 - DNA, 405 bp, Populus trichocarpa
  Intron number 1 from transcript POPTR_0004s08980.1 (locus POPTR_0004s08980) derived from phytozome v7.0 (chr-ID scaf fold_4; pos 7546424 to 7546828)
ctggtattgcaactcaggtttgtttatggactgtctgtttatactgatattagtgtattgactgattctccttttgggttgtttttaacagaaaaaaagtccatttttcacttaagccttccataaaactattatcaatattggagatttcctttaactttgtttccctaactctttagttgcatttcttggagaaatgaagatcccctcttaaactgtttatatagggatcgtattatattagatttgacttttagggtattgattttcagtctttccactacttttcttgttgcttatgtttttggcaataagtttctgatgaagtattgcttgaattgcttgtgtgttttgaattctctttttgaataaatgtgcttcttttctcagttggttgtagaaaaa

SEQ ID NO: 56069 - DNA, 719 bp, Populus trichocarpa
  Intron number 1 from transcript POPTR_0009s05730.1 (locus POPTR_0009s05730) derived from phytozome v7.0 (chr-ID scaf fold_9; pos 5750569 to 5751287 reverse strand)
ctagacctaatccgcttatcagagctgtctccacggttagattacgtcaatcaatcaatctcccctcctctctccctgctttgagtttccgaagttgttttcttttgtgtttggatttgttctctgttttggaaggctaaagagggaaatgcgaggaaagaaagcttattaaattattagcacaggcatatcagttttgatttgtttttggattgattttttttttaattttttatcaaaagctgcgtttttgaatctcgtgctctgtttcaatgcaggggaaagaaataacgtcaaaagtaaagggtgatattatttcttttatttcaatctggtgtctgttctatatgactttttttaaaaaataaaaataaaagtgtactcagaattgtttcatgattgttgaatttcttattaaatgtgctgtgctgtgctgagtagatttgggagaataagaaaggtgtctagaacctaggaaattgaaatgcttctgatttaacttaattagattgagttcgttaatgaatgttaacattttatatttattttggaacaacaaagaattgtaaggctagcctgcaaaggcaatttcttgataagaataacctcgatgttgattattagtgatagagtttgtctagtttagttttcatgttttataacttgcacaatttttgtgggcagccagtaaagccggagactgaaactaagcgtagcaa

SEQ ID NO: 56070 - DNA, 846 bp, Populus trichocarpa
  Intron number 1 from transcript POPTR_0004s11780.1 (locus POPTR_0004s11780) derived from phytozome v7.0 (chr-ID scaf fold_4; pos 10651460 to 10652305)
aggcatactctgctcaccttaaacgatctggcaaggtaattattttcttttacacacacaaatctataagcatagttttcggattcttgcatcctggatctgttgttttagtgagtgatgatttgggtttatgttaaaataccttttggtttccaaagtttcttttctttggttttcatttcgttttgtttttattgtgatatatgcataatcataagctttgtgttaaatttatggcgcttaggaatttatggtttgtttcctgtggaagttttgactgccggtgtctgctaggtttttgctaaggagtaagaactggcccgtgtttagattgaaagtatggactttggaaaatatgcactactggatttgttgaggttaataggattgtggaatttggttttttaatttggcacttgtgaggaggagaggaggaagttacataatagggaaaactagagaagttacctgtactgttgtacctgtttcttggatggtttttttctctgtgctgtttgttagagttatttcataatgtataattaggtttaatgatcatggtttgttgtacagttttcagtgtcttatatttggtttagtacttttaatatttggagatgggtatgttggagatgcctgtttcaacagatttattttttctccttatctgtggtcctttctgcactaaaaaatgaaagctttatttgattttgactgtgatactatcttgctttactggattggtgaacctggtaatggtattgttataagtaaccatcattttgatgttgggtcagaagttctaaaccttttcttttatgtccacaaacaggtagagttgcctcc

SEQ ID NO: 56071 - DNA, 706 bp, Populus trichocarpa
  Intron number 1 from transcript POPTR_0012s05730.4 (locus POPTR_0012s05730) derived from phytozome v7.0 (chr-ID scaf fold_12; pos 5525887 to 5526592 reverse strand)
ttcccaaagcaaaaacaacagcactagtaaggtaatagtgaaagtcaaaatcgatttcgctttcttcattttgttgtttttgcagtttcaggtaaatcgactaattaaatcaataccttcttcttcttcttcttcttcttcttctactacttctactttaaattgttagccctaaagaagtattgcattcttttagggttttctttcccctccattattgatttaactctctctctctcgattttcgcattcttaaccggtgagaatctgacaagctgccattgtgagattctagggttcgaagtttagatttgtatttttcgtgattttagagcttgtacacccagtaataaataaaagtttagtttttgaattttctttttccattcctctgtaaccatatcatattatagttggaacggtggccttttatagcttgaagatgatgatgatggtgattttttttgtgtgtgtggttatcttactctttaattttagaattatttggaaagaaataagaccagttattgttattttatttcgtaatgttgctgaaatatttatataaattaatccttgttgccttttcatgttgcagtttatcactttacattttgatgcttagtcgtcgtgtttttgctattagctttgtgaatttgattttgatgaaaatgcagaaaatatttattcgaatcttggaggcaat

SEQ ID NO: 56072 - DNA, 902 bp, Populus trichocarpa
  Intron number 2 from transcript POPTR_0425s00200.1 (locus POPTR_0425s00200) derived from phytozome v7.0 (chr-ID scaf fold_425; pos 13148 to 14049)
cacaggcccagttcctcctctggaaacgccaaaaggtattttcttcttcgccctttacttttctagggtttctttctatatcaaaccaattgtcctggaatcataactgataattgagctatattgaaaattttaaatatgttaatatataccaaaattctcatcttgaatcgttgattttggtgtgtgtatcatgtcaaagcagtgcaacactagaaatattgaacagtttggtctttgtcttaggaattagaatagggaatctctgttagctttttgtgtatgaattcactttaaaggctatttgcgaaataaatacagtgttactgagtggtaatgcacttctttatttggttcccaatttcatttatcatccaggtatctgtaatttgttgagggtttaatataattggccatacatggtagttcctgatcctttctatcctatcggccatatattgatttggtgggtcaaagtcatcatcaagaaggaataaagaactgggaaagggattttgtggtaatgcatttaactgttagcagcaagagttggtacccatgttgtgtgttttctttttgatagtagttgccgcaatgaatctgttacaaatcagacaccatcgcgaaactaaaaaattttgtctgcaggttgttactagtgaaggtaactgagagccttctcaaggcattataataacttgctgttaagtagagggtatttgcataatcccatctccttgaactgttaccaagttgataacaagttcatagacatgatgagggctctactaatattagactactttatttacttttttcttttataattatgacaataaatatcagttttttttttttttttatcaggaagcagattcctcagctagaaaagctgaagctgc

SEQ ID NO: 56073 - DNA, 779 bp, Populus trichocarpa
  Intron number 1 from transcript POPTR_0001s30470.1 (locus POPTR_0001s30470) derived from phytozome v7.0 (chr-ID scaf fold_1; pos 28931140 to 28931918 reverse strand)
ctttgcctcaccttagcattaaagacactcccattgtaaactccctctctgtctctttttctttagcaatgcacaaacggtttttgattttttttttttcgcaaggtttaagaaaaaactgcatttttttaagtaattagttttgaggactgtttgttttgtggagaaggttaagtggaaacaactaagcagagttgggattggacattggcttactgagagtagtagttttgtgggtttccttttcttttcattcgttttaagtgaattgagaattattgtatcagtgaattgctagatccatggaatatttttttttctaggttaacttttttaaattgctttttatttttatttttttggggggcgccaatattttctttggctggtgagaaacagaggaaaggcaaagaaataaaagttcatgatgttacatctggtgttgctctacaaaatttctggttgaatctccaaaggtgctcataagagtacaatctgttcttcttctgctgaaattattgaaaaaaatatgatattgtaaggacttgtttgtttgttttaatcttttttcatgaaagttgaaactgatatttgcaccatagtgtgtaatgggttgctgctaactgtggacgctcgactccatttgtcttcactgttacttggtgtgaattgttttaatttctttgaaaaacaaaaaagagttgttgctcatattttgtcttttatgggattgtattactgcaggaaacttcctctgcccagtacatattgcagcagta

SEQ ID NO: 56074 - DNA, 774 bp, Populus trichocarpa
  Intron number 3 from transcript POPTR_0015s09090.1 (locus POPTR_0015s09090) derived from phytozome v7.0 (chr-ID scaf fold_15; pos 10408068 to 10408841)
tagagtgggcaaatcttgtacttggttttgagcaggtgatttttctctacattagcttctttccaccttcttgctttaatctcatacgattctgtggttcaagcttttaaaatgccaaggtattgtcttgtgtattttatattatttaacttcacaatgctgatcttttctacttttatgtatgggataatttgctgtttttttttaaattcaaatatcagacaaccgtaatttgattggttgcatgcaaatttctgactttttcccgatggtcggtgatttcttatgttgcatatagagctttgatgctgcctttataatatcatcatgtcctaatggtaatgttgctgtttcaaatgtcattgaagctatgcatattgttattaaaaaaataaggcatggtttttattaccatcatatttggagtatttggctttgtagatgctgactgtaattttatgagttaaatggctggtactttgctattgatttactcagaatctatatttatgtattggttcttatcttaatgtttctcaagactattgttggtaacctgcttgtttttctgtccacttgttgcgttgtggttaattttatgaggtctttaccataatgattgatgagttatgtttgcatgcttgtattttggaactgactatgaggtttgtttattgccataactgactatgaggtttgtttttgatatagtttgttttggcttttaattgtcaatattgctaattgtattattatgagtgcaggagaaccgtt

SEQ ID NO: 56075 - DNA, 829 bp, Populus trichocarpa
  Intron number 1 from transcript POPTR_0014s08890.1 (locus POPTR_0014s08890) derived from phytozome v7.0 (chr-ID scaf fold_14; pos 6566343 to 6567171)
aagaccgagttgagagtgttggtggccttaaagaggtaagggacttcattgctttctggtctcttgagatttttaaatgggtttatactttatagtgatctgtttgcgtgtcttaatttttgcttggaagtggggttttgatattttaattgatagataagcacggcttgatcttacctaaaattattcttatttttattggctctctaaagcagttttgcgacggtttgataaccataaaaggctgttctttagtgtggaaggaaacacaagttggtgatcaacagattcattcctggaagatttcctgttttcaaaatttttccttttacatgttctctttaagcgccgttgtctttccgaagcaacaatctagcgattaatgcgggatacatccatccatacttcacagatatcgttttaaatccagaggcttaaaatcttgctctgcatttgattcggtaacctgtccgtcagcccctttaatttcattgtttttttataattagtaaaataatatatacgtggttgcttggttgcctgcaagctgagtaccatactgatcatgttaaaaactctttcttccatgttcacgtgtttcttgtttaacaacgttttagttttttaatcatgtttgatgtgtaggttatgctgggagtcttgcatttttaaagtgatttttttacttttactacgagtcggacattttaaagacgaatttatatataatccgaaatatgtggaaggatgacagattatgatcctggtcctataaaatagttcttgctttgcaggtgcccttgagaccatcactatagggtcgtggctt

SEQ ID NO: 56076 - DNA, 209 bp, Populus trichocarpa
  Intron number 2 from transcript POPTR_0011s12810.2 (locus POPTR_0011s12810) derived from phytozome v7.0 (chr-ID scaf fold_11; pos 15500470 to 15500678 reverse strand)
ttgatcttgattctgatgttagtctctttcttctttcttctttgatctgtttcttgttttcagctttggtattaaattttataggcacattatttaaagaattggtgcatcttaggaaatattgagttttttttcttccttttctttttttacccttttaggttacaaagtttggtttgtttaataaatttaatatcgatgaatgcagg

SEQ ID NO: 56077 - DNA, 872 bp, Populus trichocarpa
  Intron number 3 from transcript POPTR_0015s11680.1 (locus POPTR_0015s11680) derived from phytozome v7.0 (chr-ID scaf fold_15; pos 12250753 to 12251624 reverse strand)
atcctatttgtgttgcttttggaggtaatatccacgttttctgtttttgcttatctagtgaatttgttgttgctttttatgttgctggataagagcaatgctctgcctgtaactctgctcgtgtcgctatgtagagagttagctattgccccagttgagtgaactgctttgtcttgtaactttgacggatagaaagcatacatggttacttgctgtgaagtatttggactgacttgcatttgaaattcaacatctctctccaactgaaatcgtcccttatttttatcctgatatgatgtgaagataatcactggtgtaactagctgacttgctccatagtatggtccaaatgttcgtgcggcatgtcaaaattttctgttcatctgttgcatgcatgcatttttaactggtatggataattttattattagtttagagcataattaagtgatacttagccaaggtaagctgtaattgggcgtagcttaatattgaatcactttcatgacaggatcaatgttaataaaatcacattagcttttgaaaaaccagtcttgagtttagatttggggttttttcctcagagtgtgaaatatactcaaatcacattagctcttggccagtcaagatgaagcaacatgtattgttgcgcagcctgttacatgtatcttattcatgcttttatctttatcacttttttctttctttccaaatgctgttatatttaccataatttctggtatatgtaaaattcaagggacctattctatcaaaaaagcaaaaaaaaaatctaagggacctaataaacaactcgatgcattagctgttcataacctagtactgcatttttttggtcgtccttaggtcctgtt

SEQ ID NO: 56078 - DNA, 889 bp, Populus trichocarpa
  Intron number 1 from transcript POPTR_0004s05800.1 (locus POPTR_0004s05800) derived from phytozome v7.0 (chr-ID scaf fold_4; pos 4548634 to 4549522 reverse strand)
gctcaagttggggtatcctatttactctctcaaaggtattatctcctgagcaccaatttttttggaagtttgactctttatttttaatggcacattatttaagttttggtgtgacaaagtagttgattttataaatagattagatctgctgcatgctaaattgctttctaaatttctgtcttttgttttttttttcttcgtcttttgttattgatgtgtgttcatcatgtcatgaattgaaaatgtttagattcactcaccatgagccaatatgtgattgagtcgttgagatttatgttaataggtgcaaaatgtgtcgctggtttccatctctaatgtccgggagaataaatcattttgtgttggttagcttggattgtgtttaagcatttgagtttccctcgtgaatttgatggcccatcaaactattcatggaatttgaatgaaggtgtccggcattagactaggtagagtgaaaaactttagcttaatatttaattaatacacctgctatggtaataacagtagtcatcactagatgccatcaagtcaaggattttgcatcttccaaccctttacaatttggtactcgtatgctgctttcagtggttcttatttttgtttggttggtagtccacaagtcccctccgtgttgagactgtcaacagcacaaaccgcatcatctttgatattcattgcaacccagaaacatttcattgtcagacaatgcttaacttctttgcttgactttattcccttgtcatttcattgacttgtcaagaacttaggctttcgatgcatgtgttggttctgggccaaatcattttgtgagcttcaaactaagagcccattttttgatgcagcttgttaaatttggctgagattgcag

SEQ ID NO: 56079 - DNA, 902 bp, Populus trichocarpa
  Intron number 1 from transcript POPTR_0012s05090.1 (locus POPTR_0012s05090) derived from phytozome v7.0 (chr-ID scaf fold_12; pos 4585963 to 4586864 reverse strand)
aattatagtgaggttttgaagaggagtctcctcatgtgttggacttaattttgaaatttttattcaaaaggtttttttaatttttctaggtgtctcctagatatattatctaggcatttaattattaaaagtgtatttattttttaagtctgcttcaaatatttctaacaaattggactgcaaaatatagtgaggttttgaagattttttgggctgagtagccatttctgatttggtttagcttgaagattagagaatttggattggtttcttgattagaccatgattttacaaagacaatcagccactaaaaatgatgtcaatatctcacatttagtgacatgaaggcagttctactctttgaaaatctcaatgcttgaatagagttgtgcttgcatcagagtatttgtcagtctagaaccatatttctttcaatatatttttcttatacattttgttggcttgtttatatggaatgctagatgcttctatttatttgattgatctttttcatgaatacaagtacatgcaaacaaagcatttgctgtggaaattttgcagtttaatttagaaaagttcagttttttgtatataaagctgttcttatcttgcagaagtctaaaatttcagtttttagtttgaactttttcattagaaatctaactcctcactgctttctactattttatccaggaaataaagatgtcatgaatgtgggtcggaaggttcgtatgggtaagatgttgtcatgatctctttttaccatttacatatgtttctcttcattgttaatcactgcaattacgtatctaaatgctgtgaaagttttcgcacctaactgttactgaaaaggctaaccaatcccagcattctcctttcagctcttggggcatctcttggta

SEQ ID NO: 56080 - DNA, 785 bp, Populus trichocarpa
  Intron number 2 from transcript POPTR_0009s07960.2 (locus POPTR_0009s07960) derived from phytozome v7.0 (chr-ID scaf fold_9; pos 7367826 to 7368610 reverse strand)
cagggtcttggtgctgagattggtacaaatgatgagatttttaaatcatttttttttaattgatactgcttgggtttcctgttgtgaatttttggattttaccgtgaatatattgcaaaatccgtctcctgtaaacaaaattggattctgcctaatctaaccacaggcctaaaaggtagcaaaacatggtgcagcaaatgaaatagagatggtcaatatagattcctatggatatgtgtagtggctatagctgtatttcatgtccccctaggatatagatagagactttgctctccaacttagtttgggttcttcacaagttccaacataagaaatatagggtgctttaaagcattcgagactactaggattaacaagatttgatttgtatatatcatgtgttgagtaacaaaggaaacataatgtgaaaatcgtgatcaggaaagggagcttcctctggctatttctcttcataactttccattttagtcctgtttggtgttttatctcaattttacatagaatcaattggagtcatatcagatggatagtcaatttttattaaccttgctttgggcagtttgtatggtattattttcactgtgggaggggtaattatctaaacctatggaagccattacttgagttgacatagagctatttaaggaatgctgtggtctttaatatggattgttcttgttggagtcaagccttttgacccttctttaatgtgtggttctcttactacagcaaagaacctcattctcgctggtgtcaagtctgtg

SEQ ID NO: 56081 - DNA, 857 bp, Populus trichocarpa
  Intron number 1 from transcript POPTR_0011s01280.1 (locus POPTR_0011s01280) derived from phytozome v7.0 (chr-ID scaf fold_11; pos 802278 to 803134)
tgaaggcgtcgtcactttgtcccaggaagacggtttgtcactcttctctctctttaaggttttgttgtgaatgtctttgttggttgaggttggccttttcattctttgttggatgatgaagaattagagaaaagagtattgttgttttttttgggagatgggttttcttttttgaccgagaaagaatcttttttggatcaattgaatttgtttcttgatgggtgtgctaaccgcatggtgattttatccttgttgagtttatatttattttgcctgtcttttggaaaattcagattgtaactgaagttgttgactttgaaattagttagcaagtagagaaaatgaggttggaactagataatcagtgttcttgtacttgtttcagactggttgatatttgatttctcatgtttaaaatataaaatttgaaaaaaaaaatttcaggatatttgtatgggaatgatttcaagtacttttctttttgtttttcacaaactttctgattgatggtttgattttgattacctgtcttgaggtttagtttttgattctttggttttttcgaaaggtagtttccaaaaggaatactgtcttgtggaaatttttgaatttcaaatctagaattaggagatggaagcattcctgagacttgaattagctgatatggtttttgttctttccatcactgagaagcttgaatagtcaaccatcccaagtcatatgaccataatggtttcagttcagtggaggttaatgtcaagagtcttaaacattggagttgtgatggtcatatacatattatttgcattttgctttcgataggtcctacaacagtgagtgttcgtattactgggctt

SEQ ID NO: 56082 - DNA, 387 bp, Populus trichocarpa
  Intron number 1 from transcript POPTR_0012s13145.1 (locus POPTR_0012s13145) derived from phytozome v7.0 (chr-ID scaf fold_12; pos 13428460 to 13428846)
tttgccctcaaaaatctgagtgggaaaggaataaggtttgttctttttattgctcttggtttatagttctctgaaattttttttactgggtttgattgataattcttataaagttttgagtctttgttacctgttaggtattggattgggtagagaaaagcgcttttttattgagtttgatatgaattcttgctcttaatagtgttataggtgtgggttttaaagaaaagtaggtttggaattggatattgggtgtggaatatgtttataattgaagattttttgctcattgaaattttgattttgtggttgaatgtgaggtgttgtttatttaaatgaagaaaatgatggtggtgtttttgtgtgttaatgatgattgctgcagat

SEQ ID NO: 56083 - DNA, 1008 bp, Populus trichocarpa
  Intron number 1 from transcript POPTR_0011s11910.1 (locus POPTR_0011s11910) derived from phytozome v7.0 (chr-ID scaf fold_11; pos 14686394 to 14687401 reverse strand)
gttttgagggagaggtagaaatctttgtgttcaattatacaatttgatctctcttttcatcatatatcggtaaagcctttaattaatttgtttaaccattttctttccctttccctttccctttccctttcctttcctttcctttttcaggtaaattttctaataactggggactatatcattatataaaattatttaggtgaatctcctttcttccctttttgtttcttaggactatcaacatgggtaaatgaatttgactgtggatgtatttgtgcgtacattactgattttcaagaatttttataggaactatagtgttctttcttctcttttacatgtatatatgagctcgcttttcctctctcttattgacccatgaatagtagatataaaattaaactttaatcaccaaaaatagggtaaacatttacaagctgcactgaaatatttaagagagttgaaaaagaaaaaagtatgtggtgtgctcaatcattgttgaagcagactgcttaacaatgttagtggcaaactaatcaacttgcgtggagatagagtataaagatgttctgcaattttttatatgtaatgcttgatttggtcctgtcaagttagttaatcaggtcgatttccactttgggatgctgatcaagctctcttagattaaggtatttttgtcctaaaatggcccacaaactagatgttcaacaattaagttcacccacagttttttgaacatttatattattgacagaacaaaaaacaaatagtacaagggagagattacacagtggaaaaggaacttatacaaagagaaggtgtggtatcagaattgagatcagaacagctgaatagctcaaattatttaccattaatgtcataaatacagcagcatgctatttttttactggtctcctgttcttttccttctctagtttctttttctttggtctaatgcatgctctcattataggacacagtgatttctgccctggatcctttggccaa

SEQ ID NO: 56084 - DNA, 1001 bp, Populus trichocarpa
  Intron number 1 from transcript POPTR_0012s00350.1 (locus POPTR_0012s00350) derived from phytozome v7.0 (chr-ID scaf fold_12; pos 104030 to 105030 reverse strand)
tcacctaaacagcgtttactttgaccaacaccgtatgctactcctcaatcttatcaacatttctcttctcttctcttcttctctgtccattccaccaccttccacttaattttacttaagatattattgctcaaactctcttcttctcctcttcatcttcgaaagtagattattcttttgatttcaattgttggattaattgcaatcttcaaaatctcccttccttttttttttcttttcttttctttgtggagttttattttggtgcctggtgtatgtgtcattacatttccttttgtttcgctgaaggaatatggaaatgtcaccactgcaattggacctactgcgttggaactccctgttttgatcataaagagtgctcgcacacgcacacgcacactcacacgcacagcctcataaatctcaaaaattttaatcaacagcaaccatgtttggtttttggaactaaaggttagtagaagccaaacatttctcagcagtggagtgctactttcacttacttttagtgaaactgcaaatatttacagtgcccttcactcctatgatttattccagcatgctgccttttctattccatgccaagaaaatgtagaataggatttagtcaatcagcatcctatttgcaccctggtcccaattcagtaatgttctcgcaggatgcctacttttgtgagatattgaatggttgattcggaatgaatggagcgactactcgagcttcgtgttaccaaaatctgcctatctgtggatatcaaattcaagattattgcaagcagtcataagaaattcaattatgaactgataactgatatttccacttggcactcattatcgtgaatttgctacttttgcatgatcctacactattcttcagatatcttcttgtgtatcgaaattgtaattgtgcatatattttattgattcatgttctgctaatgaaatgctcgccttctgcatgaatgcaggtgctgattccatta

SEQ ID NO: 56085 - DNA, 845 bp, Populus trichocarpa
  Intron number 1 from transcript POPTR_0011s05470.1 (locus POPTR_0011s05470) derived from phytozome v7.0 (chr-ID scaf fold_11; pos 5422101 to 5422945)
aaaaaggttagttctctattctgtgtttatcctggctaatgacagaaagacagtattgtcacatgacttcttaactgtttcattgtctgaaatttctgttaagatttattcctttcagctctcttagagattctgctttatgtttggtgataatttttgcatcaaatcacttcaaaataactttccaaggtatgctaggtcgatgtatgtctcacatagacagaaaattatgcagatcagatcattatatgctggaaaattacaaaatgatttttgtgatcgcaaccacatatcaaactgctatatattactataatatagatcatcatgatttaaagattttgttcataaatcattaataggatatttaagtgccggagctggaggggccaaagtgtacaagtactgtgtttgataggcatcaggatgttatgcaattctttcctggctatacaaactaggttgtcatatttatatcgaattataatatcttgaactgttgtatagaatacatattaatgaataaaatgcgtgtagattgcctggttgtttttgtgcaaccaacattatgtgtgcatgatttttagtacttcgtctatcaaatctgacagtattttcttctcttgtgatcacagaattcaggcattcaaaactttcagaggcctgatattttaatatactcggacatgaattttcccttgaaaggtttctgctcttattgctcttactacaaaatgtctaacaggaaataaagatccaacactaattaagcagtaactgatttttttcactctctgttatatcttgtagtttgagcaaatctctccgaaagagaaaccaaagga

SEQ ID NO: 56086 - DNA, 747 bp, Populus trichocarpa
  Intron number 1 from transcript POPTR_0015s15760.1 (locus POPTR_0015s15760) derived from phytozome v7.0 (chr-ID scaf fold_15; pos 14966314 to 14967060)
atcaggtgagtctttcattagacatgatttttgcatcctatttctacaatgtagacaaaacttactatgattgtgtaaaacctgaataaacatctctgtgatagaagtgttgccaaagtgtttttttttttttgtgaaattacagtgtggttttgatagtgtattgctgcatcaaaagaaagaaaacaatctttgtagaaataatttatggcctcgccatcattattattgtatcttctcaaatccattttgaagaattcacaatgcaagaccaagacatgttttaattttccttttatgaatctggagcttcaaagaatttctactttcagtattctgaacagtggaaagaatttattattttggaatctctatcatagatttagttctggaccagctatattaattattctatgatgttctttggctactgcagccactcaagttcagtgaaataaatactggcggtgattctgaatgctatctgttgtgctaattgtcttcagtcattttgatttttgcatcactgatttatttctcaaacaataagtgcttcccaattatagtagtcgtctctcttagctttaatctatgtaataaagatttcactgccaattcaccttgtttacaccatctattgcaaccttgataccaaatattttgtcctgtgcatgcttcccatgtggctttagtttatgttaacttttgacagataacaaacgaggagaaacttgaggttccacttct

SEQ ID NO: 56087 - DNA, 686 bp, Populus trichocarpa
  Intron number 3 from transcript POPTR_0001s11910.1 (locus POPTR_0001s11910) derived from phytozome v7.0 (chr-ID scaf fold_1; pos 9248813 to 9249498 reverse strand)
gaactgttgccactaggtgtctttctttctcccttttggtattaacgttgttctgacttttgtttttattgtggtgattttgttacattttttgtttcttgtcattgttttattgaattcttatgcttcgagagtaatattgaataatggtgaaagacaagtttaaagataaacagaaatgatccttttggaattgaaatatcatgctgtagtacctggtctgttttacttcttatctgtttggtaatgtcgtgcagtttgtttttcaaaagtgttttttaattaaaaatgtatcaaaataatgttttttcacattttatttatttatttattacatcagcgcattcaaaccatcgaaaagcacctcaaaaagtatcaatttgatgtttttcaggtgaaaagcaatttgaaaattacattaaaaaacagatgccgcattgcgaaacgggcatatcaccacacacagtacccttttttcataaagcaaatttgatggacctgaatcttggataactatccttcagacgtcttagattgcttatttgggcttgatactctaggaaatctctaggatactgaacttgaatttgattaagcagtaaatctctaattgtttcagctttgtggtgccttttcctgatggccggctctttcttgtttgtatagggagatagcagtgcagttta

SEQ ID NO: 56088 - DNA, 856 bp, Populus trichocarpa
  Intron number 1 from transcript POPTR_0009s13750.3 (locus POPTR_0009s13750) derived from phytozome v7.0 (chr-ID scaf fold_9; pos 10902899 to 10903754 reverse strand)
aagtgtcccaattcgcacgtgcgagctccttcgaggttcgatacactactgctttcagtgatgagaaccctacagcttgtgctgttatgtgatgatcgtgattgtagttagtttatttttgtgctttgatttcaaggcatttaattatgtttttaattttcctttcttgtacgctgtagtctttattattctctatctgtatttttgttttactggtatttctaagaaatgaaatatttgtttgctctaatacattacaccatgatgcacgtgcatttgaaagcctaaaaagcttgtaattgattattttcgtttttttttatttagaaattatataagtttattatagaattataattatctctgaaataaatttatttgtacctcacaatttcgacaaatttatattatttaggagtttgttttgagataataattaaatgaaaatgaaaatcttcattttaaataaatcttcattttcataaagctgaagaggatcaaaatcagagtcctaaattttgcaataccatcactgttattttgcaattaaaattagaatactgttctcaatctttcctcttggaagtgacagaagcgattatcgtgcggttgtaattcagtacacacgcacacacatatatatcttaaataaataaataaatatatatatatatatatcttaaataaatgcttgctttcttaaatccaaccaaccaaggagtcacgactcatataatttagtgagtcgaatctttaatgaaaacgagtttaagctcgtataattggggcttcaatcaagtcttggactccatgtttttcaggtcaatatactaggccgggactaaatcaacttggg

SEQ ID NO: 56089 - DNA, 895 bp, Populus trichocarpa
  Intron number 2 from transcript POPTR_0012s02330.1 (locus POPTR_0012s02330) derived from phytozome v7.0 (chr-ID scaf fold_12; pos 1947882 to 1948776)
catcatctcctaaggaattaccagtagggaaaaaggtataatttacatcatatttagatcctttttttgataaatcatgggatgcttttgtgtatgcttaagtaataagcaaagttaatctttacaaaaacttgttttacacgatcatttggtacacctaaactgtaagacttctgttctaatctgatagcttccccttaagattttcatgttgtgttttcctattttacgttacttcaattcattatcacactattgctaatgattgtttaatcatcatcatcattattaatacagttgtgcaatctttctcagctcagttgtcaaaaggaaatgatacgatcatttattaaaaattatttttttaatttttatttagaaatgcattaaaataatattattttatttttaaaaatttatttttaatatcaacaatcaaaataatctaaaaaaataaaaaaattaattttttaaaaaacacggtcatgccgtgttcccaaacaatctcgacggacctattaaacaaagacctaccctttatctgtagctaggtccataaacttaaaggaggaacacatggtccccttgtcaaaatgttgcaatccttcatgacttattattgtcatgccaccaatgatttcctttcatcaatctccatccacatgtgcattgccttgctagatcccaatcatgccaaagagaagcttgttgtattacattattaatttctttgctgtaaatagttgaaaaagaaattcttcttgttcctgaaattgattgatcttaattgattgcattaaaccagctaatgattttatgataattgatcactaatttgacatcattgcaaatgatggcatgatatgtgtgtatttcagaaagacaacgcagagaa

SEQ ID NO: 56090 - DNA, 805 bp, Populus trichocarpa
  Intron number 1 from transcript POPTR_0015s13320.1 (locus POPTR_0015s13320) derived from phytozome v7.0 (chr-ID scaf fold_15; pos 13323145 to 13323949 reverse strand)
aaagataatcctctctttggtccctcttctgccacgtacgtaattcactttctttgattcactttttgatccttgtataatttcttcttgtttttgcttttgccttttctgtttctttctgtttcatgtcattttactttgataaatactaaatgctggtggtggttaaatttctttatgagtgagctttttcgattcttggggtgttgttgttcaatgttttttgatggatcaactgaatttggggaggaattttgattccttttttatttgtgtagatatgaatttggaaatttggcattgctttgatatgaaatgccttgtgtgtggtttccattgggggattttgattgattagatacttgaagagagaatttagtggatctgctttagatgctgatgtccaaatctcaattactgcatttcatggcagtgttccctggctggtctctgtggaggaaatggcatgaatttagtgattattggtctcagatattatatatttatatggtggattcaaggcttcattggtgaaaatttcatggatctgatgaaataggtttttctccaacatttctaacactgaaaatattctttttgtgtgtgattattaaggggtatttgatgtttgtgtcagaaaaattatcttgttgaaagctgttgtttcttggttcatcattgtcacttgcattaagaaatgccaaggaaggtagaagaaatataatgtagttaattgaagcttgttccttttgttttttgaacttgcaaagactggagaggttgggagctcttgagtggaccaagg

SEQ ID NO: 56091 - DNA, 937 bp, Populus trichocarpa
  Intron number 3 from transcript POPTR_0004s08120.1 (locus POPTR_0004s08120) derived from phytozome v7.0 (chr-ID scaf fold_4; pos 6652310 to 6653246 reverse strand)
agtttcttgaacttattggcaggtatgtatctgtgtatctgttgatgtatctgtttccattctataacaagaattttacatgggttttacttaatgtttttgggttgcaaggaggctaagaatgaattatgtgatcgttttatttttagttttatttagtaaagatggcaaatttatgtttaagtatgctgttcttaatgaattttcagattaggtaaatctgaaatactttttgaggttttgaggggtgtggagtaagcttgcttagctttggaatttgttaatacttattaaagcagtcttaattgaagggtttttcccccgctcttgatatgtaaaaactgtgacaataagtggatagatcttatgctgtttgttctgaaaaaaaaaaagcaatgtagaaaggagcacaatggttattttgatgcttacagaatggttggtggcattccaactactaaagtttctccaggtttagaggttggtctgggaaaaggttggcttgttgtatcaattaatgctggtgttgaaatatgctgtcatttaactagagacctaggaaagcagagaatctttgttgtttctaggcaaagcaagggcagcgatgtggaaatatgtatttgaagcaataaaatttgctcatttactagagtttcttcaaattgggtctagcccttcatttgaagtgtaaaaccagcattttgaaattttacacttttgtttttggaggggatggggaggcgggaggatggttttagttatacagcatgttagtgttgtttatgaaattaagtcaagttgtaaatttcttcaaacaatattttgctggaatattattttattcatgttgctttggaatctgggtttattattcagtgaaggcataatatctttgataatataatgtcagatatctgtttctgcttcagaatatcaa

SEQ ID NO: 56092 - DNA, 1056 bp, Populus trichocarpa
  Intron number 3 from transcript POPTR_0012s00590.1 (locus POPTR_0012s00590) derived from phytozome v7.0 (chr-ID scaf fold_12; pos 289369 to 290424 reverse strand)
tttcacagcaagaagttgaggactccatcgaagaggtttgtctctcttaaattactgtttaatcaaaataatctcgttgtttatgttgtcattattgtttttgcttctatttggttgctatgcattgttttgcatcaccaaatttaggtctcatctgttcatgagttcattcaatatggtcatagaataatctatacaccataaagagcttttcctattccaccatctagtgaccagtgtggcatgtctaatttgcagaaatttaggatcataccttgtgccatggctaatgccatgttgattctcttagctaatcatttatagactctgtgaaaggaaattgtttcacacaaattttgtgctcataaaggatttgagtctcaatcttttcaaattatggcttggcactgaaaatccttccttgcagcttggtgccattgtgtaacaagcctagctgctggaaaattgaacaactcactgctggaacttatacaatgaaataaaataacaaagccaagccttgttcctagttctgaattattcaaggtagccaacctcctaaatttctaaacaaaagacataacagaattcactctcagatgcccctactgcagccaacagtggctgttatttatattaagaaactggaacagaacaagctaaagaaatgggaaaagaaattcaaatttccttcccccctgccgccaaggaaattgaacttcaagttctttatctccttatctagagatctttttgagtggagttgtcccttatatgttctgctcttagagttagtcttccaaccaggataagactcttccttaaactttgaagtttcacagttatcttccctcaattgttttcgatattgttggtaacagactgttacacaatgcactgataccaacagttgaaactatataaataacattccttcaatttgtaactttgttagttcatttcactgcgaacctgcatatatcattcttgtctgccatagattctctctctaaattctaaaccgattgccaggttgttcgcacaaagttttttgac

SEQ ID NO: 56093 - DNA, 508 bp, Populus trichocarpa
  Intron number 1 from transcript POPTR_0004s04130.1 (locus POPTR_0004s04130) derived from phytozome v7.0 (chr-ID scaf fold_4; pos 2966325 to 2966832 reverse strand)
ttgatccgagtgtgctcgaatcgagttttttcaaccttttttttaattatgttattttttaatttttgtccttcaacattttatttgctagaaattgagcttcaacttttttttcttttcagttttttttatctatgaagttatcacgtttttatttgatttattaaaaattacacttcaaaatttttctcatgcttttttttacgagattatctcaatcttatatccatgatcgcggcgtttgcgagttaaccttgttatctgggtctgctttttttttgttgctctttttttaaataatttttttattttagttttgtccttaacattaaattgtttaaaaatctgagtgaatttaggtcagattttttttatttttttttattattaatttttttaacaatttttttatgattatttatctggggcgctatcaattgatgggaatgatgtgagagccttgtacaattgaggccttgccctctcctttcgcgcccagttgattgca

SEQ ID NO: 56094 - DNA, 795 bp, Populus trichocarpa
  Intron number 1 from transcript POPTR_0004s11610.1 (locus POPTR_0004s11610) derived from phytozome v7.0 (chr-ID scaf fold_4; pos 10397250 to 10398044)
ttttgtgctttggtgcgctagttttacttcaacaggttggcaaaatttctctctatgttttttttttctctgtctttcagaagctggactctttgagttattgatggggtgtagttctttcaattttttttttcacaaaatggaaattgttgggggtttggttcattaattagagtggtatttgggaaagtttgtttcttgaatttgatgaatgaggaaatggggtggtttcattatataaaacattgaagaatcatgttgttttggtgtattttaggtgtttttgttaatgggttttcgttaaactcctgagctttttctatgtctattcatagctttctactatgggttgtggctaacgtaaaaccatctgggattgtggtttcatcattcaagcatgattagtaactaagaaagtacaattagaaagtgaaaaattggaggcttacggaacagtttgtttttgtgtttggaactacgttgagatgcctttcaaaaatgattttggcgtgaaacaaacatcgatgtttttttgttagtattttccgatcacacactagtgctagagcgataagtgatgcatgcttatatgatctttttttttccttcctatttttggtttaaagttttttgttaaatttagtgcaattgccattttaattgttggccaatatgtttgatttttgagctcttactccttctacctataactttaaatttctaattttttaatcctactttttaggtcgttgtctttctaatgcaagttgctgtttattaatttttcagaagcct

SEQ ID NO: 56095 - DNA, 644 bp, Populus trichocarpa
  Intron number 2 from transcript POPTR_0004s11610.1 (locus POPTR_0004s11610) derived from phytozome v7.0 (chr-ID scaf fold_4; pos 10398117 to 10398760)
tcgtaagtactaatcaatgtacagtaaatttgataggaagcttacataatcaactaatgataggaagcttatattttgaacatggattacaattttgattctcccagaagaacaatgtacagtaaatttgttatttatgtttgatatgctctatgtttcgttgcttgccttagattattggcagtgttttgctttagattattagctatgtttagtcgctgaagtggtttttcttttttgtcttgttgcttggaagttacaatcaatcctccacctactctgtattcagttttcattttacttgagttcataagagttccttgagcttatcaacttttagagttgttacaagttctagtggtgcatgattgaagttttccagtccgatgtttcttcaataatttgggctacctgttcctcactggattctaaggcctttatctcattaaagaagggtgtacttgatcagcatatcataatctactgaactgtttagcagtttctcttttgcgtttttctcacattcatggtttgttagcatccattaaactcgtagtttctcttgagactcccacatctgtgatttgctaacaccttcatgcatgataggctgttgtcacgatttacaacttccagcagtatcg

SEQ ID NO: 56096 - DNA, 829 bp, Populus trichocarpa
  Intron number 1 from transcript POPTR_0004s07720.1 (locus POPTR_0004s07720) derived from phytozome v7.0 (chr-ID scaf fold_4; pos 6347720 to 6348548)
aggaatagaaaaacaatatctataagacaaaagaggtattattttgattagtttatacgatttgtttgttttcttggaattactggagatatagatttctatggtttttgtgtgtcgacgagaagagaagacgaaaagcttagatcaggaggagaagtcagatccactctctgcagagcaagatttttgaagttagggttttctttgttgcagtgagatttggaatctgcttcttttttcggtgatgggttcttctgttccagttgatttgttgtctcggatctgttatttctgaatacccatctgcttaccatctacttgtttttgagcaaatccatccatcgcaggcagtgaatatatgggttttcttctctgcttttgattgagattagaagatggcttcttctttaattggtgttctggatgatctttggaccagacacaattagtgtctctagcaactagatttgctgtcttgttttgttgttcaaacaactatttatttgcaagttggtggccttaggttttagaaacaatagtgatgaactctatctctactacgtctcatgttctgttaatgacatacaaagaagacctgcagcaaagctatatagaatctgagccgagggagtctttgcagtccttcaattatgtttaacataatctccttgaagatcttgttatcagctctgaactatatgacaatgtgctgaaatagctgttctgatgctgctctgattcgtgtagaaatccattttggttgagttgctgatgttatttcccttgttttgcaggtaggaacggcagcagcacgttagaggtttagatc

SEQ ID NO: 56097 - DNA, 656 bp, Populus trichocarpa
  Intron number 1 from transcript POPTR_0004s16130.1 (locus POPTR_0004s16130) derived from phytozome v7.0 (chr-ID scaf fold_4; pos 16570691 to 16571346 reverse strand)
aaaaggaacttctcattaagatcaagcaaacacaggtactaaattattaatttttttttatgttttttgaggttttaatttaaaagtaacgaagttggcgccatgacaattcatgtgtttgacaggtcgattttgatttagtttttaagtatttgttttctgttgaatggaaggtttgttgagaaagtgcaaatgctaatgtccctgtggaatgggaacttgaaatgttatgagaatgtatgaatatttcatggctgtaaggatttatttgagaaatcagtgttaattttaggttcttatgaagtgtcatcttcggtgacaatctaaccgagaacggtcattgttgcacgatgaagtgaaattcatgttagaatatttaataggaaaagtatgtcttcgttatttatggtatcattgttctctggtggtcaatgtagttgacgttgtaaatattgaacgagaacctgaagacgggatagaaataatgggttaacatagaagtagtgaagggttcaagatactggttaggggcttgctgtccgcttttgatttccttggaaatttccattgatagagaaaatgaaatttcgtgatgttgaatggctccttccattggtgcagaagcccgatcttgcaggattggctgaatttctcaa

SEQ ID NO: 56098 - DNA, 500 bp, Populus trichocarpa
  Intron number 1 from transcript POPTR_0011s03480.1 (locus POPTR_0011s03480) derived from phytozome v7.0 (chr-ID scaf fold_11; pos 3574495 to 3574994)
ttcttctcagttcaccttcatcaatcgcaaggtgggtttctttttttttttttttttaatctgctagtttttttttttattcaagtgaaaattgaatcttttcactgttttttgatttttcttcgatatccatgtctcaaaatcctttcttttttgttctatatttttatattcactcgatgatgatcgtttatttctttattttttaagtattaatgatcacttatggttagttagtgataactcggatcataatttgaatttactcggtagttcttggacttgttctagtcgtagattgtcaactgtaatcagttttagcacttgatttaattgtacgttaaagatctattgtaagtttattattggttcttagtgcgtatgtaagtttgtttggaggattttgtaatgggatgcttgttgatttcaatatgggattatcttgcttagactttacaagttattgatgtgtaattggattttcagcatcattgccgaag

SEQ ID NO: 56099 - DNA, 648 bp, Populus trichocarpa
  Intron number 2 from transcript POPTR_0011s03480.1 (locus POPTR_0011s03480) derived from phytozome v7.0 (chr-ID scaf fold_11; pos 3575126 to 3575773)
gacacaagaatagagctgcaaaaggtatttttttcgttttttattttgattattaatgttttttacattacatgggcgatcatttactgtttccctcgttgcctcacagcaaaattctcactgttgttctagttcattcattcattcaatatatatatgtatatatatatatatatatatatatatatatatatatatatatatgtacatgtataaagattgttggtaggctactcaagtttgtagaaatgttaattttcttctcctcattccttccttgaatctcttggaaaatctgttattttgttttgagctttttcccccttgttccttcttttccttgcctttataatctgtggaaaatctgctattttgttttgaagtttgtttctctagctcatgaaattgttggatctcagatatatgagtagtttgttggaatgcttaagaatattgtgttgtcacatgggcttttgtagtttcaatgtctgtccattctgtgcttgcaatggtgtttggacatgtagacacatgcatttacacattatctgatgttcatgaatatgtacacggtgagatataaggtatcttcatgtgaaatgatactctgtctaaacctagatatatttttttgtaggaagttcaaga

SEQ ID NO: 56100 - DNA, 798 bp, Populus trichocarpa
  Intron number 1 from transcript POPTR_0009s02680.1 (locus POPTR_0009s02680) derived from phytozome v7.0 (chr-ID scaf fold_9; pos 3442488 to 3443285 reverse strand)
cttgtcctatatttggatcgtctctctctgcacaggtgcatccatccatgcaccttctttcatttcttcgtaacatgtttattgttttactctttcgtgtttacttattcaatttttcatatccaccttcactctgctctatgttgctcgtatatcagttgttttcttccaatatctggactcagtttagtcgatttagcattagatcacttggtttgtggtatgtgggcagatggcagatggaatatggcatgcattcaaggaaataatcgggaaaagcaaaaaaaaaaaaaaagtcttaggaataacatgaaccctcaaagaattatgatgttgcctctcagggtttcatcttttgaagagttgaacctgaactagtacaactgtacatgtatatgatcatacctttctgattatttcttaattcaaattggcaagtttaatcaattttctattcctgataataaaattttcaagaaatagtggttgctttttgcttttgtagttgattgccattaggacttgactgctttcgcttttcctgttactgtttctgcagtgtactcaattctttatcatgcagtttaagattgatgatattgacctgtgaagttaacagggattaatttcttctgtcgatgtctattatggatttttaagcgatccctattcttaaaaatctttattccaaatctctattcttgttcttttttaaggtaatctcttggggttgccaagccaaatatttgtcaattaacctctataacactgctgtctttttttgtcagctttgccaat

SEQ ID NO: 56101 - DNA, 653 bp, Populus trichocarpa
  Intron number 1 from transcript POPTR_0011s11210.1 (locus POPTR_0011s11210) derived from phytozome v7.0 (chr-ID scaf fold_11; pos 13960614 to 13961266)
cgctaagctcgccgagcaagctgaacgctacgacggtcagtctctccctctagatatatttatatgtgtgtttgttctttctctctcactctagatctgtgctttctcgttatgtttttgctcattatagaactcaatcgtatgaccgatcgtagatttatggattgattaacaggtttaacttacatttcaatacttattacttttgatttaaaaaaattattgaaatatatttgtcttcttttttgggagattataagttaatcacgtttaattaaggttacggattttaattattttgattgatttcttctttcatttgcgactactttgatggtgatttttcttcttcttaatttcactattattatgtcttttaatgtaggtttttgtgcttaaatttaggatctttcaaaaaaaaaattaacaatagaggaaatttagtaattgctgattcagtaattatcaactaattaatttgtttatttgtgattacataggtgaaaagtaaaataaaaacggaattatttctgttcatcgaaattaatttctagtggaaattcaaaaaaataaaagaaacaaatttatgatgttgatacttttgttgaaagttgttagaaaactgatagtttattgtgtgatggcatgtagaa

SEQ ID NO: 56102 - DNA, 415 bp, Populus trichocarpa
  Intron number 1 from transcript POPTR_0015s06130.1 (locus POPTR_0015s06130) derived from phytozome v7.0 (chr-ID scaf fold_15; pos 6409213 to 6409627 reverse strand)
atcctcagctcctgctccatcacccacaagcggtgagtctattccttcttcttgccaacttctttcattgacatataaatgaatggacagatatgaaattgctagacttacgagagagagaaaaaaaaaaaaaaaagcttcgtgaaatattgtcaatttgaatcttgtttcgtagaacttggttttttttgttttttttttttttaacaattttatttcttcccttgccttgcttattttagggttaaattaaggctcggtgttatgatattggtcttcaaattttgggaaactgaataaaaatctacccttttaagaatattatttaataaaaaataaaatttactcaccctttttcctgttatatattgtgtttgcaggcactgcaatagatcaaggaatagcttgtattctg

SEQ ID NO: 56103 - DNA, 444 bp, Populus trichocarpa
  Intron number 1 from transcript POPTR_0011s02980.1 (locus POPTR_0011s02980) derived from phytozome v7.0 (chr-ID scaf fold_11; pos 2937487 to 2937930 reverse strand)
ctggaaactctgcagggactgtcaccaccttctatgtgagtttcatctttatgatcacatttggtattgtttttggtgcataaattgaacgaatagacaagctggccagagcataaatcatcatctcacctcgatccaataacatgcatgacttaaccctaatgaatattttccatcaccttaatcagcccctcagggcatcatcactttttgtattgcgttaacgtaagttacctaggtatgattaatatcatggactctttagccatcagaaagaaagaaagggaagaaaacaaaccctttagtagcaggtttcagatccttttccaaattaataaccatgattgtttaccctcgcatcaaacagcattgtctgtagaacattaaaatctgagaatttacgtcatgtatttttcttgcagctaacatcgcaaggaaacaagc

SEQ ID NO: 56104 - DNA, 595 bp, Populus trichocarpa
  Intron number 3 from transcript POPTR_0004s22010.1 (locus POPTR_0004s22010) derived from phytozome v7.0 (chr-ID scaf fold_4; pos 20959521 to 20960115 reverse strand)
ttgctgcgacagttgaacaggttcttttgacttttcttgcatttcagctctttctaattgaaccattggtgcttgattgctcttccatcgtagcaagagattagaccaaccatggtaactcttcctatttcaacatctgcttaaaggactggcattagattctctccttgactgaatttaaaaaaatatatatatatatctcttgtaaactcatggtttaatatacgaataactggagtctcttgtaaacccatggttcagtaaacaaaaaggaggaggacgaggagaagaaatctcttgtaaaatcatggcttaatatacaaataactggagtcttttgtgaacccatggtttagtaaacaaataactgtgatcatttgtatggagacccatcttgatgatgatatgttgactggatctggtattgatcaagtctggtttcactgctagtctgttaaaaagagtttctaattgatttctcatcacagttcattttgatgaaattcctcagtcttcttgttgattgggcctgtctgtcagaactactttcttttttctcggcagttacattaactgctgtttatttgggtaggtg

SEQ ID NO: 56105 - DNA, 729 bp, Populus trichocarpa
  Intron number 5 from transcript POPTR_0011s01530.1 (locus POPTR_0011s01530) derived from phytozome v7.0 (chr-ID scaf fold_11; pos 1071146 to 1071874 reverse strand)
tcgattcttcgagctgatatcttgtccattctcgagtaaggttattttttttcctgcatatttgcatgaattttttattcggatttggatctgtttagaatgtcatgttatttgcaacatatatctattagaagcttgtatggaaaaagggaaaagaaaacctttgcttctcattgggttgtcttttgaggggcgtttggcagtgcgaccaatctgtttgcctaaaattttaaatttttctttttgcttaatattaatttttttggtgtttttagatcgttttgatgtgttaatgtcaaaaatgaattttaaaaaataaaaaaaacattattttaatgcattttcgagcgaaaaacactttaaaacacaatctctaccatactcccgaacaggccctgggtatactggatgttgaacatagaaataaccataaacactgttgtcaaagtgtcgcaggttctaccttttcatgctttaacgttacactcgcagcagttttacacaattccattccctagcaaatgaaatggttctttgtacagggtcttgcaaattaactgacagttaggatgcataatgtttttcctaaagaaacttttggttgatcattattgttagtttgttactgatggtattaactttttaatataagctaaattcttggagtaccaaccacaatatacaatgacggatcaaaatttccttcatggattctttatgtatgcagac

SEQ ID NO: 56106 - DNA, 857 bp, Populus trichocarpa
  Intron number 3 from transcript POPTR_0011s05100.1 (locus POPTR_0011s05100) derived from phytozome v7.0 (chr-ID scaf fold_11; pos 5017697 to 5018553)
caaaaggtatgtataatgtcctcttcaatgttcaaggactattttgattttttttaccaaatgccctcttttctatcatttattttcaaaaccaaatcttgattacacttgttgctagttaaagcattgatgcttttataggtgggacatattgtaggttggcatttgttgcttgcctaggattcagaattatatacttttggttgcttccaatggttgagctttataaattagttaactgagaggattaaaaggcatcacggatttacggtgacaatgaacaaaggccttttaaaagtaggctagattttttagccacaaggcttgggctttaatagttaaaatttgtgattacaacatgattgccttcaagaaaccctaaaatttgtgcaactattgacgtttttttggtgcatggcttgttttttatattttagactaataagccattctttcagtatgctattttgcccacaagtatggctaccttataaaagtttatataattttgagggtgtttgttgtgagggaattttaaggtggaatgtaactggaaccacccatcatgaccaaaccaactacttgagtattaccagcgtacatgtgctaaagcttcagttctttttagtaggatgcctcaactgatgaacttcaccctgatcttcctcaatgagcctatcaaagaacctatgtttaaacatcgttgatgaacatggatgaaacttttaagttaatatgcatgatgaagtaactcatgaagatactgtgtgttttagtttgttcttaattaatgtgatcttatcatctgtggtagtaagcatttctaaatctttctttctttttgtacctttcagagc

SEQ ID NO: 56107 - DNA, 672 bp, Populus trichocarpa
  Intron number 1 from transcript POPTR_0015s03470.2 (locus POPTR_0015s03470) derived from phytozome v7.0 (chr-ID scaf fold_15; pos 3025230 to 3025901)
ccggcattgttgcttttcgcgacgctaaattgaaggcaatcacatatatttattttatatttattgtttccttcttgtttgttaaggttaaataaataagtaaataacaatgatattgggttttgtttgattaaaaaattaagaacaagcaactcaatttagtaatcaggtgtttatctgcagaatgaaatgaatggttatttctgttttgatgatattattatgacatatctaatttgctgaatacgatgatttaagctaagtggtttcgacttatgatgtttacttggttgggtgttactttgcttcgattaattttaaagcatttacttgatagaaaagaaatgatgattgattttttccccttgccatcactaccttttggagcgcacatgcttgtataagtaaacatggataccatgcatatgactaatctaataaattcgcatccgaatttcatactcaatgttttcatttcatgattcgttcgtttagcatttctttctgtactgtaagtaaatcgtttagaagtcaccaactttttctaccgcagaaggtgagtgctgatagtttagatatcagcagtataaacgcagttgttcatatgccttttcattctctattttttcaccaacaggcttttcctgacgaggttcttgatcttgacaaagc

SEQ ID NO: 56108 - DNA, 553 bp, Populus trichocarpa
  Intron number 1 from transcript POPTR_0004s15200.1 (locus POPTR_0004s15200) derived from phytozome v7.0 (chr-ID scaf fold_4; pos 15849923 to 15850475 reverse strand)
tccttcgattgcatttccacgactgctttgtaaatgtaaagctatttctcttttactcaaccacatttctctcttgctaggtggtctgtttttccaaagcagatgttgaaaaggctaggccccatgcaaaggacagtttgtaaccaacatgggagagatccaatgttttcgtcctttgggcccagaaggttcaaattccttgttcaaccttgaataagagagcccactaaatagattttggtgcccaccagtcggctgtgctctgtatactagtcgggttcttttatcggatgttatcctctgctagtttcctcgaattaaatcaaaaacgattaaaaaatcaaaacatgggatgggagtgttttaacaaggtttaatttgtctaaccagaagatctatgagcttggtgttattgagtttcctgtctgtgggtgcatgccttttttctgtagcggaaaatttagaattcagtctgttactccactcccacgacacgtaaacttctttgttttgaattaaagttatggtatttcgtgtgtaacacagggctgcg

SEQ ID NO: 56109 - DNA, 688 bp, Populus trichocarpa
  Intron number 3 from transcript POPTR_0009s15280.1 (locus POPTR_0009s15280) derived from phytozome v7.0 (chr-ID scaf fold_9; pos 11862026 to 11862713 reverse strand)
gtagttttcttcctaaagatagtcctcttcgtcaggtaagattcgtgttttctttgctttcttgatgtatgttagcgaaggagcattttttgggtactgtgattttgaagggtcttgatctgtttgtaattttagattagtcatttaagctgcacttgatgtgcttgcatttacatgtacagtggttgggtctttttcgatatttttacaatagttaagtgcacatacttagcttaatgaaagccattaaggtaaaaaattaaagtttcacagacttttagtcgaagggatgtgttagagagtaatggaaaactatttttggggcttatcctactgtctacgcttctgggttgaaatagttctttgacaaaaggtgtgatcacaaaagtttctgagtaactagttaggtcatgtaaaacgtttataagagagtgcaggtcattggtattttctattttgatatggctcgattagaggtaaaggttagaaactgataaaattgcgcggttggatcatagcttgtctattattgatgttcttgtttgaattgggagttacaaaaattgttatgttttggaatcgcttttgattttgatttgttctgttatttagtttttcatcatatggttgtagttagaaatgaggccagtaattctgttcgatgtgttgtgataggaccctgcatact

SEQ ID NO: 56110 - DNA, 544 bp, Populus trichocarpa
  Intron number 2 from transcript POPTR_0014s08240.1 (locus POPTR_0014s08240) derived from phytozome v7.0 (chr-ID scaf fold_14; pos 6121567 to 6122110 reverse strand)
aaagtaaatcttcactgcgctcttctttctttgtttttttttttttgttacatttttattttcaactctgttatcttttttataggataatcaaagtgattgctctgtgggtgttatgtatgtatttgtattgatatagatggtggtaaatggagatattatcttgtgttttgtgattaataattaataacttgatttttttaaaaaagaacttttatttttggattgctatacagttctctcattcaactgttttatgcagttcgtagattctaaatccttgaatgccttttgattctagaaaggagttcatttttaggaggtttttggttttttctattgcctgatctgcattttctcagacctttttagcctagttcagaacaattataattctcgaagtcatattcttgttgaaactggctttttttttttccttgtccaaatctaatgtagcagactggatatcgatatttttggtatcagcaaaaacaagcatctttaacccctttctgtcatgtgatggatattgcaggtccttacc

SEQ ID NO: 56111 - DNA, 904 bp, Populus trichocarpa
  Intron number 1 from transcript POPTR_0011s01580.1 (locus POPTR_0011s01580) derived from phytozome v7.0 (chr-ID scaf fold_11; pos 1108545 to 1109448 reverse strand)
tgagataggtacggactatgaagagagtttaaatttcacttgtatggcaatgcagtgatatgttgtgcacttgttttgcatttctccacatttagttcaatgtagtcctccctgtggtattaaatgatagaagggtgattgggattggaacatttaattttttaacttgctgctgaacagagactctcgaaccaacaacttatatggttctggtttcaactcttttgatgtggttacacaatattatcaaacctggtgatgtcgttggtccagttgtacaattatctagctatttttctagattgatcttttagttggatgtttcctgattaaatgagaaaaaaaaaaaaactaaggaaaaggtaggtagaatagttttgacctgagttcttaaactgttgtatcttacttcagatttttattaatgattaccacttcttccccatcaaatttataaggaagaggaaaaagaaaaaaaatcacatgctgaaggggattctaactcttttgcaatattttttttccttcttccaattcacctatttttgcatgttatgtgtcctccatgatattgtttaatctcttccatggaacatgcaatatcatgtgaatacaatctaataaaagttcacttttcttactggttgacgctgcatcgtgagttttgactcttgggagtgatttaaatacagttttagttatgttctttccttgaatatataaaattgtgagaatgagatttatcttatggggcttattgattcactgcataagttttaatagctctgaatttaattgtcttcatcttttttttttaaaaataataattacaattagggatattatattgacatgatgttgtgatacaggactttatcaggaccttgtaattccagcgcaaatt

SEQ ID NO: 56112 - DNA, 704 bp, Populus trichocarpa
  Intron number 1 from transcript POPTR_0004s19050.1 (locus POPTR_0004s19050) derived from phytozome v7.0 (chr-ID scaf fold_4; pos 18947079 to 18947782)
ttgtcacaacagtagaaaccgtaggaagcaaacaggtaataggagattgaacaatctgaagttgagaagtaatcaccattttttagagtgcaagaaatagaaaagaagagaatcaaagattgagaaggaagaatcttgcagaaagttgaagatttgaagaagaattttttagtttgacaatatatcaaacaaataatagacacatcaacgaatacagaagaatttcattgataagatgagaatgaagccagaatcagaaacaagagtaagaaatcatagagtgcagaagctaaggtctcaagctcaagaatccctaagctctgataccatgttaggatagtaagatttacacagaaaagagaaatagagagagatgaagaaaagcagagaaggattctgttaaacagagaggaagaagaaattctgtttttgattcactgttttattaagtgaattttgttcccttatttgacatcagtttatatattgctacagtaagaagcttattcacgttatctattcttcactaaacaatactaactaattctcttaactgacaaacaagactaacaactactaacaacattctaaccatttcattctctaatcttttgacatgtggcaggactagagcctttgatatctttacaaaacaaacctctgtttcacacactaagcccaagccttatttatctaagtgccag

SEQ ID NO: 56113 - DNA, 996 bp, Populus trichocarpa
  Intron number 1 from transcript POPTR_0009s10690.1 (locus POPTR_0009s10690) derived from phytozome v7.0 (chr-ID scaf fold_9; pos 9130654 to 9131649)
ccgacgtattaggtaacccaatcaatgcaccgacatttagtatatatattctggacctaaaagcatcgaggtggcttttatattcatcttgttgagatgataatttcctttgcaaaatcaaccccccccccccccgccgccacaaggtggctttagaatttccgggtttcattagatttattttgttgaaatgataagtagagttaattataatttagttcatgtgtttttttatgatgttataagttagtccttgttgcttttaaaattataagcaatcccctgaccagggttgattataaatttttaaaagttcgaattattcaaaagcagtggatatggtttttattttttattttctctttatgtttgtcttatttttttaaagtgaacatactgtgaaaaacaaatattgatcttagagacatatcaaaatttcgatgatgacatcatcaatattattgaaaagatttaaataaaacgaatccgataacattaaaaaaacgatcataaacgataaacgaagtgggtacacaagccatccaaatgtattgaggctcacttgtctttgaatcgcttgtgtgacccactccagtcaccgttagtaacattttttagttttgttagattcatcttgttaagatttttttaatagtatttatagtgtcgtcatcaaatattgataagttgtataaatcccttttcttttcctttcttgtttttttctctcttctctctcatttctttttattaaatcttgtgttggataattttgctatttaaaataatactcgccactcttcatggatcattgatattattggtatctttctaaactatactatttttctaaatattttttgtattatattattttttctgaatcatggtagcaagattgtcaaaatatttttttaacatcaaacaaaatatataatatatattcggatagtaataatctattgaaaagcacatgagcatcctcttccttagtat

SEQ ID NO: 56114 - DNA, 476 bp, Populus trichocarpa
  Intron number 1 from transcript POPTR_0004s24070.1 (locus POPTR_0004s24070) derived from phytozome v7.0 (chr-ID scaf fold_4; pos 22818942 to 22819417 reverse strand)
attgtaagttctttacagttagtttttttcttgtttttggtaaattacttagaacatgcatgttgttttagcactcttttgatccaattagtatcagctgtctaatgacctcttgtctaacatatactaagatgaactgtagatttaggactccagattccacttgcttttgcaattccaagagtcagggaatcatttctggcttatgatttacttggttttgattctgtaattctggttgtaaagtagaagctggagctgggagatactttgtcaaactcagcagtgtatccagtcttcactggatgccttttcctgttcttatatgatgattgttggaactggtgccaggccccagaattgtccattaggctcgttcaatctggggaataagactagttattgtaaatttgttattagctttccatatatagaccctcaatatatgtatattcttttgattcctgatgcagtta

SEQ ID NO: 56115 - DNA, 220 bp, Populus trichocarpa
  Intron number 2 from transcript POPTR_0009s14390.1 (locus POPTR_0009s14390) derived from phytozome v7.0 (chr-ID scaf fold_9; pos 11280015 to 11280234 reverse strand)
caatactgtggccgaggaccaatccaactttcgtaattccgcaaggccttgactagcagagtcgtttaattcagtttatgggttaagtattttttttatatgtggaagatatattgtgaagtgctttgaatcaaaagaaaaggccaaatccagcaaaacattattagatcttcatttgcattgagttggtttattaacatgtggtgcaggaactataatt

SEQ ID NO: 56116 - DNA, 771 bp, Populus trichocarpa
  Intron number 1 from transcript POPTR_0009s06860.1 (locus POPTR_0009s06860) derived from phytozome v7.0 (chr-ID scaf fold_9; pos 6546644 to 6547414)
ccataatatctacatataaaaatagacgcagaaaggtaaaaagtatcgaccttgtctaccaccagtgagcttgacttgaacacccttgtccacaaacttagccaaatccaatactgtttctttccttccggactgaaatcacatttgatcacacacattaaaccttaatcacaagattaaaaattttaacacataatctcaattaccatcttatataatcaattatgcagctcctctttacacagaaatccaaaatcccctagaatgatacaaaaagaaaaggatcatccacggaaacgagaaatacatccatgatgacaactatttaaaaaactaaacataaattaacaaaaaaagaagaagcaagaacctcgctttctttagggaagtgaagtgtgccctagattttctctcttcttctgttctgctgtgcttttcccgctttgcttttttacactgaagctaaaacaacattactagttctagtcaaacttgaacaaaaaggtctggactgttggtccatttttacttggtctcaagcaacgaagcccatatgtcaattccccttgggtccagacttgagccgacccaggaaacaaagtctagcgcttttttttttttttaaatatagaaatccaaatgacaaaaaaagcctcgacgaaagggtatataggtagttttgcggaaagacaaggatattttattatagattggtagtatattaatagtgaagcagcagctagggtttagttgtagcagccgaaagaaaga

SEQ ID NO: 56117 - DNA, 760 bp, Populus trichocarpa
  Intron number 1 from transcript POPTR_0001s23780.1 (locus POPTR_0001s23780) derived from phytozome v7.0 (chr-ID scaf fold_1; pos 23174602 to 23175361)
ggctcttgggtttgaagaattccagtccctccgtatgtagccattttctattccttttcttttctttgcactcttagtttttcattaagattctgcatgactggacatacttgtagcatcctatttatgtttaattttcatttgatcacaatgctacttagtgaagcccgtgaattttttttttcaaatttttaatctttcattttgtttgttctagcagaacatcttcaattttcctctcatcatgttttagacatgctacgccattaatgccaatctcctaattttttcgttcataatacacgaggaaaattcattgctctgtaactactaaggggaattatagtaaaaaaactgttctttctcaacaaacttccatcttagtgtcttttttatgattgttaaccttgggagatttggctttaggatggtctttcttcacgtcaaggttgatgacagtatacgactactgttatctgatcacttttcatagtcattaggttattccttttgatgttcaattatttgatgtatacccaaatacaattctgaaagtgttttcactaatctctatcatctcaagaaattatgttaatcaattatgtgcttgttgcacgtgcttgtgtttacaccttgagcatgcttgatgattttcagtattttgattgctactctagttaacatgcaagtttaaaatggtaacgatgtttagaattcacttgtaggttgattgtgaggttggatcttattctgcatccag

SEQ ID NO: 56118 - DNA, 721 bp, Populus trichocarpa
  Intron number 1 from transcript POPTR_0011s14540.2 (locus POPTR_0011s14540) derived from phytozome v7.0 (chr-ID scaf fold_11; pos 16910527 to 16911247)
tggtgtcaagaagatcaagaccgatacgccttgtctgcttcttccacctcgtataacatacatatatattactcatacccttttcatatgatgcatgcatgcataaacatacatgtagaagaggaaaacacaaatctaatgcattttgtatgatttgggagcatgagagaagctgatctgtgatagaaacataaatggaaggtttctttgaagggcccataatgatcttcctctccatttctggaagaaagtttatgataagtgcttgaacagaaagtgatatgcaaagtaacaaaacaacaaattaattaatcattgatgaatattataaaagattatgatagtgatttgatctcaataattctctttccttgcactttttcctgtttacaggcaagtacgagtccttttctttctcctttgatctctctcaccccactcaaatataattaattaagaaaaaatagtaattattaattgattttttctcctcgtgttcttttcttttcttgattttcatttcctcatttaaatccttctttccttagtctagaagggagttggatcttgcctggaatgtacttattgtagcatttaataattcatatacattcatcttgtgttttcttgttgatttttagaagcaaaagaaattacttaaataacataagatggattagcttagagtcttaatttttgttgtccaggaactggtggtggc

SEQ ID NO: 56119 - DNA, 476 bp, Populus trichocarpa
  Intron number 1 from transcript POPTR_0001s34470.1 (locus POPTR_0001s34470) derived from phytozome v7.0 (chr-ID scaf fold_1; pos 32590380 to 32590855 reverse strand)
ggtttcccttcgaaattttgccaaaccacaacgtcagtaacttttctctctctttctttctgagctattactttctttaatacacatgcaataatagagaaaaattagggtttcatttactatattaatttattgttaaagatacacacatttatgcttggctatacatgggttgtgcttagtttttgctgttttgaatcattgattctgcatatgatcatttctttatatttggttttgcctattgaagcctaattgtgatttagagttttgactttatagagatttttttggcttgcattgctgctaaaaagtggaacaccccgttagggttttggaacttctggcatggcatagcattgaattacaaactgaattggtgcattttgggatctgagttgttttgagaattttcttcttaaagtgcaatgttgattgtaggagctgtgcccttgcgtaaaaaatatccttctact

SEQ ID NO: 56120 - DNA, 763 bp, Populus trichocarpa
  Intron number 1 from transcript POPTR_0015s02120.1 (locus POPTR_0015s02120) derived from phytozome v7.0 (chr-ID scaf fold_15; pos 1461961 to 1462723 reverse strand)
cattggccactaaccctctttcaataccagtgaaggtaagatatttgtgatcataaacatttcaagggctttattttttgtgatttgttggcaattctcaagtttttgtaatctggggtgatttaaagtttaaaacttttttttttgggagctgggtgtgtttggttgcttacaaaattgggattatgaacttcaatgagttgttgatttgattgagttcttcatttggttgtttatgaagtgaataagaaaaggaaataaaaaatattctgtgaggaatttaaattttggttactcaaagtttgaatctttttgctgttttttgttggattggatgtgtttgattgcttagaagatgacagaatgaaacttcaacttcctttaattgttattttcattatcattaattaaatgtgattatggcttaaattactgtttgataatcttaattttgaatctcttgccattatctggaactggctttgtttggttgctaaagaaaatgcaagaaagaaaaaaatcgaatcttgtttcattccaggtgatttttttgttctaatccttgttttgaattttggttatttatcaagttcacgaaaaaaatctccttgttttgatctaatcttatttatttcaggcacaaaacatataattgtgtagaattcgaagaatcatttttctttatatatatatatatatatatttctaatttatattatcaaattcaggtaaccatacatttcctttacagcatcaagagaga

SEQ ID NO: 56121 - DNA, 730 bp, Populus trichocarpa
  Intron number 3 from transcript POPTR_0012s04510.1 (locus POPTR_0012s04510) derived from phytozome v7.0 (chr-ID scaf fold_12; pos 3797214 to 3797943)
gggctccctctacaaactgcagtacactatcagaggtctattctttatcctttctatgtgaccttcctttctctttcttcatagaataagattctcttttttcttaatttaagtatatctttaatctcaaataaggaacacaatacaaacaatcaagaaggtttgataatgtcgttatgattagaagtgcatttttttatattttcttttaggtttatagagtttaaaaaagattgtgtagctaatacgctaagggaattgaagaaaacaacaaaaagctatgtttgttgggaaatgaaaagggtttaaaagctgcattctttcctttctgccggggctgctgttataagactagctgggtttttgggtcttgtgcttatcaagcatttaaggcattgttttgggcacccatttttattccattgagtatttgggcatcctgatagtgaatctataaaatgccaaccctactggtaggaacttggcttctcacactcttcatgagctctgatttttttttttttttttaagttgaggtttgaattccagatatcccaacatcactagtatcatggattcatgtgcaaacaacacaagagttaaaagaaaaatgttcaaacttgttgcactattcaaattctcttttgataataagagaattcatgttttgaatggtactcttcattaaatctcaggaatctgtttcaatatcaaaggcaacaaaagcagc

SEQ ID NO: 56122 - DNA, 592 bp, Populus trichocarpa
  Intron number 1 from transcript POPTR_0011s10590.1 (locus POPTR_0011s10590) derived from phytozome v7.0 (chr-ID scaf fold_11; pos 13123821 to 13124412)
gcggctcttccatcaccaattctcaggtaactaccatatctacattacagtaccaccaccaccacttttactctctccatttttttttacagaatattcagagctcacttgctattcatggtttcttcacttcaaccctcttaaatattagccatttctttttgggttcttctcccttgtctcattttcatttttcttttcggttttaacatttggcttaaccttgatgaagatactctgtttgataaaatgtcagttgatattagcgttttttggattgtattattttcattgagtttgacatttactgctcttatgtagctattatatctgtaatagtagatgactataaatcaaaatacttaatttttatgtttcaatggaggaattctgttcattctcaaatttgatggctgcttgctagaaatttgttggtcaaggaatgtttgaagggaccatttgatctaaagtctcagcctcttttttttttggtcattttctgtttttaccaatcatgtaaaggtttcttactcaattttgtgttggaattattgcaggcttttcgttatctagataacaggcgtaaggttca

SEQ ID NO: 56123 - DNA, 613 bp, Populus trichocarpa
  Intron number 2 from transcript POPTR_0004s24230.1 (locus POPTR_0004s24230) derived from phytozome v7.0 (chr-ID scaf fold_4; pos 22939254 to 22939866 reverse strand)
acattgtctctcttgttgctgcccaaattgtcaaggtatctttttttcgctcatcatctagtcatcccatttggtgtttatttgtcaacactcttggcacattatatatgtaattatttaatttttgtccttggttggtcttttcctttggacatgtattattattctcccccgcgtccttcctccacatggaaacttggatatcttttgtcagtgtcgttctatttgcgtggttggagcgagttggccaattgcgttgcatagatgctctccttggtaaagcgcaaaaaattatgtagcaggggcggaatattttcggttcggtgaaaaaaaaactaaactgattttcttttaatacaaaaccaaaacagaattgaaactggttcagatcgattcattcagtttggttttggtttaggttagggttaggaagaaaatcgagttttagttgattcagttcggttcaattaattttagatatttaaaactgaaaccaaattgaactggatttattttgattttttaatcgattaatttaattattatttttttttccggtctttatgtttttttctcattgtttttttctcatcgcaatcccattagagcagag

SEQ ID NO: 56124 - DNA, 609 bp, Populus trichocarpa
  Intron number 1 from transcript POPTR_0004s24230.1 (locus POPTR_0004s24230) derived from phytozome v7.0 (chr-ID scaf fold_4; pos 22940026 to 22940634 reverse strand)
atttacctttgcaggtttttgatccttctatatcatcatgttcctttttccgttttccatgtaacttctactgatcttctgagtactgagggatttatttgcacgactcaaggatcaagttgccaattgccatgaattccttgatatgttctttagaagatggtatttttgtatttgatggctgactgcagttgccctctcagtagtggcggaactgatgtatttttactgtggaagaatggcaatgatactggctataaaatattgaaaccttccacgttgtgtactctaattagtaaggaaataaaatatggatgatatgttgcgacggggaagctgtttctagtccgttatcaatgcctcttttgtcatgtttcttcacttcagtagaacttaaatgttcagtatgtaatcagttagcatttcaattttcatcttcattaccattctggggataaaaagagattcatgagtatatatatatattcgaggaaacctccctctgctatcttttcatgctctgcattctgaacagatcaaccagaacaagtatcattatgttctttttattttcagcatctctgaagaattctaccattcaaacaggtt

SEQ ID NO: 56125 - DNA, 767 bp, Populus trichocarpa
  Intron number 4 from transcript POPTR_0015s14930.1 (locus POPTR_0015s14930) derived from phytozome v7.0 (chr-ID scaf fold_15; pos 14334770 to 14335536)
agctgcgtcacgaacgcaatacatatcttgaactagtatgtcctatttaccctctcctgaagaattatatatactccatccccttgcctgcaaaaaccctgttctcatgccgatccaattgatattgatatgcttgttaggccgttcctatgtgtttgcttgaaaagagcatactgggatgaaatggacaaaggcacgtcagatcttaggtttttttttttttttttagatcttaggttttttttttttttttttccccttacaactaggaggtgccagtgggagcctctcaaatatcgaaatgatccctcggatttatatataacgtccattttgaatagaaacaaaggctatattgtagtccatattctatgccttatgtgtatatttttttgaatgtgtaaacaattttggcatttcaatatattcttccattagagagatcttagcacgaacctgaacaaaaaagataaaaaacctttgtttttgtccaaattagcttctctgacaggattcaaagccttttttaggatacaaaactctaatgaataagagctcgaaacaacaaccctgatctagataatccaaacctaaactaggtttctcaaagatgtcaagtgcacatgaatttgtgatttagtttcgagatttagcagaccttgataatgattccatttgtgctggatctctacaccgttgctggggccttttcttctaacattaacgttagcataatcaatgtgttggtgccttcaccaggcaagcaa

SEQ ID NO: 56126 - DNA, 196 bp, Populus trichocarpa
  Intron number 2 from transcript POPTR_0009s14430.1 (locus POPTR_0009s14430) derived from phytozome v7.0 (chr-ID scaf fold_9; pos 11306223 to 11306418 reverse strand)
caatactgtggccgaggaccaatccaactttcgtatttccgcaaggccttgactagcagagtcatttaattcagtttatggaaaatgtattgtgaagtactttgaatcaaaagaagaggccagatcctgcaaaacattattagatcttgatttgcattgagttagtttattaacatgtggtgcaggaactataatt

SEQ ID NO: 56127 - DNA, 802 bp, Populus trichocarpa
  Intron number 1 from transcript POPTR_0015s01060.1 (locus POPTR_0015s01060) derived from phytozome v7.0 (chr-ID scaf fold_15; pos 617426 to 618227)
taatgtttaagttcatcttcttcggctagacatgcagtgcaatgagtttgggtttttatacaaagggtcttccatgaaaaagagagaattttttttttaatccaatctttatacaagtttgttcatatgattagctcctttgtttcattaactcttgggaatttttccatgaaatatactatgaatatttgagaaaaatcaagaaaaattaaaccaagagagatgaatataaaagaataccaagaaatatacctaaaatgatagatataaaccacaataaaaccaaacaaatataatctgaaaaggaactaaaaatatattttttaagaaatggatacaaaaattaaatacgaaaaagaagacaagtgtcagagtaaaaaaataaaaataaaaatggtattataattagagtaaaacgataaatgaaagtaagatgtatatattaaacccggtttagtatgtgagatttaataatttattaatttaaaacttggttccggtccagttttatttcaaattaattttaagattgattgatttaattgatctagttaaataaatctgaataaaatataatttaataaactctgatatttttttaaaattttaaatcttttatcttcgttaaaatgacctagcaaacttgtgatataggcggcaaaagtataggggtcagattaaaagattgttttgatgagggactatttacacaaacaacaaaaactataaggacctccaaacctcattaacctctcattttcatttttttcttgctcttctagggtctctaataaagaagaga

SEQ ID NO: 56128 - DNA, 797 bp, Populus trichocarpa
  Intron number 1 from transcript POPTR_0004s14040.1 (locus POPTR_0004s14040) derived from phytozome v7.0 (chr-ID scaf fold_4; pos 14499885 to 14500681)
ccttgaccttccataaagacagttttgtagcatcagtaggggctggatcactcccatccacatgaccccacaattcttttcctgtgacaaatacttgaaactaaaattcccaagcagaataattcttcccagtaaatcggacaccaaacagatcagaattgtttgacatctttgtagtgatacacaaaaaatcacagaacaatgagaatacaaacctcagctgacaaccgagaaccaaaccaaaagaaccaagaaactgagagtcctctgtatctaggactgattgcaaagagccaggagactgagagtcctatgtatctaggactgatccagaataatccagaaaccaagaacaacaagaaataacctgattttggaatacaaattcaaaggtatagctctgataccatgtcaaattggctgaataaattcctttacatgagagtcccgttccttaaataggaaggaatcctgatttacgtcaatcttgatttacatcacattcctataatttaggaagatacttatcctataattatacttctatttcagctgtatttctatcaataacaactattgcctatgctaacaagaactatataaatccagaagagaagaagtagaacaatcagaaaatattaagctcctgaactaacaatgtctaatattgtcaacaataaacatttacttgaaagagtataataacatcccagctgtgcaaaattaactaatttggaaattagttatgagattttttatggatgcttctgtttctttttctattacatatatctcag

SEQ ID NO: 56129 - DNA, 663 bp, Populus trichocarpa
  Intron number 3 from transcript POPTR_0012s10760.1 (locus POPTR_0012s10760) derived from phytozome v7.0 (chr-ID scaf fold_12; pos 11449261 to 11449923)
ccctccaggtctcctattcccctctatctttgtgatcatttatgtcaaccatcaaactaattatggtgattagttcagatagactaaatgctggtgctattgttaattttacttgtgaggtagttagttaatgagattataatgggagccgatgaggtagatttgcaattattaccaaagacaattaaccaagacattccacaaaactgggagcttttatttatgtgtttcacttaaatattgccagtagtttatcttttttgtttgtctgcagatgtttataagtgatccttggaaatgctcttaagaattataagaatgcatcaccagctgacaaaataaagtgaaacttgtctcacctaattgcttttcttattatcatgtgaagaagtgtgaagtgcctgctgtaactaatggcaagaagcccttgataaaccacctgctggtttcagtatagcaagtgaatgaggggaaaacttgagttgttcgatgagcaaacagatacaattgcaaatgtttcatgctagttttttgtttttgcgcgtcaatgtgtgattcacatgctgtctgtctccatttccggaatgatgtttctttttacctacttgttgtcttgactaccgtgcagtgtgggagaatcacttgttgattcaaaaagtccac

SEQ ID NO: 56130 - DNA, 873 bp, Populus trichocarpa
  Intron number 1 from transcript POPTR_0004s06590.1 (locus POPTR_0004s06590) derived from phytozome v7.0 (chr-ID scaf fold_4; pos 5290683 to 5291555)
aagctgccgaagaatcgtgagtatagcttaatatatcaccctcttccccttttttaactttgctcattaacctaaccccacaagttagttaatatgtttttgtttgcataaataaagatttagaaaatcgtttgctttttgtagttaggttaatggttactggttggctagttactttgtttattgtttatcactggatgggttgaagacaactgcttagattgaagttattgtttctttgtcttagctattgggataattgaggggaaaaattgtacatgttagggaaaaaagaacagctaggatctataatggttatttctatcccaatatgtagctatttaggaaaatgctctgttaatgcttcccaaagatgaaattatagtcagtcaccatctaggaataggatccatctagtccagaagatatttgattggatatatgcttttttgtttcgaaggaaactttccaatgacttgaaaaaaagaagaagcaagtaattgtaatgccatggaacttatctaatattaaggcaaagggttttttgaatcaataatcgtcaaggataaatgtttcattgtgtgaattagttagtggtttgcttccccctgccccctttcattgtgcaaagatacaatgaagattgtcaatgagatcttagagattatcagactttctacctaacacccccttgctcagaacaaaacaatgttcaaatagaaatcattagcatatagttagctggtttcgtgaaaatgtgctacaaatttgacatgtttatgggtgtttatgtccagtgtgcgtgtgttaataatatcatagagtatgttttaacgtgcacaactgccttttcttcttttcagtaatcccagc

SEQ ID NO: 56131 - DNA, 1033 bp, Populus trichocarpa
  Intron number 3 from transcript POPTR_0015s07430.2 (locus POPTR_0015s07430) derived from phytozome v7.0 (chr-ID scaf fold_15; pos 8633802 to 8634834 reverse strand)
tgcaagatatatttaacaagttaaaaattgagaaggtactaatttcaactttcatgtgtaagataaatttttcgctttgctttatgtttagagcttttcgatgttcagatacatttctattaattttcctgaatcgccatgtccatagaaaccttgggctcctagtttgattctcagcaggaagcttccgctgactaaaatatgagaatgtaatttccatcatatgatacggtttcgatatataatttgcagcattctgcttcttgtgtttatacattttcccattcttgcatgttaccatttggaccattacttctttggttggatcaactatatgagttggcgttatagtaagcctgtccaaaggcagagttggatgggagattcttggaatttctgattcaggtttgtttcagtctgatcaattctaggcccagaaaattgaagatggtgagcttggtttaagtcaacaaagtcaggaaaaaaaaacagagagggagaagctaaacattgttcatgtttcagcaaatggtgacattattccacccctccaatttgaactctcaacagcccttccccccttatctatctaataggcagatgcaagcagaaaatgatcaaagatcgctagaaggctatctctggcttctaacatcagagaaaagacaaagtgcttcaagggcgaaatgaaaaaggggtaatgggaatcaaaggttaagaagtataggccttccatctctccctctcgcctggctcattctcaatcacaatagtggcctctcagttgtattagcgatacatatagagatatgattgagcttgttgattgtgttgttaacatgtgagttgaaggtgtgtgtttttagttaacagtgttgatattcttcaaggttctaacatgagtgaggagactgggtacagtttttcttttttcttaataatagaaccaagacactatattttccttgacatcccttctctttctatctacatggcagcatcttgaagttaacaggcttgttaaaggaaggcc

SEQ ID NO: 56132 - DNA, 879 bp, Populus trichocarpa
  Intron number 1 from transcript POPTR_0004s10600.1 (locus POPTR_0004s10600) derived from phytozome v7.0 (chr-ID scaf fold_4; pos 9126273 to 9127151)
ctacattcacagtctccaccatttcttaaaccccagtaagtgctagcaatttctaaataacatgttagtgattttgttttttcatttcttgaagttatatggctctattctcatctgggtttttatcaattttctgaattgaatgatatatctataattgacttgctaaaattacaagaagttaactaggtaggaggaagttttttctgatgattaaatgaaggattgaaagtgttaattacttacaagaatttgtgtttgtcaacacggatatgaccacatttgatgaccattaaacatacatggctggattattaattagctttttaatgattaaatagatcaaagatgaattatggtgaaaagggagatgggatgataaaatgttgtaattataactgttcgtgaatctgctatgcatgttaatgagtgatcattggagaggatattcgtaaaagatatgaaggatgctgggtgaaacaggggtatgcttttggggctcgttgcaattgttaatgtgcttgtcaagtttaaggagatagtttatctaatggtcagtgttggatgtatctgaaggtgataaaagtaccataatgtggctgaagcgaatcatacatgaattttaatggacccgatgtcatactaaaatgatctattatgattgattcacacttctttcacatattttcttgcatttttttttatccaaaccagagattttaaatcatttcatcctgaatttttccctcaatagaccgaatttatattatcgcattacagctttcgtttattacacctgctcctggtttttaatccattatatcttcatggaaaatcatttcagttgttaccgagacagttcactgtttgcagctagaa

SEQ ID NO: 56133 - DNA, 600 bp, Populus trichocarpa
  Intron number 1 from transcript POPTR_0009s06540.1 (locus POPTR_0009s06540) derived from phytozome v7.0 (chr-ID scaf fold_9; pos 6300314 to 6300913 reverse strand)
aaattcaagctcctttagggtttcccaatttcacagtaagcaattctcccaactcctccttcatccttcctctctctctgcttgcatcttcattttgtgtttttgatgataaagttttgttctttggggaatttctgtatctggcttgctagaaaatttgtgggaaagaagaaaaaattggaaatgttttagctctgtccttcaagtagaagggggatttagaactagacttttgcttggtttgaactttgtgctgtgaaatttaaaaggttggagtggatttaggatatcctgatgaaaatcatagctgaattgagctaaaatttggcgtcttttcccctgttaagcctagttttgttttaaagctgttgaagtttgaataaatttgttctttgctaaaaagcttgaaatgaagtcttctgtaaatctctctctctctctctctctctcttcgtttggcgatgtgtggtgatgagtaattcaatggagattgaattttgcatatattttgcggcgtgtcatctgtcgtgttttatttttattaaattattgaaaatttaggattttttgaaatttttatgttctaggagaacgttgtga

SEQ ID NO: 56134 - DNA, 788 bp, Populus trichocarpa
  Intron number 2 from transcript POPTR_0009s15150.2 (locus POPTR_0009s15150) derived from phytozome v7.0 (chr-ID scaf fold_9; pos 11766662 to 11767449 reverse strand)
ccttcgtcatcgccggcgcttttgccggtgagagggtaagaattttttattttatttttagtaagattgttttatgttttattgtgtataaaattgaagaattagtgacttacttcggaaacagtgccctaacttattcgagcatttgaattttaatcaattttttaaaagaattaatttttgtaagaatttggaaatagcaagctataaataatattattagaattctgtttctcgtgatcaaaggaaacaatgatctagaaaccaaaagttgttgaagaaacttgccaagtggaaacctttttttttctctttccatgtagagctcacattttgcatagatgtcacttgcattattgaaatctttcggagtagccgatcaatagagaatataaatgagcttctgtttgcctgagaacttttctacggtttgatctggaaatgatgatatgtgagacaatggcacatgaatctataaatgtataattggattagattttgcttaagaaacacagacatattttctatgcaatctgatggagtgggaaatctttttcatgttttgaatctgaaaggggctagtctacttgaattgcacttattgatgcatttaaaaaaattctttggtagttcaactatgtgaatgcctagctgaatttgctgaatgctatggcagttcaattatgctttatcgctacaaaaatctgacttatattttgcaattgtttttaataatatgtggtatcttatcccggttaatcattgttgatgcatgcaggctgtggatt

SEQ ID NO: 56135 - DNA, 721 bp, Populus trichocarpa; identical to SEQ ID NO: 56118
  Intron number 1 from transcript POPTR_0011s14550.2 (locus POPTR_0011s14550) derived from phytozome v7.0 (chr-ID scaf fold_11; pos 16910527 to 16911247)

SEQ ID NO: 56136 - DNA, 928 bp, Populus trichocarpa
  Intron number 1 from transcript POPTR_0011s01710.1 (locus POPTR_0011s01710) derived from phytozome v7.0 (chr-ID scaf fold_11; pos 1262685 to 1263612 reverse strand)
actggataagaaagtggcagtcattgcagacacaagtagaaaacaagaccatgatcctgctgcacttgttcttttaatttgaactgattttaaagaaactataacaaaatgagaattgttctttaaatgaggaggtaaacgagaggtggtcaagaaactataacaaaaacacagcgcaattagtaggtttcaagccaaaattgttctttcaatgaaattgcttacgtaaagacattcaaacatgcactggatattttttttcctgtgaattgttctttcaatattgaccgaggcttgatgttgggatccatacagattcctgattgttttatttgagatacaatttttttgagatttcatgccaatgcttgccttctattggtactcccaatcaagaattggcttctcttaccttccacataaaagattcttgattaatgggtcatgcagtcatctgtatggcctaacttcttggtcatggtttaggccaaataaccagtaaaggccatgcagttcagtcgctattgcatgtcttgatagagccacaaagaccagtcaaacaactgtacgttgagtttacagaacatgtatatataagatcactcgcttcagtattactcgcttttggatgagggaagttgcatagaatatatatttgattgattaccaacggtggaaaaaaaatcactcagaatttatttctgcatgagtcaatacagaaaagacatccatgttgagctaactggcttgagcttttatgggtggtattgaccaaatgtgtgatctccttaaaatgggctttctcgttattcagaatgacggatttgaactggataagaaagtggcagtcattgcagactaaagtagaaaacaagacctcgatcgatcctgctacaatcaggtatatcagttgaaagttctctgtatc

SEQ ID NO: 56137 - DNA, 672 bp, Populus trichocarpa
  Intron number 1 from transcript POPTR_0012s06830.2 (locus POPTR_0012s06830) derived from phytozome v7.0 (chr-ID scaf fold_12; pos 7306817 to 7307488)
ccttctcctgcattaatctttctatcgataatacggtaaaatcttatttatttatcctgcagattctctcatcttctcttttcttcttgctgactgtttttaatttatgtgtttaatgttttttcttgcacttcttgatttgtcatcatccgtcaattcttttctttttctttgttataccctttttgtttcgttgatttcgttctgtgtgtttaattttcttttgtttctgcatggatgcttggtgctggctcggaaaactcaagttattttggttcttaatgaatgttaaacagagaataaatctttattaatgaggaggagaaaacaaattaatttatttactgttcgaacattcattcgctctggttctattacctgcataaattgtgatagcgtttaatctccaatggtttttttgttctgtgcaaacctatttactctgctggtttatgctcttactgtctttattattttcaactaatgtctttttctttctcttacaaaaccccttagaactcaaaatttcatgtgctgaaatttaactgtgctggagtttcaggaatccgtttatagtatgccgtaatattacggctatcacaatctcacatgtactttgtttcttcattttatgcaggaatcttaattgatttcttaccatctgccttatta

SEQ ID NO: 56138 - DNA, 709 bp, Populus trichocarpa
  Intron number 1 from transcript POPTR_0011s02460.1 (locus POPTR_0011s02460) derived from phytozome v7.0 (chr-ID scaf fold_11; pos 2351338 to 2352046)
ggcggagagcgttttgagcagaaggtatgcatgttttatttattgtatttcagaaaatggaaatgctgtcaagtgtcaaccaaccaaataagtgagaaagactcaagacaacaagaagagagagagagagagagagagaatcgatgattccaaattcgtgaagggaagcaatccctccctcacacgcacatgcatgcccttctcttttcccttttaaccagaaataattcattccaactcccactttcctcctcttcgatttcttcctctgcgattcatttggttgctttgcacggtgcttgatccaacttctcactattttattttgattttcaccggaaacaaattatagcaggatcgttgatggagttgggcagagcaagctccccagcagttcgaacaattccaatagactcaccaatttgtaatgtttattttcttaagaaattgaatatattggaaataagcgaattattttgttcataaaactatctgtgtatttgctgacagctgctttgaataagtttaaacagcagaatctcccagcatgtaagccagtcctcaagccatcctgtgtgagtctcagttatctacaaccaccagatatgtgtgtgtgtgtgtgtgaatctttctttttctttttcaagtgttgatattgttttttgtttttgtaggttattacttcttttttggtgctcggttttatttt

SEQ ID NO: 56139 - DNA, 620 bp, Populus trichocarpa
  Intron number 2 from transcript POPTR_0015s14200.1 (locus POPTR_0015s14200) derived from phytozome v7.0 (chr-ID scaf fold_15; pos 13890379 to 13890998 reverse strand)
cttttggcaatcaggtaacttgtatttataaaacagattttttacgctacccttgtttgtttactcagaaaaaaacttttttctgatcatatttacatgtttggggcaatttttctgtgcaagaaaattgtttttcctgtgaagagaaacttgtttcccccctcttaaaggtgggattttttcccccagaaagaatgggtagtcatcagttgtacatccataataatttaatacacctctatatgaatgggtagtcatcaggtttctgcaagcagatatattttctgttcttaaatttgctttattttcgattttttagaaaataaattaatagatcagaatttaatgatatatccaatatggttcgccatgttatcttgtaaatgccataatcaagttgaccacttctccacgaatgacagtgacggttcatggctttgcatggctgcaaaaagaattaatttcttgatttcaagaagagctgaacttgtcgccaaatcttaattacgcacctaaatgatttttttagagagatcaagaataaattcaacaaaattaactccaaattaataatctgatccttttacttcttcttttttgatgcgttaatcatcaggttt

SEQ ID NO: 56140 - DNA, 583 bp, Populus trichocarpa
  Intron number 4 from transcript POPTR_0011s13960.1 (locus POPTR_0011s13960) derived from phytozome v7.0 (chr-ID scaf fold_11; pos 16566401 to 16566983 reverse strand)
gaatcaggtaccaattgaacagttcctcttccagcaattatctcctttctttactagcaattgattctattaatctttttgaaatgatagtcgtcattaagtgcctcattataaacgataattgaaatttagaggattaagttcagcaacagtattgtgaccttaattaatcttaatcagttaatcatcatatatactgatgttaattcagtttgtaattagcccggaaaaggatcgttgatgtcaattgaattcctgaaccataaagctgcagttagttcaaagaatgatctgtaacagtgtatgattttaccaaaaccgattaaagagtggagccccaagattaatgatggtttcattgtacatgagcttcataacatcttgtgtttgctttattggtttgatttaatgggtctgcatcgctgcatcacacagtttgacactttttcttaataaagagtggagccctagatttaataatagaccaaactgttttaatgtgcatggtcttatatctcaaagcttctttttgtgttttctgtttgcagacagcaattcctatactaatagggaccaaatttga

SEQ ID NO: 56141 - DNA, 749 bp, Populus trichocarpa
  Intron number 3 from transcript POPTR_0001s21780.1 (locus POPTR_0001s21780) derived from phytozome v7.0 (chr-ID scaf fold_1; pos 20270858 to 20271606)
ctagggataactctgctatccatccctgcctcaaggtttgtggacttggtacaagtaatttaccattcttttgtgctgtcttttatctaaaaactagttaagtgggtttgttagtttgtaacggagtggaaagaaaatacttagtatgaaaagatgtagtttgtttataatgagatttttagtgaagaactttgttcaaatcagcaatttttagtgattaccttattttgtcaaaagtgtgtacatcgttttttatttagtctctaattttgggtttgccaaatgatttcccatcttaagctgttttctctaatgattggtgtcctttctttccccttctgttacacctctttgatattgtacctaaagttctataattccaacttggtattgatgctcgttatttattttagtggttcttgaatatgtctggaaaggctcagtgataagttcacgtgtaggctactttactgaagcaaatttgttggatttggtcctagaaggattatgacgacattcatgtcatactttgtagtattttgactctgagaataatgcattttcagacttctactaaaagttcattaatgtggttgtgtttttgaactatatgaacttagtcatcttgtggttgaatttttttctttaaagctagttggatattgggcaccattatttactccatttcatgagacaagcttgatatgtttacaggagccagcattccagcgactaattttcatcacaat

SEQ ID NO: 56142 - DNA, 145 bp, Populus trichocarpa
  Intron number 2 from transcript POPTR_0012s13230.1 (locus POPTR_0012s13230) derived from phytozome v7.0 (chr-ID scaf fold_12; pos 13477799 to 13477943)
tgctgaggagaaaacagagggctctgtcaatagaggtatccattgttagatcttaagattgttcttttctttgattatgggttcttcttgttattgattaattaatatcagcttaagtaatcaacttttttgtttgtttgtgtag

SEQ ID NO: 56143 - DNA, 940 bp, Populus trichocarpa
  Intron number 2 from transcript POPTR_0014s09340.1 (locus POPTR_0014s09340) derived from phytozome v7.0 (chr-ID scaf fold_14; pos 6942074 to 6943013)
aagaccttacaggtctgttgtacacatacatgtgtcttcgattgtgtatgcatgcttgcaagaaattctccccaccctccaattttccccaatttcttgacaaatgtcttctctaaagtcacattcttttgggtttgaagcagttgtttctcttggctagtaaaaagctgaaacctcaaagtttaccatatgctctaaaacatcacccctgcctctttccctttatcccctttatcctatgcacacactcagccactccatgtgctttgagaacgtacatttcttctattttcttttttttgtttgcacagttgatacccaaactttgtcttctccacacatccaaatgccttttattttcagtagtggttatcttcagtggtcgtaggcactgaattgtgatgccctggtcatgcattttgatttgtcatactgcaagctagtttactaatgtattctaacttggccaattcaattggcgatggcttggcaaatgtgccactcctgcttttactcatcaccacccaaattctaaggcgactgtatggataccactacacttaaccatgtgcaagatttcaattcgtttgacttgatgataaaccttgttgataagggacaagagttgaatctcatattttgaattacagattcatttaggcactcaaacttgtgttacttcaaaattttgggtaaaagaaaaaagaaagcaagaaatatagcatggaaagaagtgaatttactagttgctgaaatccatgtactgggactcagttaagaagtcacacgttgaacgactgtttgttgcccttcagtcctgattgtatttttggcacttgaaaaactatcacataaataactattgttcgtcaataatttgacaagaattttcatctggattatagagtgcacaagaacagtccacccaaatttcacagga

SEQ ID NO: 56144 - DNA, 714 bp, Populus trichocarpa
  Intron number 1 from transcript POPTR_0004s10580.2 (locus POPTR_0004s10580) derived from phytozome v7.0 (chr-ID scaf fold_4; pos 9112634 to 9113347 reverse strand)
ccattcaagctacttcttctttttggtcttttgaggtaagggttatatgatcatgcagctattgattagcagttattgattcttttaattgttcttgtttctgttctttgtttaacatgcaattcttaatgtcttaagatttcattgaattatcattgaaagtatttttttttggttggttagaatcgaaggtattgaagcacttgatttttgcttttttcttggttgattattcctttgtgggatattctctgattgttttagcttgttttggtgtttgttactgtgttttagatatgatgaaagaaacccattttgttatttgctctcaatttgaagaaatcaggatctgtcatattgagttattgtagattttgttttggaaagcaacaagatcgaattaatatgtatattaaattgtgtgcttaaaataaacgatagttttactcattaaagtcactggctttttgagtttataattttaatctctatgtgaatttagcattgaattgcatgccaaaactgaaatgggtaaattttaaggaacaggacttagttctgatatatggaaagtgctcggtatgtataagatgtagcgttaaattgtctcctggctcagctcgtgaactctttgctttgagttagcatataattaaaattatcatttttttatggacagcaacttgtaatttaaccaggaggcggaattagaca

SEQ ID NO: 56145 - DNA, 322 bp, Populus trichocarpa
  Intron number 2 from transcript POPTR_0015s08180.2 (locus POPTR_0015s08180) derived from phytozome v7.0 (chr-ID scaf fold_15; pos 9440870 to 9441191 reverse strand)
gttggcggacctactaaaggtatcgtctcttcttcttttgtattcaattgctctatcacagtttgatttctatctgggaattctcaattttgattgtttgattgcatgcaatgcaacttaatgttcattttataattaattgaccagacacttttgcaggattcttttgattttttcttttttagttgaaattttgattcttttggtgcaaataatgaaacccagttcttagtttctttgatttttcttcattcaattgagctaagttggaatgtgaaatgttgcaggtactagattcaggccattgtcattgaatattcca

SEQ ID NO: 56146 - DNA, 741 bp, Populus trichocarpa
  Intron number 5 from transcript POPTR_0012s11300.1 (locus POPTR_0012s11300) derived from phytozome v7.0 (chr-ID scaf fold_12; pos 11800794 to 11801534 reverse strand)
gagtaaggtgagcgcccccaccctcccacccattacaaatttcagtttctggttcatggtttttgttttctgactcatagcacagaacaaatgtcattaccgtaatcaaacaatttcagcgttattaagtagctatgattagaggctattgaataatgatttcacatgtttaccgcttaccagttgaagaattcacaatgggcagttttttacctctttggttgcagctgaatggctttgttctgatcatttagaatttcatttggatacatcatgcttacttgatacttgtcagcgttttgaatttttctgccactggagttcaaatagtgaaaattgaaatttcattctgcagatatgctttactcattgtttgatgtgacttggaatcagttactgttcagacaatctgattggttaagattcaattatttaatggcatgatttctttgaagttgctgagctgggcatgtttgtgagctcaagaaaaagaaatacagcatctgtagcatcttcaataattatttgctgataattgttacaccctgcctgtcctgtaaacaccgcacccactgtgcacaaattgtaaaaactcccatttcaaagaaatcatttagaaatttgagaataggttgctttaggaatttcaatcatgtttttgtaatgcaagtttatgggacttgtcaccttgtatttctgatcctaggcaccaggagcctcagaggcatccatcagaaatct

SEQ ID NO: 56147 - DNA, 557 bp, Populus trichocarpa
  Intron number 1 from transcript POPTR_0012s11300.1 (locus POPTR_0012s11300) derived from phytozome v7.0 (chr-ID scaf fold_12; pos 11802359 to 11802915 reverse strand)
gcatttttctcttaataatatacacagagatcgaggtaattacaattgaaaaatcttaatggttaatcaattcatcgatttttcttataatttgcggtttctgtgattaattaatttattttgaaatcgaattacagatcgagttactatgaagagattgatgatttgtgtaaatttttgagttttgatgaattcaatgtaacggatctgttgttttaatttacgttttttttatttttttttaaaaaattatttgttgatcagtgaatgttgtcatggttgttttttaataaaaaaaatatattaataatttaagtgattgattgtggcgattaagaatgagctattttttttaattctttttttaaagaagatatttaatgcttgatcatgttaattgattaattaatgttgagctaaattttgattttttatgatttgtggacggaaataatgggagttatggataggataatgttcttttttaagaaaaaaatattatctgattgttttttactttgtttgttgttgtaatatgtagatcttagctgttgaga

SEQ ID NO: 56148 - DNA, 844 bp, Populus trichocarpa
  Intron number 2 from transcript POPTR_0012s10040.1 (locus POPTR_0012s10040) derived from phytozome v7.0 (chr-ID scaf fold_12; pos 10907366 to 10908209 reverse strand)
tcccaattaataacatcatcgttggtgcttcttaggtaatgtttcgatttcagtatcaattttttgttttttattgatagaatttttaattttttttactgtttatttttttgagagatttgttgatggtgatgcatggcagattgattgttttgattttttaatcatgtaatgcaattgggataattattatgaggtttatacttggttaaatggtgttatttttagaaaataatgattaaatcgagaagttgtagcaattgggatatcttataatcgaatttagttttattgtcgatgaagatttaagacctgtttgtgttttatacataattaacaaattgaaaattattatggtttatgtctgtatggtttgcacaattagattgagtttgctatgatttgcaagtagtggtgtggtttgtttaattgatcctactcttgattttgataatggttttgattattttcgtttgcaatgtactagtggctgtgtcattgcacattgatacttttggggtcactattgaaaattactatagcttatgcatgtatcattattgataatggtttgtttaattgttcttgctcttgatttgataacggctttgattattttctttgctatcatgcaagttgttttggtctttttgttatgcagtatgtatagaaatgcggtcatgcctccatctctataaacttaatattttcttgattttccatgtttattttgcgttctggttttagagaatggtcatgtggttctattaggctttatttaaattgttttggaattgtttttgaacaaaagctgattttactttcttctaaaattgcaggtggt

SEQ ID NO: 56149 - DNA, 400 bp, Populus trichocarpa
  Intron number 3 from transcript POPTR_0012s13790.1 (locus POPTR_0012s13790) derived from phytozome v7.0 (chr-ID scaf fold_12; pos 13790454 to 13790853)
ttcactatcttaaggtatggctcaacttctcatcaattgcctatgctatccatgccattgattattgtgatttgtgttctgtatattatctactcattggctaattcagtcgactcttgatgggtagctgggattctgtaaaaaatgaaccaaaaatcagtatttgaggcattcatgcatatagtcgaattcgtaaagtctaggttctgtattcaagtaataatcacggtgcacattaataagttagttcgttgtttccgtgcaagcagatggggaattagtgagtttaattcgaggtgaaaatgaagtaaaatgaaaattgtttataccaactactggggtttctctcttttgatgttggtgtctgacaagtatatttttcggtcattcttttcagacc

SEQ ID NO: 56150 - DNA, 664 bp, Populus trichocarpa
  Intron number 2 from transcript POPTR_0015s08190.1 (locus POPTR_0015s08190) derived from phytozome v7.0 (chr-ID scaf fold_15; pos 9452087 to 9452750 reverse strand)
atcgtgccaagtatttgcgtgctattgctgctaaggtacagtttaatttgctgttttgctgacatgttttgtcactggcgacttgaaagcttactaatcttggaatctttttatatcttgcagtttgcttagattctttagtttatattgcagtttcttatctgtttgcgtccaattatgtagtgaattgaattgcttaattttctcggtggtggtgtccattcattgttatgaattgctttcctctgttaaagtaagctttacttttgaattttgatcaccatatacgttttataagaatgtttttgtatcatttatgttgttattgttgtgaggaattacaaaggttattttccgtcatttagtattgtttggagtcaaaatcagagagggatgatttctttgattactaaataacaagctcacatttttcatattcaaaatgttcatgacaatttacgggtgtcaaatatggaacccattttctttttaatgaaggagtatgagataaattatttgttattgatgttttttttgtgcaagtctatcaataattttcttaatgttggccattgaacttcccctctgatcttgggtttccatgctgttgtatctttgtttgtgtgcagataacagagaagaagtctgaactaggaaaacttga

SEQ ID NO: 56151 - DNA, 383 bp, Populus trichocarpa
  Intron number 5 from transcript POPTR_0009s01690.1 (locus POPTR_0009s01690) derived from phytozome v7.0 (chr-ID scaf fold_9; pos 2201442 to 2201824)
gaaatcctgctcaaagacaaaaatacttgcccaaggttattttttccctccttttccattccaacatcccttggtctcctcgctttaataaccaattcattcttctgctaacggtttctcagaaatataccttatatttataaatgatcatcatgctacaatcgcaaagatcacactaaagttttcttattaatttatgtgcaaaatgaagttgatgatatcaaatttctatgtcctttcaacaaggtagggatatgaacccggaccatctatttcctatcttaaattgataaatatgattttcgcaattatgggttttccccccaaatactttgtctttactgtctgatattctcttcttatgaagcttattagtggagagc

SEQ ID NO: 56152 - DNA, 768 bp, Populus trichocarpa
  Intron number 1 from transcript POPTR_0004s11340.1 (locus POPTR_0004s11340) derived from phytozome v7.0 (chr-ID scaf fold_4; pos 9941519 to 9942286)
gtttcttctcctcgacttgtcccagctcttacaaggtactttcttttttttaatctccctcaaattctttttcttcaaaacctcaaatttggcatgaacacatgaaaatctcaactgggtatctttcattttaatgatccgtgtatgttttggtgttgatccttttgttttcactgagttttttgatgggttttggacatgcttgataaagtttgcttctttttttttttttttggggggggggggtgttcataaaggattttttttttgcttggggtttgcttatgggatgattgtggaagtctccctctttttctcaatttcagtttttgattgttaaaaaatgttactttgtattaaaagaaagaaccctttctctgattttgataggatcccataaagagcaagcaaggattgttattttcctagaaaaaaagaacgattttttttacagacgatcctcagtttttttattctgaaagttaccgattttagttagtttggtagttaattgaagattctctgtactgatcatgctgtcacaacttgtattgatcaatcaaatgaagtcctttttttttttaatgtctatgggctatgtgcttgtgaatgctgaaatttttgaagaaatttacttgcttatttagctctagtgatatcattttagcgaatctttctgattttatctttattagtgacatgatttttttaacatgattctcctgatttacaggtcaagaagtatttaggtccaccaattgtttaaca

SEQ ID NO: 56153 - DNA, 834 bp, Populus trichocarpa
  Intron number 2 from transcript POPTR_0004s11340.1 (locus POPTR_0004s11340) derived from phytozome v7.0 (chr-ID scaf fold_4; pos 9942594 to 9943427)
tggtatgcttccccccttgccttacctcctttttctgttactcttgaaatttaagtttgtctttcactgtcatagcaataggactagaagttatatgcagcttctaatatattactattttttcatggcatctaatatattattaggtttgttatttaacctgtgagtaataacctgtcaggaatatttgctgctaatgctacataagacattttcattatttccaattctttcttgcctcatgtagatcaggaataagaaaatgtatcagggaaacattgatgcctaaagatgaaaggcatctgtgttgttttactcttggatgttggttcttacaagttgacaatttattgattgttaaaaggaggaaatatattagagctctaaaggatgagctaaatacccaacaagttaccaatgtttgtttttatatgtaacattgttgctaccacttttaagctgacgattctatatttctatcggtgtcttccaccaaggtaatcaaacgggtggtaaaagttgttggaaaaaattaaagcatattagttggtgtgctgcttaatgtggagaatcatccagattcttagttttagctaaagtgtatttttgagtgcaatgcatttatttgattttatttgaatgagcagctcatttgtatggaaaaaccgaaaaagtactgtttcagaatttccaagttgatttgaatggaattggaattgtaattcaatattagttaatattccttctgatggagttctaactatttaattttttctttctttccctccaatatttgtagtatacctcaatatttcaaagagggcaattgcattc

SEQ ID NO: 56154 - DNA, 512 bp, Populus trichocarpa
  Intron number 1 from transcript POPTR_0004s18320.1 (locus POPTR_0004s18320) derived from phytozome v7.0 (chr-ID scaf fold_4; pos 18251466 to 18251977 reverse strand)
tccacttctgcccggatttaatattctcttcagaggtaaaaatatccattagtttttgttgttaatttcccttccttttcttttgaaaaacctaacggtctgtttggtttcctagaatagttgaaggaaaattagaataaagcagtttacatggtttgtgaatgttagtaattgccttattgtggtttctatgtagccaaacagagcgttttcttagttaatctgggattaggagttgcgttttgactgttactgtactcatttagggttacggagacttagattagatttaatttgctcagctaatgcaaaacctaatatttttatggatgctaagcttattgaaattttatttgttgttggaaatcttgtattgttttattatttttactggtgagcagtacagaaaaaaaggaagaattgtatctctttaaattctgtgaaacggaaataattaatattattttttcttttcagttgcagttgtaataactaataaggcgtgttttgtg

SEQ ID NO: 56155 - DNA, 1032 bp, Populus trichocarpa
  Intron number 1 from transcript POPTR_0004s03700.1 (locus POPTR_0004s03700) derived from phytozome v7.0 (chr-ID scaf fold_4; pos 2567489 to 2568520 reverse strand)
tcctctcaccgattttgcctctcttttatctcaaggtttgtcatctatcctttttttctccgtttaaaccatctcaagtttagatgtaatgctgctaaatcctccgtttttcctttcatttcttgaaagtttgtgactctcaagtctttttttttttattaaaaaaagttaattggtaaaactggaaatttgtgtttgcttactatatataacatttcaagcggcaatttttgtttttcgattcttaaaatcttcgagtgtttatgagatctaaaaatctagttttctgtttgtttggttatctgtattgatagatttttcaggcatgaatatcaaaagactctgctttttcgcagaaagtagattgctttcctttttaaacaaatgaaaaagtcatttaactgaagtttatttggtttatgttttttaatgggaaaatttatttaatcagtttttgttttgtgggattcattagagattttaagaatctgcagttagtttaatctatattagcatcaataataagttgattagtgacaaattaagctttctttctttgccttgaactatcaacacatgcactcacctaaataagctaaatcaagaagccaacattaatttcctttttctgggttttttgagatgtcaattcaaatatgttcttctcaatttttgaccctttattgaggttactgtgaaaactgaggctgatatgcatgaaaaatgaggatttagactgtgtcgaatattatgaaagagagtgaagattaaactggtttttcaaaattgagctttagtctcgagagagggattctgggaatttttcttaatcaagaaattgagctaaaacaagttgcaaatttggttctcgaatttttgttcaagcttaggactttatcttatgccagagtggaatggcaactttttctcagtaaatatttttttcaactgcaaacaattgttgtaacatttgatcaggtttgtttctgatattggtctctctgcttttttgtgcatcagctgcagttggtt

SEQ ID NO: 56156 - DNA, 500 bp, Populus trichocarpa
  Intron number 2 from transcript POPTR_0001s09860.2 (locus POPTR_0001s09860) derived from phytozome v7.0 (chr-ID scaf fold_1; pos 7613300 to 7613799 reverse strand)
aaggagcaccttcatctgtttttatcaaagaagctgtgagtttttttttcttttctttcgtttacatggctatgagaattagacaagtttactatgggctcttggttgtcttaaatttggttgtgttgtcttaatgtttgactttattgtcattactttcaatatagtttcaactttttttgcacatttaggagtggcaaatcactcacaggcttagatgtgctagtcaagaagctttgaggaattcgtttggctttgaacacactgaataaatcatatttgctaaactcaaagttaaatggttagagagtttctatcgttgtggaagaaacaaagaatatctacactttcacaggcaacagtagacgatattttagagttggtttgtagttacactctgaattaaccaacctgattttcaaactatctcacctcttttttaaatcaatttgcttacatgaataggtgttaaaggtagagtatccgatctgcgaggaagc

SEQ ID NO: 56157 - DNA, 541 bp, Populus trichocarpa
  Intron number 2 from transcript POPTR_0009s05430.2 (locus POPTR_0009s05430) derived from phytozome v7.0 (chr-ID scaf fold_9; pos 5535661 to 5536201 reverse strand)
aagcctctcgtgaggctattaacgttattgattctgtatgctcctttctcttatttacttcttcttttcattttttgttgcaaaattcaagcaggagatatggaaaatcgagtcatatagctgtgaaaatataggtgcggtgaaatgggtggctatgggagaaagatttgtttttatgctctaagtagaattcattaatggctacccttttaaatcatggctttgagttcttatgccaggtaaaattcattatggctagtccttacggacagggaggactactccaacaactttggaccgaagaaaaaatttatagtatcttaaaaaattcctcctacaagaattctgcttgtcatgggtgggatttttgttttttggtttgctctttctgttatcataatgtctgagaaatgcattcactagattcgataatttagagtgcctttagatgtggtgaatgcacctttcccttgatttacgaggtcaaattatgtactctttcattgagctgctggtatttgcacttttttcttgcagtttt

SEQ ID NO: 56158 - DNA, 683 bp, Populus trichocarpa
  Intron number 1 from transcript POPTR_0001s39000.1 (locus POPTR_0001s39000) derived from phytozome v7.0 (chr-ID scaf fold_1; pos 38234977 to 38235659 reverse strand)
attgagttggaacagcctagggttagccaggaggaggaggaggagtaacacgcattcattcatgacacgagacaaattagttttgtagtccctgatctgcaactgtaaaaattaaagctagtatctttgttttttccttttcttctttagacttgactaaattcactgattctttgctacatcaaaagattttaagtaaacatcaatcagtgatgcagtcaggtacaggatcatcaccattgtttaatgtatttaccctcctttaaaggctctttgagaaatcatctatgtggtctaactgatcaattctttgaagggcatgatcaaattctttccattttaatttgccaattgagaatgaatatacacagttaaaacctgagagagtggaaaaactttctagtttgaaatgctttgtgtcataatagaattctgtgcacctagataacacacacacatgcttgttcttgaagcaccattacgaacgcaggttcacctttctccctcttggacaaattgattgtttaattatatttctgctaaccagagcatattccagaattggactaggagtatttggttcttatttttcactactactttcttagactcgatcattctttcttcaatctgtgctacccatatatatatacaagccttttcttgttcgttcttcgagctag

SEQ ID NO: 56159 - DNA, 755 bp, Populus trichocarpa
  Intron number 1 from transcript POPTR_0012s11830.1 (locus POPTR_0012s11830) derived from phytozome v7.0 (chr-ID scaf fold_12; pos 12206493 to 12207247 reverse strand)
gaacgttacgttttcaagcgccgcaacgacggttagttacttataactacaaaacacgaagttaaacactgtttccttgtcagtgaaatggttagttttgagttttgtgtgtagttagtgtctgaaagaacaaggttttttgggctctattttagttttttctagatgggattttgtcaagtgatgaattggctcccttttccatgtttggtttctgtttttttaaggttttatgttttctgctttttttttgtagtatttgttagaagaatggtaattcttgttggtgtttttggatgagaaatgtaggaatatgtttttagaacaatgtatgtaatcttgcggaaaatcttttccggaatcagcttgtagaagaatttcagccattggatttcttggactcgacaaacttccagtcgatgagtgtttttggaaagtgattttgtgcagtatgtttgattaggtttactcattgaattttggttagttgttaatcaggattacttagattcttgaatttggttatattgaatcttaatcgtaattaagataatttagcttaaaaagagtgttttttatatcaagtatttctttttgcttttaaaccatatttatgcttgtagagatgctgttcttggttgcttttgaaatattattctgttaaattagaaatgttaggatgtgctttgattctgtgttttgagttgctttgtaattattgttacaggaatttacatcatcaatcttgggaagac

SEQ ID NO: 56160 - DNA, 536 bp, Populus trichocarpa
  Intron number 3 from transcript POPTR_0012s01730.1 (locus POPTR_0012s01730) derived from phytozome v7.0 (chr-ID scaf fold_12; pos 1306360 to 1306895 reverse strand)
tggcctggtatgtatcactcctcttatgcatgtccattgaatgcaataatgtcttcacttgttgatcttttctatgcttatttgggttgtgttttaccgatgacagtaaatcacctgcaacttcatatttttgtattgaattctgaaatttgtgatgtgaatagaaatctcccaatatcattttgtgaccctttttattgctgaaattaattttaaaacattgcacaacagagaacctttgggaaaaaaaaaatattaggaacagagaatgccagaggtccaacctgccgcatttagctcccacaacagagttctttttatgctaacttatattttctttttctctcctgcagaaaatgttgccttatattgactatttatcatctataaaaatttttgcccttttcattattttcttgcgatgaatagaaatggctactctgtctctttttgagttgctcactgtatccatggtttgtgtttttgggtatccatctgcaggagaagcacatacactggaagtgaaagaggtttta

SEQ ID NO: 56161 - DNA, 522 bp, Populus trichocarpa
  Intron number 1 from transcript POPTR_0015s09990.1 (locus POPTR_0015s09990) derived from phytozome v7.0 (chr-ID scaf fold_15; pos 11053868 to 11054389 reverse strand)
aagtactctccattctctttctcttgtgtaactttgattagttgttctgtattttatgggcttgattagtctgatcattcactggtgttggactagttgtaaattggagattttttttaagttctgccaactgggatttgtttttggtgaggattttttctgaactgttggtttgtaattgcttagatgatattttgatcacccttgagtttgctcttagcaattcatttagttgagtgctataattcctggaaaataaatagaatagagaacataaagcttataacatccttgttttattctctatttttctctttataattggtgataaactaggataaatatgaaagtgcagtcttgatggtaaccttttggtttcttatgaggtgttaatgccgtgggaggaagacataaattagcttcatttttgtttggttttggaagagacgttaactatagatgtcttgatgagttaattggatgtttaatttattgcacagagagaactgggagtaacctggg

SEQ ID NO: 56162 - DNA, 772 bp, Populus trichocarpa
  Intron number 3 from transcript POPTR_0014s17900.1 (locus POPTR_0014s17900) derived from phytozome v7.0 (chr-ID scaf fold_14; pos 14435852 to 14436623 reverse strand)
cgtggtgtctccgggtttgtcagttcaaagctcaggtaattaatttggtctagcttgctagctagtacgtactatcatgggttgattttttatttatttatttatttattgttttcttgtggctgtggatagaatagaatggattgaagtctatagttttgtgttgggtaaatgggtgtgttttgtatcttgttgatgtcgttctcgtgtcgatgatagactggagaatattaacaaatgtgggtgggtcggtcggtgggtgtgtgagagggagagaaggatagtgttgcgtttcaatttcatgggtagccgtagctgcttgctagtaaagcttttctagtgggttgaaattttgagagaaaggattccatgatagctccttgcttttgcttttaataaagcttttctagttcaagctattaccttcttctgggttttttttttttttaattaattgtttttctaactttaaattatgttatatatatatatatatatatttttttttttttggatcctgacacttaaatatactttaaaaataaaaataatattgttttaaagcaaaaaatcgctttaaaacataaccaccagatcctccaaaacaaaataccattttttgctagcaaatccctttctctttggtttttgggatcgactgcattattcttctagttcgtttctttcttactctgggttaatgtcttctctctctctctctctgtttcttgtcacagaattagcagaaaatccaattggactttcaccacca

SEQ ID NO: 56163 - DNA, 1008 bp, Populus trichocarpa
  Intron number 1 from transcript POPTR_0009s14710.1 (locus POPTR_0009s14710) derived from phytozome v7.0 (chr-ID scaf fold_9; pos 11454910 to 11455917)
gccacaggtttgctaccggcggaggtgatcacaaggtatgttctttctcatctttaatactctgtttggtttccaagagtaaataatagaaaactaaattcttctgattcgtcattatttagggtttcttagcagagaaatccctggttagttgtgcacaattacagaaattaacttaacatgaactcgtaatgatttgttcatgcagtttaaggtaatgccattattagagtttgctatagagtgtagcgtacctttgtttttcaaattgtcataaattttgtactttctaggtttaatttggctgaatgcgcgttcttgcttcctttttcctatagcgttttaattttaggaatttatatttgtgtctttgctaaatgaagtttaacctgtcttactagtagcagtgtgaaaaatcaaattacttagaatgaatttgtgttattttggattaacttttaaggcttcaaccaccaaaagcaatggtaactaaatatctattgtttttgagtcgtctaacttccaagataacatgtcattattcttttggattctggtaattctagagctataaacgcaagttcattgaatagctgttatgtagtacaacacatatgccttcacagtaatatgtaaactttataatgatgaaagagggttggtagtagcagtctgatattctgtgcatcttcttttcatggacttccatgttcttgatttcacagttcccttcatggattttggtaaattgtaatgcaactaattggtttccaacctgaatgcattattgaggaggcattttttagtttaaaatcccgctcaacattgcttcaccttcttcaatgtgcatgaatgttggtacacatgattatgaccaaaggttcctatctaatgtgatcttgtgagtttgttccttttgtctttattactcatcaaattttcagtaatttctacaagtacttaattatgacatctgccttttttcactaatcgcatgcaggttcggat

SEQ ID NO: 56164 - DNA, 871 bp, Populus trichocarpa
  Intron number 2 from transcript POPTR_0004s06470.1 (locus POPTR_0004s06470) derived from phytozome v7.0 (chr-ID scaf fold_4; pos 5240393 to 5241263 reverse strand)
gactttgacaactttcttctggttagtacatgggactttaatttccttctgatttattgttgaggttattcatgctgaatttatctgttaaaaattaatcaaattctaattattagcttctaatttgtcttctatattgtttttttctctcaaaatgtgtgtgtatcttttaacagttgaaattgtttttccttgaggaaaagcccaacaaaaatgcaaactgttatttaaaaggctgtttactgtaaggttcattgagggcttaaaaaatctaggtgctctttcactttcatcatgaaattctcattctgttctgtttgtgtgaattgccattgatcatgatggaatccaaactcctgaacaacttttgtagatgatctctaggctgtgttcatgctgcactaaagcttaagatggcagatagaggtttcaaacctagattcttcagcttgagactgatgtcagtgtcactaaggctaaggatgcagttactttagttaagttgaattttggatccaaattgcaagccaagtgcctgttgatgctttttgtgggacaacataaaaaatgtgtattcttgtgagtttattatatatgagttcttttcatattgttacatgtatcattaacatagctggagaatcatagtgttttttgaactgtgcagcttctttatcttgaaaattaaggattttgtctccgtctatgaattaattcacatgtgattttttgtttcttttccttaagaatgtgtaatgcttttccatgcttctctttagcaatttgtaaaggttgatgtttgaggggttcaagagttaaatttgtcttatgaacagataactggtgaatcagaagcagtgaagaaagcatt

SEQ ID NO: 56165 - DNA, 380 bp, Populus trichocarpa
  Intron number 1 from transcript POPTR_0004s06470.1 (locus POPTR_0004s06470) derived from phytozome v7.0 (chr-ID scaf fold_4; pos 5241829 to 5242208 reverse strand)
tatttccctccccttcattcaactcactataacaggtacgttttttcttagctttaaatttcattgggtttatctgctctgcttttcgtaattttccattccaaaagcaatttttgtttttttttctttgattggatactggaactgttacagattagtttctttttgcttttttgctatgattttttatgtatttgatgcatgctgagataatgtaagacagtgaagggattgataagtattttcaaagtaatttttttctttttgtgataatcaaatataaaaaccatgattgtatgtgatggatgaactatttattaaattgcttctatctaattgtttcaggtatttcaataataatagtaatagtaatagtaata

SEQ ID NO: 56166 - DNA, 563 bp, Populus trichocarpa
  Intron number 4 from transcript POPTR_0001s02880.1 (locus POPTR_0001s02880) derived from phytozome v7.0 (chr-ID scaf fold_1; pos 2276634 to 2277196 reverse strand)
tcagagtcgaatttcaggcaacaatccttttctttgtctgttattgagcctccttttgtcattttcaatgcattcaagcttaatagcatatgttgtctcttgaatgtatcactcggtcctattgcctgtcaccagtttcccttttcattaggattttcagaaatttgagctaccccaagagtaaaatttcgaggtttacttacaaaagattaagctttcgaagtatttgtaattgtgggtcagaaatttgagctatactggccattcaaagtctcttaacattctgcaactctcatctcagtgatgttgcttttcttttctttcttgtgtgtgagcaaggcactttttgtgatttaagattctgttgcaacttgttattgacaatttggtttcttgaatttggaagaaagctgttttgttatggttctgctgaaacataaagaaatagttgatcatatgcttcctagtggacttgcaaattatggaaagatcattttatctcatctgattacatacaaggccagtttgtgatcatctgttgttttgatgtttaattgatccag

SEQ ID NO: 56167 - DNA, 417 bp, Populus trichocarpa
  Intron number 1 from transcript POPTR_0014s14310.1 (locus POPTR_0014s14310) derived from phytozome v7.0 (chr-ID scaf fold_14; pos 10467366 to 10467782 reverse strand)
ctggcaactctgctggcactgtaacagcctactatgtacgtacatgatgattcttcaaaaattcaatatgtatatatatatatatatatatatatatatacacagtcactttcaaaccagaatgattttgaaagcagctccatataaagtagaatgaaatggccatagctaaaagttcacgagcatgattactacccagccctgcttgcacactacttttctttcaggaaacaacacatagacgtccacttttcaaaaaaatgcatgtgactttgtgtcagccacttccagattaatatcaagtttaaattgaattaattgttatttctatttataatttcctttatattcacagtctaactagctagtagtgatttatttgttttttcatgcagttgtcttcgcaaggaccaacgc

SEQ ID NO: 56168 - DNA, 754 bp, Populus trichocarpa
  Intron number 1 from transcript POPTR_0012s12220.2 (locus POPTR_0012s12220) derived from phytozome v7.0 (chr-ID scaf fold_12; pos 12459996 to 12460749 reverse strand)
aactaagctctggtctcgctttgatcctcaaactggtaaatttttaaacattttctcttcttttttttcttcttttgattctgcgatcaatgaattgtttttttttttcaattagttttttgagctttttttttgtaatatggaaggaaaagttgggatttttgagtgattttgtgggattgtagttgaggttgtgtttggttactgagaaaatgatggaaagttgggaatttaagtataacttggttgcttggaaactggggaaagtttagcttagtttactttagttttagttttagttttaattataggaagagaaggtaaataaatggtgtaaggtttgagaatttatggaagtttttatttatgatcttgtggaaatcaagagattggctttatgtctttgattttgcttttgtttttgtaaatgacaaaatttggtttcaaacgatgtaatgcttgtttggtaatagagtctgtgatgggaagtttaaaatttcattctcgtgcttggtgcttaggacaaagtttggtttagttacaaaatgaggtaaagtttgagaatttaagtttatgatagttctgagaatctggattttttttaagagagagagattctgtggagtgcaattgtgatgctgaataacagtttgccactttgctccatgttggtttgtgttctacctatggtgttaaattgataagtttatgtgaaacaggacggtctgtgactttagatccaaagacaaatatt

SEQ ID NO: 56169 - DNA, 346 bp, Populus trichocarpa
  Intron number 2 from transcript POPTR_0012s05110.1 (locus POPTR_0012s05110) derived from phytozome v7.0 (chr-ID scaf fold_12; pos 4598539 to 4598884 reverse strand)
ctcaggagagttgtaagttaattaagctctactaagtgatgttttttccaatgaagaagaaacaacttgaatacatgagatgtttgtagttcatgttcattctttcataatagcacttgtttaagaaaaacctcaagtatacttcgttttacttgtagatcctcacaccatttctctccttgatcgaacataaatcttatatgtctttcaatctagggtttgcactaattttgttttttggacaacttacatgcatgtaaaaaccctaccaaaaatacataaagcatgccacaaattacaaagaacaattaatttgattctattaaatatgttttttcttaggtga

SEQ ID NO: 56170 - DNA, 988 bp, Populus trichocarpa
  Intron number 1 from transcript POPTR_0015s00420.1 (locus POPTR_0015s00420) derived from phytozome v7.0 (chr-ID scaf fold_15; pos 235257 to 236244 reverse strand)
tacagcttgattatcaaaagcaatctcaatttctggtaaggaatgccttttcatgttctttttctatacctgcattgatttgggattctttttcctttttttttgaggtattatttgcttaatttggtgaggaattgttagagataagttattctttgttttaacaatcgattctggaagataatctttgaggattgatgggttttttgagataggaaaaggtgggtttttgttacagttaaagcaggcagtgtgctgtaaagattgaagacggtcatattacgacacatttccaaacggatttgaatttttttttatttaaaattaatttttttatggtttccaatcgatttcacatgctaatatataaaaaaaattaaaataaaaacaaaattattttaatgtatttacaaaaaaaaaaaaaactttcaaaaacatctgttttaggttttctaatatccctaaaatattagaaatgtttcttttgggttcatgcttgttgacagattttcaggttggtaggattatgaagttcttatttgcaactgattatcaactattttggataattggatttaagttgaatggaatacttagattaaaatggcatgtagaatatttcgtttttataaatataccaagacaatgaaggatattgatgggagagaaatggcttattggattgaaattctctcgtgttaaggataatagaatattggctacatcaatggtaatgtttgattaagaaaatatattctaaaaaaataaaattttgaatatttagtatcgtaatatcattcattgtaattaatctagggtagcatgatcaaccgttaccattgatttatctatttatatgagattcatgttttctttttctttgttttagttttgattgctcgctaatttcatgtcaagagttgggctcacctttacattcttctactgttcagaatcaggctagaccaagcatcctgcgttggataca

SEQ ID NO: 56171 - DNA, 262 bp, Populus trichocarpa
  Intron number 1 from transcript POPTR_0004s04530.1 (locus POPTR_0004s04530) derived from phytozome v7.0 (chr-ID scaf fold_4; pos 3283068 to 3283329)
ctagctacctacctacctacctacctttacctcaggtatcaccattttctatctacatgcttttcctgtcgtaaaatccatgttggttttaatccccagatgcgtcttcttctttttatcattcctagctataaggtcatacatgagaaagaaagaaaaaaaaacccattatttttatatatgtgtgtgtgttgttgttttgattttttttggttgtgttgttgaagtgaaggtggtcactgctgattgtggaagctgatca

SEQ ID NO: 56172 - DNA, 398 bp, Populus trichocarpa
  Intron number 3 from transcript POPTR_0004s04530.1 (locus POPTR_0004s04530) derived from phytozome v7.0 (chr-ID scaf fold_4; pos 3283535 to 3283932)
ttgctgcaaaacctgttggtatgtgtgtcctgttctttctcgcttactcactcttcttttactgtctttcttccttctttttttctttttgggcgttcttaacttttttgcttgttgggatattttaatctgcttgtttgttgatgaatgtcttgttataacacgttaagtgctagtaattgatatgcacttttgattttgattatattttttcaacttttattgttgttttttgtttctttaaaaaggttaaagaaaagggatgtgtttatttattgattgtgcccagcttgtaggatattggaatcgattgctttaatttttacttagtaattaagatgaattaatgttttgtttcttgttttcagaaatcaacgattcagcccaagggtttctgt

SEQ ID NO: 56173 - DNA, 144 bp, Populus trichocarpa
  Intron number 1 from transcript POPTR_0009s02810.1 (locus POPTR_0009s02810) derived from phytozome v7.0 (chr-ID scaf fold_9; pos 3565072 to 3565215 reverse strand)
tttccatcctgtaaaaaaaatatattattctcttttgatattttcttttatctcctactacttatttttcttcctcagatctgaaacaaacattcatatttgttggcagtactttgcaattgaaggtgaagagattggaggaag

SEQ ID NO: 56174 - DNA, 611 bp, Populus trichocarpa
  Intron number 1 from transcript POPTR_0004s07620.1 (locus POPTR_0004s07620) derived from phytozome v7.0 (chr-ID scaf fold_4; pos 6254436 to 6255046)
gctaattcacgtaatgaaaacggaaacccttctttctttcagcattttgttttttttttttgtttttcttggtgagttttgtttagttttttatggggtggtctcagttttttaggttatttgatgttgaaatgaatcttaaaaattaagatgaatttagaattttttttctttttattttctgaggttttattttgtggtttttttgttggtatgaaattgaaatggaatctattatttgcttgtgtttttgaagacccttctatgcaagaaaatctgggttcaagctgaatttatttatggaaattgaaatatgtatcagtgtttggtttgatttgatttttgaagtcttttttggctttattttacttcttgtagatcagggttttgctgtttattttttattagttttttgtttctgtttatttcagtttgatgtgttatgtgaaattgcattctattgaaatggataatcaaaatcgaatggaattgattccaattcttgaaaatatttgtaagtagcccttgatttttgttgtttgttcagttgttgaatttgtgtttgtggttttgtaataatacaggccagaacataaggaagcttgtgaagg

SEQ ID NO: 56175 - DNA, 942 bp, Populus trichocarpa
  Intron number 1 from transcript POPTR_0012s03390.1 (locus POPTR_0012s03390) derived from phytozome v7.0 (chr-ID scaf fold_12; pos 2672872 to 2673813)
ccaggcacaccaaggtctgctttcccttttcaccgttttctttgtcatcgtttaggatcttcagttttagttttgaggggtcattgaatttgagtcaaaatttaatcgattttccttcttctttatcatcttttcttgccctgtctaataaccccagcatgcattcaattgcccttgtcgtcagttctttctctgttttttgttcaagttatttaatttcttttttgaactattcattgatttcgagttaaaacatagctgattaagaagagaaaagggtctcgcattataatatatagcagttctctataataggaattctattcaccaactgttgcaaatggtaactggggtgatgatgtcgaaaattgaaattcataaggaggggactataaaaatgtagatgatagatttgataaaacagttaaaacatagctgattaagaagggaaaagggtctcgcattataatatatagcagttctctataataggaattctattcaccaactgttgcaaatggtaactggggtgatgatgtcgaaaattgaaattcataaggaggggactataaaaatgtagatgatatatttgataaaacagctacacatagaagagtttgaaacagctaattcttagacaagattcaagagtaaacaatcaatgcagatcaggtagaaactactcatggtatctagattttaaaagtaacattatcattggagggcaataccagaaaactgggggcctcagcatacttatagctcactcttctaagccattctgataataaatactacaaagagaatgatttttgcttaaagagtgattcaactttgagttgcatttacttaatcaacgtcaagtttttctctgacaatgcgttctttttcttactcttttatgcagatattagagggccttcttaagctgcaggagaacag

SEQ ID NO: 56176 - DNA, 980 bp, Populus trichocarpa
  Intron number 3 from transcript POPTR_0014s03110.1 (locus POPTR_0014s03110) derived from phytozome v7.0 (chr-ID scaf fold_14; pos 2521183 to 2522162 reverse strand)
gttcgtcaaaactgataaagattttcaagagagaggtatggtttttcttaaaaaaagtagaattttatttgaaattgaaggggattaatgttatcttggtgtataaactcaaagacctttactcacagcttatgatccgaagactttcttgaattggtcagcatcccctttagcgtttccactattgttccgaaagatgtttacaccctcatgtaaattgcatctttgttattaatggagagtgtaccttacgcttgttggggacactaatttccattcatttatttgttttatgagattcagaaatggggacgttgtattgatagaaagcacaaagtactatgatttccacacaattcgcatattcccaagaaatgtcttgatgcctccaggctcacgaagcattttacttattcatcataacatcgtgcatctactgatgataaatacattaccgactacagttaatgattcatcagggtatttcaaggtgcttctgtttctttacatggagggcataaagtgatgtatgtttcacataaattagaaaatggttgatttaacaggatgttttacgagacagcattttttttttaaataattgtttagacttctgtaatcgcttcatgcatggaataagttcatgttattgattttgttttttctcactcatttgatttgcaggacgtaaggtgccacctgaatatgattgataaacataattttatcctgtccctatagttttactacatggaccaatcgatatgcatcttttgtcttggccataccatcctgcatggtttagctgcactacttttagtgattggttatatttatttggtcatatcttatcagaaatttataccattttctaagttctgtgctgtgagctttatatgtgaataatgtttagcattcacaattttggtgtttttgacttttcagctcgaacatcaggaacaactgtcacctttgcaata

SEQ ID NO: 56177 - DNA, 436 bp, Populus trichocarpa
  Intron number 1 from transcript POPTR_0012s00990.1 (locus POPTR_0012s00990) derived from phytozome v7.0 (chr-ID scaf fold_12; pos 662649 to 663084 reverse strand)
caagacaccctttcttccttcaaactccttcctcagtaagtctttcaatttcttgtttgcttgtcatctttgttgttgtttttgtgaattgttaggaccctttttgtaattttgatggatttgattgaatcaagaattggttaaagaaacatgctttttattgatcttgatttttggggttttgaaaacgaaactgaataagaatatgctgctccaattttaatgtttgtacaagaattcatttctgtaattgaaattggatggtattgttgaacagttgattgcgttggtgataattgaatgaaagcaattacccaatttcacggcttttgatatatggccaatgagacaatttgggtttcttgcactaattactatggattattgttcttgtcaaacttctcatgattgttttgttggtatttttaatcttaga

SEQ ID NO: 56178 - DNA, 684 bp, Populus trichocarpa
  Intron number 2 from transcript POPTR_0009s13920.1 (locus POPTR_0009s13920) derived from phytozome v7.0 (chr-ID scaf fold_9; pos 10998895 to 10999578 reverse strand)
agtcgtttaatcgtttaatctcttatcttcctaaggtaatttagtgaaatttgtgtatagatcgtgcacttttagtgtttcgactgttgatttaattggttttggtcgatgggaatgttagagtagtggagggttttgattgttgagtagtttggaggggaaagataggatttttatgtcctagcattggcgggttatacgtgtttggtctgtttcgagttcgttttttcgcggtcgagttggaatgactagcgggcatttaggttgtgaagaaaagtcagtactttgatagtgctgtgaggaggatttgcttttcttgatgccaggggaggctgagttgagactacagtggttaatcttatgaatgaactaaatgtagggtttggttattggatggacagttaatcactcaattggaaaagtttgtctgttcggggcaggtcaaagatggacttttatctcttagcattgatgggcagtagcgtgttttgtctgttttcagttctccttgttatgtttatgctgtgagtaatagtgttttggtagtggttgtgtgtgtgtgtgtgtgtgtttatttggtgcttaggtagtgaagtaaagtttgataattggataatggataatgttgtggggagtttgcattttttggaagtttggttgtttaatatttgtcgtgacaggaag

SEQ ID NO: 56179 - DNA, 562 bp, Populus trichocarpa
  Intron number 2 from transcript POPTR_0004s05710.1 (locus POPTR_0004s05710) derived from phytozome v7.0 (chr-ID scaf fold_4; pos 4477541 to 4478102)
atactgaagattcaagtatgcctcgcaaactttgttttagtgttggaactttggagaaaaaattatctctttttttcttattaaattggatgcccatctttataattgatgttttctgcaatgtcactggagaggaatttattatattacagcttttctttaaatgtgtctctgtttttttttttttttccgagtaatttttatagtctttgtaaattgccaatcaaaccatttgtcttcactgcattaatcaattgtaactatggagtatactgcattgaacgattttgttggttcgctcaacacagaccgagtttctggaacagtttttccatttccatgtgtttgcttgtttattaagtgaaggagacttggctggaaatgatgagagctgtttggttgggtagttccagttgatctatctctcttcagtaacatggttgatttaagcgtactagtgcttctctcagtcaatttttatagtcatgttgtgtttcagctgcaagtccatttctaagagtatttgggtttgccttttttttttcagatcaggagactcaac

SEQ ID NO: 56180 - DNA, 444 bp, Populus trichocarpa
  Intron number 3 from transcript POPTR_0012s12410.1 (locus POPTR_0012s12410) derived from phytozome v7.0 (chr-ID scaf fold_12; pos 12746496 to 12746939)
cacactcgcctgggtctgtaaacccgcgcaccggggtctgcagacacacgtgaatgggtagcaaacccgcacgcctagggtctgcagacccgcgtgcctgggtttgttaacccgcacatggggtcaacaaacccccgcatagaagaataaaaaatttgaaaacaaataataataacaattattattattattattattattattattattataattatcatcatcatcatcattaataaatttaaaaatatatatattattactgtcgaagaaaaaccataaattttgtttgaagagattaaaaactatacatagatttgatttgaaaggtaaaatcaattgttattgttattgttattattattattattattattattattaacttgggtttgacatcctcttctagaccaccaaagaaacttggggcaggaaaggggtgtc

SEQ ID NO: 56181 - DNA, 421 bp, Populus trichocarpa
  Intron number 1 from transcript POPTR_0011s05260.1 (locus POPTR_0011s05260) derived from phytozome v7.0 (chr-ID scaf fold_11; pos 5140330 to 5140750)
tgactccttcgttctatctctttcatatcctttacgtatttatacattcatctcgatttcaattttgactgcattcgtattttcattaatttgatcattaagttttgatattgttaataattaggttttattttgttttgtttgctcaaatctacatgatgatcaaacagagaattgaccgacttaatcttcttgtttattgtgataatcttttttgttagtttaagtaaataatcgcattaccattattagttattgttggtaaaaagtctatggttttaaatttatactttctcttttgatgtccggcgagtgacaaatgagaaaatttaaatgtgcgtgatcgtgtgttgtaacaattttagttagttctttgttgaagtaatcacaatttggtggccttaactaagagttactcctc

SEQ ID NO: 56182 - DNA, 960 bp, Populus trichocarpa
  Intron number 2 from transcript POPTR_0015s04300.1 (locus POPTR_0015s04300) derived from phytozome v7.0 (chr-ID scaf fold_15; pos 4362776 to 4363735 reverse strand)
cactgcttggcaaccggtaatgatcaaatcatgtgctctttaattagtatgctatttctgtacagctcatctagatcccatgcatacaagttttacaaatatatgcctggctatgtcaacaagccttgatgatcatccacataccaaatcaaataagatatgaatacccattattgttgtattgcagtacagaactatataaattaatagttggacttgatatatgaaaaattgaagagaattaaacggagattttttttttcttaatctcattccataattaatctcatttatatcatatacatggaccaaaatacctatattcatttctttcataaatgatgataattaatttatttttcacaaattttggtagagagagagagagagagcatgcctttttgtaattaggatattcaagattttacctttttatcagtgtatttaatttcttcgaaaatagtgttttaatttggtcatggtacatttatttttgttcaaaattttttttgtgtttccaaatattattaagaaataaaaagtttatttaagaagaaatatgagagattaattaagattttgaaaatatttatatttatatttgtttttaataagttttgaattttaatatttagaaagtaaattcttaagggaaaaaatgattctttcaagattattaacattctccatatatagtttatattaaagataaaaggtaatgtattttgtaaataaaacttgtaataatttcatgaaatgaaaataacttttgatcccacaaaaaaaaaaaaagcacaaattttctaaagggtaacataaagtaaaattacattttgatactatatatttacttatataattgattgcgtgatccaagtgtcgtgagaggttaaataatgtcgatgaaatatatatcgttgattaggtggtccttgatagctggaagattacccggacgta

SEQ ID NO: 56183 - DNA, 843 bp, Populus trichocarpa
  Intron number 1 from transcript POPTR_0001s04500.1 (locus POPTR_0001s04500) derived from phytozome v7.0 (chr-ID scaf fold_1; pos 3538553 to 3539395 reverse strand)
cagtgcaagcccttatcagaacaagaggtaaccctttttctccataaaaagtttccatttttatgttttttgagatgttttttctttgatttttttttggtgggttctggagctgtttctgggataaatggtgttgatctcgttggtttttttggggttgaaattggggatttgtcataaaaatacttcatttcggtgtttttttgggctattttaagtgtttgaggtcagctctggagaaatggcgtggatctggccgggtttgtgagggttaaagttgggaatctactgttattttgggttcatgtgcggtgtgatctatgtttgaagggatcgtggagggtttaagatagatttggggaggtgattggaacagatctgttaattggttttggtttttgaattttttcttatgatttattcaagttaaggtttcaaattggcgaaaaaagtttggatttttgtttgatgggttttattgattggaagacttcttcatagtttggaaggttaagagaacaggagtatgatgctctttgcttattagattatactgcttaagctgccataattgaaatttggttctttgtggggtattctaaatcggagtggatactttgaacttgtgctttctagatgtattaatgaagttggattctggtgggtgacatggatccattattttggtttgaagtggatgctaagatgttcaagtctaggagtaagtgtgcaatgttgatgcttgttttaggaggattgctttcaaaactgggaacacctagattattctttggggatattgttttcaatggaaatgttttttatgattcaggtaagggcatt

SEQ ID NO: 56184 - DNA, 874 bp, Populus trichocarpa
  Intron number 1 from transcript POPTR_0004s02500.1 (locus POPTR_0004s02500) derived from phytozome v7.0 (chr-ID scaf fold_4; pos 1650039 to 1650912)
tgctcctccgccctctccagtgtcgggatcaaaaggtaaagttgttttttgtttgtctgtcgagattaattagttgaaccaactgtctttatttggtttcaatttagacaattgattatagtagttcttccattcatgatgaatccatttttttttcttaattttgatttgtaaaaaaaaaaaaacaaccgagacagagggacacgtattagaatttttattgtaattttacaaaaacaattgaaaaataatttgaaaaaaaaagccagttaatcttttttaaatttaatacttttttccgattatttatttatttatggcttatttataaaagaaaaaaaccgagacagagggacacgtattagaattagttattctcgctagaaaaaaaatattttttttcttgtaagaagacaaaattttttttttgcttaaaatactttttgttaaatcttttacatatttcagttatgaaaaaccaattagctaatactgtagcaattatttgagtcttcttataaatgaacagattgtgtaacactattcaataaaggattaggtaatagatttattgatgaaacatgattgatggcgataaatgaatgatattttgatttaatttctcatgaaaagttttgattgtatatgttcgagcttttctatctcttacataaaatttatttcatttctagcatttttctttagttttttttttaaatttcaacataaataaataaaatcccaacatgaataaatcttttatggtggtaaataaaaaaaaaaggtataatatatttaaagaaataactaatgattgaaacattttggtttatattcaggaaaagtccgtgtctcaacagttgtaattattgcc

SEQ ID NO: 56185 - DNA, 686 bp, Populus trichocarpa
  Intron number 1 from transcript POPTR_0009s01530.1 (locus POPTR_0009s01530) derived from phytozome v7.0 (chr-ID scaf fold_9; pos 1958326 to 1959011)
gtaatttgtttactgtctaagcttcttgggcaagtgtgtttacagtcttgcttacccttttctttcttgaattggaccttcacctccatcgttatgtctgtatttatatatatctactctttctttttatgtgaaatgatcatgacatgcaagaagcttttttttttttttttatgggattagggttattactagttgacgtgaagtataatcaaaatgatattcgagtaatgttttagttttaaattttgttaattactgtcggggaataatttttaaggttcattttggtgagaactgaaagtggaagaactttcgcactgtttgctctggtgaggaaaggtctacagttcttgtactgtaacacaatatggatgtgaaaaagaaaacaaaaaggaaaaaaaaaacaatgagaaaaaaagtggacacgttcttgtagtatctaagcgatgaagctgaagctccttcagtggattgcttccagttgtgtttagtttcctttcttctagatttatgtgatctttttgactgatcaatatgcttttctttttatttgtatgatctatgtcagcaccgtgtcccttgctgtgtgggtgttttagaagaataatcttatcttccaataaggtggcatatagagcaatgcgtgatgatttaatgtgattgtattgcaggaagtagataga

SEQ ID NO: 56186 - DNA, 627 bp, Populus trichocarpa
  Intron number 1 from transcript POPTR_0012s10710.1 (locus POPTR_0012s10710) derived from phytozome v7.0 (chr-ID scaf fold_12; pos 11413725 to 11414351)
gagagtatttatagagtgggaggtatgctttaccttattagaagagaatatacgtgaacagaagccttgatgcaattcagcatccgcagcttaactgtaatcagaacgagtaggttgccggctgagaaattctcttgttgaatcaaaactgtgtagtagttttttttataagaagaaatttgagaataattaagttttggatatttaagtattatgtgagcaaatgattaaccattataatcaatatttaatgaattttttttcttggaattggatttgtcgaaacacattaatatttatgcactcttttgtcttgtcattagtggagagtcggtgtcaaagcattggctacaaaactattcactaacagcagtatactgaaatgggttaattctcacgtgagaaatttaaaagacaagttgcaattcttgaatatggagagagcccacaaagcagaaagtgatccaatcacatgcaagcagcagggaggccttggataatgcccagagtgaatcttgtccactcgtatccccgctagcttctcgcctgtattaatcttttttaacaattttcaatagcaaaagttgataagagctctttctctaccacctgctattatcaattcct

SEQ ID NO: 56187 - DNA, 888 bp, Populus trichocarpa
  Intron number 2 from transcript POPTR_0001s34360.1 (locus POPTR_0001s34360) derived from phytozome v7.0 (chr-ID scaf fold_1; pos 32507890 to 32508777 reverse strand)
gtcatcaggtttgatttcctatttctcctactttatttttatttccttttctcctaaacatagttcatttgtctattttactagcatatgatgcctgttgcattcttcccagcataaacaggatgttacactagatcctcatgctattctaaatttgtggcctttttgtacaacactcgaatataacaacctcttttccagttgttgtggttcattagacatgtaatttttgccgtggtgcaatttttctttccgtgtcagctaagattaagttatctctttgtcaaaccttattcttgttttcatttgtccttaatttgtcaaactttcttcgataaaattaacctgattttttaattagtgctgccactatcatcatattcatgtaattcgccactggttcattgctcatagctttaggacttcaactgatatttttgggaatacctcacctttcattgttagcatttattacctttttggtgtgaaacttccttgagtagacatcaagtgtgatgtatatccatttccctagttactacttcctctgtttgtttgatttgtcattttatgaagtaagaaaaaacaaagatagttgcaaagatgagatgaagtcctctccattctttcctgtgttgttgtaaatcccattggcacccatcttgcttattcttgatcggaacatccgctagcctcataatttgtattcttgaaaaaccatattgtgctggcaaaggccaaagcttttgtagattaaagttaatgatttgtttgtcatgagtgctgtgcagattttgtgatgagtttcatcctgtaattactagttttgttttgttggtttgatgttttaaaggttgttccgtggggggatttggactcactagcaat

SEQ ID NO: 56188 - DNA, 652 bp, Populus trichocarpa
  Intron number 1 from transcript POPTR_0001s34360.1 (locus POPTR_0001s34360) derived from phytozome v7.0 (chr-ID scaf fold_1; pos 32508901 to 32509552 reverse strand)
agcacatcatttgcactggcaatctttctatcaaagtatctcttctttttcatttaattaaccttgtttaattctactattttattataaataatgggtttccttcgcctctatctcagttcacatataaatggattcttattatttggtcaaatcaaatcctttttttttatatcatcactgtatccttgcttcattgaatttgaaaacattaatgctcatggccttttcacttggactaagcctctgtaggatatttcccatttggcaaactttctaggagccgggtttaacctaacagcttgatgtttgactaaagtaattttggttgctaatgtattaaactactatcctgctctcatgttgggctcttagatgcatctcaatggtcaaccttgtgattgcagagttgcccatgttggcttttcggcattgtctctggtttttgaatcctaggagccttggtttttatagtccaagtgttctccttttggaaattaaaagaaccccatcaacttgtttgccgatagcagtttgaatgtcttttgagatagtgcatatccacaagaagcatttaagcaccagttctgtttaacttactgaaataaatttcaccaactctttttttacttgtgagattttcaggaagttc

SEQ ID NO: 56189 - DNA, 885 bp, Populus trichocarpa
  Intron number 1 from transcript POPTR_0009s01890.2 (locus POPTR_0009s01890) derived from phytozome v7.0 (chr-ID scaf fold_9; pos 2364645 to 2365529)
ttcaagccaagaagcagttggcaaggttaaggtttttgtttttctctttgatctcttctctcataagtttttctttgtttgctatattttggatcaagttcttcattgtaatctttctttaggaagaaataaaaattaaaaatcagtcatcatcatccatgtgtaaacaagctggtctttgattttgattctctatattgataatactgttcttgtcaattctttttagtgtttgattttacttctctttatttgctgtgccttttcttttattgtcatgtaatttggtttagatcatgccattaaaataagtatgtgagaggcacttgtgttttctcctaggacaaatagatttataactaaaagtattagcagatcaaacgcctatgtacacctatattttcggaaacatgaaggggggctgctccaaatttcaacaagccatccacctggggctagctatggtggtatacgaggtggatggggattcgggtagagctgctatgttggtttggagctatagttctctggattgtactgaaaaaggaaaatctaaacgatgaaccatttgttgtggaagctatttaggccatttgttcttatcagttcaacttgcttttcgtatgcatcttttttcgtgttcttttgtgcgcgcgcgcgcgcgtgtccatgcacgtgcgcttgttcatgggtgttaaataacagacttttgtaaacacttggatgaccctgggctgactagctactctgtttacaagaagaaaaatgaactgtcagtttttgtatgatcattcttcatattctccacctcactgctctattatcttgctctctctttttttcttcccaggttgaacactcaatagaaatagttgaagaaactga

SEQ ID NO: 56190 - DNA, 1018 bp, Populus trichocarpa
  Intron number 1 from transcript POPTR_0004s11060.1 (locus POPTR_0004s11060) derived from phytozome v7.0 (chr-ID scaf fold_4; pos 9674924 to 9675941 reverse strand)
caattgagcaggaggtaagtgattttaacctgttttatttgcttattttatggttgctgtttgatttatagacagaggttaatgagtgcccggataaaatatagtaagatgaggggaaacataaaggtccttaaaattgcatttagacagccttcatctgaggtgatgaacttggaagaaaggtggagttaccatcgataaaaatcagctatggaacttagattatgaaacctcagtaatgcctgtaaaattagatttttcctttacgtctgtaaaattttgtgtgtccaatgttgaaggaggttttttctgaatttcttttcctatatatctatagttttcaccttcagctttattttgattccgcatgaattcaagttcttgtgttgtttaatagttccagtgaagacattaaatttaggcagggcatgacaatgtagtgtaatgtaacatcttttagataccaagttcttacaactttgtcattatacattaaacttttcatgtcatgggccttattaagctgaatactctattccacctttctttattgagctacactttcttcaaattctgaacatggtggaccaataagagtgagatttcaacttccctttgttagaacacatctcatgttaggacactccatgtcactatggatttgtactattgcgtatccctgttggagacaacaattatctttagcatttcaattatgcaagtttttgtttgtgcctttgtttaataatttttttttaaggtttttacctagtttagaccttaaaggcacatgtgacactttactccagtgtctcctctgactttgggagttccttctttttttttaaataaaaaaactatacaatgcagaaatatttaggaataccattcttaatcaatatattggaccccctaactctccagccttgttctctttctttcagctgagggctgaatctgtgactgtttctgtgataaaacagattaggatacacaatttcttggagaaaacaaggaa

SEQ ID NO: 56191 - DNA, 543 bp, Populus trichocarpa
  Intron number 1 from transcript POPTR_0009s07710.1 (locus POPTR_0009s07710) derived from phytozome v7.0 (chr-ID scaf fold_9; pos 7138141 to 7138683 reverse strand)
gccaagagggttcgggtgctagagctctctcgcaggcaactccctctctccctctctcatttatctagcctttatgttttcgctaccatttccacccatattttattcttgatatatatatatatataaatttgaagttttgaatgtttatttcatagctctggtgctacctggctagcgtaacagtaaaagtacgaaaatgtttttcctccgctggtatatttcctagcgcagacaatttacgaaaaggaattaacagtatttggagatatggacgtgggaccggatttaagatgaaaaatattaaaaacgaccagaaaccttataaagtatttaggattcttggacatgatccgtttaatcaagacgaaggatagaagattattgtttcgtaaatttgatgatgataggggactgatgggtccaataatactattataatcgacaaatttgtgggtatcaaaattgcaattggatgaataatgttgtctaattataattgtaacaggttgaagcaccgtggtccagattggagtgggctct

SEQ ID NO: 56192 - DNA, 424 bp, Populus trichocarpa
  Intron number 1 from transcript POPTR_0001s09310.1 (locus POPTR_0001s09310) derived from phytozome v7.0 (chr-ID scaf fold_1; pos 7110513 to 7110936 reverse strand)
cagaaagtaaaacggtgcgtttttgtcttcgcccgcttctgctatatggccgtggatactgcattagccaacgatcaaagtagttaagattggtgctacttttgcagtctcggtaccttaaaaaacgttgctggtcatttattttcatgttgtctgaaacctaatcacttcaataactaaaacccatcaatcacaattaatcgaaggttataataactcatgctgtctctctctgtttttttctaacctggttcttacaccacctgtttgtaaaaatgtcgcaatggaacccagtgtgggaaaacacaatcaaatttctgtcttttttgctaatttttcttgcttcgatttcagtttgattatgttcaaaattaggaaaagtgttgtgtttttaatttgttcttttgtgtcaatgtaataatag

SEQ ID NO: 56193 - DNA, 973 bp, Populus trichocarpa
  Intron number 3 from transcript POPTR_0015s06090.1 (locus POPTR_0015s06090) derived from phytozome v7.0 (chr-ID scaf fold_15; pos 6388521 to 6389493 reverse strand)
ttggacaaagctgttgcaaggtgaagttggtaaactctgtttgattattattgttaaagtgattgtttttttaaaatattttttgttaagatgcatcaaaataaagatttaaaaaaaaaatcatttatgagatcaacaccttaaaacaatatcaaaacacaaaataataatttgaaataaataaaaaaataaaaaaaaaatcaaattgattcaaaaacgtttttgaaatgcaaaaacaaataaagaaacttttaaaaaccatagatgtaagaccagcacatgactgacttgaaaaaaggcctcggtcattgagttataagttaactcgcggttaaccgaatcaacttagattaattatttttattaaaataatgtaatatcattaatttttagtaaagaaatttctttgatattgatatgaccaggtttaaactagatttaatagagtcaattagatcactaaaaacctgactgggtcaaccgggtttcactaggtcaatgtttttttgttcaacttgaaactcggtttggattaggcttcatgttatgaattttcatggataacatgctaaaccaggccgggtttaactacgatgacttaaaccgtaacttctaaatgatggtgagtttatcatttccatttttcaaggtgatatctcctgataacaggaaaatgctatcgaaccgattcgtcatgtaataagttcatgctattgagggatccatttgatatatccattcattagtatcttttggctgcttacgttttcctctgatcttcagtttaacttgttcatgagttgcaccccctgaaacctgattctcctcaattttgattgcaaatatatagataaaatgtttccattcatcgtacaatgtcatttctggtgatcagaaaggtaaaatgtagagctcattttctgatttttcataaagaatatttgcttatgccgtttcagggcaattaaagagc

SEQ ID NO: 56194 - DNA, 178 bp, Populus trichocarpa
  Intron number 1 from transcript POPTR_0011s07640.1 (locus POPTR_0011s07640) derived from phytozome v7.0 (chr-ID scaf fold_11; pos 8470370 to 8470547 reverse strand)
gattgttgggtaagtatctttatctttgtttctttatagtttgattaatctgatgtatacaacgcataaatatccgcctgtgtaggaagtagatgttaataatgccatgaaactaacatgtaatcggcttctcttttttcttcgtgtgtgtgtgttacagactggtgttgtcttgcgt

SEQ ID NO: 56195 - DNA, 478 bp, Populus trichocarpa
  Intron number 1 from transcript POPTR_0011s05280.1 (locus POPTR_0011s05280) derived from phytozome v7.0 (chr-ID scaf fold_11; pos 5158966 to 5159443 reverse strand)
taggaaaaggtatgttttatttttcaatttatctatatgttgttattgcttagatattgatgtgttcaatcataggatatgggattttagtggtgattaagtttgtttcttagtttagaataatgctcaaattcatcactgatgctgtgttgaatcggtgcttatggctgttatgtagttcttgcctttctttcagttgattgtttgaattggagaaagtgtgtttcagctagttcgtgctttgctcttattacatgagctgggagatttgtattctcatggataattggtcccactgattgatgtttattttgtactaaattttgaaaatattctcttctattcacttctcgagccttcttggattagtcttgactgcatttgaacctttgctagagttatcagtgtggtggtctttttggagttcgattgcaactgtggaaataacgtcttcattttgctttgtttgcaggtgaag

SEQ ID NO: 56196 - DNA, 589 bp, Populus trichocarpa
  Intron number 2 from transcript POPTR_0011s12370.1 (locus POPTR_0011s12370) derived from phytozome v7.0 (chr-ID scaf fold_11; pos 15095420 to 15096008)
tctgctgtcagaattagtaagtacagggctccgtcctatgcatgatttttagttttgtgtgcgtaatatatctatattcttacttcttaatctccacttcgttgaatatacatcaatctttagaagtaagactcgatcaacattctttctagtgaaaagagcctgtatatcaaatctcaattcgatacatacatgcatacatgcacacacaaggatttatggaggtcaattttcgatcttgacgtagaattaaccatttatacacaacaagctagggacttgcatcgaggagaagaggggaaattgcacccttttatttttcaaaaaaattcattatagccaccatcaattctggtagttcaaatccatcccttttctttcaagacatttgctctcatacttcttgaaaatttctctttaccccctttatatttgaatcctaactccgttcatgtatgtgtgtggatcataagtgatccatgatcaaaaaactatataacgagtattgcatgtttcttcttcttattaaaaattatcaatatatgtcatgttttacaggtcgtcatagtaaccgtgaacgatatactac

SEQ ID NO: 56197 - DNA, 603 bp, Populus trichocarpa
  Intron number 1 from transcript POPTR_0012s11820.1 (locus POPTR_0012s11820) derived from phytozome v7.0 (chr-ID scaf fold_12; pos 12197855 to 12198457 reverse strand)
tccaatccaatttcctgagccatttcccacagtaggtgcacacactctctctccctccctctccctctctttgaatctccatctatgaaatcctccagcttgattctttccttttcttcttctcggcacatattctttctgatatcatgtgtactttcatgcacaaaagaagacatcttgctcctgtcatatcgaattccattttccttcataacagctctgtcttagctaaaacacagcaagagtttgagtgatcattgcagttctaaaacattgagattttaagatgtaatatacttgtcttcttatgcattaatgaacttgaacaccaaaaaatgttggcatatataatttgattagcgtaaactgccttttctgcaagaacccattacagtttttggtttgattgtgtggacagaaacgactgttgaatgatctcatcaacattgattggatagtatttatttatagcatagcatagcatatataattataactatacatattcagttagtattgattggtttggttccacattttcatgttttggagatgtgtgatagctcagattctgatacaagtgagtattcaaactccccagca

SEQ ID NO: 56198 - DNA, 739 bp, Populus trichocarpa
  Intron number 1 from transcript POPTR_0014s03850.1 (locus POPTR_0014s03850) derived from phytozome v7.0 (chr-ID scaf fold_14; pos 3074034 to 3074772)
agtggaaattccaggtccagaagctcattgagaaggtaatttcttttttattagtaattaatttgtagcttttttttcttctaaaaaaattaatcaatgaacctttttggtttgatttacttatttttggtaagactttttcatgtacgcttcacaatttagttgttaaagacccaaaaagtgtggaggtgtgaaaggttcaaaacttcaatgggaaaatcttgcagaaaatcatagttgtatgatcgcccatctggcacccttgtgtttctttttgtgtttcttttatatatatattttattttttaaaattattttaatttactaatattaaaaataaatttaaaaaaataaaaaaattattattttaatatatttttaaataaacaatattttaaaaaacaatcattactaaaataccaatttagctattaaagattttacactttcagtgcacactctattcacacacatgctttcatgttacgttaggatagcctttgaccaaatcttttttctatgcattcattatatatcatataatttctgagtttctgcaattgattttatttcctcaatatgcttgcatgcaaactttattttagtaaatttgcttggcatacatgaatttgcattttgtggggcaaaaaacttatgattataaagcaatgataaatttaaattgatcgactgcaactgcgcaggctataattgattgtcgattcttcacgttatttgc

SEQ ID NO: 56199 - DNA, 727 bp, Populus trichocarpa
  Intron number 2 from transcript POPTR_0014s12370.1 (locus POPTR_0014s12370) derived from phytozome v7.0 (chr-ID scaf fold_14; pos 9130008 to 9130734)
aggtaacttcgtctaaccctaatctccttgtttttagctatggatcgatttatttgattcctctatctacttagtagcaaactagggcatgttttaagtgacagtgttggtaaaatttgtgcgtcgttttgaaactcgaagatctttattatcgtttacttattgaaatagtaactgattatcattattattttttatttctggagttgcttgctggagattagagaatgttgtcttttgaaaagaaaagaaaacaattttttttgtctttgctgtaattctttatatggtttcacgaagcttaaaatgtgttgatgcgtgttcaatttctcaacagtgaacacagtttttataaactattatgttacctctggactactggggaatgtgtaatttgtcaatcacttactttttttttggtggcgaagaaaatacaattttcatggaactcaaaagcatgctttgtaaaatcatctcatttcgttgatgtctttctttacttgcacagtcaagatatttcagttatagtaatcaaccacgctatgctagtatatttttgtatgacaatttccaagggaaacaggtgctgtgatttgtctgttctttgttagaagttgtactcttgatacttatctgaatgggtacccttttttttcaatattatattaaacttgaccataaaatatactaacagttagttttttcctctatcttttgcagtcggccg

SEQ ID NO: 56200 - DNA, 744 bp, Populus trichocarpa
  Intron number 1 from transcript POPTR_0011s12050.1 (locus POPTR_0011s12050) derived from phytozome v7.0 (chr-ID scaf fold_11; pos 14833655 to 14834398)
ttttcccctctccagtcccattaccagacactcaggttcgtgcattttcggtcttaaaaacgcccactaagctcacttagacgaagaacaacgaaacgaatgataaaatgggcaacataattttagaccaatttgctctaacctgtcaatagctactacacgagttacaaaaatatagatggaagagaaatgttttgtctgattaagcttagttgaaatgggttaaaggtgtttgatgaaatgccccaatgaagtatcgtgttacaagttcttaatcaatttttgatgttagcagtagttaatggcgaggtcactgcacctttgttttattccaagcgtaaatgaactaaactgctcgtgtgcttgtttgtatatattgtcaagagaaagagcatgattattaatcttgatgcttgaacttgttaaaacttgatcaaagttagcttttaatctcagtttggcttgttgattttcgttgtcgttcatcaaaaaccggttttggggctacatggggggaattggaggaaattttgtttcgtaatggaacatggggggttgtgaactcaagaatcgcgtcaggtggtagaatcaaatggagcattactactaattaattgtctcctttacgaagtacttttttagcactaattatttacggattgctagtttatgtactacaagagtttgattatgcatctgatggcttatggtttgtgctgcaatttttatgcaatagctttaggg

SEQ ID NO: 56201 - DNA, 588 bp, Populus trichocarpa
  Intron number 1 from transcript POPTR_0009s05510.1 (locus POPTR_0009s05510) derived from phytozome v7.0 (chr-ID scaf fold_9; pos 5602638 to 5603225 reverse strand)
aattttctgttgcagcaacagaataaaaccgataggtatattcaagattactaattttgcttttagcatgccgtatcctcgtataacgtgtcagattttcaatttcaatcagttctactggtggaattttgtcttaatttggtgtacctgttaatctcgggacattattgctcaactgagcaatcccttatttacatacaagatgagaccaagggtacgcgataggttaagtgtttccatctttcagtttgcttttattgttatttttttgctggtcaaagaaagaaagagtcttttttagagggaggtagagaaaaaatagtcatagtgaggatatatagataggaaaaagataaagagaaattcatctttttaattgagctagttttggtttttctttttcttgtctggatgctgttctagtctaattggatgatttgatggaactcattatgcatatgtttctccgtttaacaagaaagacttttttcttatgaatttgactcgttattggagttttacttcgggattgggtaatggtgcgatttgtggatgtttggtacttgcagattgggggcagcagcagca

SEQ ID NO: 56202 - DNA, 474 bp, Populus trichocarpa
  Intron number 1 from transcript POPTR_0014s07090.1 (locus POPTR_0014s07090) derived from phytozome v7.0 (chr-ID scaf fold_14; pos 5350683 to 5351156 reverse strand)
atacttagctagggtttttaattaccgctttataggtaacgctccgaaccatctctcaatgtcttcactagggttctaaagaactggaatttctgtttttttattcattgtatccttgctattgttattgtttctgaaatttatgattaatttgactaagtttggttgctgctatttttctagttttgtttataaatgcaattcagtggctattattggtgctttagcttcacctcactacttttttttttttgaagtttaaattttctgggtttcacttaatttttgcttttgtgaattctagcaagaaaaacacagatttttttgtgttgggaaataaaattacacaaggctccatcaacataattcactgaactactcaatcttttgcattttatagggcaggtttttatattactatctgaaaatttgccacattggtgcaggattaaattgcattttgctaaattaata

SEQ ID NO: 56203 - DNA, 912 bp, Populus trichocarpa
  Intron number 3 from transcript POPTR_0014s04320.1 (locus POPTR_0014s04320) derived from phytozome v7.0 (chr-ID scaf fold_14; pos 3374614 to 3375525 reverse strand)
tactaccaggtgatttactctttttttttccttctaattttacatttgagttattttaattaagttttttgattttttttttaaataaaatgtttaggagtgattggtattttatacacttttgatttggcactgcttatcgtggattgaatttcttctgctttagctcatttatctgcttcatgctttggactctgaattctcagtagttatgaatgttcaatgtttgagttccatttcatgctctttgttcctatgtcgaaacctgacttctggccatgtcacaccgattacgagttataccagcagcagaattttgtgacaacgtctgtttttgtggttgctggttgatgactagccataaaacttgttaacaatgcttgttagagaaaaaagagaaagatttattataaaaggttggatgtgcacatagatgttttcattttgctaaaactctggggggaaatcccttctgcttatgcaaaagtccccctgctcttcatctttgtattctctctctttcattgtcattcccctggcaactggtttgcacacggtgagacatcccatcccaatacgatgttagttggttgacagccttggtttaagaggtgtctgtttgtttgttgaatatcaattggtcttcctctccatcatccatgtaattagctagggattctactagaaatcatctctctgctatgctctatcagatactctaatttttcgtgtattccttttgcaattcatcagaggatgaaggctgaaatatagcttgtacatcacactgttttgggcagccaatgacattatgcaccctaacctcttaggcttctttattttgtccatgatataccaggttataatactatttctgaatttgacaggttctaattgccaatattgaggaat

SEQ ID NO: 56204 - DNA, 712 bp, Populus trichocarpa
  Intron number 1 from transcript POPTR_0004s01830.1 (locus POPTR_0004s01830) derived from phytozome v7.0 (chr-ID scaf fold_4; pos 1103141 to 1103852 reverse strand)
ttactttgctcagtctttccggttgtggattgttggtgaggactcaaatgtttcctctcctgttagtttttttgttaatttatgaagtgaatgttgacagtaagaaagaaagaatttttgataggcgaatgcgtgatggatttcttttcacttcctgctagtttggttaaaggattgttcttctattgaatgatgagaaaatgtgggtttgcattattagaaatgttaatgctagaaaatgaaatttactcagttaagcttagtttagagagattatgccgttttctttatttagagtcttctggttttgatattggggttttgcaatttatgtttttgtccgagagtgtcatgtaaaaattggaactttatattgctattttgggttttgggagatctgttgcgatagtaatttattgtaagtaggtgaatgcatgatgatttttcttttcatttccgtgggagttttgggaggtgggttggtgtttggattagtttcttttcactagttagttggtgctctctgttaaaaatcttcactgtgagtaaaattaaatgagtgatatagctactcttgtaagctcaatgcttaaagctaggtgtgttgtacggataagattgttgcgtttgcttcttgcttatattgtttgtaactggacttgggtttttatctgcagacattgcctgctgtgataattcaattgccgaatct

SEQ ID NO: 56205 - DNA, 612 bp, Populus trichocarpa
  Intron number 1 from transcript POPTR_0014s14220.1 (locus POPTR_0014s14220) derived from phytozome v7.0 (chr-ID scaf fold_14; pos 10410911 to 10411522)
atcccagattcagcctcagtctcagcacctctctggtatttctagggtttattcctccattccttaattgatttctactatttttccttaacttgttttgaagcttctgtttttgcctctttatttaacttctttgtttgtttgtgtgattcgtttgggtgaatataatagcttatttttcacgtgcttaattgagagttggatttttcacttgaatttatttatttatttatgcagaggtgaaaaactaaacgaaatttaaaagaaaaaaaaacatgaaagaggttaattttgtttttgtatgaaaatgcaatgaaattgtttacttactattttttactgcatttgttttggcaatgcaatccttatttatctatccgtgatttttatggttaagatcagattaagttataaaacactgaaaattagaatcataaaacaattcggatcacattatagatgggagtatagcatatctaagatgtcctggccagcatcaagagttgttcttatacctgtgggagagtcttcagagacttactgtgttcatgtttgattagtgcaacttttgtggcaggcgaatcggctccagttacagaagattctgccgga

SEQ ID NO: 56206 - DNA, 344 bp, Populus trichocarpa
  Intron number 2 from transcript POPTR_0012s12320.1 (locus POPTR_0012s12320) derived from phytozome v7.0 (chr-ID scaf fold_12; pos 12535359 to 12535702)
acaaaggtccacagctgtaccaggtgtctttgctagtcactgtgttaatgtctgaagtcattaactattttttttttatctggattatccactgcagactatgtggtagcctagtattctagaagctgtaggcctttgtgactatcatgcacccttctgtgtgcccagagggttgataagtttttgaccttttgttttcttggttgagatttggatggattatgactcacttgtgttgcctttttaaaaatatgttagactcttgcactcaaatcatagttcttctgatgatgttatgttttgtatttgtttggctaggttgatccatcaggttcctacttctc

SEQ ID NO: 56207 - DNA, 370 bp, Populus trichocarpa
  Intron number 1 from transcript POPTR_0012s10220.1 (locus POPTR_0012s10220) derived from phytozome v7.0 (chr-ID scaf fold_12; pos 11038521 to 11038890)
ttgaaattaaatcagtggcaaggttgaagaaacataaaaaattacgtgggttgttttgaggaaaaaagggagagacaaatagtttggagatgatagttcctcccaaggaaaacagggaggtttgttttttagtcttcttcccttaaaagtttcccctgtgcttaaaacataccaagcaagattagcaattaatgcattgattatcgtccttcatttatctccacccaaaagcatcctcaatgtaaaatcttctacagatgcaaatacgtggctccttgttatgagctccactgaagacctgtgattttattttttgtacatcttttatgtgtcaggactgccagcagagacatccattgaaaggtacgtt

SEQ ID NO: 56208 - DNA, 711 bp, Populus trichocarpa
  Intron number 3 from transcript POPTR_0001s15420.3 (locus POPTR_0001s15420) derived from phytozome v7.0 (chr-ID scaf fold_1; pos 12261808 to 12262518)
agacatcttccagatcatccaacgttttctggtaagtttgttccattaatcatgtttctgctcttttaattcaagatttttgctgtaagagaaattttcttactgggtgtccaaagttgatgaaggctctgtataaaattgtattcctctacaaagagatttactgtgtattcttgattacttcttttttttataagaaatggggtcaaagcccaagaagcaaactaacagtcacatgtgacgcagaggtagagccacccaacaacatcctggtacaataaattagaaaaaacctcaggagcatttctttgttgatttttttgataatgtagaaaatggatcgtgatagcaatgattgggcgacatacttgaacaatggaaatctgtggcctaaactgcctgctggctgcagattgtcctagctgtctcactgtttgggacttaaatggtgatgcatggctctcataattattctacctgcataggtggtcattcaggtttagaacagtgcatatatagttagggaaaccatctccattcaaatgattgagctctaggtctcattgtaatgactgctttgattgtaaagaaggggtgttgctcttctacattggtgtgtgcatgtaaaggccaggagacttctgcatgtggttgtttggtattttgatgaatattatgttttcttaccttgatctaataccgatgtagacg

SEQ ID NO: 56209 - DNA, 521 bp, Populus trichocarpa
  Intron number 1 from transcript POPTR_0004s08920.1 (locus POPTR_0004s08920) derived from phytozome v7.0 (chr-ID scaf fold_4; pos 7503390 to 7503910)
tcagctgctgaagtagttcaagactcttctgacaggttagatttcacagtaatttgccactttttttctgtttctatttaaagctgagaacttttgtttgattttgtatgcgcttgattggttggcgaacgaaaagatttcatttttattaattattaagctgcttttgaagatttggtttctgggttctttgtaaaattcatcttttattggctggtttgtgttttttagcgtgaattttcttgtttactttaattcctagtacattatgttctccaaggttagatttggctatttacttttattcctatttcaaaactcattgtggtaatgttactaatgtctagaaaaattagaatgaactttttggtggcatttcattgagtataaaatctaattgaggtactgctagtgttaggctctagttcggttcgagttattttgtattaacatgggaaggttaattagtggtgcagagtttaatgttgctttgaacttaagattgatgtttaatatttagg

SEQ ID NO: 56210 - DNA, 889 bp, Populus trichocarpa
  Intron number 1 from transcript POPTR_0014s05400.1 (locus POPTR_0014s05400) derived from phytozome v7.0 (chr-ID scaf fold_14; pos 4056479 to 4057367 reverse strand)
cacaaagaagtgcacttggtaattcagccactagggtaaatatttgtcttttttcctttttagtttcagctttgtaactttgagacactgcgacttgccttcggagttgaagttggttatttacagcttttgttgtggtttgagttcaaatttagtttgtgcctcgtgtgttttatggttgtttgaagaaacttgttgttttatattgaatgcaatagaacttgaatgtcaatgtaatggtaatgcatgttgcctcaaagtgttgccactttgaggtatattaacgagacctggatcctattgaactcattgtgccaaagtattgcaatgaatgaatttaacctcccgaatgaaaaatttatcttagcttcatttaagatatgctgacctttcttttcggtgcttagcctatataatgtaatgcaaatgacatccttgagttgtagatttctccaggttctggccttctaaaatgaggaggcaagattagtttcagtgatattagaaaagttcacctgtcagaaacgagattgaatccccagtcatactctttctagttataattttcctgttacccttttttttccttctaaaaatcacttctcttcctttccccttcctggctttaaatgaagcaactaattcaaccagttatttgttctttgtcattactacctttgttctgtttgttggctcctgttgttaccttaatgcttctggaaatgtctgtcaataagtaactgtttttaccataaacttacggtacaattgggtaattttctttttatagttgaaatcctgtttgtttcaagcatattagttaaatgtgatgtattggtatttgatctaagttacattctgatgttgactcagctgccaaagtcagatt

SEQ ID NO: 56211 - DNA, 527 bp, Populus trichocarpa
  Intron number 2 from transcript POPTR_0015s10680.1 (locus POPTR_0015s10680) derived from phytozome v7.0 (chr-ID scaf fold_15; pos 11539637 to 11540163)
agtttgctgggattgtagtctggattttgcatcaggttagttagctacctggccaaccttgtttttctgttttgattaatgaaagtgattcaattacctttattgttctgtttattttatattagaaaattggaagaggaaaaatatatgaaggcaatcttgtgtatttgatttgttatacagtttgtaatggttgataatgacattgatcattaacaaacatgtgtagagacagaacaggaatcacgtgtctgattttgagagaatgggatagactaaagttttgtttttcttaattcattgatgtggcctatgatcctgtctgtgcttttatataaggcggtagcattgacaatttcttttctttttagtctgtcaaactatgagaatgagatgtatggtgccttttgtcttttaatcttgtgttctggagatcttgtctgaatgggaattgaaaatgcgattttatggttttttcttttttttggacagtcggaacctccatcacccaggagtacaaccccggg

SEQ ID NO: 56212 - DNA, 620 bp, Populus trichocarpa
  Intron number 2 from transcript POPTR_0009s13220.1 (locus POPTR_0009s13220) derived from phytozome v7.0 (chr-ID scaf fold_9; pos 10574684 to 10575303 reverse strand)
agcattttgttgaattggggaataccctaggtaaatactcaatgcttttgtatattgttcctataattttaatgaaagtaacatgtctttttattaccggatttattaagtctgtgagtagattagacacttatttttgccaagattagtgattggatggatactgtattgattgattttgcaatgtaagagttgcgttatgtttccaagacttaggatgggtttgaattatgcatgttgatccctgtcgatttgagccagacccattttcttatactgttttggaagaaagctactgatagctacaagttctgaatccttcgcttttatttacttgtgtactagttgttgaatgttttgcttgcttgtattatgaagattgaggggttgaacctggcatagttgttcaccttgctcgtctcctttttctaatgaaagcaaaatttgatattatagatcacttaaagggtcttttaaattgtagataaaatgtttgttaattggtttatgatattgaagcatcagatgattacaatcagaatgggttgttagtggtatgtggttgtgtccgtttgatctccatgtggtgattttgattacagatcctgatagacccaaaa

SEQ ID NO: 56213 - DNA, 914 bp, Populus trichocarpa
  Intron number 1 from transcript POPTR_0004s16300.1 (locus POPTR_0004s16300) derived from phytozome v7.0 (chr-ID scaf fold_4; pos 16764080 to 16764993)
cctaattttatctacaaagatattttggaggtaagcttcgttggctatgttgtcatatacactgatgaagttttaaaatttgattgtccttgtgaataaagttatttggtatttgaataatgattaataacatgtatattttcttttcttaaatttagaatatatatatatatatatatatatatatatatatatatatatatatgataggttgtaaaagttctagcattttcaaaacaatctccttttagtagagtttaggaatatgattaaattatttggtgactttaaataaaatattgtaataaataaaagaaaaggctttaaaattttagaacaaaagtgtttgtttttattttgatatgataaatactctgaaagttaaagtatgaatgtttggaaaaaaaaattatgaactttctatttggatggttcaggagatatttataatctttaaactttgtcatttaataaagtggaaggaggggctcgagagtcattttcttctaatgacattaatgagtgataaaaatcttttacacataattaataaaagataaatattttttacatatcattaatgaaataaaaatatggtagttcattaaaaaattatatatatatacactaagatgattattccttttattattttaacataagtatataataaccctctaactaattggatatgacacatagctaattagtccaagaaaggtgggtcagaaccggcccaacccatcttcacttggattcatcttatctcatgatgtttgtatatatatatatatatatcaggacaacaaacctcactgttttacatttatacaattaaaaatacttgaaagtgaaatttaagctcgtttaattgatttttgcaaattataacattttgacattggtggcaggac

SEQ ID NO: 56214 - DNA, 859 bp, Populus trichocarpa
  Intron number 1 from transcript POPTR_0004s03150.1 (locus POPTR_0004s03150) derived from phytozome v7.0 (chr-ID scaf fold_4; pos 2126296 to 2127154 reverse strand)
gttaataaatgttgcattaaactttctctatagatgttggtatatatgatcataaatataattgcgagaccggctaggtctcaatccattgagtcatatataggattaacttgttggaccatcgaactaatcaattaatcgaagtcttttatttttattcaaaacaattttattttaatttaaaaaaaaaaacttacttttaactcgatttgagtttgaccaggtcacaagttaattaatacatttgattaccaagatttagccaggttaatttcaaaattagtttaaattaaaactcattttggattttgctttgagttataagtttatcgaatcaacttgttggaaaaaatcagatttactatttgttgataaaaaaaatcttgaaaaatgaacttacatatgaccgtgcggtttcagttcctttgagtttcactctatactgaatctggtccaaattttttaatgttgatccgatcgatttgtttaaaaaggggtaaaataatgtagaggtgattgaggatcttggcgaatttctctcgtagacttgcattctttctagggaatgcaagaccataccatctccttcattcactattaatattccaagaagaaggttggatatatatctacgagtcattaatatccctttgctaactccttgttttttaacaattttcctttccaagtaattagcagatataacactaatcttgcttcatagttcaagcaagttgtttacaaatccttaaatacatgatgtcttactctcctaatcttcaaaaagcttcaaacagtactaaccactacgaagaagatcaacaacaacaacaacagatcaaaagccagtcccagaaat

SEQ ID NO: 56215 - DNA, 514 bp, Populus trichocarpa
  Intron number 1 from transcript POPTR_0009s02970.1 (locus POPTR_0009s02970) derived from phytozome v7.0 (chr-ID scaf fold_9; pos 3703963 to 3704476)
caaaaactgttcctcttaataaatcatcaaaaactgtatgtttttgcttctccttctttcctgttttcaatttccttgagagtcactacaccatgcattattttgatttagtactgtcaactaactgcattcttcacttcacatttttttttttcacaatcattttcttttatctaaagactagctcttctgcttcaaatttattgaactcatacttgcttcatatactaacattcattgcctagttgaaggtatcccaatcacatcatactcttactatggagtagacgggataatccatagaaagaaagtaattgttttaatgagaaacaacaagcatttgtttactgaaatcatatccctgtcatgtgcttctcaatttaagggtccatttatctacgccctgaaacatacaatgatgcttgttgtgtccagtaccatttatctacggtcagtgtttattacctgtttctgtgtaggttcgttccgataagaaggttccttccaagattga

SEQ ID NO: 56216 - DNA, 862 bp, Populus trichocarpa
  Intron number 2 from transcript POPTR_0001s02700.1 (locus POPTR_0001s02700) derived from phytozome v7.0 (chr-ID scaf fold_1; pos 2125288 to 2126149)
agctgttttcattggggccgcagtttttgtgataggtaataactagtcagctaattccttgatgaaagttcttttcgaaatttcctctagcttagtgaagaaacaacttcctaagagcattttctcaaaacaatggcttctgtcttctagtatgttgttcatggaaatagtttaaagttcattccatgtcacaaaagatttttaaaaaaaattaacctattttcacgtttagtggcacttgatttagcctgttgataatcttaagatttatctgaagagcatctgatcataatttaaatttttgacctctagtccctattttattgtgttgattatgttgttctttcagtataacagcactctaatcgtgtttacatgtgctcagattcccttttaaggagaacatccaaatgccaaataatttatagcttccactttgggaagaatttcttatggaacatgtaaaagattctaataaaataatgtttgttgtgttattcatttgttataatccctactgattaattgatcttatcttgctaaatttctttacttgcaaatatggatctatttcatttccattacatgcatcaaaggcaaaaaaataaaaaaaaacaaaagagcttgtatataaatttatatcttttatattcgttttatttttcacattgttttgttctatgatccaagacccatgaaacaccattatactttttgtggaaaacatctaatccgatgcctaaataactcattacaaaagagaaaaaatgtaattgctcaacaaatagttcacgattttgggtatatcattgtataaaaacatcttttcgtgtttaatttgacaggaactgcaacaacatac

SEQ ID NO: 56217 - DNA, 765 bp, Populus trichocarpa
  Intron number 1 from transcript POPTR_0004s11090.1 (locus POPTR_0004s11090) derived from phytozome v7.0 (chr-ID scaf fold_4; pos 9688656 to 9689420 reverse strand)
ctacatttgaaaccggcgcacgaagctcgtaattggtaataagaattttgaattctcatttcgcttcttttttgtgtctaaaatcttttacttttatttttatttagctgcatacaatttttgtttgttatttgataaaacagatctctcttatgtttgtctttttatcaatttcgtgctaaatagatcttaattaggcagatttgatgtttaatagaaagagatattttttctcattatttgtttttctttattcaattattctacttaagttgtttaaattattatgcgttataggtcttgattgtgtttattgtcgtggttaatttgctttggatttttttaaaggttcctggatcaaataattcattaagtgctgtgcttattttatgattcttctctctttgttcatgcgagaagagcaaagaaagtaaataaaatttgacaattataatgtaatttagcacgattttatagaatcatttataaatgttgcacgtgcgtataagagttcggaatgattaggatactttgatggtatgatgaaggaatgtttggaaatcataacaataggttagatttggagttgctgtatttggttagtattgtagtagcaagcatcttgttaagtagttttcaatttttctaagatttgctctctccggatttggttaaaagtttgtatgcgtggaaggagcatctattaatgtgagtaagatgtttattcatgatgacaactgttataccgttacggttggttcaggt

SEQ ID NO: 56218 - DNA, 978 bp, Populus trichocarpa
  Intron number 1 from transcript POPTR_0001s15500.1 (locus POPTR_0001s15500) derived from phytozome v7.0 (chr-ID scaf fold_1; pos 12330840 to 12331817)
ctcgtcaacctaactacagcagccgagctgttcaagtgcgtgaaactctttctcaattactttataaaaccctgaagcccttcctagctagtgtcctactactattttttagggttttaggatcattattgcttcacaaactcactgtaacagatagagttaacctaagctctttttttttatggttttgttgtttgaagcgtcattgaatttaagtaagcttttttattcaagtagtagttgcttgtgattatgtatttatctgcttatagttagtccaatggacctcattccacgttaattttcaattatacagcggattaaggtattttcatttttgtcgtagagtgtgggatcgagaaactagtgaacggaaatttaggttttgaaccatcattgacaactgaactttcctcggtagaaactagtgaacggaaatttaggttttgaaccatcaatttatttattttagatgtacccataatacgatgaggaagaagtgaaatttgtagtacaacgaggattgttagtggtttgctacttcatacattgtgtctctagttgtttttttgcttaacgggcatgcttcttgaaactggatttgatagcaattgtatgagctgctggctgtttgttttgactaagctagtaaggttaagacccgttattatttcaaaaggatgttttgcggggaccaattttgcttgcacgagtatgctatgaattgacctaattggattttagatctaaatcatggtgtatagaatgtttggcgttaaagttctcttcttgtccaattgtcaccagtccatgcttggggatttaagtatttgtggtttggttttttgcacttcagaatagggatatgacacacctcttgctgtatattcatcagttgcttggtcaatgagaaattttatttttgtgctgattcttatcacaggaagcattggaacacttggcatctattgatttaat

SEQ ID NO: 56219 - DNA, 716 bp, Populus trichocarpa
  Intron number 2 from transcript POPTR_0004s21490.1 (locus POPTR_0004s21490) derived from phytozome v7.0 (chr-ID scaf fold_4; pos 20597862 to 20598577)
agctagggatctcagttgaagttaaagagcaagtcagtcctcctcctcctcctcctcttctatttcttttctttgcctttaatttcacttttggttccttttgacttggtgtttcttgagaattctggtttaattagtcagttagtgcccattttttgtgactacagttggggaaagatttggcaaaacacggtgacggtttctttcggtcttttcccacctatattattatgtaagaatgattgcaaatcgagcattggcattgaatcatgcattgacagatgaaggggacttgggttaacaactgattttgttcagatctcctatcaaacgcaattatcttgatgatttattacctgcttgattgttgcaatgttcttacgattggcataccatacatgttgattgcctgaaatattctgtagtcggataaatggtccgtgccaattaatggtactgtttcgatgtatcgaaagttttctggtgacttgtctgactgaagattatgttgccaaacattataagagcgttcggtttgcacatactaataaagatgatgtggttcatgagtagaaacttttcgcgtaaaatggtctgcatcattgattattgagaaaataaattttgaactgttagttgcgattccaattttatcatatatccagttttacatttgtggttgtgcaattgatatgattcaggttgagctaacacgg

SEQ ID NO: 56220 - DNA, 571 bp, Populus trichocarpa
  Intron number 1 from transcript POPTR_0004s14290.1 (locus POPTR_0004s14290) derived from phytozome v7.0 (chr-ID scaf fold_4; pos 14750310 to 14750880 reverse strand)
gcttccccaaacccttgtaccaggtactcctgatcaatctttcttccaaagttttttgcttttagatttctgcgagattttgttatctggggtcttctgatttcacgcaactatggattggaagatgagtttccttatgaataggaaggtgatttttttcttaagaaaaaataaaatcgtgtatgatccatttcgatttcactgttgaatttgtgttgatggtaaacatgctcctgatctgtaagtagtttgtagaatttgaggcaccccttaaagccattattgatttgttgaattaaaatgattgttacatcaagatgattctgtagaagcaaactggatctaatctaccatgaattcttaagtcttgtgattttgttatggaaatgaagacaatccaagacttgaagaactgtaattgattattgatctaaattctaaacagaattgtttacaggactaggtaggatcaagaggagactttgtttatttcagtatcaaatcattctttcctaatgctattttgcttttcttagatcaagtatacaccacctggagctccagaattggc

SEQ ID NO: 56221 - DNA, 750 bp, Populus trichocarpa
  Intron number 2 from transcript POPTR_0012s02700.1 (locus POPTR_0012s02700) derived from phytozome v7.0 (chr-ID scaf fold_12; pos 2220908 to 2221657)
gttttctgtccgtaagaacaacacgtacttacatttgttattgtctgtttgattgtagattcttatactatatttccttcatgttacattcaagttattgttttaggtagctgttaatggcgttcgggctctgttttttgcctggtagggaaaagaaaattgaaattcacttcagctcataaaaaaatcaaggcaaatgtatctgtggaactaaggagagtgcttaatgaatggactttcaaagaaaattatggattctgtatgtaatactctaaatttttaggttttttgtaatttgtagaaggtaataatttgatgtgtgacaaaaatgttttcttctagagtatgggttagttggagtatggatcttgttcaactgtttgatggtgaattttttagtcactgtaatgttcatgtttccaagggtttttagttaactgtgtttatacacggtttcttttcttgtgcctgtgtgagaactggaattttgtctctgaattgaaagagtaataatctattgtaggcaatcgtatagcaatatatttaatgtacagagatatatgtttgtgatttgggacaaagcgagcttgaatcttttctttcatggacaatcaatttttaatgcttaattatgtcattatttgaggaaataaacctttttgtttttccccataattttttcggcaggtaccaatccttccaggtaatgcttatgccatcaacatgctctgtctgcagagggtgcagttg

SEQ ID NO: 56222 - DNA, 802 bp, Populus trichocarpa
  Intron number 5 from transcript POPTR_0015s08830.1 (locus POPTR_0015s08830) derived from phytozome v7.0 (chr-ID scaf fold_15; pos 10183254 to 10184055 reverse strand)
atttcatataacattgggcaggtgagttgcataaacgattctgttatgcaaatttttccatagaaagaatgtcttggaatgatgataaagccatgtgtgctatagatagttatttattttgtcatttgacattagttttgtaattaacttatcttctatatcattattgtttttttacttgactgtattaatagtaatattacagcctgttttaagttttgagaacagttacaggtttgaagtgcctgacaattgacacgtaggaagtttttttttttttttttttttaagtttcaagtgaaggaaatgactccatttggtgaataaaaacctacaacctcttgggggggaaatgtatacctttccccttaattgtagaatgtggttatggacaagttttggcatatatgataattgtataaagtctgaattctctttcaaccgatacttttgctgctagtataattatcgtctttaaacctgaaattggagccttttacctttgagtagccctcttcatgcacaactttgatcagacaatttaattgcatgtttagtgaatatttttcaattctcaaggggaaattcaataactatagattgtgtgatgccttttctagtaatacctgctagtcatgaactctagggacatgtttttagatatcacggatcgtgtcatgtttgttggtaagcaattttgattttttgagttgattgtctggtattattatgttaggtaacttactgactaattgacatgaatgtggtggctgtctttcttgtatgcagatttcatacctga

SEQ ID NO: 56223 - DNA, 464 bp, Populus trichocarpa
  Intron number 1 from transcript POPTR_0014s01800.1 (locus POPTR_0014s01800) derived from phytozome v7.0 (chr-ID scaf fold_14; pos 1678952 to 1679415 reverse strand)
catcccaagaactacggtcctggatcccgaacctggtattttatggaactcagcttctctttgttttatttatttatttatttatttaccgtcatcttgatttgaagattcccatgttgtttttgtttaatgtcctgtcttccttttgaattggtgttcgatgtctgtatgctatctattttcgttgcttagttttcaaatttgaaagaacaactcaagaaatccatatttgcttaagtttttgcttaggtttgatgtttttcttgattgccttgtttgtttaggtccttgtaaaatgatggtgatcccttttaggtcaagatattgtattttttttcttttgattatctagttgctatgtggactaaatctctttcctgagtgaatttcacgtcctaactttatttagttaaggattttgatttgaaatctccttgttggcagccgagtgtgtggaaaccctc

SEQ ID NO: 56224 - DNA, 538 bp, Populus trichocarpa
  Intron number 2 from transcript POPTR_0014s08700.2 (locus POPTR_0014s08700) derived from phytozome v7.0 (chr-ID scaf fold_14; pos 6456087 to 6456624 reverse strand)
cagctatattaaaagagaaagaggtacatgatcaatctttgttttgttttttttttttttttgctgcagaaattcagtaattttttggctagttttttattcctgcttatcattatgtctcaaacatcaaaattgagaaataagtaccgatgaatgacagaaaaacctttagctttcaggtgcaaagtgcactctgatagttaaatgccatgtcctttttatctttgctgtacatgcacattctatcgaaggaaataatatttactggcaagagacaacatgtccagaattgatatcaaatgcatttcattttgcagttatcgaccaccatgttctatttgctcattttagggtttcgttattaaattcatgtttttcatgattgtcttggagtctagagtatatttttggcttattaactctcaattaacattaactagtttccattagttctatgttcaagggcctttgacaaattaaatctgttgctcttctatcccaatgttacaggatcagatttctagattgaaccaagaaa

SEQ ID NO: 56225 - DNA, 436 bp, Populus trichocarpa
  Intron number 3 from transcript POPTR_0009s15750.1 (locus POPTR_0009s15750) derived from phytozome v7.0 (chr-ID scaf fold_9; pos 12113496 to 12113931 reverse strand)
ctaaggtttgtgaagatataactattcagaagttggtgacttgttatttatctatgacttttattgtttaaatgttacacatgtgggctttgagttatttgatttagacatgtgtggtaagtagcctctgaatgtatttgtctgcagttgctttgaatcactaggacctttaccttccctttatgaaaatatggatagcttagttccttcatttgaagtgtaaatatcatagatgagagcaaactataaaaaaacagaatattttacctgaacataagaacactggaatgacggaatattttgtctatatgtctatgtttgtgttgagattctgtgtaaatggtttgggagttgaagaatctgcttaatctgggttttgttatgcttgactttttatttagggacaagattgctttatttgcaaggaaagtggcca

SEQ ID NO: 56226 - DNA, 304 bp, Populus trichocarpa
  Intron number 1 from transcript POPTR_0015s08900.1 (locus POPTR_0015s08900) derived from phytozome v7.0 (chr-ID scaf fold_15; pos 10257558 to 10257861 reverse strand)
tttttaatatctacttcaatatctataacaagcaggttcgtcttttcctttcttctctctctctatttttttaaaattatattggaataaattatgaactggaaatgtatagatcgtttttcaaatttagtaatatattaagttttttctttaattttgattcaaattaactatactgattattcagaaaaagaaaatgaaaatattattagtttttcttatgttaatgtagattgataaagaggattttgttatgctacttttcacaggttttgaaggtattcccgaatccagtaactgttac

SEQ ID NO: 56227 - DNA, 229 bp, Populus trichocarpa
  Intron number 1 from transcript POPTR_0011s12390.1 (locus POPTR_0011s12390) derived from phytozome v7.0 (chr-ID scaf fold_11; pos 15114591 to 15114819)
tcttcaagaaagcaactagggctgtttctttgagggtactgatgaatgagaatttaagaattctctctttccattaattttagtgtcttttttctttccatataaatggcttgattattaaatgatggtttctttgcatgttttcttcttcttcttcttcttctttttatccatttcttgcgttatatattaaggcagtcttagttttgattaaacgtacagtttgagg

SEQ ID NO: 56228 - DNA, 699 bp, Populus trichocarpa
  Intron number 1 from transcript POPTR_0011s15050.1 (locus POPTR_0011s15050) derived from phytozome v7.0 (chr-ID scaf fold_11; pos 17235199 to 17235897)
tttcaaggtagacaaatatcaacaacattaacccttttctcctttttttttttttttttactataattctcttcagatctccatttctctgtaaacacaagcacatggcttctatctctttccatcacgactcacgagctacctagattggcatctctattttttaaaaaacaaaaattctaataaataataataataataataaattggatgaaatatacccaattggggtgtaagaataactaccttcacttttttttttctttcctttttcttgctattttcaatggaagaaaaattgaaaatcccaagagggatatgaacaagatcgattcttttttattttttattttttgtaatttttcattatttgtttttactattaaatcaagcaactctctttcctttgtttttgttttttctctctctctctacacttattaaatggattagatagttggtatgggaagtggagaagaagccagtgggcctaaaggtatgaaagtgagtgagagagagcatcatcttcttctttattaaatttaaatcaaggtaagattttttttaaaaaaaagatgtattttttatcattggatcattagaaatctttgatttttattttttgttttttatcattggaaagtatactacttgtggtaataaaatatgaaagcatgatgtaacaggaagctagcagag

SEQ ID NO: 56229 - DNA, 903 bp, Populus trichocarpa
  Intron number 1 from transcript POPTR_0015s05230.1 (locus POPTR_0015s05230) derived from phytozome v7.0 (chr-ID scaf fold_15; pos 5598992 to 5599894 reverse strand)
gcggtattgttattatctctacactaattgtttgtttttttttttcagtcaagagaagatctactgtggatttgtttgctcttctcttgctactgattagtaaatgatgtgtgtgatgtagtagtaggaggaggacaattgtaatctggtttttgtttcttttttttatttctttgttgtttgttactggcatgttcttcttcatggaaagttgctgtgggttttgttcttacaaatgatttgttgaaggccgaagctttttccgtggaatcaaatcaattgttattgttctcaatattgtcatcttgatggtccatttaggatcttctgtgattagttgtttgcgctcttgtgatgggtttatgcataggacgccatttggattaggtagttgtgcaggactgactgagtcctgttttctctgagatgggaaattttaaagaaatggattgtgtgagattctcacttttaaattcttaattaattgtcttaagttgaacttccatcaaataaagcgttgcgtcaattattgtgctttgctctggcctgtgtgtgtggaacttatcaaacgatagtggacgaaatcacttggatgcaataagaggatgatttttgtggggtaaacacgtccaagttaatcagctatcttgtatgctgtgatttaaaactatctgatttataaatagatggcactgtgctgtggaattttgatgatcgagaagtatttatttcgtgtcagattgggaattcttttaatctgtgtgtgatgtcttgcagttcatctgctccttcgcagtacaattgtgaaattaacattacagccttttaaaattgtaaaaagcttctataatatactattattgttcaacaggttgcatcactaccaaagagttggggacagtg

SEQ ID NO: 56230 - DNA, 854 bp, Populus trichocarpa
  Intron number 3 from transcript POPTR_0009s14020.1 (locus POPTR_0009s14020) derived from phytozome v7.0 (chr-ID scaf fold_9; pos 11065500 to 11066353 reverse strand)
aagataacatcttagagaagctccaaaaggtaagttgaacctttttttaatctctattttttttatttgacttttaagagcttagattatgtgtgtgaaacataatttgagtgtaagttgtatgtttttctctttattttaatttttgtcttcctttaatcttctcagagcagtatagattaatgaaaactcacacatgcatgtttcttttactaccatctattttacttgaattatgtgtccagttggtgtttagaatcttccataaagactagatttttgttctttgaggtgccaaatagagcaatcatgactgttgcctgcaacatatagtgtgtgtgcaacatcagcataagtagtgatttgagcaaagtatttgaagcatctcagcaaactttgagttagctatgttcttggatgatataagggaaggctgattgtgtggatgaatatgatataagggaaggctgattgtgttgactgggataagattgcagagtgacccatgggtagttattctccctatttgggaattccttttcctgtgtctccacctcacatggaaactaattctgtcggtacccgtcatttttggagaataagtgtgaggaatgtctgtaatactgtgatgatagaaccttttgtgtcatggaaactatggggagcctatttgcttcatttctatgcaacaaataaatattttcctgatttatctgtctctataggatccaagaaaatgatatcatacttccttgctgttctttaatttttcttcatgcatttgtttcctggtttgtgtttctgacatgcttatctacttgtacgcaggctgcagaaaaccaaaggcaaaaggc

SEQ ID NO: 56231 - DNA, 769 bp, Populus trichocarpa
  Intron number 1 from transcript POPTR_0011s15920.1 (locus POPTR_0011s15920) derived from phytozome v7.0 (chr-ID scaf fold_11; pos 17930076 to 17930844 reverse strand)
ccaagagggctcctgtaaagagccagacttttcaggtttgccgttttcttttggttttttttctgatattatttttcagcagaagtttcgatttttgagaccctgttgtttgtgcattgtttagcttatttttggggttttatgttcgtatttcttgttttacgagatgggattttgttgttttatgtaatggatgagtggaaaatgaaacccagatttggttttgctgaaatctgggttttttaggtttattttttctgttttatttgatgggtttttcgttttttggatgatgggtggattggaatggtagttgtagtgaatttttatatttttggtgctggaattttggaatctaagagtaggataagtaatatgagaagcctttttttttgttttccaatgtgttaagtaattaaatgtttgaagagacaaaaggatgggttttcgtgaagaaaatgaaataatagcagtactatcgtgtcaaattaattaactaattttctggatttttgtatttagctaagaatgataggtgtgttgtttcagttaatgaatctctgtaaaactgaaagagggtttcttttgcttctctggtcttatcttgttcttgatgcaatatggttgtgtttggagctggcttttaaagatcttacttttggatttggcgatttgtgttcagaccagaactgttgatactttttaaactaatgcaagcagtatttggatatataaagacattttgctgaagaaactgtagattgcaaaa

SEQ ID NO: 56232 - DNA, 467 bp, Populus trichocarpa
  Intron number 2 from transcript POPTR_0012s01680.5 (locus POPTR_0012s01680) derived from phytozome v7.0 (chr-ID scaf fold_12; pos 1265996 to 1266462 reverse strand)
gtggatttgtttgtagagggtggaaaaggttggttcttgtttctctatatttgctgttgtatctatctatggtgagagttctagggacataggcctgtttacactcgctactgcaattataaataggattgattggccagctgttaacctttgggtggctgaagaaatgatatgcaattgctatagtattatgatactttgagtttcttgtatgtgcttatgcatttcaatctctctattgcaggacttgtgttctttttcttcccattaaagtttgaattttcactgtatttattagctccaatttcttattattggaggtcgcctagagtaatcagtttctcgcttgcaaggttgaaattgtcgttgtggtataagctgtctaatgtaattctacccagccgcgtttaatttgggttatgttttttgcagtgaagaaggggaattgagctgtgggtattcaagtt

SEQ ID NO: 56233 - DNA, 733 bp, Populus trichocarpa
  Intron number 1 from transcript POPTR_0012s10240.1 (locus POPTR_0012s10240) derived from phytozome v7.0 (chr-ID scaf fold_12; pos 11061231 to 11061963 reverse strand)
aattagtaagtattttgttatgaatttcatatgaaaaatgatgataatgaatttactaatgattaaaaatgaagtacatgaaaactaaaaaaattaggaacataataaataaattaaaaaaaaacatttaatatttatgtttaatccacttgtacaaaacaacaagtcagcaagaacaacattaatttatgacaatccttttaaactatgattttagatgttatgtaccatatatcagcataaaattgttgccaagaacttttctagtccttggaagatttagaaatagataaataaaagtttgttgtatatattaagaaatatatttttaatgaaattaaaaataaaatcattatgaaacagttttaaaatataaaatttcaaagagaataattataacgtaagtttttttattttaaaagtatttttaaattaattttgcttgacttgaattgatatatgtatttcaaattaatttctatatataacacatgtatatataatatataatatcaaatatttgttagtaattttctcctcatttaaaaaatcatgtttgcgccctgacagtaacggctaaccaaagttttcttaagaaaccgaagaagagaataatggtaatgaaattaaagactaaccaaaatgaagtggatagaaatcttcaacatttccctttgtgctccattgttttatgaaacaaaaccaaatagagctcactagtttttgtgctagg

SEQ ID NO: 56234 - DNA, 1000 bp, Populus trichocarpa
  Intron number 2 from transcript POPTR_0009s12520.1 (locus POPTR_0009s12520) derived from phytozome v7.0 (chr-ID scaf fold_9; pos 10212107 to 10213106)
actccgaaggaaagagagaatatccagtttttgtaagattattcatttattactactgtcaaattgtgcatctttgaaaattatacacacacctgcaacaattatggaaaaattgatgcattcaatttttttaggcagttcttgacgcaacatatagcaaaaaggaaaaaggaagcaccacgttcacaaatcctaaacttatatctaattatagagaattctgatctgataaactccaaaatatcaatgattcttaactgttttgaaaaataaatagtagctaaaccgatttaattaataaaacccaaatcaaataaaattttgatatccaatcaagaaaggaatatgaaaataactaggaaaataaagaaaattccgaaataacaactttcgggactaattcgagaatgatcccaacctggactggctctatctgatcaaccccgttgggaacagggcctgtcgaaagtgatagttaaatttctctgacgatgatcatatcaaaagttatgcctgtttttttcagtttaactcatccaaacttctgcttgggcttagaactgtcgaattggtcataatcatatctgctattagacgtttcacgtcattttttgctttcaaattttaaatgacagtggaacattttagtgtataattgttaattcaacctggtattagttcgagttgaattcaacctactatggatatatactggttctaggattttggtgatgatgcgcttacttgggatattcttctggaaattgcgctcaattctaacttaccaaaactggcaaactccttgtccactagagtttttttttgtcttaaaatcaatgttgctactctttttgttcgtgatgctttctgagtttcttgagagatactactgaatttggaagaaaagcttataatgcttactggtgtaattcctgtgaaatttaattgcccaaattaactgagaatcttattacttttgtctaggaagagtgaagaaaaa

SEQ ID NO: 56235 - DNA, 633 bp, Populus trichocarpa
  Intron number 1 from transcript POPTR_0009s04550.1 (locus POPTR_0009s04550) derived from phytozome v7.0 (chr-ID scaf fold_9; pos 4879203 to 4879835)
ttcctgttgttgctggttgtgtcattgctagtggggtgagaacttttatcttctttcttatatttttgttgttctggtgtatggtcgctcggaatggatccgaaggatccatatagccgatcccaacaagcttgggattgaggcttggttgtttttgttgttgtatatttttgttttttgctcatacagttggttctcttgttaataatattttaacaacttgttgcttaaagatagccgtttgaatgttttaggtaaaactttcaattgtcgttgtcattgagatcattattggttattgaaaattgttggattcttacaatggaaagagcaagttggtggcattacatgttgcaacaagtttaattcaatctcttgcagaggttctataccgcgtctgaatttgacagttactgtttatgatacttctctttaggtgttaatctttagctataatgctactggaacaggtttttgaggaacctctttgattggtttagataattctttgatgtgttaattctgtatttttcctttgctgatggaaaaatcattaacagattcgatctcatttgtttttctcattacttgactgcagggggagccgagttttaatcttttcgggttcttaat

SEQ ID NO: 56236 - DNA, 521 bp, Populus trichocarpa
  Intron number 1 from transcript POPTR_0009s05490.1 (locus POPTR_0009s05490) derived from phytozome v7.0 (chr-ID scaf fold_9; pos 5588224 to 5588744)
ggacgaacagctgcaagaaactgctgtatttatcgggcaccattcttgatagctccttgttcttatatttaagtagcagagcataatttaatctatgtattttagtaaaatagttaatttttttttttacaaagaagatcctctttatatcatatataatgccagttattgagcacttgattttgtctgaggtcctcacttgattcttatgttggtcagaaattcaaagtctattgtaagtggaatagtcaatagactagcttgtcaacattggtttttggcaaggctccatgaatttctttctgttaataaactagtttgtacggcagacatgcttgagcttccgagtccaaaagactttgagagctatttgcaggctattacttaatcacacaccctaagaactactatcatgtatatatcgcagtgatgggctgacggctcacttttttcaacaaaactcgttagcattcagtttatgttgcagatgcacaatccgtagggggtttgctgtggaaaga

SEQ ID NO: 56237 - DNA, 796 bp, Populus trichocarpa
  Intron number 1 from transcript POPTR_0011s16680.1 (locus POPTR_0011s16680) derived from phytozome v7.0 (chr-ID scaf fold_11; pos 18469973 to 18470768)
tcccaattctcctttcactgagtcaataaaggtacggcgtttttccctctttctctttctctttctctctttctaacactggttggtcgctgagaaaattcaagaaaagacagaaaaggatctacctttaggaagaatattaggtacccattatttaggactgtgaaaacagaaaaacccatctttcaatttgtgtctgattttcatttttcgtgttaattaaggtgaacttatgtggttgtattaggtatctagctggttagttgttctgtttgtcgtggtcatatgttttctttattcagtggctgggttaaaattcaattggtgacattttgtagcttaagatgtggaaaagtcgcagtcttggtgattgtggtggattatggattagagaagggctggtgtgttgtgcttttacttgggttttggttgaattgggattatatgaaaagaaaaggtattttcaagagtttttcaatcttttcaagatgggatttttgtggtttttttgaaccttaattttgagtaatggaaatgactcaattagccttgttactgtactgattttgctttctgatgtttgcttcattatgtggaatgtgcgtatttactcgtgaagaatgcatttcacttcttggaatgaaaagtttcctttcttttggctttagttatctggtttacaagctatgcagttcattatggtggcacttatttagcatttgatttcacttgacatctttcatctcatttaattttaacagataaatttacaggttatttctcctttgttgctgag

SEQ ID NO: 56238 - DNA, 716 bp, Populus trichocarpa
  Intron number 2 from transcript POPTR_0011s16680.1 (locus POPTR_0011s16680) derived from phytozome v7.0 (chr-ID scaf fold_11; pos 18470786 to 18471501)
aagtaatatcagctctgtgcctgtttctgtgccaggttcgtgttctctcctttgttgctgagatgttgcccttttctgcaagtaatatcagctctgtgcctgtttctgtgccaggttcgtgttccggtatttgatgctataaaatgtgcatgccagtcaattggattaatcatgttgatatgagtataatatattgaatatatatcaggtatttgatgctataaaatgtgcatgccagtcaattggattgtttgttgaattgtgaagcttaaatgcacaacatgaataaacaatttgcaatagtaatagatccccgctccatcctcaaccctagtatggcttggttaccctgtgcctttctaataattagctagcccttgcatttaaacttattggggaactgatattatatagtggtatcaagctttgtttgagtgtgggtatgcgttaggttgttaatgccctagtgcaatggatagtatctatcccccatgatccttgacagttctcttgaatgttgtcaatcaaggctattccccaacccccaaaattcctgatggttctttttgcaagtagctttcttcttgtacatgataataaaagtttagtacctggtaagttttttggctaaatttaccaggttgttagattgattctgtgttgattctaaatactgcaatttgtaatattttgcgcacagcgaagacaaggggtca

SEQ ID NO: 56239 - DNA, 605 bp, Populus trichocarpa
  Intron number 1 from transcript POPTR_0009s07590.1 (locus POPTR_0009s07590) derived from phytozome v7.0 (chr-ID scaf fold_9; pos 7060528 to 7061132 reverse strand)
gaattattcaaggaattctcaatcagcaaaccgaggttaatatttcacaatatctttgaagagccatacgttccatccaaaaccccagaagcattcggaacacgaaacacacattattacaagcatccaaccttaagattcccgagaattttttttactggaatgacaaaattcagatgtgtgataattaacaatgaaaaacatcttgcttcacctgaaaaaattgccgacatgttttgtttgcaagccaaaataggaacataaatgaaaaagaaaagttcaactacatatagccatagtttccatcatctgggacaaaatcaaaatcccatttcacacacaattccagtttcctcaaacaccaaaaacatccttaaaggaaattctaacagttagtttgtcttgctgatccccacgtaacccttgttgtccatgcaagaaaaattctaataacccacaaaaaagaaaaataaaaattcaacaagtgcatgaaatgatcataagattggggaaaagagagtgagatagaggtatattttagttttaccttccatggttgttgaatttcaggggattctctcttcctgtggctttgattgactcaa

SEQ ID NO: 56240 - DNA, 697 bp, Populus trichocarpa
  Intron number 3 from transcript POPTR_0004s19400.1 (locus POPTR_0004s19400) derived from phytozome v7.0 (chr-ID scaf fold_4; pos 19250733 to 19251429)
ctactcttacggaggcagctggtgccattgttgatgtgagttttattcaaattccttttttttttatttcagagaaaatgtgtgacgcaacatgttttttgaatggaaagaaaggaactttatgtaaattctggatgagatagtgttaatcatggattttaggcatgcagtggcatggttacattgttttagttagctgaaaatgacctgttttattgattcaaaataataggcttgataaggagatttagaagaaaagttttagttttttctatgagagtttatatattaattttactcatgtttagattaaactcaaatttgagaatgaatgaattaggactcatttacatgataagtaaatttttttactgaattcaaagaggggaatttgggcatagttttagatgaaagaggtgttaatcatgataaaaaaaatataaataaatcttaacggaaaagtaattatgggctattatttattttcaagttcggtctcttttttttttgagtaattttctgattaacttgataccaaagaagcaatataaacatgcaacagtataactagctgggttttgctcattgaaaataacctgattttcttgattcaaaataatcggctcaataaggaaatttaaccctatttggattaaactcaaatttaacaatgaatgaaccaggattcattcacacg

SEQ ID NO: 56241 - DNA, 690 bp, Populus trichocarpa
  Intron number 1 from transcript POPTR_0001s40330.1 (locus POPTR_0001s40330) derived from phytozome v7.0 (chr-ID scaf fold_1; pos 39718613 to 39719302 reverse strand)
ctttatacaattgggggtgagtgccttgttgtttgcaatccttttcttttcaagtatcttctgttaaaagataggcatcttatgtaaatatcattcatcttgttgtgttttgccagagtttagacaacctaggatttggtttgttgtctatattgcattgagctagacatgcctcactttcaacaaactgcaacttttaggtttttttatcataaatgtcgacaaatttatgttgttatagaacaagagttgtgagcctatatggatggagagtatcctggctaaatcatcatctaaaatataaaacagtctcatgcatctagtttcttatataagcattcccttgcttcagttcttgacttgcttcagatctccttccatgacagatctagaaatgtgaggatagaggttacctatcctaaaagactattagcaagtggaactataagaaagcttatggcacttaattcatagtgttgatatcataagtggagttatgtaatttagcttactgtatttagagattagaagtgatgattataaatgacctttgatgcttgtctttgcaaattctttcaatcctatcctagagaaaatataattgcacttgatgttttattgttattatttgctttcttttttgtatgatcttcaggtcagattttgctcgtctaaatttctttgggtttt

SEQ ID NO: 56242 - DNA, 603 bp, Populus trichocarpa
  Intron number 1 from transcript POPTR_0014s07380.1 (locus POPTR_0014s07380) derived from phytozome v7.0 (chr-ID scaf fold_14; pos 5557646 to 5558248)
aagaagctctctctcactatatcaggtttgtccgcgtatctctctgtcgctacgatcgctcggtcaatcgcctcgtttaccgccacgatgtcgacgaccggtttcaattatcaatgtccttgctcggttcttagggtttcatttttggatttcctttcgtttttattatctctcgcttctggatctgcaatcagatatcgtaattgtgtttttagggttagagattttatttcaattagggtttcacgagatcggtgatattatttattctgtgattgtcatgaccaagggtgaatcaagtaattgcagttcaagatttagggttttttattatcttcatggactttgcattagctttagttttgtggagaaatcagccaattctggacggaataaccccggaatcagattcaaaagttggattttgggatgattttgttatgctttcttcggttctggttaggtttttcagtgatcgtgatcgtggtcgtggtcgtggtcgtggtcgtggtctgacaatagtgaaagactggctttttaattcatgtgtagattctgtttcgatcggtattgtttatttgtgttctgtttctattctatagc

SEQ ID NO: 56243 - DNA, 723 bp, Populus trichocarpa
  Intron number 2 from transcript POPTR_0015s00570.1 (locus POPTR_0015s00570) derived from phytozome v7.0 (chr-ID scaf fold_15; pos 349926 to 350648)
acacccccggtacttccttttctcatttctcttattgggttcttgttttatatttcatttgatacgtttttttcccgcaagtaattattattgatttgtgaatctgggttttctttcttgaatttttgttttcagtcttcaagttgctttagtgagtttactttttttttctctgcaaatgttgtgtctttgattcaattctttgtttgacgattcattgtttgaggaaaaaaaaagaatttttctgtttatttggtttgtgaggtgactgtagcaaataaatggtttagtgtctaatgcttacatgcttttggtttatgagaattggaagtgtattgagtttctttcaattacttatttcgtatgtgagaaaatcgacttttgaaatatgatggaagatatctttgtggcccaatacgtgagagtatttgcttgtcaagttataatgcttttcctggggtaacaatccttaaagtttccatcttttcatgttattagtgtcttttcttaattaaagtgttttgtttatctagttgcattacagatccattttgtctgattttaaacgatagcttatgagtttgatctcatatagtcttaacctttttatcctaaggttcattttaaatatcggtttggtttcgtgaatgttgtttttgttttaaatagatggcattgttctgttaaagttaatgataggagtgctgtgagatgcaggtgcta

SEQ ID NO: 56244 - DNA, 668 bp, Populus trichocarpa
  Intron number 3 from transcript POPTR_0012s02000.1 (locus POPTR_0012s02000) derived from phytozome v7.0 (chr-ID scaf fold_12; pos 1601793 to 1602460)
ttaaagaagagccagtaattgagtttacaggcgaggttagtctctttaacttgtgccacttaatggctgttttagcttagtacaacctgttggtatttttgggctgttgtttgacattgtgaatattcgaagagtttatgctaggcaactggaaattagggttgaggtagtttatagaatttgaagaaactggtctgggttatttttatctactacttttttgctcaataaatgaactgacaccattagatgttagtgtcatacaatgtatataggataatgggagcagtaaattaagcgtcgcattacaaaatcttgagattctgttggcattttcaagttcatctactgtgagattggagtgagtagtcttttcagtttgatactttaggacatagtttcatatgccaagattcaaagtgttcatgctaggtaacttataatttagggatgtagtagtttctagtttttcccccttgtataaaagtgaaatagtgcttgcacaaaacttgttattgtgattgatggaatatttattaggtggaaaataattgtttgccttttttctaccagagacttctcctaattatgttgcatgaattttccctgcaataactaacactatagctggatttatattacaggaagcatttgggaaatacctagac

SEQ ID NO: 56245 - DNA, 722 bp, Populus trichocarpa
  Intron number 3 from transcript POPTR_0009s06910.1 (locus POPTR_0009s06910) derived from phytozome v7.0 (chr-ID scaf fold_9; pos 6578705 to 6579426)
agctggacttttctccgaccttggcgttgacagtatggctcttttcctctctctctctctctctctctcttgaatttctatatttctaattaatgaattttttccatgaaaatcgccttattaaatttgagaaatgtagtcagaaccttgtgttgtgttttttatgttgaatagtgtcatcaatttcaggaaaagaaaattgtctaaaaattgaagtagtctgttaaatggcttttggttttgtcaagttgaaaaaaatgaaaaagatcaaatttttgaagaaaggagaatagacactctacctttttcttcactttctcagtaatcaaacatgttgtggtctcttcctggatttgttgcactttctttggccggaaagttgaagggatctcaaaagttttactttatacaaggttgacttttgaaatgtttcccatttcttttcttctcattgaatcactcatgttgtcggtgaaagaaacagagaaccgagcagagttctggaacaaaattggtcattgcaaatgaattatgttaaatgatccgtcccaaaccattaattttgatgacaaattgagcaggtctgcttataatttggttattgaatatgtttccttttaatctttagttcaatgtctacgactaataaattatcttatgttcatctcctcaagattgattcattgctgaataactcttaatggttaacaggctttgttgta

SEQ ID NO: 56246 - DNA, 401 bp, Populus trichocarpa
  Intron number 1 from transcript POPTR_0011s06420.1 (locus POPTR_0011s06420) derived from phytozome v7.0 (chr-ID scaf fold_11; pos 6771447 to 6771847 reverse strand)
gttattgtcatatcacgtcactgtaagatttttcttcttcttcttttttttaattttttttttgtcttctatgtttatttgaatacttgatgttaaaatatataaatgttttggtgttgaattagttgtagtatggatagcccatttttaaatagattggatacattgctcctatgtttaaattaattgtctgaaaatatctctaatcttaaagttgtgtttggtattggatgaaaattaattgtttaaattttaaatctgaaatgttattacgccaacccttcgagggttgtaattttgagtttatttttcaatcatctaaacatttgtttatatattgatggtgtttttttctttcaataacagatatctaaaaacgctcagtcttccaggcgagctcc

SEQ ID NO: 56247 - DNA, 685 bp, Populus trichocarpa
  Intron number 1 from transcript POPTR_0011s12080.2 (locus POPTR_0011s12080) derived from phytozome v7.0 (chr-ID scaf fold_11; pos 14860076 to 14860760)
atccaggtaccctttagcctccttttcatttcatttcttcttttgaagtgtttgcatctcttaacttttagttttgtatgtgaattttggaggtgttattcagtgatttgatatgagatctggtatgggttttatatattcggattcattaagtgattagtaatttgttttgttgcagaagctcatcaaactgcccatctaggcctgtttttgatagtttttggtatctttaattgtacaacatatatgaaattatgtgactttccacaagtaaacacttttttcagttctgtttcgggccgaaccgagcttgtgtgaaattattttgaattttgatttgaattaatgtcctctctcggaaggatcaacgtgtgttatggttggatacgacagcatggttctggggcactatatgttaagttgatctcgtcctgaaactgagcagtaaagattagcgaagaaatgcgttcttattaattgatctttcattgtcaaattttcatctttcgaaacaaaaagaagtgggattatctatatgatatctgatggcatgtttatcttgtatgaaaccttttgaattatagtgtactatttgatacgaggaaagaaaactgctatatatactcacacttttagttgattatctacagagaacttgggaaagggccaaactggcaactacact

SEQ ID NO: 56248 - DNA, 914 bp, Populus trichocarpa
  Intron number 1 from transcript POPTR_0014s07250.2 (locus POPTR_0014s07250) derived from phytozome v7.0 (chr-ID scaf fold_14; pos 5479883 to 5480796 reverse strand)
atttggaggctatatccatctgggcactcccttcggtattatacaatctctctctctcccatctctttttctccatagaaatagtggatttgctaacccttttgtctgattgttgacctctgctttctttgaggttttctcgaggagaaagctttgttcttttttaagagtatgttcatgtttttttttgttttcttatttgcatctctgtaactttatggctgatgagcttgaggttgtttggtgtctttaattttatgttctaaagttgatttctttctgttagattctgggaagtgattgttaggtgcataactagagtttgcttctttgattccgactgttattgtcctcttttcttgatatgggctcagttaggtaagagatttttgtttaatcaggtcaataacattaatccaggcttgaatcctgattgaaagtttcttttattacttctatttccgtgctagccagggaaaaagcatacaatctgtaattttacaagagtttgagaatctgattgttgccaaattgagaattgtttcttgaccgttgatttcgttaaggatgtaatagttacgtgagtttggcgattcatcaagaaactatgacaggatcttacaatacccaattggaattggttttcgctgttaaagaaaatcccatgtgttgcttgtctatgattcatcaaagagagcataaaagtctgaagagacggcctttgtcgcatacagaaaatggctgagaatttcttgccttatagatgaattttctgggttttgttgatgtagttcttttcacttttgtcatgttagaatgtgctttgtccatgttcaatgctgttgaactctattatttcttgagttctaacaatagttcagtatttgactttgcaggtttgatccgggtaaaag

SEQ ID NO: 56249 - DNA, 762 bp, Populus trichocarpa
  Intron number 1 from transcript POPTR_0015s13190.1 (locus POPTR_0015s13190) derived from phytozome v7.0 (chr-ID scaf fold_15; pos 13245753 to 13246514 reverse strand)
ctggtatgtatttactgcaagctcataattattcaccaatcagtgcattgcaacccatcatgccatcttgctaatgcacttggaatttgaatgagaaataaaaaaacaaatcattgtatgttgattataggcacatattaacatagttctattagttttcaggactttactgtatcggatagcattgtttagcagggatgaatctgttcttatattcccagaacattgaatttttcttgagcatgagtgattcaactcagaagcatttattattgccatgaacgtttctatggttggacagagggtttcatgttgatgggattggtttgatttattaatgttgagtgtgtgttatatagttttgattaatcaatattttaagatgattgtatacaatatcttgttaaatactcttatacaaataatttgtcaataaaataatggccaagtatcatgtaaaaagccatcaaaattactggaaagtcttcatgactcttgggttaagccaagcttaagacttaccaacctctcatcatcaattggctaattcagttggctcattctttggttaacttagttaggaatttagatggcagcttgcatcatctagacagcatttgtagtagaatctctaaatttcaagagaaaaggattgatggtggcttcctcttaaaataactagaaagcccttatgagttgactttttaaggtcttcatgatcatgaaaccctaaatattgtgctaatgcaggcttgcagagga

SEQ ID NO: 56250 - DNA, 936 bp, Populus trichocarpa
  Intron number 1 from transcript POPTR_0011s05190.4 (locus POPTR_0011s05190) derived from phytozome v7.0 (chr-ID scaf fold_11; pos 5077595 to 5078530)
ctcaaattctagtccggacattcctttaaccgccggtaagctcttgcttttgtacttctccattctgtaagcaatggattaagtttccattataaatccaatacacaaaattgtaaagaatccagtgttctagctatatgtttcaacaaagttgtttgcatgctttacttttgagtggtctgggattaattatgagaatttggttttgcaatatggttagctctgtggcctttttgacctgttaaaggatgtaatttttcctcagttgatcattttatgtactctcagaatagggtgcttgctctagttttagtcttgcagatatcattattgaaagccttgcaagtttcttgagaatcttcatatgactttcttctgtacacaagtaacacaaccacctcagaacaaataagaattgaggcctagaaaatgttggtgtccgaaaagccatcacactaggatttcaccaactcgtgccttgtagtgatagagagtaccaagccagtttgcagggtactcagtgttctggttgcaattgcctatttggagaaatgaagaaagaaatttatgaactgtaccaatctgagagatggtaataagtatttcctggggaaaatctcaacagtgataggagttcaataggttgcagtttttctatgtaatgaaattaatgaagccattgagcacatatggtgtttggcataaaagaaaccctttttagcatattttgtgtgaatggcaatagcattacataatcttagtatacatgacatgatgccaacctataagtgcacaaggcatttatgcataatacccccttccctccatctgccgcgatcacaaggcttgctcaatcaatcttgtgaagtgctaggtgaagcttgttcccaattgaagctgatttttgtcatggatttatgacagagaagattgtaa

SEQ ID NO: 56251 - DNA, 796 bp, Populus trichocarpa
  Intron number 1 from transcript POPTR_0004s05030.1 (locus POPTR_0004s05030) derived from phytozome v7.0 (chr-ID scaf fold_4; pos 3783849 to 3784644)
cataagagcacttctctttcttttcatctctcttggtgagaactgaaagaagatttttcttagtgagtttgtgatgatcagtttttaaagtttaggtgttttatttctctcttggatttaatgttatcttgatgctaatatttacaactatatcgattgttatggttttatgtcagtgattttgtgttactttttctgatttgctaatttaatgttagtagaagtctgcatgttgtttagaattgaagtgcaaaaactaatgataaaaaagatgtggacatgtgggattttcttgaatcgctgatttagttgtgattttgtgctactttttcagctgctttgattggataaagaaaaattgaagtatattaccgctcatgcttttgaaagtttttatggacaattgggttttctttttcaaggtttaatattgacatttgaaaaaaaaaattaattcttttttggtagagaacaataattttttgaaaaattgatcagtcataagtttgtgagttttttgacctaatatgttttgtctttcatacttgtagggtttttttgggtgtcttttgatgttgtaatggttgacctttaaactgatttttttttatggtgattattgttattatctaattgggattttcttgaatggctcttatggtattcctttggtttaagctaagtctacttgagaatgtgctttatgttcattgtttattagaagctattgtgcctagtattaaatggagttttggttgtagggttttgtggagagtaaagggagtgctactgtgat

SEQ ID NO: 56252 - DNA, 861 bp, Populus trichocarpa
  Intron number 2 from transcript POPTR_0009s16740.1 (locus POPTR_0009s16740) derived from phytozome v7.0 (chr-ID scaf fold_9; pos 12652474 to 12653334)
aactagggatctcagttgaagttaaagagcaagtaagtctcctcctcctcctccttgtcttttatttcccttttgccttggtgtttcttgaggattctggagtaattagttaagtccccatttggttagggctacagttcagagaaagatttggcagaatatggttatggtttcttttttcacagtgctaaatcttgtcacatacttcaaattttgtgattgaatcagaaatgggaagttaggaatgctcaaaatttagttctcccatctgtcatttcatttttgatgtcaaaaagggaaaggaagggtacatatttatggagcactggccttttggcacatattcgattgtgaaaaaatcgttgtaaatcgagctttggcaccgagttatgcagagtaatattgcatgagtctagtagcctccttcgacagaagatggggtgaacaaccgattttgctcggatcttctaaaggagtcatgatgatttactaccagattgattttaacgatgtccttgcataggcatgccatgttgcttatgtaaaatatcatgtagtctcatgtccatttcgcaatcgtgggtttctgacagctgctaacggttctgtttcaatgcattatcagaagttgtagggtgaattgtctattatgttgccaaacgttataaccgctttcatctttcacgtaacaatgcagatgttgtgattcaaggagtagaaacttttcgtagaaaattggactatgttattgataattgggaaatacattttgagctcttagttgaaattccaattgaatcatatctccagttttacatgtgtgattgtgctattgatatgattcaggttgagctaacacgg

SEQ ID NO: 56253 - DNA, 852 bp, Populus trichocarpa
  Intron number 2 from transcript POPTR_0015s04870.3 (locus POPTR_0015s04870) derived from phytozome v7.0 (chr-ID scaf fold_15; pos 5084330 to 5085181 reverse strand)
gcctaggtgctcgatttcctccagagacaaaatcggtgaggcatggtttcttgactacacttttcacttcttatttatgcagttttggttttttgcctgctgttgcttctgggtttgtaaagaacgcacaaatttgtgtacgagtgattgtctcattggatttgaacttaccttgttgtcactggaaatgagctataacttcatttcttgcagttgtatattgctgaaatactttaaagaatggttttcgatactaatttacatttccttatgatcatttcttgaaatggaaacaaatgaggaaaaagagagagaaaagagtcaaccttgaaccgaatttatacaattaattagtgttattacataaaactctctttgttgataaaagtttgagctctatttgataatatatggagttattaattttttttccattaaaatccttcaaagaggaaaagatgaaggattttgtaatcgaaacatttgatttatctcgttcttatgatttttactctaaaatatcacgctgtttttcatttcaaaaaagaatgttttcttctctagtaattttttctatactgtttattttactggcagaaatattgctctcgagttttggactctgacctagtggattagaaagttataacttgcttggaacaagagagagatcgagtccctcatttttccatgtcaagaattcttttcaataacgaccattgagcctaactggttctctttaaaaaaaaacaaattataaaatggtttgtagcatgggaggtaattggctttatgacaattgttaggtgatgacgacagggtgctcatatgcaggagaaaggtgatattgac

SEQ ID NO: 56254 - DNA, 994 bp, Populus trichocarpa
  Intron number 1 from transcript POPTR_0015s13295.1 (locus POPTR_0015s13295) derived from phytozome v7.0 (chr-ID scaf fold_15; pos 13309027 to 13310020)
aacaaataagacaacaacaaagtttgacaaaaaaggttagcttaacaagaaccctaatttctagctttattttttagaataaagtccgatatattacttctttctgagaggtttacaaaccaaaaaccaactataaccaagaaaatcataatccctaaaaaaagaaaaaataacaagaaattcaaaaatcatatgaaatcctgaaaaatcaaggaaaaataataaaattatctcatataatatttttaaggtgtaatttaagagtcttttggaggaggaatagcacaagcatgcaaactccactataaaactgagtctcgaattatctaaaaaatttgagcttgacttttatattattagtctggtgtgataaggttttctattgagcgtaactctctcctggtccattgacagcacatcatcttctagttatgatagatccccgtttgatgcttagaaccttttttgtttttatctagcccggctacatcaatgatgctgtgtcttaatccattgacagcacatcatcttctagttatgatagatccccgtttgatgcttagaacctttctttttttctagcccggctacatcaatgatgttgtgtggaaaagtaagaagcacgtgcgccacaagggttgctgacatttcgaaagatctcccgttcaattggtggaaaaacttgagagcctttcaaattgcaggtttcaaagtacagttcctcttgaacggttggagttacacatgctattatggtattcaagttaaagaaaacaagaagcttaaggaaatagacagagatcacaaaggcctctaaacatactgaggaatacgttgaatgaaaggcgtgctaaactcggtaggcaacggaaagatttccttcacattgtaacagaggaaatgaagaaagattgttcattgttaacagtaagtaaatctgcattttgtgctttaatttatttctattcagattttgctatatatcagaaagaac

SEQ ID NO: 56255 - DNA, 630 bp, Populus trichocarpa
  Intron number 1 from transcript POPTR_0012s10590.1 (locus POPTR_0012s10590) derived from phytozome v7.0 (chr-ID scaf fold_12; pos 11319332 to 11319961 reverse strand)
aggtggcacttttcaaattgatatcactctcccaggtaacatacttgaaacaaacactagcatacaaggagtttcagtttttgtttatgtcttagagatactttacagctgaattttgatggggtgtcttttttttttaaaaaaaaaaaacaatcgagctgcatttgagtgcttgcttattggatgaaaaagaaagttgggaaagaaaaagaaacatacttgaagattgaaattgaaaatcttgcccagtcgttttagttgctgtaagagtaattttataaggctagttagggtctttaaatgtgtatcaagtgttgttaatttggaggaaaaggaggaattatgatgtgggttttgggggtttgaagtgagtgtgtgtttttaccgtgtatttgatttggtttattctttggcaatctgttgaatttccaatgccagtgctctgtcgcaggatgtttgtttggcggttaaaaaagttgatatgaaggaaatgggctatcgcgttcattgtgtcatattattactactagctatagttgcttgacagggtgtttgtgttagctatatttgaagtggaggatatagagacatttattgacctgcatttgtaatgttttgttctttttgtag

SEQ ID NO: 56256 - DNA, 980 bp, Populus trichocarpa
  Intron number 1 from transcript POPTR_0012s14580.1 (locus POPTR_0012s14580) derived from phytozome v7.0 (chr-ID scaf fold_12; pos 14423586 to 14424565 reverse strand)
tcaaaatctaacgcccaacccaacggcatcccaaggtatgcctctctccctctcccttcctcttccttttctttaacgttattcattttggtattgtcttttacgattttcttggacctcgctgaatttttactcttgcaaaaatggttgatatttttgcgattaaggcagaacccagtttcttattcttcttgtttcactgctatagtgagtttgtttttgggttcttgatttttgtcatgaaattggtaaattaccttgaaagtttgatttttttagtaaaattatgtagaaggtgtaagtggatttgtgtttgtttgattttccagctcctttgttttctcactaaattatcctggaaaatttatgaattaatgtaaatggattgatttatatattatgttgtgtgtacaatgatggattagtgacagagttttgcaattgattgatagcaatttagtatcggaatttttgtagtttattaagaaaatcctttgaaaaaatattcgcaatggtaaatctagcaatggaattatgaaatacgttgcaaatactattgagtgttgaggctttttgcaacggactgaagctgttttgcaatctgcttttaaatagaatttgcgatggagttctactaatttgaaattgataatcgttgtttcttgtagatgaaaataaattattctttactttcatttcttgcagaaacagcatggactaacgtaatactcttctccacattttaatacttcaaactcggcacgagtcttttcttgtttgaaaggtattggaattttggtttgaagataataccaattaagttgaagattgtatattgggagcggttaattttgtgttgctagggtcatggagttgtttgcaatcaaaagtggtgatgagcttcccttttctgacacctccttataggggtttcacatagctatttcaaagcttaaactggtgagactgtgaggtgaaaa

SEQ ID NO: 56257 - DNA, 242 bp, Populus trichocarpa
  Intron number 4 from transcript POPTR_0009s06330.1 (locus POPTR_0009s06330) derived from phytozome v7.0 (chr-ID scaf fold_9; pos 6123532 to 6123773 reverse strand)
gcaggttggttttccaactgattttacactattttctgttcgtttcccaggaaaagaaaatactattttggtaccctgtttatgcctttttttatttgttggtttatctcataaaatgcggagaataaattaataaactcaaatgggtttatttcgttgtattgtaataatcgatcgaagactgctaaacagagaagttaatgggttgtttgtgtaaacagaggtagagccaatatcaacat

SEQ ID NO: 56258 - DNA, 755 bp, Populus trichocarpa
  Intron number 1 from transcript POPTR_0001s10720.1 (locus POPTR_0001s10720) derived from phytozome v7.0 (chr-ID scaf fold_1; pos 8339529 to 8340283)
accatcagatctgttcttcctttgaataaatccaggtatctctctcctgtagcctttctttcatttgttacaaagatagaatattcggatgcacattctcattcttttgctatgttagaaatcatgtcgtgatgggctgttattaaagttttatctgaaacgaaatattttttttttaattcaggttggtttatctcttttttttaaaaaaaaagaattgcatttttttgttaataaaaaagttttgttttgtaattggttcagaaggaaaattctaattttgaatctggctcaaggttcatcgtcaaagagtttgtgtgctggcggagataaggattttgatcccaagtttagattttgatggaccatgattgctgtttggatgggaggtgtttgtgtttttattggaacataagaggtatcctgaagagggaaactttcttatgagaaggttcaagtacctttcaaatggatatattactctgtacaagttaaactcattgagaaatattctttttggatggtttttcaaacagtttcatccttgaaatattgcaaattaagcacttagtttgttccactcaaaacatgctgatgggtttagcttatttgttatctttcttgtgagagaaagagaatctgatcgcgtgtgatctatgtgcctgttaaatctagttttggaccggtaaccactcactggtttttatttaagcaatgcagtggcatcttggaggatatcaagaagcagcagcagc

SEQ ID NO: 56259 - DNA, 895 bp, Populus trichocarpa
  Intron number 2 from transcript POPTR_0012s02290.2 (locus POPTR_0012s02290) derived from phytozome v7.0 (chr-ID scaf fold_12; pos 1898561 to 1899455 reverse strand)
cggttgctgcacgaggccgtcatctgcgatcaccggtaaagctctgatctttttctgtttttgcgttgatgaagttgagggctaacctcaatctgtgtccattgctctggtcaatatcttgtcacagctgctccttggctgagttgattttttttttttttttatgaagtgatattcattgttaccacagttgcatgcttctttgaatacttgtttgggatgagagtgaaagttgagggcagaaatagttcctctttgattacaaacattgatttgagatttgatgaatggactagttctcagaactttacctgagagacttcggttctgtttgtatgttgttcgatttttgtccacaagcattgatttcaagtgcttattgtattgattacaagcattgatataggcagtttttgatctttgaagtgtactcgttttacctttacatattagaaagtaactagatttatgagattgttgctggcccatttgagggaggttaaaatttaggtatttataaagttgatgttttttttaagcttgaattgtaactactgggttttgaaagttttgatttttttgaaggagatagtgggttgttcgagtgtgatcagcttgttgtttcgattgttttttctcccatgtttgaatgaagactgttgatttagaccttgggttggattcatggtttaatttgtagcatgcgttgataactataaaaactaattggttagaaaaggtattttatcttaatacgccagtttatcatcttaatcctaaacacattgactgttggaaattttcatatttactgggaagtgtttgaaattaggtttttctgagttgatatttgttttcaggcctgaaggttctgacttttctaagataggagaaa

SEQ ID NO: 56260 - DNA, 1049 bp, Populus trichocarpa
  Intron number 1 from transcript POPTR_0012s02290.2 (locus POPTR_0012s02290) derived from phytozome v7.0 (chr-ID scaf fold_12; pos 1899816 to 1900864 reverse strand)
ttttcagtcttcactgaatcattattcatcaacaggtaatacttaattgcttatattgaatttttcttgctggaaagggattttcagccccggttgttctttgtcccattccatgatttctccttcttttctctccttacttgagtgtgtgacacagagatggtcaccaatcatcatagacaatttcttttaattgcttgagtttgatcctttgttgagttcgttccagtaattctacttctttgcaagtcttttcctttgttaatcgttccagtaattctacttcgttccagtaaaaaactggactcatttaaatcaattaaaatttcaaaagttgatagagttgctatagatctgtgaagctgttcttggtttaggctatttggaaacttgctggtgatttttttaggagaaggtgttacttaatttatagactgtggattgtggaatgtaaattgtgagagaacagagagtgtaaaaacagagaagcaatgtaatttttcctatttcaaatcatcaagcaaaaacttcaatttgcagaagacaataaatttaccaaactgaacaactggaaaagctcatcttgctcgaagggtgttgctgtccgaatcttgactctgtcgtgattgcatggcgatggtgagtgaggaacaatggaatctgtagttttcatcccagtaataggttagacaagagggtgtaagttttgaggaaaaagtttgttttatcctcaacttaatgggacatttcaatttgaacaatctttgcaaaaagtagtaaatgccattttttaaatcaaaatttgtaataacctttctgtcacaattgaaagttcttaagagaattgagatgtatagcatgattctttagtacgtttcataaaaatcaatccttctgtcacaattgaaagttcttaagagaattgagatgtatagcatgattcttaagtacgtttcataaaaatcaatcccatttttgctttttatatgttgtcttaagtattccttttcttttttcagttttgccgtggtaaaaaaatcagagctaga

SEQ ID NO: 56261 - DNA, 850 bp, Populus trichocarpa
  Intron number 3 from transcript POPTR_0004s20980.1 (locus POPTR_0004s20980) derived from phytozome v7.0 (chr-ID scaf fold_4; pos 20318343 to 20319192 reverse strand)
gtaaaggtgagttattctgatagttctctctaagagtaactgcacttctagtcctacaattcatgcatgggtgagaatctttcctgcattagtacattcactcttgggtggccctctcaggatgacagttttagctggacaacagatgaatgcctgtgtggatgtgtgcttgagtggctgatccataatgggtgtgtgtttttgtgtcttcctgtgtttagtctgtgccgtgttccaattttgatccgagctttgagttttattcactgcttactttgcaagatcagctcaattaaaagagctgattcagagttgtgctaggatagagttgaatgcatagatcattgccaacatctctttttctgtgcatttatgcgtttgttgagattttattgaacgtttagctaagtagttcatcttctatgtccatgcctgtgcttgatatcgcattttggagtttaatagtatcaggctgctcattcccatagttgcaatagtagtttgctcacagcaacatgtaatcttcatgttctagaattgtcaatgtcaatttgaatactctagtggagtttgtatatcctcattctgtttagacatgagctgttaagtgatatgaagtcatattttttcgttgtagtgattgaaggtcatggaaagttatttacattgcttgactataactagtatcaatatgatatatttctcgttattgtttggctgaatcagattgctgtgtgctttatgttttaaattctctattttgactgcatcttctgtaccttttcattaactcgtgatacttttttatgttgtaggtattgaaatatattgtgcaccaacagctgattcc

SEQ ID NO: 56262 - DNA, 418 bp, Populus trichocarpa
  Intron number 1 from transcript POPTR_0004s10030.1 (locus POPTR_0004s10030) derived from phytozome v7.0 (chr-ID scaf fold_4; pos 8577983 to 8578400 reverse strand)
ctgtaagttttttttttttttttttaagaaggaatttttcttgatcgcagagaaaatacgagaaagtatgagaaaatttgaattttttgtttcctagaaagtttgaaactatgcttgaaaaataatggaaagtttcctgtcaatctctgattttgtgtttgtttgttggaaagtgaaaggaaattttcttatgcgtttttgaaatggtagcacgattttactctgaatttcagattttttatatagagaaaatgaaggaaagtgaaagaaagtataattggattttttttagtaatttagtatttggattttttttttgtcttaaaggagttcttctagtttgcctaattttctctgatggtttgagagaaatgcttaccagaattttaatttttactgtttcagagttctttacctc

SEQ ID NO: 56263 - DNA, 276 bp, Populus trichocarpa
  Intron number 1 from transcript POPTR_0001s10110.1 (locus POPTR_0001s10110) derived from phytozome v7.0 (chr-ID scaf fold_1; pos 7827319 to 7827594)
gcaaagtatgtgtaattttgttttgaagaattgttgctagctaaatggctcgccattttaaccatttgatcaacactcgctatgtatagcgagtattttagcactctctattcagttagggatgcaacaacaggaagaataattgttagtgggaaagagaagagaggaaaaattactcctcatcctctgtttctttacacgtccaatctaaatcttgggttttctttttatatgatttgatttgggttttagctaaatatcctcctccatttcttc

SEQ ID NO: 56264 - DNA, 884 bp, Populus trichocarpa
  Intron number 1 from transcript POPTR_0004s01690.1 (locus POPTR_0004s01690) derived from phytozome v7.0 (chr-ID scaf fold_4; pos 1020304 to 1021187 reverse strand)
actatattgctagctgttttgctcatactggagaggtaaaaaagaaaaatccagttttcattttgtgtaaagtttgtgttttgtgtgtaaagatttgatctttttgattctgtaatgggtttcttgtatgtttatgttatagagggtttgctgtttcttttttcttggattatttttcttttttgaagttatgactattatttgtatagtatatgaagatttatccggtgggtgggtggtgaatttaggtgggataatttagtgtgaagcttaatagcagtattcaatgaaggaggatgggtttggagatggtgactttaaggttttctggtttgtaagattttgtagtctgtgctgattctgttctgttctttcttgaaatttttgaatgagtctgttttgtctactgggggtgctatatggtttgattgtataagggagagatgaattggagattctttttgtatcaaagaggtttatgtgttgattgaacctggctagtttgcttaccaatctatgatttttatttttccttattatattttgagagaaacagaatagtagtaatgttttatttagtttttgctgtttgaaggggaagtgtaaaatcatgaagagtttagtattgaatgcataatcacatggatcaaatatcttcatcatttgagttcttgtaaaattgattttttgtctgtttacagaagcaacaaaaagtttgtgattacatgtcagacttttttcatactttaaacattacagacatgtttacacgcatgctgtgaacatgtgaattagagaggggaggatcctaatcgaggggaggatcctaatcttgggtttactttgcaggttgcttctgtgaaaatcattcgtaataagcaaac

SEQ ID NO: 56265 - DNA, 594 bp, Populus trichocarpa
  Intron number 3 from transcript POPTR_0014s13140.1 (locus POPTR_0014s13140) derived from phytozome v7.0 (chr-ID scaf fold_14; pos 9655771 to 9656364)
gtgatctaggacctcggaacagtaaacttgagcaggttgcttttatcaatcattgcctagtctttattattatttttatgtatcatcagttttgttgtctgttttgcttagcaaatggactttgacacatcaatcgaaaatgtttggacatgtatttaaagtcaggctttgttgtgcttgtgaaccttgacaaattgtaaggatggtcactattttaattttaactcaaaataagttcccctgtctccctattactttaagtgatgaatccttggatcaaatattgaagtcttttgtgcatctgcttggtttttctttgtaatgctgaagctattctaagtacttgcatttggaagttactttaaactagttgtggcattgggttctttgttgtcagtatctgtaattatttatctttaaatggacttgtatttggatgctatccatttttctgtaaactatcattctctttgtttattcttgggcaactgtgatgtgttcttttcaccaccagatatttatgtttgtaagaatttgggaacgatatcttgaagtaaaatgtatttctctcgaatgtaatacaggttttgcttg

SEQ ID NO: 56266 - DNA, 660 bp, Populus trichocarpa
  Intron number 2 from transcript POPTR_0009s13820.1 (locus POPTR_0009s13820) derived from phytozome v7.0 (chr-ID scaf fold_9; pos 10937637 to 10938296 reverse strand)
cgaaccagatcctttgctgtaaccctacagtgagtcctttttaataatatatatatgttcttttgagcttcctgcgcgcatcgatcatcaatagtatatgccctgcaatattaagatttctgtgtacatatgcaaaaactcttttcttttagaagtaactagggcttgtagttaataaatattatgtgaaattaactgtgaccaataaacatgttaagggagaacataattctccttttccatatctagaatgggatttaattaaagcccgttgcctactaatttataccacctcctttaagtatcaatcaaaatatttacattaatcttgtgcatgcccgttaatcaattttggagggctttagatagccactcccaccattgatcgatcaattcatattctcattaattactgtatggctcctagacgcctaggctcctagcccctaagtctagcatgcatgcaaatggtctgagtattcatacattgttatcatatatctttacaaaataatgttgctcgagagaatcatcaacttctatcttgttataaggcttggattgattatatgcgtatgctcatttgtcgatgagcatgtttgatgctatcttgttcattaatctgtttttaacttagaagaaaattggttatgcagaaag

SEQ ID NO: 56267 - DNA, 782 bp, Populus trichocarpa
  Intron number 4 from transcript POPTR_0014s17720.1 (locus POPTR_0014s17720) derived from phytozome v7.0 (chr-ID scaf fold_14; pos 13980462 to 13981243 reverse strand)
cctggctggaatcattatcaccactacatcaacaagtatgtcctttcctcacaccctgtctttctttctcttcttctttttcttggcatagcattcggttcctatagatgaagagcatacatgaaacatgcctttggcacaaatactaacagatatgtataaagtcatgttagttccatgatgatgacagacttggcttgcgcaaaattaaccacatgttttgaacaaaattttcatttcgttagttttaaatgaatactttagttgttttctactttgaatagtcagaatgtattttttttttccttgcttggttaatagctcctatcgggatcatcaatgcattcataaaggctaattattgtgctttttttttttcaattccatttattctaaacatctatccctgagatgtttttgttgacagcttcatctacaaatatcgattatgatcatcaacaaagttgtcatctcattcaaacccagcacccctcatattttgccactataaattattgttactatttgttttttcatctaacagattttcccctgtgactcaaccgatcaattaaaaacatctcccattacattcacatctatacatcatgatatatttctcatattctcttggttaaagctacccatatataaatatgtgtgtgtgtgtgtgtgtcccacacttttctttacagcttattatattagatgaccttctgacataattcctctactttttttttataggagggttggctattgctcacgcaaatctcttgcac

SEQ ID NO: 56268 - DNA, 269 bp, Populus trichocarpa
  Intron number 1 from transcript POPTR_0014s17720.1 (locus POPTR_0014s17720) derived from phytozome v7.0 (chr-ID scaf fold_14; pos 13983575 to 13983843 reverse strand)
cttttctttcttccctcttcacacaagcgacactggttctctcttttcatcttagccttttcattttaatcgattaattttggggttgttttgtttctgatcaagagttggcttttttttttcatgaatcaacatctttttgtttgaagttaagggatttttcaaagatggttttttgaattttttacagtaattatggttgatttttctttgcatcttcttttttttattcaggagttgaagacagaagagagagaagcaaggaaggc

SEQ ID NO: 56269 - DNA, 347 bp, Populus trichocarpa
  Intron number 1 from transcript POPTR_0011s10710.1 (locus POPTR_0011s10710) derived from phytozome v7.0 (chr-ID scaf fold_11; pos 13282958 to 13283304)
tcaacccttattttaaccatttctctacattttgtaagagatcattctcatctcaaagacaaatatattgaactcttttccaacctttgatgtaaaaaaactcaatgacttccaatggtacacaaacacttccctcactcgtttcatgctctgagaagattcaaaccaatctttctgaaaagaaaaattcattgttggattgtcaacccttctaggataaagagtcagaaataaaattaagatatttttttctccaaaacaaccccttataaccaattaatatatggggagcttgttagttttacctaaaagaaaggtctcaagatttgtcaagaccttaaacttca

SEQ ID NO: 56270 - DNA, 279 bp, Populus trichocarpa
  Intron number 2 from transcript POPTR_0001s08950.2 (locus POPTR_0001s08950) derived from phytozome v7.0 (chr-ID scaf fold_1; pos 6845209 to 6845487)
aatctgcttatcctgtcacggtaattaaagagattaagctcctgagttcatttaatgccgattttttctttgatgttatttactgttcaaaaaaataaaatgttgtgatacgtggcacggagatgatagaattataaatgcaagttgttttgctaatcgaagagttaaagttttggatccttacttctttgtgatgattaatttctggaaactacaataacaactcgtttctttttagctgcagatacattctcaaacgaggagctcctattttgttgt

SEQ ID NO: 56271 - DNA, 635 bp, Populus trichocarpa
  Intron number 2 from transcript POPTR_0014s11340.1 (locus POPTR_0014s11340) derived from phytozome v7.0 (chr-ID scaf fold_14; pos 8438845 to 8439479 reverse strand)
tggggaatcgggtcattttactcaggtactgtattgtttgttggaaaataagtgggtgaactttgtaaattttcttcatatgcttgagcgcatcacattctcacttcatattgcacttttatctatgaatgctctcttttatgcatgacaagtcattatttgtgatttctaatgggatggagcctgtgacaagcacgaggaaactacagttttgttatgctctggtggcactatctttgaatctattttgccttcatggcaggtttacatgaaatcttgtgttaatgtataaaaaaccaactcgggcatgcttgagaattaaacttagtgcccaaactgaatgattttttagattaactgtggttggatgagattgacttcctgctaatcataccactttgatttaggactcgacatgcttcacttcactttttacttttgtggcgctgtataactttactgcatgaataacactaactcacgtgcaagagaagagggatgccactttgttatttttttcttttttacttgcactttccagtgtcagaggtctagttgtttgtttcttattctcttcgtttatttttagctgtgggattgaatgttgtgccatcctttctggtacttgttcaggg

SEQ ID NO: 56272 - DNA, 545 bp, Populus trichocarpa
  Intron number 1 from transcript POPTR_0014s11340.1 (locus POPTR_0014s11340) derived from phytozome v7.0 (chr-ID scaf fold_14; pos 8439758 to 8440302 reverse strand)
gcatcaccctctctatctcccgcccggccgcccaggtaaatgtttttcttcttcctagtttccgattcacttgctccttaaaatcaccagtagaaaacagaataaagaaaaataatgtttgcttgttacttgcagtcaaggtctcagttactttttgagttttttccccccttcaaatacaaaattcataattcgcaatccaaaaggaaaaccagctgcttattagtttggcggaggaagtgaagcatttgggttatttttactctcgtctttttcttaactgcatcacatgtaatcacaccgacacaaaattttttgtgccacttggcatctaagaaccatctctttctgatgttaatacaatacagtagtcgattttatgaacaagtttaacatcactgtgatactcgttaggcaaggaaaaaacagctctagtgttgtaatgagtttcctgctgtttggttgatcagggttcttgtttttattctacttcatttgtgatagggtgttaattttttattttagaaggttaagtgtcttttgga

SEQ ID NO: 56273 - DNA, 433 bp, Populus trichocarpa
  Intron number 2 from transcript POPTR_0004s21890.1 (locus POPTR_0004s21890) derived from phytozome v7.0 (chr-ID scaf fold_4; pos 20865102 to 20865534 reverse strand)
aagtgatattaagcaagaaagtgagctcctcctgcgtttgcctttgaatttgcattccgacactaagcaagaaagtgaagtgaagaaggaaaaaacgaaaaaagacgcttcgatttcagtttctgtttccaattctcaaacccacttctggccaggttagctagctcgctctgcctatgcccaccctataaattctttgtttttataactaattatttgttcgtttattaaagaatggaaaggaatagtcttgttgttaattttgtagtaccaattcttttgtctgaaactggcctgtaagaaatgccatgttaggttttcatttcactctttttttttttgttattattattattattctttgctgcctacaaccacaacaacagccacatccaccgtaatttatcgattttttcttctacttggttagaag

SEQ ID NO: 56274 - DNA, 775 bp, Populus trichocarpa
  Intron number 3 from transcript POPTR_0004s14450.1 (locus POPTR_0004s14450) derived from phytozome v7.0 (chr-ID scaf fold_4; pos 14966313 to 14967087 reverse strand)
ccaaagaagttgtgccgttgtatattcgtcaacaagtaagtttttatgttgttttgctttgttttggtgaaaatgagtttttttgataagtggattggatggaatttggacgttctcagagctggtagggatgaaaggttgatgtaggctacaaatggatgcatttcgtgctttttttttttatctgttctttttatatttggaggagtgaaaaatgctattggctataaaatgatagaagaattgtatgcttatgctggtaatgttatttgtgaaattcatggcgcaatgttgaagtttttattgatggaatgttttggtttttctgaaattaggtgttagagggtttctctacattaactggtcttattcttaagttgaaacaacacagggcgaagacttagctcacttgttgtcaaataccattcatttcaaacccaattatgataactcaaacatcttcattttgcaaatatacctgtttgtaatacatgatgtgacttttcaaaggtatcatatgaacttgatataatgtgtataagttaaacgatgggctttgcaatttgctgtttagacctttgatttgactaccaaagattactttctcaacactagaagtcccactcatgctaatgaaaaagagattgattttattggatacctaagataaattaaacaggtatagcttttcatctatcacctacataataccccttgtttcttttctgaaaatttcttttacttgcatagtcggcaacatcctcatcaccagggg

SEQ ID NO: 56275 - DNA, 251 bp, Populus trichocarpa
  Intron number 1 from transcript POPTR_0009s09080.1 (locus POPTR_0009s09080) derived from phytozome v7.0 (chr-ID scaf fold_9; pos 8153420 to 8153670 reverse strand)
ccaattagggggaggtctcatctacagcttctctggtatgttttccaagttttcccatctgtctcaagtttaagatttttgggtttttcttttttaattttatttttgttacattttcctacgagaggaaaaactaagaactaaggatatcgtctgcaaccaatacaaaaaattaaagaaaacaaacagaagaaggttactaattatctatttcagaatttttaaaagaaaagtttgattgcaatttcagc

SEQ ID NO: 56276 - DNA, 972 bp, Populus trichocarpa
  Intron number 1 from transcript POPTR_0001s15440.1 (locus POPTR_0001s15440) derived from phytozome v7.0 (chr-ID scaf fold_1; pos 12271392 to 12272363)
agttgcacattccttaccctttatagttcttcgtaatcatctccttttctcttccaaagtttttgccttttttttttatttgattttttttacttatctgttcgaatacttggcacttttctctttctggatgtgtggatttagtcagataaaagctgattatggaattctttggaatctggtttgtctatctgtagaaagtattgttgtgcttctctgtagtttactattaaagtgaattgtactgttttgtttatgagaagattttcttttttatgaatgagaagatagttgtagcgtgatgttattactgggtttggcaattggccttgagcagtggcattaaatttgtgtttagatatgatgcctaaacaacaacacggtttctatttaatctgttttatgaagaatttgaaagaaaaaaaaaagatgaactttctgtgggtatttaaaataagctgcagattaggtggaggataatggagaatatagcctgaagatttaaaagttgaattgtttcttagcaacttaatttgctcttgcatactcttttattttatttaatagggagaattttaaaattgaacttatccttcgtttgcatagcatgaaaaatcatgatatgcatgtgaatatgttgtgtattggaggttaaattctgtcgagaatattgcgcaaagcttgtctagaatataaaatacataatatttagaaatatttggatgttttgcagattttagacgaacaaactgttcatgtgttttatttgtccttagtgcagaatctaaaattagatgaatgcttttgtttcattcagatttttttccccttagcatcttaaattttgtcgaaccatggaacgtaattgtggatactatagttccattacattctatttgcttttatatttttgtgcttttgcgattcattcttttattctattcttccttttatggcaggtattggagatca

SEQ ID NO: 56277 - DNA, 570 bp, Populus trichocarpa
  Intron number 1 from transcript POPTR_0011s12980.1 (locus POPTR_0011s12980) derived from phytozome v7.0 (chr-ID scaf fold_11; pos 15701488 to 15702057 reverse strand)
gggccaaaaggtaattataagtaatcattttataggggtctaaatgaacaaacccttaatatagggatactttcaattaataaaaaaaatatggggtgattcgaagcagagaaaaaagcatgtgaaggttcgcaatggattggaactacttattttaattctttttcacatgtttcttttttttttacttatttggtgcacttgctgtctaacagtcaactttaaagaagggggtacatgatagatactgcatattatacagggattcaatcaaatcaaaagccaaaagccattgacgggatccagtaaaaaacgttcgaagagtatagctagggacgtcccacctaaccgcgcctcagttcaaagcattccacttgtgccctcaaatatgccgtttttagcatgaacattttcaccatctatggcagtcatcaatatcaaaaagtgaggtacagggaaaaggaaacaatgggagtaccaacggaacattgcattcttgtacttcttttttgctcctctttattgcttattgtagaaacagcaactgctattgacaccataaacacaact

SEQ ID NO: 56278 - DNA, 648 bp, Populus trichocarpa
  Intron number 1 from transcript POPTR_0012s02730.1 (locus POPTR_0012s02730) derived from phytozome v7.0 (chr-ID scaf fold_12; pos 2246069 to 2246716 reverse strand)
ggtgagtgttccctttctttcattaaaattcaaacttttttagatctatcattgtctttatatggatctgatgtgatttatgtgtttttgattggtttttggaggtgggtttattagcatttttgtgggattggttttgttgttgctgaaagctcaaaactttatgaaaacaatgagtcgtgtaagaatgtgggatttaggctgtgttttttgtatggcggggacgttggatctggatttagatttgtcataaatttatgggtcttcttttgtttgttttgtctactacttagtggagggtcggtatttggtgctgtaaaggtttgagcttactttgcgttttgtacagaaaggcaagtgtctgccttgtaaactgatcacggagattggatctggtttctttgatatatcaaaataatgacttcatttggcatttatttttcattttgattagatacttgaatgatcttgtttattttgttgaattttagttaagcagttttttaaggctttagctggatttgaaatttcttagttcttgcctttagtatcagagtagagcttggtaattcagttgtttcaacaattatgttcatgataaattactgttttttgtggtgacagctggtgattggttgcaaggtccat

SEQ ID NO: 56279 - DNA, 460 bp, Populus trichocarpa
  Intron number 3 from transcript POPTR_0011s02920.1 (locus POPTR_0011s02920) derived from phytozome v7.0 (chr-ID scaf fold_11; pos 2863779 to 2864238 reverse strand)
aggtatgcattgtttctaaaatgaataaatgtctgaattttgttagttgcttacttgggcactattattcaccatgttgcttatcataaaaaaatgccctgtttgaagctagatatgctactaggacttgaaatattctattctgcagttatttaagcaattcaaactcttgcttggataatatccatattgtcctttattttcaaataaaagagaagatggaatgtgactatagatcagtggagttaattggtatgctcatatattcagtagtttcctagtagcattagaaggttttctaagtaaaggatgaatatagctgttatggaaagcttctttatttcagttcttccgtttgacctgtccaaatctaagcttagcttccttattcctttttttctcattgtctgtatgctttatggtccacagccgaaggtaaacctcagccttcaagactcct

SEQ ID NO: 56280 - DNA, 563 bp, Populus trichocarpa
  Intron number 4 from transcript POPTR_0001s44670.1 (locus POPTR_0001s44670) derived from phytozome v7.0 (chr-ID scaf fold_1; pos 45105952 to 45106514 reverse strand)
gaatcaggtaccgatttaaagttcctttctttaccaacaattgattctgttaacctttctgaaatgatagtcatcaaatgcctcatcataaaccaataattgacatttaagggatgagtgatccttcagtaatgtgaccttgattaaccttgattagttaatcatcatgtatactgatgttaattaagtttgtgcatgagcccagaaaaggagcattgatgtcaattgaatcactgaaccataaagctactgttagttcgagggatgtgtgaaacaatctatgactttaccaaaaccaattaaagagtggagccacagaattaatgatgttttcaatgcaatgtttcattgttcatgatcttcttaacagtttgtgtatgcttttttgcttttatttaatggggtctgcatcactagatcgtacagtgagacatttttttagagtggagccctggtgttaataagagaccaaactgttttaatgtgaatgctttttgtatctcaaagttttctgtgctctgtttgcagacagcaattcctatactaatagggaccaaatttga

SEQ ID NO: 56281 - DNA, 609 bp, Populus trichocarpa
  Intron number 1 from transcript POPTR_0001s46240.1 (locus POPTR_0001s46240) derived from phytozome v7.0 (chr-ID scaf fold_1; pos 46659903 to 46660511 reverse strand)
ctaaaaaggtggaaactttatttcaaagaaagtagttttttgtggggttctgaggttgttttaagtatggctttttttttggtggtgggttttatgggaaatttgtgaaaatgggtttgtggtgtttttgctgggtttttgaaattagattttgtttattgtttattgggtgtttttttggtgggtttttaagtgggaggattttttttagatatttttgttgggttttgagattgcttttgtggagttttgattttagctttgaagtttatgttgttatttctagttatggagatgagtggatagagaatttcaattattttaaagtctactttttttttgcattggtataaaaaaattagagtttaagttagttttccggaattgcttgagtgaattgaattgttcttagttttccatttccaggcctttggattcattttgctgttgtgaaatttgcgtgctcgaaatgacttttgacaggattttttggttattcattgatgtagaatgtgcatttgaatggttcttcagttaatggatgtgctaatagtggtgcttgttgtctgtgtaggtctttgaatctataaagacacaagaagcaacgag

SEQ ID NO: 56282 - DNA, 852 bp, Populus trichocarpa
  Intron number 1 from transcript POPTR_0012s04040.1 (locus POPTR_0012s04040) derived from phytozome v7.0 (chr-ID scaf fold_12; pos 3252275 to 3253126 reverse strand)
gacttttggtccaaactcacatcgactgtttgaaggttctctctctctctctctctctctctctctctctctctctctcttgtgtgcactgtgtgatgtaaaattatatcagaagcattaagaggttaattcaaatttgtttgtgaaattatttttttctcagcacaagtaactcaacttttgcctcattaatttcaactatatttatggcagtgttaccaaaatttatttaatttgatcatgatcttgaggtatcaaaatcatgttaatgtgtgtatcagattatgtttttccttctacatttttatggggttgtcaagagtgcaatgttaagtggctaagatagcaccaaccaacactctagaacattacacttggtcagcaaaacacaaacgggaaaattctacaacatgatcttgagcttcatggtccatttttttgtggcattttttttctccttcctttttcgtactgatgaaaaatccaaaacatggtactgtgatgctagcaagtttcaagagtttgaagttgaaacacgtatacaagattcatcaaattgtgcagatatgaatagcaaataaaataatatatataatgtccccatatattgatgaggattcagaatcctacacttatcattaattttcagaggctgcattttcttttcaagttctgttccaaatatcacagtgatcagattccatgaattaatgcataggactcatgcatatgcatgaatgaaagcaatacatgacattttttcttaattttttctataatgaaatcaaagatttgaatacgatttgcattgtttcttcttgcttttgacatatcaggttggtaccgttggtg

SEQ ID NO: 56283 - DNA, 769 bp, Populus trichocarpa
  Intron number 1 from transcript POPTR_0015s13700.1 (locus POPTR_0015s13700) derived from phytozome v7.0 (chr-ID scaf fold_15; pos 13535388 to 13536156)
cagtaactatacgcttggagaaccgcgttttgcaggtaaactatatatccttttcttctttaccattttttctccattgtggctttttggcttttctggtttctgggtattaatttgttgtcatttaattacacgggtaattcatgtttcctgaattagttctctatttgcatctccccagtttcgagtctcttaatgggagtgtatagttttggcatttgaaaattaagaagatgatctgccatactgttggatgctgatccatacctgtttaaaatgagttttcctttttgtattcactggtttcgtttctcttcatggatgtaagataggctggagttctaaatcttgttataggtgtttcttgaagcaactgtaacattattgttgatatattaagaggatgttggaatcccactgttcgctgtatgtatttttcagcttctccagatccattaaattcttaaaggagtgaattgattctgacttcttctttatcagatattgtgtttaggagatttagtgcaagattttgatgtcattagcatcattagtacttttttatgttcaatgcaataatcgaaaatgatagaaaggtatttctgtgttggaatgttagatgggcaaggcagttcaaatttctgaaatttgataagatgtttaactgcttgtttttatatgtcaatcctttgcacgtattatgaatctgggctctgtttcttgccctgtttctgttcctgttaacaacagattaaggtgccgtttggta

SEQ ID NO: 56284 - DNA, 468 bp, Populus trichocarpa
  Intron number 3 from transcript POPTR_0004s22260.2 (locus POPTR_0004s22260) derived from phytozome v7.0 (chr-ID scaf fold_4; pos 21174247 to 21174714 reverse strand)
cgttggcgtagtctggatccagcaaggcttttgtggtcagtaataaaatctgttctatctgtaacatttgattctctaccctttactacaattaaaactgccaatcccatttacaagtttcttttgtatatctataatcctgggaaggctaggcatctctcgtcaaacatgtttgagttaaggttacattgcattaggtgtgacaaccattgctactacacatgtatcaacagtgcaacccattgcttgaaggtgtttgctcaaagatgcctaggcactcaaggctacctctattattctcctactaggcaatatattgaaacatatgtaggctacgtaagatgtttttttggttgcaatttactgcatttgttaatttcaaaatgcctaattgatggtgctgcacatactttttcttcatctacataaatgcagcgtgtttcatttatagttaatcggatggtgcag

SEQ ID NO: 56285 - DNA, 596 bp, Populus trichocarpa
  Intron number 1 from transcript POPTR_0014s08210.1 (locus POPTR_0014s08210) derived from phytozome v7.0 (chr-ID scaf fold_14; pos 6092572 to 6093167)
ttcctggcactaaaatcaagacacaagtttcccaagtatgtccatctccctccatatctattgatcattaattttaaccaaaaaaaatctctttgcttaattcctggcgcattaatgacgatagttttctgctttgctatttaccattttcttcaagtacagtggtactcttttcctggggtttttatttatgatttcaatgtttttctcctcaatccggctatatatatatatatatatatataattcggtccaataagaatcctcatataaaaatgaatagaaacatctttctgtgcccaccggattggtcactgcgctgtccgttttttcttctttccgacaagccacgaactaactgcaccgttgtctattcagctctgaaacgacaagtcgtcttcatgtttgcgaagactagtcgtcgacataggtttcagctagttcaaccaagttgttcataaggaaaagagagtggattttcagtgtcgtggattttctaatcttggaccaaattttgtgtccaaactaactcactctttttttataattcaaaatattcagctcattgggaaaactccaattgtgtatctgagcaa

SEQ ID NO: 56286 - DNA, 917 bp, Populus trichocarpa
  Intron number 1 from transcript POPTR_0014s10670.1 (locus POPTR_0014s10670) derived from phytozome v7.0 (chr-ID scaf fold_14; pos 7944351 to 7945267)
cagggctctaattcgatttgagaggctgcatttaggtatagatatctctctatggttctctttcacttcgacatgacctggaataagtatgggtgtttgcttgaatacgattatctttgcaaaagcatgacttgagtcttgatgatgtttattgatgatccagtttaaaaaaactagagaacaggcagggtttgtggtaaatattgatgtttctgcagtttgggtgtgaaaatgcacgaaagcagtccgaggctttaaaaacaagacaagcttgttaaaatgccgtttcatttatcatgatcatttatgttcccctatttttttttgtgattgcctgaaataagtgctgggccttcgagaaattcctacctgcttgttctttgttttgcttcatgtttggtgtgattttactttgataatctaaggtgaaattttaaattactttggataaaaagttcaaataaaactcagatttgaattttgataatattgcatgataattgatcttttccttgttgatgctttgagggtttcttcaaggggttaagatccaaggccagcaataactattcgatgatagattcacacttgtgtgttttggcttctcagaagcattctaaagtacagctgccacttccttttatattatgattaagtttattaaaagaattttaattgaaaaaactgcgcaatttgtttctataaaactaagaaaggtggctttcattttttttttcttaataataaaattgcatgccaacgcatatttggtcccaaataaatgcgaatgaggtctccagtgctgatatatcccaccatcacaaattttctggtgtttgtctttatttttattttctgctgtgccccgaactcatttacttgctctattttgtttgcagaaatctgattcttcaatc

SEQ ID NO: 56287 - DNA, 644 bp, Populus trichocarpa
  Intron number 2 from transcript POPTR_0014s10670.1 (locus POPTR_0014s10670) derived from phytozome v7.0 (chr-ID scaf fold_14; pos 7945413 to 7946056)
aggataaaccaattgtttgtatgatatgagcctcttaatgttttcttttatttgctaattgagtaccacacgacctttcattgcttcagatcactggtaaatgatttactactgttttccaaataacaaaataagagcagcattcaacacatgaatattaagaaattgaaaagaaaacagaatgaaaaattgaagcatacaaccagtatcactatatatttacatgatctggtaatattttgaagcctgctatgttagacttgtacatttgtattcttggtggtttctttaccctaatatttttctatctcctgaaggaaagctaaagtaaaggcttgagaccaatttatatgatattaacctcacagatactttacatccaacggtgctgaatgtgctcaagtgtgaattattttctgtttggtatttttaatggtatgccattttgcacatcatgttatttgcttcacaagcctgatacaaagtactttaattaacttacaaaacagtatgtcttctctatgaaaattttatgttcctttcctatcagcaaaaagagaacctttgtttttcctgaatgcgttttccttttaatcttactgcctctagggcgaagttggaaagcttctgaactgcgtctgaag

SEQ ID NO: 56288 - DNA, 623 bp, Populus trichocarpa
  Intron number 3 from transcript POPTR_0014s10670.1 (locus POPTR_0014s10670) derived from phytozome v7.0 (chr-ID scaf fold_14; pos 7946145 to 7946767)
actttcgatttcccaatccagagcgcttacccaaggtatatccaatcttctttgcttgtattttgatatgagcatgtcattgatgttgctctgagctcctcaaatgcgttgccttatattcctgcactgacaacgacttgaataatttagcccttcaaaccattgaatcactaaaaataaatgcactaccggtcagaaaagccagggaaatgacatggcttttcatatgcatgcaaacatgggcttaatgtgttttataatcatcatctccattttctctctcattctctattgggggagtggtggagggtttttcaagatatatatattttgttgtgtggtgtggggttgccagcatatgcatgtaaaaagcttgtttgtatgtcagatgaagtactacaattacaagcagctttgctatgtactcacttgtgttttgatagtttcttacaaagaacagaaaagtaaaagaaggattactagaacattgcttctctttgaacttagtatatcagtttttaggatgcaagttgtgttttttttgtcccccagtgcattctcacaagcccgactgcaaattctgttctatttcaatgaacaatgaaattcaggtgaggaagtca

SEQ ID NO: 56289 - DNA, 944 bp, Populus trichocarpa
  Intron number 2 from transcript POPTR_0014s03240.2 (locus POPTR_0014s03240) derived from phytozome v7.0 (chr-ID scaf fold_14; pos 2577674 to 2578617 reverse strand)
gttggctttccggtgttgatataaatacccagcaggttttgctttatgtttatgcttatagacatagcattggtattcttaatgcttagtgtcattagtgaactttacattgattttacagactgtccgaaaatggattattagatttagccattcagtgattatgggataggatgactgtaccttatgattctgtgaactgtcatttggaaagagaaaaaaagtactgcctaaaacaggatagcttgtccaatgtgaactgtgatcacatgggttagtaaaaaaaccttaggaaattgtggatgatgctgcttgacatggatataagaagcttgttgataagaaatgactggggactcttgttttgcggagtgcctttgtgacctggaatgattgttctttaaatgtgtaactttttctctgtttgtcctaaccaataggtttgtccccttgtttgggatttgaacctcaaacctccaaatgttgataaaatgcttactttgccatctcatctaacagtctctcacaattttagcatttttaagtagatgctaaaaatcataatgccctctcctgtcttttcttccaatcttttatggatatatacctgtccaatttttccacaagttgtatcagaacaaaattcaggtgctgttctttcagaatgctctttgtctgcttatataattttgattcaattcagttttgccacaatgctaagactgtgttagtggaggcaagggtttttaacgaatgtggcatttagccaatgccttgaagttagtctttctgaactaggatgaattcttaattgcagtatttttttatatgattgttgtttgtttcagtattgttgctgcttgttgttgctatctgaactgactggtttatcatgtttgatattaacagagttttgaagctctgaatcaacgtgctgtggcagt

SEQ ID NO: 56290 - DNA, 859 bp, Populus trichocarpa
  Intron number 1 from transcript POPTR_0009s06210.4 (locus POPTR_0009s06210) derived from phytozome v7.0 (chr-ID scaf fold_9; pos 6053088 to 6053946)
tgtctcaaggtatgtttaaagtgatttctttgttctttgtatttggacaattgaatgctcgtttcagtgggttttattgtttagctgtattccttagaattatatgtcaacaatgaaggccaaaagcaatcgcgaagtattcaaaaggtaatttggcagagtatgaatggctactctcttcagttcatggttaagttcaactcgctatagggacttgaaccatccattcaagtattgaattaaaatctgattattatcacattatcaaagagaaattttctgctgtagttgagcagccaaagaaatgccatcgaactctccgtactcgtccaatttcatcaaattatgaaccctgtctatctgattctaccatatgctaccgatgggcctcggagcctgatggccggtttgtttattgggtattgaaattatgatggagaccacatgagactgctgataacaaattagcaagtgtactgttgtcactatgaaccatggaaactatgaagcaatggactaaaaacatcaggctattttaatatgtttatgctctttcatcgaatcagttcaccttaaaactagtcttgactgccaaattctactgcataatcttcttggttaatggctgcctgcttctactttacctgaatatgtgtataccatagttcatttggccggctcttcttccaagtaatatcaaggaccttccatagtttatcggtttgattgaaattttagatacctaaagcagagatgtctaatgctgaaaatcttattctcagtgctccgtttgttatcagcttttcttgctcatttcaaatttatcatctcaaatatccaatttcttgaaattaacagc

SEQ ID NO: 56291 - DNA, 795 bp, Populus trichocarpa
  Intron number 1 from transcript POPTR_0004s12140.2 (locus POPTR_0004s12140) derived from phytozome v7.0 (chr-ID scaf fold_4; pos 11065983 to 11066777)
agtttagaggtacaggttgaggcagttctgacctcaaatcgttttctcttgtactggacgaatcgatcgaatcatgatagattgataggtatagtgtccttatgattcaaatagtggagaccatttccactttggttgagcataaatcagacaaagatgtacaggcggtagttaaggaattgactgtgttgacaaaggagaagccatggactttgagtagccaatttgattatgtagttctatctgtgcttaggatcctaggtgaagtcgaactccaagacaaaacaagaattcttgcactagaatttgtgattgctttagctgaagaaagagttcagggtcgacagatgtcttgaattgtctgatgaatctcctttcgagaagttatgttctgatgtgttaccagctttggtaaaagcactaagtaaggtaatttctatctggaaatgacattttttttttaatcaaagaaatgactttttgttaagcttcgctgctatttaagaaatttgtaatttgtaattgctattgctgagtaggaatccttgcccgaaattgctgcaataattttggactcattggagtaatgcatgaaggtctgtattgcttttaataaatctgtactgcgtatagctgtctatgatcttacatcagaagaattcaaattgcttgtttctactttaatcatatttttttccctctatatatctttccaaggataatgattctgctaatcgaattcatatgttatagcaaaatgctgttcgcgtactgatgtgctcttttatctttcag

SEQ ID NO: 56292 - DNA, 708 bp, Populus trichocarpa
  Intron number 1 from transcript POPTR_0004s23270.1 (locus POPTR_0004s23270) derived from phytozome v7.0 (chr-ID scaf fold_4; pos 22063303 to 22064010)
ggacgatactagtgtagtgcaagaaggcattcaaggtgatatatctcaacaacaacaaatgagtttggttaaggaagccattgcagatcaattgtggaatgattataataatcattaagaatttattgtatcttaattaatattgttcatgggtgtaagacttcattatgaatactctaacaatgaaaatattatattgttatgttcattcttgtacctcattcaatttaattaggtggaaaatttatctcaaaacctttcaaaataatgataaaaaatatttgtgtatgtcaagatatcaagaatatcatagaaaatgtttaatttgaatacaattttcattttgccatttttcccaaaatcgaaaacaatataaaatgaacacattttccagttttctgagttggaaaaatgatctgaaattttaagaaatgaacatgttctctattggagaagaaaaactagaaaaagagaagaaaattgaaaatgataagggaaaattgttttgtgttattgaacagggcctaagtggcttattgctaaacttggttttctttttcttgttattttatgttgtgttgtcatgttcgcttccaacaagtgtaaatttggaggacctgcagcgtgtttttgttttgtgtttttttcattataattttaaaatacagtggttgctgatggatttgtgttgctacaggaaattaaagc

SEQ ID NO: 56293 - DNA, 908 bp, Populus trichocarpa
  Intron number 2 from transcript POPTR_0004s23270.1 (locus POPTR_0004s23270) derived from phytozome v7.0 (chr-ID scaf fold_4; pos 22064893 to 22065800)
agcctggacaactgcaggtttgaaccatttattttgtgatacagtattgttttaaattaatggctttgttctctattgttattcttacttttatcttgttgagagggtctctatttgctatatgcatccatatagatttgataccaaactaagcccctgccataaatttcctctttttattccagaccccttatcaattaagtattttttattatccttttttttagttctgcagacatgcaacctcagctgacattcctcatctcaaaacttttttcaaactcagataatgtctgcttgccggttatacttctagtcttgctagacttcaaaaccttaaacttgatcatatttgctactcagatttaatttggctttttctccacaagcggtgcagttgagtttgacttggttcctgtcatttgagaaagccacaaaggacattgctaataagatagcctttaacatcttaggaagtgatggaggaacttgtggtgtctggagaataatttcatattagttgctcaatgattctttgaagatgtgtgtgtagtctgaataaactttcttggtattgtatcttcagcttccttgtgtagctataaagatgacatcttgaattgaaaatgttcgatgcagctgtatttaaccatgcatataagagttggtgttgccattttcttgtttctattcccccttagtttcctagtcttgcagcaaattgtatggctttgctatgtttgctcgcttgatgcattttttttcatcctttcatataatgtctgatacacttttcttctctctctagctctctttttttcttttttccctgaagatttattttttattcatctgctagctactttctgttaagattgttgccattgccttcaggtacttgacattgg

SEQ ID NO: 56294 - DNA, 615 bp, Populus trichocarpa
  Intron number 1 from transcript POPTR_0014s07620.1 (locus POPTR_0014s07620) derived from phytozome v7.0 (chr-ID scaf fold_14; pos 5716983 to 5717597)
ccgtagacttctcaaggagggctaagactggcaaggtatttctgttcaaaacattccttcttcgctggtttggagctttcttcctgttggtgcttgacggtgcaaatcaactatgggaagtaatgactcaaacaggagttagctgaagaacgcctgaaataaactattgtggagccaagaggatggattggtggaagccctcgttcactcccacagattatgtgattctccatgactcatcaatgtttcctccacttcagagaaagttaatggtaaaacctccgtttaattgctgacatctcagaaaggaactggttcaagtttgatactggtagctagtttggctggttaaaaagtctgctgtatgccgaaagtagatcttacttgaaatattaccagtttgatttaacctaagtaaaccttaaggtctagaataggtagcgagcactgagtagaaatgaagacctaattggcactttatttcacctcagaaattgaaaatcccctgaacacacacaagattggttcatgtagcaggtctcaaagagaataaacttcccagaaattgtttagcatacttgctcattatcttgttccagagaataaagttcccaa

SEQ ID NO: 56295 - DNA, 698 bp, Populus trichocarpa
  Intron number 2 from transcript POPTR_0012s05430.2 (locus POPTR_0012s05430) derived from phytozome v7.0 (chr-ID scaf fold_12; pos 5065787 to 5066484 reverse strand)
aaggtaataactttattgttattattattattattatttgtttgacgcttgaattgttttgttttgatacttatgttgatatttatttggatgcaaattatggattaaatattttttttctattttatccaaaaagaagagagataaaatgggtagagggtcaggtgaacaagtgtgtttctgatattattatgataaaatgtgtgcatctctttcaacaatgtgcagtgtgggtacttgtcctactttccaagtatccatgtcgatgatgcataggatattttctttaaattcttgtagtgaccatgaatgctcaggtaaaattccctgcctatttaatgaacacacagagaactttgaaagaataataatgatattttgagtttgcctatttgatttttgtactataggtgatcttcttaaacccttttgttttctcccttttcactttctgtatgagtaagaactgaactttgatttgaccaagaccataaaattgattgcaagtgatgcttagcgcatactttgtctattgttagcagattgctgcttatggtttatgcttacgaagtctgggttcctagtggctcatgtatacagtgtgtgatcccttaattctatcttactattagtttgttcaaattattttctcatgtgcatttactttttctgtaggtaacatcccaaaatttcctcgg

SEQ ID NO: 56296 - DNA, 372 bp, Populus trichocarpa
  Intron number 1 from transcript POPTR_0077s00240.1 (locus POPTR_0077s00240) derived from phytozome v7.0 (chr-ID scaf fold_77; pos 78696 to 79067 reverse strand)
ggattcacaggttactaggtaactatagattctcttcttcaaccttttttttcctggaattatagcaattaaaagttatttaaagcaattaaaatttcttgtgcatattatagttttttttcctctcctgtaaatcatttttgcttgaaaaggcacaagtctgttctgttttttagtggaaaactaacttccaatggacttccaccttaatggtacaatatcgatgctgcttatataataaaaattttactcccatacatccaccagtttcttatagattttttattcgacgtaaagatacaatttgagttaaagatgcttctttcattttttgcagtccggaggccaaactcataagagaagttgtgcaaa

SEQ ID NO: 56297 - DNA, 810 bp, Populus trichocarpa
  Intron number 4 from transcript POPTR_0012s07890.2 (locus POPTR_0012s07890) derived from phytozome v7.0 (chr-ID scaf fold_12; pos 8851315 to 8852124 reverse strand)
gttctccgttagtcactgcatcttaaaacagatgcatgatttagcatttacatcttggcttatcctttatatgggggatctttttttttttcctggtttacaggggaatgattcgaacttgagccacctaggaaatcaaccatgtcttgcactgctggaccatatccagtggtgctataggtggatctttacttgtcattattttttctttctacctataggcatggctcatgattacctggtaatccctttacaatggtcctttctattgattgtaaatccctgtcggtttgttaattgaggtactctgctgcataaagagtaaaaccagtataggaagaggttgaacacagtggactttacctattcattttatccaaggagaaaatcaaagtgtgaattaaatgctctttttactcatttcctctgttgatgagcttggttgctatgtctgaacatggacaagctgattttgaaaggcaagagttagatggtccatagttggagactgcttagatgaactagtagtcatagtccaattaggaagtgcttgtgatgcaattatctgattcggatttaaataaatatgacaaatttcgtcttaaccgtattcattccttgcacatttcattgaatcagctgggtaatttgggttctaattggtattagtggatgaagagtttgattaaagcttaattttgctttaatgtagtttaatgtactttttcatgacttggcattatgggatggcatcaagtgttccttaatggaattatgggtttgcaggataagagttccatatccctttca

SEQ ID NO: 56298 - DNA, 974 bp, Populus trichocarpa
  Intron number 2 from transcript POPTR_0012s06860.1 (locus POPTR_0012s06860) derived from phytozome v7.0 (chr-ID scaf fold_12; pos 7358971 to 7359944 reverse strand)
gagttcaggttagatgcttttaccagttctcctttctttttgctagattgaaaacatcttcataaaaaatggtttgtgactgaatgtggtttaagatgtcaatcacttgagggaattcatactggtacctggaaactaagtcctggttacttcacttcatttattttatctcctaggagtgtctactttgcagaaggcacaagaaatttcccatttaatgaaaataaaaataaaaatgcacctccccttgaacttcactcatactttatttccaccttctcttaaacattttgtagtggttagctcaatcacaccattccaattgttcacgtgtagaatagtcaaggataaaatcttggtttgttaaattcctaaactctgaaaagtttataagggacatgttatgtaccgaaaaagttgcattttgttacttttaataacactttcttattcaaatccagaggctaaaattgcaagcgtacacactttggatgatctcgcaatatgaattcataatggaaaaaataaaataataaataaacatgaaagcaagtgatactacttaacccactaagattatatcaaccctgtttggcttgagaagacaaacgatttaatccacccatacctagtattttctaaaactaaaagtgtgtaacaagttatgatttggtttcaattctatgacaaataagaatatgttagaagacagatgagacttaagtttgacacgcatttataatttattgaatgcttataagattttgatctataacactttgctcaatgttcataatttctgattgtttatgatatggtgtcaatttactttcccctgtcctttctgaatgttttgtccatcttggcctttgattggccttaaagttgaccactgtactctgttgatgttttgctgtgattcatgtaagtttcacagtaacaatttttatgttgaattattcaggaatttgtac

SEQ ID NO: 56299 - DNA, 659 bp, Populus trichocarpa
  Intron number 1 from transcript POPTR_0015s14370.1 (locus POPTR_0015s14370) derived from phytozome v7.0 (chr-ID scaf fold_15; pos 14000630 to 14001288 reverse strand)
tcaacgaatctcaacttccctcactctctaacaaggtaaattgtttcttttctccttttctctaaacctaacctgcttagtttctttcacgctacctttttttttcttatatcgaaacagcttgcttttgtatagttaatggctccgttttctgcatcttcgatttttcgctttaagtagtgttttagcttgtttttgttggaagtaataaactttatgctaaaatagcatctgggtttgaagaattttgaattgggtcattagagtttgttgattttaggctctgtctgtatttgtttgatggtcttgttatcaatttagtgcgagttttattgcataaattaagggtttttcttggtggttaagtatttaaattggattatctaatcttgatttgttgagccaatctgagttttgtgttttttgatggtttgctttatccggggttgtataccagcgccaatttactttgtagaagtatctgaatccaatttgattgaggagaacttgtcactatgttattctttggtaccttttttagcttaattttgagtttatgtattgatatccatgagtaatatctgctattttcatgcttgagtggatattggtgtgcttattaattgtaattcggttttggattgtgataggtttgtata

SEQ ID NO: 56300 - DNA, 619 bp, Populus trichocarpa
  Intron number 1 from transcript POPTR_0011s11930.1 (locus POPTR_0011s11930) derived from phytozome v7.0 (chr-ID scaf fold_11; pos 14716070 to 14716688 reverse strand)
acccttccgctcttgaaccccgttgtcgatttcaggtatcttttattcaaactgggtttctattgcctttcttacttcttacgtgggttccattttttcgggtctcgaaggcttttttttttttttttatttcttacgtgggcaatatttttatttaaattttctcatgtgaattatatactatgtattcaatgctattttgagtgaataagggctttcaatatcttttttgaatttagggttttattttattttattttggaaattagagtattgttgggtgtccgcacttgggattttgaattatttttatttgttgctgacaaacatggaaggggatagagaaatggaaaattggttagtgacaatgtgatgaaaattgtttatatgaattcaattaagaaaaaagaaaaaaacgccaattgaaattggaattctgtggttattattggatttaacagggtaaggtcttcagtttatgtaatcaaacatttatgcattagccacattttgttcagtagaagttactttatcttattttgaaatgctaaagcattattgtcgtgtttgaagatactgaaacttgtccattgaaatcaggaagaggattctgaggaat

SEQ ID NO: 56301 - DNA, 819 bp, Populus trichocarpa
  Intron number 2 from transcript POPTR_0009s03710.1 (locus POPTR_0009s03710) derived from phytozome v7.0 (chr-ID scaf fold_9; pos 4301960 to 4302778 reverse strand)
ccggtatcgtccctgttgcctaccgccggtcagtgactttttaaactctgtttttctctgctcttgccctgcttacatatggctctagattcgaactctttcagttaacactcggaaaacaacactaccaccttcttttctaactttacactacatagagttttggttttttatttcgataaacatccgaatttggatacattggactctgtaaatatacacactaattttaccactcattttagccgtcatcccctttgcaacatcatttcttctccatatatatggatacacagtactcattcttgcaagaaaaacttccatgccaagatgtaatttggcccaataaaccctaatggttctacagctataaaaatttattcaaaatgttggtaaagggagatccagaatatgtgcggaacccaccctttttttggtgggacgttatcgcttttttcaataaagttcctatctttaaagtcttattgtgacccaaacaggataggctcaggctggtggtgtaatcacacaaatcctgttgggtttgttagacctcaacaacttgtgctgtgtctttttgcttattttagccatgggacagtttatggtcactttctgcggtttgtcttgactctcactgcccatctttaatgctaaaagtaccaatccacccttgcccatcacagtttgtgtttacttgctaaaatcacgccccgggatatatgcttaggcttgaacttttttataatttatatgtttttattttttgcaattacgaaaatgtcccgacggtgctgatgtcgtgcaatgcagggtgcc

SEQ ID NO: 56302 - DNA, 965 bp, Populus trichocarpa
  Intron number 1 from transcript POPTR_0012s15160.1 (locus POPTR_0012s15160) derived from phytozome v7.0 (chr-ID scaf fold_12; pos 14779501 to 14780465 reverse strand)
ttttggagcagttaaccacgatcgttgctcaacaggtactttttttttctttttttataatcaacaggtacttaattacttttctacaattttgcaattaacctaacatttatagttcattatacattgatttcattatcttatagaatatctgttaatttgtcagaagctaaatcagtagcttgatttatatattatcacattgcatgttatcaaataaaatacacacacagacacacaagatagcgggttcttacgattctctttctttttctttatatcttttgtgctatacaaaatatggttattgtgatggctggttagaacaaatcaatatagtaaaatagtagtaaattcctttttcaataattccttatcatatttgaatgcataaatcactatatttgtaataaaattattatgataaaatgattaaaataaatatagtcaaatattcgattaattacaaacatgattatagaaattctaatatttcttttttattttgatatcaacctcacagaatttttttaaaaatagactatgataattattaaaagtcacctaataatattgtgaaattgcaatgtattgcgctccacaattatatgattattataatatctatgaattctatcttttatctaaagaaatcctttattcaaataaaatatattttaattcacgcatctagtaaattttagtacaataattgtgcattagcattacattatttacgagtcattttattttagagagtttattatatataatttgaatataattaacaatataaatatattaattgcaactgagaaaaagtttaataaaaatgatttactctattaattgctaaaaattaagaatttgtattgaaatcatataaatgtttcctatgcctaacgtttcttttcctctgtacactaataggtacaagaagagttgaacctagtagtgggtgtgaa

SEQ ID NO: 56303 - DNA, 360 bp, Populus trichocarpa
  Intron number 3 from transcript POPTR_0011s04540.1 (locus POPTR_0011s04540) derived from phytozome v7.0 (chr-ID scaf fold_11; pos 4511446 to 4511805 reverse strand)
aacgatttcaataaatttacatcaatcatagatatgtaagtgcattggtcacgtctatgtaattatgaaattggtggggaagattagtttggcgacataattttctcaatcaaacctgtttatggatcatgatgttttcatgattgttgtttctcttttagttcataggaatagtattgatgagttttaccttaaaaagtttgaagagggtggttaatgaccagaatcatccgggatgattttaagaattgacgagttggcaatggttaagttcatgatatatgcagtttgtaaatggaagttttgaagcccctgttgttaaagacttatggtactttctatcacttttttgttgcagag

SEQ ID NO: 56304 - DNA, 590 bp, Populus trichocarpa
  Intron number 1 from transcript POPTR_0011s04540.1 (locus POPTR_0011s04540) derived from phytozome v7.0 (chr-ID scaf fold_11; pos 4512057 to 4512646 reverse strand)
ttccttttctgtttcttacactgaccctagtaaaccattttcttttctgggttcatgtttttttggctgtcatgttttttgttggtttctcctccttgtttttttggatgttttgcctcataatgctctgtttgtttctgaagttttgatattttatttgatttgccttgtcagttgcttggctttcatttgcttgcgacatctgtacatctatgcttcttattttattttttttgaaatattaccgtgatttgcttattaatgctctccttcttcttcttcctttaatcatttgtgtttatgggaacatgttaaagaatgacttaaatttgtgctactgaattttatactttgttggtaactagacagagtttgttcatgccatctaatttacttgcctaatattccttattatgataattcttgacccaactctattttatccttgcttgattaatgatagtgtcacatatggttttatttttatttaatttttgtgagtctcgattgcttcggcttgttaaataatctctgactcagtatatatatgtttcatttctttctttcttcttttttatccagtgactgca

SEQ ID NO: 56305 - DNA, 1010 bp, Populus trichocarpa
  Intron number 3 from transcript POPTR_0009s16710.1 (locus POPTR_0009s16710) derived from phytozome v7.0 (chr-ID scaf fold_9; pos 12639344 to 12640353 reverse strand)
gtattgctttggaagataccttgttgcttgcttaggtatgtttcttactaaaagttttttgtgtgcaatgaagggttttatccgaaattcagtttaattcatctcgtataattttgtcatttcctagattctgtagtggtagttctttgaagttgtttactaattctggatggtctgatatattcctcttcatggaattgacatttccatgcttttgtccatgaatcctcttgtggaagtcagaatcttgggggttttttagcagccgaagacagtttccttctatggtttgtagtcaagctttttggtcctaaggccccagatggtcatgatggagttttcttgaatacaagctgccatgaaacaaaaaaaaaacttgttgaacatggcttatgtatttgttcctgttctgacaatttcaagggtgtgctagtttcttttgaaatgtgcaaaaattaaaacatgtgcgcacgtatttaaataatctatgggtaaagtaatataagaggcgaaattggcaagtttggctggaagaaattctctggcattgtcattatgatgtattggattcatttgttcatgcttctttcgtacacattcagagaagtatgtgaacatagtcaaatacattctacattgcacgtgtggtaatgcacatgtctggctgggtgccattctagttttaaatgtcatcttacagcatttatgtcaaattgcaaactataattatgtttataagtggatgttttgttctatataaaaaagtaaaagtttgatctagttgctgtgtgatttttagtattgtttattaacaaggcatacgagtcttctatgattttatagttttgtaattatacatatggatgaggtattttcctatggttttaattaattattttcctgatttcattttgtttattcttctggtgttgatattgttattgatagttgttttcttttatctacttcttaaaggtggggaagaaagaactattgagtttttggaaaga

SEQ ID NO: 56306 - DNA, 718 bp, Populus trichocarpa
  Intron number 1 from transcript POPTR_0015s08820.1 (locus POPTR_0015s08820) derived from phytozome v7.0 (chr-ID scaf fold_15; pos 10170046 to 10170763)
ctgcagttgttgcaaagctatatcgatttgtaactgtaagtttccatgctctgtatttgcacattgagtttgttctctttggatcgcatttgcaatacgttgctagttatttctgtaattccttcgttgtttttgttacacaccaactgtttctttaaatgccccttataaattctctttcttattttgtttatcctgctgaatttgattgaaaattttgagacccatctcagatttgtgatatttaagcttttccttgaaatactaaggtaccttatctactaggtttgactatgaactttgcttttgtataaatatcaatctaaagtattcaaagattttcaatttgtatcaagattttagaagaatgtaagttgtagagttggggagctggtaaactcttcggatctttgtaaaggctatgtggagaggctactgaaaagaagttccctttgcgaataagtaatttttctatataatgatttgacgaagaatcagttattttagtgaaacataatgatcactaatcttttattttgaattttgattatgtgagatataacaatttgtttgtgatattgaagagtgattcttggaacattgcaatattgagtggccattacatcatttctcagcaacttttttgcctgcccttatgctatactcactttttttcctctcaggcaacaggcttggcacccaactctctgtagttctt

SEQ ID NO: 56307 - DNA, 371 bp, Populus trichocarpa
  Intron number 3 from transcript POPTR_0009s15840.1 (locus POPTR_0009s15840) derived from phytozome v7.0 (chr-ID scaf fold_9; pos 12172905 to 12173275 reverse strand)
ttgggtaattatctacctttttttttttaatcttttcttcgtatcttctaagtatccgttctaaaaaatccaatcaaaaccgattttattttcaaaaacagaataaattaatatttttagttttattttttaaaaacaaaataaatatctaaatgggttttctttttttgatttctcggttcgaatttttaaaatttctaaccaaatcttcatatttaacttctcaagttgatttttttaaaattttagattgatttttacaaatattctacataattcagttattttactcaccggctgttatcttctgcaaagtcaaacaagctaattaaaagggcatttgattgaataaaccacaggagagtggttca

SEQ ID NO: 56308 - DNA, 893 bp, Populus trichocarpa
  Intron number 1 from transcript POPTR_0011s09440.1 (locus POPTR_0011s09440) derived from phytozome v7.0 (chr-ID scaf fold_11; pos 11693439 to 11694331)
cgagaggatcaaataaagcaaagtatctaacctgcagctgacaattttgtgctttagctctgtcttttaacttttatcaccttgatctagacgtgaaaattgtacgtgtgtgtgtgtgtgtgtgtgtgtgaccagctctctgcgtttgtatgtttgtgcgcgcgcatcgctctgtgatgtctaggaatccactaagtaccccttgagatccacatgcagaaggctttcttgagctgaatcaacatggaaattaggattctcgagatccacaggaatatgaaagatgctcttcttttgtacagtttttattatgaactagctactcgaggttttattttgtaaaattattaaaaactgattcacaactgtgaagctacaatcgttattttagacaaacaaggtccgcagtcgaatgttgagcataatttgaaaccatgaaatcaatgtgggtagactgaggacaagtaaaatattctcatcacaagcaatttctactgtcagataaaagcactcaacttccaatctctgtttattgaggcgaatcagcagcttctgttgcagcagctcttgtagattcttgaggagacagtctgaaaaggagaactcctactgagctttaacaagttaaaattagggagaaacaaactagaagtttctctagatcaacatattgagctcaaagtcaaatcgaagccatatatagttctaagatagaatagattgagcaagaatggaagcttcttagaagagaagaatgacaacgcacgtatatatcatcacattaaagtgtttggaagctttttctacagttttgtatttatgctttacatattgctggtttggcttatcaacgtgcagtagttttggctgttctatacaacgggcaacctgtc

SEQ ID NO: 56309 - DNA, 459 bp, Populus trichocarpa
  Intron number 3 from transcript POPTR_0015s10850.1 (locus POPTR_0015s10850) derived from phytozome v7.0 (chr-ID scaf fold_15; pos 11637428 to 11637886 reverse strand)
gcataattcttggtaagttgattttgcatgtagttttctttaccttttagttatgaatcttgaactccatttgttttttaattccttcttaaagtgaattgaaaatgagaatatgaatagtaaggattgatgacatctacagaagtgaacacttagattctcctaataaaaaataagaaatggtgcaatgagattggtaatttaaataaaatgattttcttctttgagattgcgaaccaattgcttttgcttattgcttttctggcttcttttacatcagtggttctattcctctcttaagaagataaataaacggtaactctagtttggtgatatatttctggttatggaagaacagcagttatgcggttgtttttgagtttgatgatgacaataatactcatgtacattgtgatgttttcaattatcatgttaatctttggtcaggcattggctata

SEQ ID NO: 56310 - DNA, 935 bp, Populus trichocarpa
  Intron number 1 from transcript POPTR_0015s00980.1 (locus POPTR_0015s00980) derived from phytozome v7.0 (chr-ID scaf fold_15; pos 572745 to 573679)
gccgtgttcgccgccctgctctacactaccagtaggtaataatactagaagaaccacaaaagaaaccctaatttttttgaaatattttgaaggaaagagtgagattattaagtagatgaaagctctaaaacggagtcaaacatcgtcgtcttcgtcaaattcatcttctcctccgtcgtcttcgtcttcgtcgtggattcatttgcgttcggttctctttgtagttacttcctcctcaccggcttattgttcctcctcttcctcttctgatcggtgagtcctccttttctctctctgaaagtactttcttttactctttcttgatgattctagtgattttcttcttttttgctttgttcagatccgatcttgaagaaatattaagtgtagatcgtgtttacagtctctactctctactactactactactactactcactccacttgttctttttctctttgtttttttttaagttactgctttcttagatggaatgggtgtggctttggcttggtcaatttaggcaatttttatttttttattattttcacggaattttttgacatgggttattggtaatttaatgcataacttgttttttagtaacaatggtgttgattattgagttgaaaattgaagatttgtttgtttttgcattacatttccgggagttagggtatggatttaactttatcttatagcaggcttctctcgttaaattatttataatgtttcttgcaaaaattctattttatttgaattagagatgggtggtctttcaaaatctttgctggttttttttttgaaaaaaacttgggaaactaccaaataaagtgagctgtttgctggtgccctttcacgttcacttttttttttttttaactggaacttgatcaatattgttcttttattgcaggggccggcttaagtcgcc

SEQ ID NO: 56311 - DNA, 811 bp, Populus trichocarpa
  Intron number 1 from transcript POPTR_0012s11850.1 (locus POPTR_0012s11850) derived from phytozome v7.0 (chr-ID scaf fold_12; pos 12216155 to 12216965)
ctaaattggtgagtttctaagcttctttctttattttatatggataatcgttatctgggtgtgatttaattttgaagaattttggttccattattagtttgtaggtatttatttagtttttttatgcaattcctgatgtgggttttgtttagttttggaaatttttataatttcagcaaaatctgatgttattttatctggactttttttttgtttttgtgatcgcaattgagaactgagttagctcgtcgtaattgtgaatgttttgtgtgttttgttgtgggtttccgataaattttaaggatcttatatgaatttgtttaattctgatcgcttagcactgttttgggttataaaattagatgtacaacttaagtaagctaagtcttgatgttatctactacatgtgaacagcttttgtattctggtgatattttttcttttgtataaggaatcaagtgggatttatacattaggttagtggttgtatgaattgcctttttagcattgttcatgtgcaaatattatatgctttagcccttgctttatgagtccgagattgagacttgttaggggttcatttatctttgaatcccagacgcattgtttgtcatttgtgtctgtttttgcttgtagagaatttgtagcatgtccttcatttctttttgcataactaaatttaaggtggctgtgtttctccatgcctttggtttgactttttttttttgctgttttttgaaatacatcatggatttttttgaaatttaatatttggtttatggttgctttgtgctgcaggtgcttctcgggg

SEQ ID NO: 56312 - DNA, 575 bp, Populus trichocarpa
  Intron number 1 from transcript POPTR_0011s11830.1 (locus POPTR_0011s11830) derived from phytozome v7.0 (chr-ID scaf fold_11; pos 14625922 to 14626496 reverse strand)
tacttttcttcaagatctgcccttctgtactccaggtactctctccatatttgatcccttttttcattttttctttacgaaactcttgcttggctggctggctcaatgtatattgtttttatttttctggagatctatttggttaaacacatctcttactgtttgttcttcttgatttgttttataaaatgattacttgattagtttttgccttggattctctgactggcaaaatgtggttattaaaactgagctccaactccaaattattactgaatttctcattaatttagactgccaccgttgattttttcttggggttatctttgttgctatgatttgatttctggtttttttttacctattaattacatcgctaatccggccaacctttttgataattgaagccatggcagaataaaatcagactactattcttttcgaaaactaatctgagcatataaaacagaaaatccgatatgcctgcctggtctaaattaatgtaattgcttgcttgtttgtttgttgttttacacagatctgtgatcctgattcgctattcagagccagctaga

SEQ ID NO: 56313 - DNA, 441 bp, Populus trichocarpa
  Intron number 1 from transcript POPTR_0011s07410.1 (locus POPTR_0011s07410) derived from phytozome v7.0 (chr-ID scaf fold_11; pos 8270843 to 8271283 reverse strand)
gcaaggtgccaaggtctatctgactgggcgacgcatgtagagtaatttccagtggtttgtcgatgattgactgtcttcttttattttttcttttctctctctcttgatttcaatgtctgcacttgcaacatttcacaataattttttaatttgtttttctttatattttgatcctcgttcttgttatgtagttttaattacttatccttcacaacagtctttaatttcttctcttctctctctcttcacgccttgtttccactttgaattctaatgattctgggaatgggacatagatggatggagtttcaattttgttacggtgtggaaactgtggaaatagagaagcttgaagttttggtgatgggttcaacaaggcttttaaaactatatagaaaatttgcagaaggatcttctagctaaggaatcttcacaaaagca

SEQ ID NO: 56314 - DNA, 701 bp, Populus trichocarpa
  Intron number 1 from transcript POPTR_0001s30620.1 (locus POPTR_0001s30620) derived from phytozome v7.0 (chr-ID scaf fold_1; pos 29108555 to 29109255 reverse strand)
gggtggtgttgcattagaaactctccaacttagtgactaaaggaaaatgactgttgcttttgtttcaagatatggaaattctacttaatgagcgcttccaggaaaaaacaattcttacttttcagttaaaaatgaatttttgtacttgattatggtatttgtggttttagcgctcaatctttgattattaggaaaagattgtatacttttctttaggtcattgatctggaacatcagatttacattctgtatgatttgaactgtttagattctaccaggcttgtgcaatattgcttttctgattagttcctgtggagatctactatatgcatgttgctgattggttgttaggaaattggagataaggtgttttggttttatatgctttacgataattcagtttgcgaccatgggaaaaagggtttttttttttttctttaatgaagaacatctcactttatgctttgtgccaattgagtttgattttcctttatttgttaccaaatagagtgagtgaagtattgtggtctcagttctcaactttcactatagatcagtgaaacagagctgctcgtctgctttgtctgatatatgataaacttgcccctcatcctcgctttctctttgaggaaggctcacagtattactatctggactctcttgtagaggatacactctggactggaatcccaggagactat

SEQ ID NO: 56315 - DNA, 359 bp, Populus trichocarpa
  Intron number 2 from transcript POPTR_0004s24130.1 (locus POPTR_0004s24130) derived from phytozome v7.0 (chr-ID scaf fold_4; pos 22863313 to 22863671 reverse strand)
tgtttgcccaaagatcacagcagtccctacgccaagtaagcagctcctctctaaaattacttgcagaaatgcctgcttactaattgttgtttgattctagtttcttcaccaaaatgcttgtagatctggtttatgaaagattattatgttggtattgaaatataggggaagacaatgccggtgttgcatttgatggttattttcaaaaggagaacacaatttaacaaatttgaaaaaataatgctttcaatcatcaagaagcttgatattattaatgaaaaccaaactctcttctcttgccatctgattttgtttacatgccagtggggaattttattcctatatcacaagtacgagat

SEQ ID NO: 56316 - DNA, 696 bp, Populus trichocarpa
  Intron number 1 from transcript POPTR_0004s24130.1 (locus POPTR_0004s24130) derived from phytozome v7.0 (chr-ID scaf fold_4; pos 22863848 to 22864543 reverse strand)
catgtaagtttctcgccgtttcttgttttgacagttcctctagtaatttgcttgtgtatatgtttctgggtttttgagagtttttctttttgtttggagtctaaaagaagaaactcttcatatgtaagtgtttgatgtctgagagatttttgcaggtccttgtttctctggttgttgttatgactcctgaaatgaaatttctcttatttgatgtgtgaggattgttcatggaatttaggtttggagattttacaatggcactgttaatttcaagggaactgaattaagacaagatgtggaggggacaagtaacttattgacatataggaccaaggaggaagcaccagcaattctgatgcatgttatcccccttgtgtcttatctgaattaactttcttggttttcactttctagattcttataatctgattctgaatagatactgtttatggtttctttggaataaaaggaagtagaattgcagtgttagatctcttacattgaatcccttttttgcgtttgttgttattaaaagcatgacgctttaatttctgattccaacaaaagagaagtgattgcctttttccttgcgtctttcaaatactattgacttatgaagatctcttactgttcttggattttgacatgcttgtggggctaacacgagttgttgcggtcattcttttgctggcacag

SEQ ID NO: 56317 - DNA, 863 bp, Populus trichocarpa
  Intron number 3 from transcript POPTR_0004s23050.1 (locus POPTR_0004s23050) derived from phytozome v7.0 (chr-ID scaf fold_4; pos 21854500 to 21855362 reverse strand)
cggaaaggtgctcaacataaattttttaggttttattttgtttcttgaagatattatgtttgtgtggtgaaacctttgagtgtttgtatatatactttgcaatttgagaagagaaacagtgatgaaatatcaacatcatgaggcattttaattaggcagtgaagagaggacactctatacttctaattcaaatcataaaagaactgttttaagtgtacttgaacagctgtgaagtggtgaaaaaatgaatgataagtaacatggttttggtgactctggattatttgtgcctgtagaagctacaactactgctaccatgaaagccagtactgtttacttggttcaacatttgtgttccttatgatgaggtctcattatgtttttggaatgtccccatgaagttaatatctgttaagctgagagggaaagctcgagagaacacatttcagtggaattttgacaaatcatgttggaggtcaactacttgcaatgtgacactgaatttcttgttattaatttcatgggtgctggataaatttttagaagaggttgatagttgatgtcaatagcacatatcagaaagagaaaatgggaaaaacaagagtgctcaaagttatttgttgttgaaattgtgaaattaacctacatatgcagcatagatttctgtaatgattgagcctaatgcatcctttaatgtaattttgtagcaaaaaagatttttttcactttattcttaacattcaaatgttataattctcttaaatattttactatttcctttttctgaacttgtattatggtgttttaactgttgtgtatatgctgcagaaatttttggatagttccaagttgaaaagacactt

SEQ ID NO: 56318 - DNA, 538 bp, Populus trichocarpa
  Intron number 2 from transcript POPTR_0004s06390.1 (locus POPTR_0004s06390) derived from phytozome v7.0 (chr-ID scaf fold_4; pos 5134776 to 5135313)
agcagtacagaaaccaagtattgccttttatttttagattttttttaagctattttttgcaatatgtcaacaatgaatttgttgtaatgtgatttcagtatgggaactcaacaacacattcgaacggagttttgtctaatggagttaatgaaagaccgtaagtgaagtgattgggttttcaattatttatttatttatttatggtgcttgatgattcttgggaaagaataacagatcttatgcctttgcatgttaaagatatgatatattggcaatgtggctttgcaattattttgccgaaatgtttccatttaacagactctcatgtagaactaaatgaattagcaaagaagttttaattttcttaaagttatcttatttgacctttgagctgtgcaattaatggtggacaggctaaaatcattgttactttaatgtttgcaagaactagctaactgccttttgcctcgagaattcactgattttttgtttttcatttccagaaagaagtctttgcttcctgcttttgattctgctg

SEQ ID NO: 56319 - DNA, 385 bp, Populus trichocarpa
  Intron number 1 from transcript POPTR_0015s08800.1 (locus POPTR_0015s08800) derived from phytozome v7.0 (chr-ID scaf fold_15; pos 10150238 to 10150622 reverse strand)
ctaagctctcctccgataaagccaaagctcgagaagtaactgtctccctctccactctgtttgatttcccagaaaatgaaataaaactaaaaatagaaatgaaactgtgactttgattttcttcaatgccgttttttctctccctaagctgaactttaaattaggcgcgatgaaatttatatattcatttttctccttattgataaaaacaatgaattagtttgtaactcgcttattatattgtttgtaatttctgtctgcggttattttttttttgaagtgaatgattttattatttatcatttttaattcagtgtcaaatggtgataaattattttttgaatgcgtaggagggaataaagttgttgaatacgtggttagaggg

SEQ ID NO: 56320 - DNA, 633 bp, Populus trichocarpa
  Intron number 6 from transcript POPTR_0004s14580.1 (locus POPTR_0004s14580) derived from phytozome v7.0 (chr-ID scaf fold_4; pos 15165745 to 15166377 reverse strand)
atttggtggtaggtaaaatgtatggaacatgtggcttgtcagaattacttcttatgccgattaaccactgctaggttacaacttctgcagattcattgacatttgatagtttgaggggttctgtttctttttctttgtccacatgatttcaactgttgacaggccttacagaaaaacaacaagcttgttgtgccatcatgtctacatatttagaagaaaatttgtcacttgaacaacttactagctcaacaggcttctacttaaaagctcattggaagtccaaaaaataagaacaaaattctacgtgcaaagttgtcatttaggagttttcttttcccatagtgaggttctgaaatttgcgtaccccaaatatctatgaattggagctttagaaattgtttgccaatggtcccagcccttgttccccttcttactgtttgccatcgcgaaactttctattgtaatgtgggtttatcagcctgggtgttttaccagcagcagtgacaattgcacagtataatagccaaaaagtttgaattgttctttgctgtgcaggattttttttactcttgaaagtaagcttgttttaaattgttttccagagtgccggagtgcaatttcctcagaggcctc

SEQ ID NO: 56321 - DNA, 852 bp, Populus trichocarpa
  Intron number 2 from transcript POPTR_0004s14580.1 (locus POPTR_0004s14580) derived from phytozome v7.0 (chr-ID scaf fold_4; pos 15167175 to 15168026 reverse strand)
gcatttgatttgtttcttgctttttgtgagggaaagtaagtctaagttctttttggcatttctgcaaaattcgaatctcaacatgcgttattttttggactacctctcaccatgttgttcttgtctaaaggttttagtttcatatgatcagaccatcttaaagggctttccatcaaaaatttcataatcgttgcctcccctggctttatcagtcaattaattcttgttccatcagtgttttccaccaccaaagtttccacgttagcattcttattttgaccacactcattttatgaacatgttatttctttatcacctaatgttatagctggcctggcaccatttaatttttttccccttagttggacttgcattttacaatctcaaaaaggactggatgtttccctccttttctgtccaaattattttagatttatggttgatgtcttccctgatcttccctctgtattgatcttatcttttgtttggccatttaacattgttggacttctgtcgccatcctgaaactccgttattgtcttttggttttgtaaattgtttattgtgtgcaggggtgttgtgagtgtaatcaataatctggcttgtatgcatatatagtcacagacatgaagtgagttactgatgaactactagtaaaattgtaatgagtagggattatatgtgaaattgagctgtgattggcaatatgaggttatttgtaatttttattgcaaattcttaatccacttttcatttgttttatttagctttctcctgtcttatagaccacaagccataagagtgtttccaatctttgatttttctttacattatgaattcctgaataggcag

SEQ ID NO: 56322 - DNA, 618 bp, Populus trichocarpa
  Intron number 1 from transcript POPTR_0004s14580.1 (locus POPTR_0004s14580) derived from phytozome v7.0 (chr-ID scaf fold_4; pos 15168073 to 15168690 reverse strand)
cattttctctgtattccttgctgtttttctcacaggtatgatgttttttgttgtggttgtgttttaagatctggaatcgttattcgggtgttggggtttactgggtttggtagtaaatgtcctttcattttcagggttgtttgtatatattgttttattaattgggtcgtgtttgtcttttccttttatggaagtttgattgagatctagaggtgatttagcattaaagtttctgtttggttgctgcgagaatgtaggaatgcaaatagtaactgaaagcttgaattttggagctcagtggtctagttttaatttgttctgtcgcctctagtgtgataaagtctgtgctttggccgtatatacaatatttcttataatctgatattttacttggtgtccattttgaacagaattccgattagaagaatttctgtggttatgagtttattaaattgaaagtgataatgtattatgtttttatgattagtttgaaaccaagataactatgaagcaaacttcattactagttttaatgcatagtgactgtgtcgagccttttgtcttcgagtaggtttgtaattaatttatgctttatttttgttgtctgcagaatagtga

SEQ ID NO: 56323 - DNA, 834 bp, Populus trichocarpa
  Intron number 1 from transcript POPTR_0004s23770.1 (locus POPTR_0004s23770) derived from phytozome v7.0 (chr-ID scaf fold_4; pos 22385169 to 22386002 reverse strand)
attcccgggtccttcttgtctgactcaagaacaaggtgaaagtgctatggtttccatgttttcttcttcttctggggttttagttttggagagattaagaggggtttttagtgaatttgtaagtgaagtaagtaggtggtgttgcaatctgtttatcatcagatccctggccatttctagtgtttattaagagaagggtttttattttctcatggtttctctgtgtccaagcatgaagggtttttctttttgtaatcagagctactatttttgtttgtgtacgatatttgtagatattggcagataatcatgctgttttaggatgtgatcatggatttattttaattttctgtgagaattttgaatggttttgtttatattttcattttacagtagctaaaatacatgttgtgctgaaataaatgtgggttttgatctgtgaaaatggtgaagggcttttcgaacttgtgaaaggtccatgctttttgtaatattgggagttaaagttgattttttttttgaaaaaatgaggtagaaataaatgccaagtctttttgcttcatttaaggcaaaaagaagagatagctttggcactgacaaatgattagtaattaacgcaggcttttgtttccttttaattaggcaacactgaatcaatctgcatgatcattaagtgatagtaaatgcaatatctgtaatgggtttgtttttgtttggtgagataatttattgctactgtttttttttcctttctgttgttgacggagctacttttatagaagggtttccctaaattgacttcgctgctaattcaggggtttgtgtggttttctt

SEQ ID NO: 56324 - DNA, 555 bp, Populus trichocarpa
  Intron number 4 from transcript POPTR_0004s20550.1 (locus POPTR_0004s20550) derived from phytozome v7.0 (chr-ID scaf fold_4; pos 20056975 to 20057529)
gtgaaggtgattacttggctgttaaggggcctaaggtaaagctatttcatttcctcagttgcatttctttgccttaaaatttctgacatttcctagttagttttttaaatcaatctgggatttgttaggcgagtttgagtttttttctgtagaaaatttgattttccattttgagcagcaacatatatatggttcccgttcttaccattgctctttgctttggttaattggttgggtttcttcacaaccaattagctataaaccttgcagtactcagaacttgcttgtcagaaactatagtttgattttaccatggaaatttgattttccatttcgaggcacaactttttgtaccataaatacatggttcctcccattgctttgcttgaatggatgggtttcttctcaaccaattaaccctataaaccttgtcacttatcagaatcatatcacattttacttcttttcagaaactttatcacaagtgcttttcattgatgtactaaaataatttttctaggggcgcttcaagtatcaacctaaccaagtcagagc

SEQ ID NO: 56325 - DNA, 601 bp, Populus trichocarpa
  Intron number 1 from transcript POPTR_0009s08480.1 (locus POPTR_0009s08480) derived from phytozome v7.0 (chr-ID scaf fold_9; pos 7749316 to 7749916 reverse strand)
accgtgtctactttcttgacaattctggcaaaaaggttatatctttcacttctctgaagtttctcttttttatgatatctgtattggttagtgataatacgcgaggaatgaatgtaatttgccaaacccagaagaaaaatctttagaaaaccagttcctgtctccaatggtaatgatttcagtgtatatttttgcttaaaattatatttatttacgaaaataacaatgcattgttcttttgatagttgagttttgctcgtgttaatcaatgcgagattttggtgcttttatgtttcagtttcagtttgagttcttgattttttattttagccatggcaatctgaatttgaaaattgaaacgaaaggttgttatggtggagatgagattctgtatatgccattttgcattgaagacgacttgtgcaaatcccggagactgggtcacctgttagtccattaagaaaacgggcatgccactccagtagagagcacctatgatttgggacttttttcaacaatttaaaacagttttctttaggtttatttgtgtctgcttatgggtaatgcaagtgttgtttggtattacaggtttcgccctggc

SEQ ID NO: 56326 - DNA, 831 bp, Populus trichocarpa
  Intron number 1 from transcript POPTR_0012s05440.1 (locus POPTR_0012s05440) derived from phytozome v7.0 (chr-ID scaf fold_12; pos 5080787 to 5081617 reverse strand)
ttgactagttcattttctggagcaactaatattgagttaattctcaaaaatataatgaccgcagcaagccttacaagctagtgtaaaagaaggcaatttattcaaaaataaataaataaatgaaatgataagacgggtgaaggattaagggcattattccttttctttccgattttgattggcaagtgatgctcataggctgttcataaaaaaaaataaaaaaaaatacacataaagcaaaattaaatctgaacttacttctccaaaaaaaataaaaaaatcaaaagctcctaccatgacacattgatacgggtaaaactccaaagggcactcgaagaaaaactgtgggaaggaatcgtttcgtcactgggttgacaaaattggatgatgcatacttgttgtagggcaatgaaaagagcatgagaatccttatctaccagtcagaccgtgactagaaacgggattgacagtgaaagaaatggaattgcttgaatttaaaaaaaaaatagagaaaatatctttcggatttttttccccactaaagaaacgagagaataataagaccactcagcctgaattttagaccagtaaatcagaataagcaaaaaaaaacctacagaatatcctcggcttgcttaatcttccaccttcctggattctttcctctctcttttagttgatgagatgcatgatttctattttggctggtccaccttgtagtctatagaatcattcgtagctagaattcagttccaatcccgtttggtacaaggaatttgataccaaattccacaagtacactctcaatttagcagattctctaccacctta

SEQ ID NO: 56327 - DNA, 617 bp, Populus trichocarpa
  Intron number 2 from transcript POPTR_0012s03030.1 (locus POPTR_0012s03030) derived from phytozome v7.0 (chr-ID scaf fold_12; pos 2436597 to 2437213 reverse strand)
gtggtggtggggaagaggtggtgagtgatttcttgctttatcggggtttgtttggttgatggggaaatgtgatgggaaacaggaaaaaaccttggtgttttgatttgggctttatggaatcatgcgggtttttaattatcatgtttttgagatgcaagacagggaattgggtttctctctgtgtgttaaaatgtgcttatatagtggtttgtagaaatgtattggtgatacccttgatgtggaatgtttggcttgtatggttttcgaagcaagcaagggtttgttttgaaaaccaagtgactaagctaattgtttttgaggccatgggtaaatgggtgaaatgttattagcttttttgatgggaaagctgtctcttttttggttatttgaagatggggagattgaatagagttagtaactggggtttcttttcctttttagatgtttttctgtgtgtttgttaatgggcgtttgaatgcaaaccaaaaaatatttttcttcgagttttcagtatctgctaggcaatcaatgtgggtattagatgattggtttttgggtcattaactgtggaagctttttatcacagaatttggaacgttcaaagttggggcaatcag

SEQ ID NO: 56328 - DNA, 760 bp, Populus trichocarpa
  Intron number 1 from transcript POPTR_0001s08660.1 (locus POPTR_0001s08660) derived from phytozome v7.0 (chr-ID scaf fold_1; pos 6627392 to 6628151)
gattatttttcagctccttttacaccctttatctggtcctaccccttattaatgaacgaggatggagaagaggaagcataaacaaatattgacattgaattttcttgtcgtttaaggagactttatgccaagctatttgggtgcagactgcagagtgttgagtgttcaagtcaagtaaaacccacagcttgctgtctcttgtccgggcatcacacccttgctaggttcccagtttaagtgttaattttaagttagtccttgtaatttcaaaaaatactattacatccttacgctcttaaaatccaattataacttggtaattttcttcaattcatttttttttaaagatacatataattagataggacgggaaaatttgaccgggaaagaagatatttttgggataaaaaaacaactaaattaagtatggtcaacgatgttcaaatgaatatttgactattttctatatggaacaattaattaattatgatatactacagggactaatttctaattaactcccgatttaatcaaaggaatttttttaaaaacaaaaatctagaatttgtcaaaacccaattatagaagacatcagccagactattttgaggccttcaatatgttagatgagtgatagtgcataattaaaagaaactagaagtgctcttggtttactgtgtatttattaatgtgtatcacaactagctcaagaatcctacctgcaggacaaccttaatcgtggacagctagaaattgctgg

SEQ ID NO: 56329 - DNA, 675 bp, Populus trichocarpa
  Intron number 1 from transcript POPTR_0015s12980.1 (locus POPTR_0015s12980) derived from phytozome v7.0 (chr-ID scaf fold_15; pos 13117148 to 13117822 reverse strand)
tgtgtgtgtttttcagcctcttcaaaaagtcccaggtcagtccttcctctcagaccctgatttcccattttgaaatttcttttcttttggtttcagatctttagttgtaaatttttcttacctttttcattttattttctttctttcttgttctctgcttgtaagctctacatgttagttagtggttttgagttaatagcctgtaggttggttaccgggaatttttgtgttttgaatttgttcattttttgagataataaagaaattttgagtctttttgtttggtttcagaagggtttttagaagaaaaaaaaatgaaaatttgaacttaaattggcagcataattgtcactggttcagtaaagttgaggctgctgttgtcttggttgttttgagaaatgaaatgtgcttgcttgattttaatttggatgggaattgtttcatgttggttgacattctaagctagggaagacaaagaaagtgggaattattcatcacttaggttgttacgcgtgttgtatttaagttgtgttctatacttctggccgggaatggaaaatattgaatttgttgatatatgcaacagaagcttgaagtgttctgtgttcacttatgtttctttttacaggaccgcactgttttgcaggttccaagaatatctttattcaagtgttc

SEQ ID NO: 56330 - DNA, 787 bp, Populus trichocarpa
  Intron number 3 from transcript POPTR_0012s06720.1 (locus POPTR_0012s06720) derived from phytozome v7.0 (chr-ID scaf fold_12; pos 7170744 to 7171530)
gctgctcttatccttccagtgtcaggtaatatgctttaattaactggtagaatttttgtgttcaacgactattttcttagcaatcaatccgaagtcagataaggtgcaacactctctagtgatctcttctagaagattatagactgccctcaacttcttcaaataaaattccttgaggcagaatagtttatagactgcctttactagaagattattttaggtgaagaactgtcttaattagatgaatacactacgattagatttggccaccctttattctatagctccccaacatcccccactaaaattaaatatatataaaagaagaagaagcaagcacacatacttcatgcaaactttatctaatataatatgttgggacgtcaaccaagaatccaggtcatggaattccatcctccgtgattttggtttttagtttattctaaaaagtgttattagaaaaaccccaccgacctgatgtactgatgatccattgactcgaaactctactaagggtttttttttttaatatatattagttaaatttagtcttacttttcaaattatatccatttggtctttatttttttttcaacttaattttggtataattttttttttaattatttttgagttcttgattgaagatggatcgtcggattttgaggtgagcttgtttgtgttcgggctttcgacactatagcgtttacactaattttagctaccaaaatagtcgattttagttttaacaggttctatttggtgaggaaagttgtatttagttgtt

SEQ ID NO: 56331 - DNA, 982 bp, Populus trichocarpa
  Intron number 1 from transcript POPTR_0014s09210.1 (locus POPTR_0014s09210) derived from phytozome v7.0 (chr-ID scaf fold_14; pos 6854975 to 6855956 reverse strand)
tgctcgaaaacgagccagaagcccgaagagatccggttagatctctctatttatataattaaaaaatgaagaaatgcagaagtttatgtggttttactgtataaaacatgcatttgttgttgttgttgttgttgttgttgttgtatttatatgcattcgattttcccccttttctttcatgaaccctaacttatttatgctttcctttgtgaaattacagatgcctcaccatctacacctagaacgccaacatcgtcggtacctccctctctctttctctccaggttttgttgttatttgtttttatattttttttgttgcctgtttggttgctaagaaaatgcgggaaacgaaagtgtactaattgttttgttttgtttttgagcttttttatacattttgtatgattttgaaagaaaaagtagaaaaataagttagcataagctggaggtaattagccgtggaaccccccaggaaggagaaattttagattaaaaaaaagattgtgattatatatacatatattgttttttaatattttcattgttattttctgctactattttaatttcctcggtaaaggaaaaaatgggtaagaaatgaagaaaataatcttaaaattcgaaataacttttttttttaactataagttttgttgagaaaggaatgagaaaaccgagaatagtatacttatcttgtttatctcttgccttaaatctcaaatgttactgtttttacttcgttgtttaatagtctcgatttctatttttttggttgcagagaacaagaccgcaagcaaatggccaacaaggtgagtttcttcctccacttttttggttggggggtgaaatttctttctttttttaggttgaggcgttcaacttgattgtattggcatgtgtttttttctgggatgctttctctttatttgttaatacttgtaaaaggttcatccacacaaaggcagaggaaaaagcatcgc

SEQ ID NO: 56332 - DNA, 721 bp, Populus trichocarpa
  Intron number 1 from transcript POPTR_0015s07530.1 (locus POPTR_0015s07530) derived from phytozome v7.0 (chr-ID scaf fold_15; pos 8824522 to 8825242 reverse strand)
caaaagaatcttcctgccaaaaggaacaggttagaatcgtttcttcacgtttatatatatatatatatatatatatatatatatatatatatatatatatatatataaaatctattcctagaaatattaaaatatctaaactaaacaattatgcctgaaatttccttattcctctcagttttctttggatcctatttaaatgaatcggcacacttgcttttaaattcatgaggatagatgtcaatgagttttaactcaatttggaactaatattctcttcttttttaaaaaaaaaataatcaaatttaagcttttaatttcttcatatcaaaaaatggttcggtggtaaacttttaatctcatcatatccatgaaatctcaagtttaatatttctcaaagcttttttgtggccattataagaccaaatacctacttctcaagtactggatggagtatggaaaggccattcatctcgaggtttagctagagttcaggacatcatgtttttgaattgaaataattgtttggtttagtatctgaattaattatgaatttgaatcttataatttttatttttttaattaaattaaattttaatataagataatggtcccatatggatggtggtactaatgtagtattcacacttgtagattgtagctttatcaacagaaacaatactaacattaagattgttttctcaatatctgcatgtgcagg

SEQ ID NO: 56333 - DNA, 685 bp, Populus trichocarpa
  Intron number 2 from transcript POPTR_0011s00640.1 (locus POPTR_0011s00640) derived from phytozome v7.0 (chr-ID scaf fold_11; pos 314465 to 315149 reverse strand)
ctcagtccctttctcatctcaagttggacccgctggtgagttttttaatttaatttatttaaaaataatttaatttttatttgcatgagttattttattaattttaatgattaatttgaacttattgcaaaatgtatgttaaattaaagctaataaacgatgcaatgacaataatgtaagttcattttgatttttgaactgatggtgaagagtaaatgtaatgtagtaagaagtgctcttatttttccctatttaattcataacacaaatttaattcataacacaagcattttccttgtttatgagagcgagggagattgttgaaaaggtttggtgtcgttgggtccgctctccgagggggcagtcatttttcttacagcttacaggttttagttgtcactatcgaacaccgaaatggagaggggaagctcattgctgacaaccctgaccatattgtaactcggccacctttaaaaatcttataacttcatctgcttgcttatgttaatagcctcaatttcaatttatccactcatttccttaaaattaattggagttactgtcagggactttttatattatgattttatcagtcaatgtagtgtgtgcagatatgctcgtgttggaaacagtaaaggttcttactactttgttgttgtattttttgtttttattcttcaggtag

SEQ ID NO: 56334 - DNA, 802 bp, Populus trichocarpa
  Intron number 1 from transcript POPTR_0012s00980.1 (locus POPTR_0012s00980) derived from phytozome v7.0 (chr-ID scaf fold_12; pos 658212 to 659013)
gaaacccgtccacaaagtattaggcggtggaaaacgtaaacaaacactgacattctctctttcatttatttattttatggaatatattataaaaaatacttgtgtttttaattctttgattcaaagtttaaatattgctgctttctttagtagaaattagcattaaatggcatttttttcttgggattgtttcaaagatttgatttacgaaaccatggaataaatatttagggagcgtttggctctgctgttcaacctgtttttcggcgaatttcaaattttttttttttgctaaaattgagtgcggtttgtaccttttggatcgttttgatgtgctgatatcaaaaatgatttttaaaaaataaaaaaacatcattggcatgtatttcggcacgaaaagctatttgaaaagcaaccactaccacactcccaaacacccttttagagaaaatggaagagaacccttctttgttctttgtttctgttatctgatagagatatctgtttgttgcttgaagatggtagcattggatcactggattctgtatcttttttttatttgttattcgaaaatagagaagaagaaatttctgcatttccacctttatatgattgagcattgtattgtattggtgactagggaagcaaatttgggatacatttgtttttgttagatgggacatggaaatgcagaagaatgattgatttctgttcttgaaactgtttgtttttccctaacagatggttttttttttggtttcttgcagctgctgacgttttcctgtggaggaacacgaaaatc

SEQ ID NO: 56335 - DNA, 488 bp, Populus trichocarpa
  Intron number 1 from transcript POPTR_0011s10880.1 (locus POPTR_0011s10880) derived from phytozome v7.0 (chr-ID scaf fold_11; pos 13446091 to 13446578 reverse strand)
gcggtcaatattcccatgtatgttgtggcttttcttgtcattaatctggttcatcaacgcctgaatttcgttccagtccagtcaaataagtggtgaacatgcatacggcttttttttcttctttatttccttccgtcttgtgttttcttctcctgaatcacttcgtcttcttcttcttcttctgtttattttttgacgagaacatcttcttctctttattttttgacgagagcattatcgatttcttaatcactccagctgatataaaaacatggtttctaggattctagaggaagtcttgaaagagtttaactggtaactttgatagcgaatttactaacaaccaattctttttttaattattatctttagtgataatcacttgatttagatatgaaatctcactaattacgtccatattacaatccttttctccttgtgcatgatcaaaagagctagacgtggagctgaggtcagtcacgggggcg

SEQ ID NO: 56336 - DNA, 957 bp, Populus trichocarpa
  Intron number 1 from transcript POPTR_0004s08000.1 (locus POPTR_0004s08000) derived from phytozome v7.0 (chr-ID scaf fold_4; pos 6544893 to 6545849)
ttttttcatatcaaatcgcatccacggtttgcctggtatgcactgatttgatttagtttcaaaaattaaagactcacttcaaattttgcaatattaattgtactatagatacatacacatatatatagctgatgggtttctgttattttatgattttttttatttgatagagacatttctattatgcaaactcacaattttgcgggattttttttcatttgagttatgatactaagctgatggttctgtgttattcgatgataagaaccctactttctatgctttgttgtgtcaaaagagagattttagaagtgatatgcacaattttttgaggttttttttttttttttgattcgtgtataattgaatcttggatgatatttagttatgggttgggttttgattgtcaagatcattgcttatattttttttagataattctggacaaatgatggaatgggttttgtttgtctcttgattttctgaagtgggtttggttttatctgaattttttttttttttaattttgcagtgtaaattgtaatggagagaatattgtggcatttttagccgatctttatctgttaatatgaagaagttgttctgttgattttgtttttataacgcaattcacaatttgagtttttttttcctgtataactttattttgtggatgcggtgtttggtttctgctaatcaagatcatggcttttatatttgtttcgttgttgttgagagaattttggaggaatggtcaagtcggtcttggttaaatcttggtttgtggagtggatttgattttatttgaagatttacgaacgtcaaggctaataagaactcgatacgtgggggaattattgagtaaaggttgattcaagggcatgactgttgtgtgtctgtttcttttgtgcatatattacagggaataaaaggaattagaacattcgatcatcgaga

SEQ ID NO: 56337 - DNA, 896 bp, Populus trichocarpa
  Intron number 1 from transcript POPTR_0015s01890.1 (locus POPTR_0015s01890) derived from phytozome v7.0 (chr-ID scaf fold_15; pos 1302655 to 1303550 reverse strand)
cgagcaatacaggtttggggctttgttctggagtttactttccaagtaggtgaatctgatttatacaccaattaattatccgtgttcaggttttttacaaaagactttggttgtcggtaagagacacgaaaggaaaacaaccaaaggttttccgtaagagacaaaaggaaaacaaccaactaattatttatgttaggttttccgtgaaagacaaggagaaagtaaagtgagttattagattttttataattaattttgttacctgagctacagcacacctaagttttctacaaggctccgcccttcacatggggtatgttctctttctgtgtaagatttttatattgctgatgcattaaatgtttcgttgtgtgaatccatttagttgtttatgctaggcagtgtagtctttctacaagacccctgttggaggttttctgtttactggacgagccttcatatctctgcatgttgcgcgtggaagcagaatataaaactcaaaaacagcataaaacgggggaaagcttgcatttactttaatatgcctatccactgggctagttgtacccatgtgtgggaggtgcactaattcagggtgctgatttattcatgtcttgtttcgttccccagtatttgtgctaataaacctttcctcgaccataagtctagaaccaccaaaatttcccattattcaatgttgttgaagaggtaccaaactttcaaagcagagttcttctcatatttcaatttctccatttgtgagtttagggatttgaaagtttatttcttcccttttattttatggcagtatcatggtagtttttctttgagacattggcttcgacaatcagattgaactctggcattggatgaggaatctgtcaggagggtgggag

SEQ ID NO: 56338 - DNA, 827 bp, Populus trichocarpa
  Intron number 1 from transcript POPTR_0012s12360.1 (locus POPTR_0012s12360) derived from phytozome v7.0 (chr-ID scaf fold_12; pos 12578113 to 12578939)
ttttggagcagctaaccacggtcgttgctcgacaggtaattacttttatacaatttgcaatgatctaattaacccttacattaataagaaatataaaaatgatctctttttctttctttataagaaaaacaaaataaaatatcaaatcctcagatctagatttggattttattaaagaaatttctatttattgttttattatttttcatatttctggaaataatctaaaacaaatattcttagaaggaaaatggagttgtcgatcctctcataaaactgaactactaagggtaaaataatcaatcagatgttaaaataataagtttcataatcttattataataccaacaaatatttatttccaaatagattttacgaataccaacaaatacagatccttttattctcaatatttctttgatccaccaagcttatgttatatataggtttgacgttgaacaatttaagattcattttcttccttcttgtatagtagcagagtgcagacagagatatcatcatgatgatgataaaaataaatattattatttttaatatattggtttttaataaatattttatatataaattattaatatagccaatccatttcacagtacgtgtcaactactgcgaaaaaaaacagattaataaaaattatctaatctattaattaccaaaaattaaaattaaaaacttgcagtgaaatcatggaaatgtttcctctgcttgaacttctttatcttttccacactaataggtacgagaagaggcctagtgggggatgtgaagaaacaagtcgacaagctgaaaagcaatctccttgc

SEQ ID NO: 56339 - DNA, 954 bp, Populus trichocarpa
  Intron number 4 from transcript POPTR_0012s14600.1 (locus POPTR_0012s14600) derived from phytozome v7.0 (chr-ID scaf fold_12; pos 14430408 to 14431361 reverse strand)
ggaagtctcgtctcaaagctctaatctttattcaggtacattagcatattgatttggtaattttaatgagtttgatagtgttaatttatttaaagacaattgaattgatcatttttatttttatttttattttcttgcttattgtttgatgaataagtgcagaactgttaatctcattgagttattggcagggaaaggatttttttttttcctttgtgtatttgaatacaatgtactgcttgacttgacttgacctgatttattggtaaatttgatcgaaaagatattaagtatctcaaaaatcacacaagcttggtttagtggcaaagggatgagctggagttgagtggtggatgcatgtctaaggtttgaattctagcatttgctaaagatttgtgttagccacctaccgagtctttgaaccataattcactttctatgggttagtggggctttcatgggactggagtgtaccaatataaggagggggttctagtaaaaggaaagtcattgtagtaatctgttccacatggaaagtgagagttaaacttggtttatcatttaaggactccaagtttcagatgctagctgaagttgattctggttcgttaggttttgttcgaatatagttttagatttacttgagctgtccattcgataactttgtgatttttgaagttactgtattctgtagattagttgattttcatagatttcaaacctgttgttgtagcatcaatatttctagaccttctaggtattcatttaagatttttgtgctttacacttattagaattacaattgtagttctagaatcccttttttttttaattttttattaagcatttttatccttaatgaagttgattagattcacatgtaggatcatctgtttttcattgatgtgattttcttcgtaatgcagggtatctttcaattgatagaattattat

SEQ ID NO: 56340 - DNA, 224 bp, Populus trichocarpa
  Intron number 3 from transcript POPTR_0012s14600.1 (locus POPTR_0012s14600) derived from phytozome v7.0 (chr-ID scaf fold_12; pos 14431348 to 14431571 reverse strand)
gtggttgattcacgtatgcttttcttttcttctttttcatctatttgaataaataatattatggtttgtttttgaatctgtaaatctttatttcaatggctaaaagggtttcattttgtgcaaagtttgattcttttgagttttttcgtttgatttttgatgtgggtttttgttaaatttttctcataggttacacaaaggttgctaaagggaagtctcgtctc

SEQ ID NO: 56341 - DNA, 667 bp, Populus trichocarpa
  Intron number 2 from transcript POPTR_0012s14600.1 (locus POPTR_0012s14600) derived from phytozome v7.0 (chr-ID scaf fold_12; pos 14431635 to 14432301 reverse strand)
gagtcccgcttctcctgcccttcaagaattcaacggtgagaatccatgcacatttctataaattgggtcgggttatgggtacccaaatggatatcatatcgggttcggttacggtattcaaaatccaaactcactgggttttaggttaggtgggggcatgaattttgagttcaaattcgtacatgaataataccaagcccttcttatcggagctacgtttccatcctaaatattaaatgtttattttttcccatggattaaaatttgaacatgccccttcattaaaaatctcagttgtttatttttctatagatcaatagttcatcacaaatttaatataaagaaattaaccaatggttaaaatctattcggaaaaaaaggtattttaaggggggagaaacaaattaacaatgatcaactgatttttcaattttttacgaactacaaagactaagttataattaactcaacttgggtagctcttcagcaaaatagtaaaattttacggggtcaaaatcagaaatctaaaattttttaggactgtttaagaaaaccaaatcctctctcggtttttcaaaatctcaataaaacccaaaaattattaatttcctaacagttaaactctcccacatccccagccagccagtgaccaaagaaacaagaagag

SEQ ID NO: 56342 - DNA, 363 bp, Populus trichocarpa
  Intron number 1 from transcript POPTR_0012s14600.1 (locus POPTR_0012s14600) derived from phytozome v7.0 (chr-ID scaf fold_12; pos 14432341 to 14432703 reverse strand)
aagtcaattggaacacctgtactccttctggccaggtcggaaactaatctcttctcttagctttgatgctcttcccttttttctcttgtttctgtgtgcttgcgataacagaatcattccaattagccaaaagttttgctctttatttttctttcaagttctctttgttcactaagaaaaggaaaccctaatcttgaaattcccaatccctaatctgttaatggaaaaaattcaaaatccattgcgctttgtttcatgtgagatctatatatacaagtcttaagtgtttcttcctctgttttgttctctcatttcaaatttattccagttaaggttattccacgtggctgccggcagaaaatc

SEQ ID NO: 56343 - DNA, 683 bp, Populus trichocarpa
  Intron number 1 from transcript POPTR_0004s16480.1 (locus POPTR_0004s16480) derived from phytozome v7.0 (chr-ID scaf fold_4; pos 16935473 to 16936155)
aaactggcagcccgtaggctgccagtgaaggtgaaatatatatataaccagcgctggctttgcaagccagcgctggagcgctggttgcatgaataaaactggcagcccgtaggctgccagtgaagacaagatttaaaggccagcgctggtgaaggctggtgaaagggaaataactggcagcccgaaggctgccagtaaaggctggtgaaggaattcaccgaccagtgctggccattgccagcgctggttaaataaaaaaaaaaccggtgcaaatttatttttcaaatattggtatgttgatatatattttgcaataagttaattaaaacaatatgtcaccaaagtgacctcttttgtggagattaattttattttgaaatataaagagttatgtgtatgcgatttatgttcttattgatcggcccaaaggaaggtcaatatttaaagtaaatgcatgcgcacatgtagtaatcaacatgtgatgattatttggttttacatgtgactaattaattgacccaaaggccaatttatttttcgacatgttcttattattaatgtttgattactacattaagatatcacttacaaattaatcttttatccaaagataaaatattaatgaagtgcccgatatcttaagatgggttttacctttatttgaattaatttttgctcttaag

SEQ ID NO: 56344 - DNA, 352 bp, Populus trichocarpa
  Intron number 2 from transcript POPTR_0015s06600.1 (locus POPTR_0015s06600) derived from phytozome v7.0 (chr-ID scaf fold_15; pos 7541322 to 7541673)
tgatagttttacagtgagctttacttcttctctctcgattagaatttgttcttgttgggatagctgtgtgcttcgttgtttttcatttcggttatatatatatatatcaattcctcggcaaaatttgaaaagtgtagttaaattaatttaggaacatttcagttcttataattgcttcctggcatgtgtttgtgcttgccgattatcacaatattaatgcagatgttctccttaatattgtttgagcctgcatttttattttaattatatattctggattttaaatctgaaagcaggcaggaagtacagatcaatgtttaaagtttttgacttgatgattctttgtacgcag

SEQ ID NO: 56345 - DNA, 502 bp, Populus trichocarpa
  Intron number 1 from transcript POPTR_0009s17140.1 (locus POPTR_0009s17140) derived from phytozome v7.0 (chr-ID scaf fold_9; pos 12896455 to 12896956 reverse strand)
aagtatgccttgcttaaggatccgcctgagatatttgttcgttctttcatgactctaggtgatctttatctttatactgaactcaactcgtgtgaggatgcgatcaatgggaactcgagttttgtgattccatttgttttgaaatttactgaactggggcataaatttgttaatgatctgatcgatccagcattatcgatgttgatcagttctggcacactggctaaaagatgcttgcaaaaagatatggatgtgatgtaccacaattttattgttttccttacagtagtgtttgaaatggcgacaattgaactaacaaacaagaaatcctggaaatcgtgcacttaattacagtattttgatccctaattagcttccgtacaagtatagctctagatctaaaagtctgcaggggtggttgttagaaaatgaagatacaacaagatgtatgatctctacacatgcagagtaagtttgacagcatacaaaaacaacgccatag

SEQ ID NO: 56346 - DNA, 739 bp, Populus trichocarpa
  Intron number 1 from transcript POPTR_0377s00200.1 (locus POPTR_0377s00200) derived from phytozome v7.0 (chr-ID scaf fold_377; pos 42921 to 43659 reverse strand)
ggcgttttttgaggcaaagctggttcaagaagaaggtaagtcacaatttccttcattaagtttgtagcagtcctctttctttttaattgaaatgggaccttttggattctgggttcttttgttgatctctgggatttattgatggaaccacttgcttcgtattttggagaagatgtggggaaaaacggtatagaaaaaaaaaataattaaaaaaagagtacaactttgaatcttgggtattgggctctttgtgctatatgggctgctttctgatggttactgagaaaatatgggaaagtgaaggaaattggaaatttgatttttgggttttttcctgtaaaccgagactcgcttcttcaatcacttgaatcgcttagactgcttggctgagcctaagcttattgtcctttcttcattttgagtaaagttttctgttttattttttttaactaaaatttttgtcagcaattaaatgtgcatacatacatgagaacgctggaaacaatcttcatgcaaaaatgtagcctgaaaactgaacctaatgtctcttaaagtgaacaaataaaaatgggatgaatttgggagtgcattggatctcaatgcacttttgcattgcagaacttcgtaaatataggaattaatgtatgcatagcttttactttcagtcagcttgtattttaattcttacaacattaactggtcatatgatgcttatcggtctatggttgataagtagttg

SEQ ID NO: 56347 - DNA, 922 bp, Populus trichocarpa
  Intron number 1 from transcript POPTR_0009s05940.1 (locus POPTR_0009s05940) derived from phytozome v7.0 (chr-ID scaf fold_9; pos 5886935 to 5887856)
attggcccacttgactcttcttgaatatcttagaggtaatgtgacgatcttaacaagctttgttattgtttggtgtctcagaaagtataggaaagttttgagtgttaattcagctgaactaagtgaaattattatctggattagtcttagtttttggaaaaagaaaaaagcaaagagatggagaaggaaacacagttggtaatgataaaaggagaaactttctaatcagagcttggtttcttacttatcatgtgtgttgggctcaatcaatcaataatcaatttaccaatcaatcagtgtttggtttatggagtatcattgtaaaagaatgaacttttttaaactgttcatcttgtctgtgatttgaatcctattggagaagcatgtcgaatttggttcgtttaggagaagaaacgaagggaatataaaccttgaatctttcttatgtgaatcagtagcttaattgctctttcttgcttgtgacctgaactgggtctgcaacaaatgtttgttggtttctaagaaaatagcagagaaggtaacttagtgtgtgcttaagcttggtcaacggatcaattgatcaagtagtgttttgtttcccaaaaaatgttgagggaaaaagagcaatggaactatcatatggatctaatttagattcactgactagaaagtaggattgccttaatacccgtgttcttagacttttctcaccttttcccagctattaagctctgtgttgtggtgcttgtgatgtatgaaataatcaacaatacaagtttgtgcttgggcacagtttaaaagatttatgatttagctgatgtttgtttctatgacgtatctgattttaatcctctttctgtttttttttttttttttgggggtaacagacattggcttgacggggacaaagctaggctgtggt

SEQ ID NO: 56348 - DNA, 617 bp, Populus trichocarpa
  Intron number 1 from transcript POPTR_0015s14970.1 (locus POPTR_0015s14970) derived from phytozome v7.0 (chr-ID scaf fold_15; pos 14361364 to 14361980 reverse strand)
ttccggaagttgctgaataaaaaggtgagtgtgtaatgaattactttgatgcatggtttcttattttgttttctatcaaagagttccatcattatagcatggttcggacttatgggttgattcaagacctgactgattgatccgtttttattctaagctaggtattcaagaaaagttaacttagaattgattcggtttgacccggccaacccaacaagtcagcctgcagcctaacttaaaaaaaaaatcaaaatgatattctttttattaatatgaattaatttaggttaatttaacctacatgtgatgcgagcttgaccgggacgagattcatttggtttttcaaaattatctacataactggttagtagagctcaaaagaaggtgctttccagaacctcttacacagtttgtatgaagaggggtttggatgtattatcaaagactatagtgttatcaaaattcaacttgaaactattgtgaactgtagccaacacagaggaccaatccaactatggcttttgttatcattcaagccattgcatgttgttgaattgtttcttacatttatatatatatattgtttttccaggttgttgaacggcaaactaggcctg

SEQ ID NO: 56349 - DNA, 635 bp, Populus trichocarpa
  Intron number 1 from transcript POPTR_0004s08740.1 (locus POPTR_0004s08740) derived from phytozome v7.0 (chr-ID scaf fold_4; pos 7325791 to 7326425 reverse strand)
ttgtcaatcctggtatgttgtttaactatttctgtttttgctgttgttgtaaattgtgattatgattttttcttctaaattattattatttttttttcaatgatttatttatttttgaaattattatcaactgtttggtttggttgataactgaatagggaaagcgggaaaatgtcaaccaaatagttttccatacccaaatcagaatatcttgtgttcttattttacttttctacccttttgtttttttttttgtttttgaaaaaaaaaaacagttcgtataatatatattaagtgatcaggaccattaaccatgttaattctatctctcttttttttttaaagaaaaaaaaacatttcttttgtattgatttacgttgtatagatgctgagttaataatttgaatatattaaatgatctatattaatttatgtaattaattactaatgatagaagggtaatgcttaaagacatgatcccgtaatatatatgaaaaaatatatatatatctaagtagtagtcatattttttgccatgtaaacattagtaaaataaaaataaaaataaaaatttacctatagaattatcgatttgaaagatttatttaacgcatgtggtttttaaggccccgtca

SEQ ID NO: 56350 - DNA, 677 bp, Populus trichocarpa
  Intron number 1 from transcript POPTR_0014s08940.1 (locus POPTR_0014s08940) derived from phytozome v7.0 (chr-ID scaf fold_14; pos 6612058 to 6612734)
gaggagagaagatatcaagaaggataataataacggttcgtttctctttttactcatttcttctcttctttttttttttaaaaaaaatgtggaaaatctgtttggctgcgaagagaattgaggtaaaagagagaaaaatgattgctttttcgtggttgtttggcgatgtttattttttgttttggtttctgtgaaatccaggaaatagaattcaaatcaaaatgaaaacaaagctatcattatttggtttcgagtatataaatattattggattcccagttttcaaaattgaacgcgttcctttaaggtttgctgggaaaggtatttctttatatatatatatatataaacctctgtttggctgcgactaattgaacctctgtgctgcaaaattgagaagagatttggcctggctgagccgctgtatcaatacctttgtcctgggaaactgaagaaagagcttttaactgttatttgtttccatgccttaaggttgtgttatttttaatggctgaattgtgaattggtgcgttctttcttgctttatattatgtttttgttctgtttggtctggatttagccaacataaggttactgatgctgttaatgcttgcaatgtttgtgcaggtgatctatctgtaggtgcggaggagcagattttaggtagtaaccaacct

SEQ ID NO: 56351 - DNA, 716 bp, Populus trichocarpa
  Intron number 3 from transcript POPTR_0012s10370.1 (locus POPTR_0012s10370) derived from phytozome v7.0 (chr-ID scaf fold_12; pos 11165569 to 11166284)
aagctcccaacatatctgatttgaattctgtagtggtacatgattgaagatgcatgatcttcacatatctctctttttattaagttttatttattatttaaatcatatttgttttgactcatggaactaataaaagtataatgataaccggatcaacatgtcaacaagttgactgatttttattaaaacacaacatcacacatttcttttttctttttcttttttttgttgaattggttgggcctggtgctcacgattaaataaatgtgtttaaaaatatgatagtagttgttttttgaaatgctttttattttaaaacacattaaaataatatttttttatttttttaaaattatcttaaacatcagcacatcaaaatgatctaaaaatatcaaaaaaatattaatttgaagtaaagaaaaaaataaaaaaaatgttaattttttcaaaagcgcttccaaaacacaatgtcaaacactacctaaatgagtttgataatattttatccgatttaaatagaaaggaacagatttaataatgatttaaattattattgtgaaaaagaatactatgagtatcataatttgttaaagttgcctgttagatgaagagaattcacgttcgatgtcttttgtaggacacaaatttctggggctcggtgtatggcacttattttgcatgtcttttgtaggacacaaacttctggggctcggtgt

SEQ ID NO: 56352 - DNA, 1015 bp, Populus trichocarpa
  Intron number 2 from transcript POPTR_0014s15570.2 (locus POPTR_0014s15570) derived from phytozome v7.0 (chr-ID scaf fold_14; pos 11590873 to 11591887)
caacgagcagcgtctgccgggggacggaatcacaggtcagttctttctctcaattgacgaacttggtaaactagttatcttgctgtttaattacttagatatgttttagccatcattttcattcgatttgcatccaattaaacttgcaatggaaagtttgaagtgggattggtcaattttaaacgaacaaaggcctttagctggttccaagtttgcacgctaactgttcgatgcaatgccacagagtgtatgtgcgtgacatttcttgagttctctaattaagttgcactctgctgattcttgttctttgccttgagctttactatgtcgtagtgggctgtcttggtatagtatttcttgcactctttgttttggacccggttcgttatcttggtattaactttgtagcttgtttgggcctttgtaattctttttgtgctaatactgcgattccattgataaaatttgtacgcctactgtttggattccttctgtgtaccttgaatagaggatgctttgtttatctgaatcagatatttaacaaggggaaaactaatgtggggagggtactatacgtgacatttttgcgtatcagctggaggtttatcgagttttggggttttcccctaattttcagggttgttgagtaagagttgggacatccttaaatttctaggtttgtaaatagtcttaccgattcgatttcttgatatttactgataaagtaagacagaatgcgggtatgtttgttatctctcgagacatttcattagagaacaggtttcttctgccttcaatactcagtaccagtcagttgtcattaatgtgcctttcatataatatatcaaacaagatatcatgttctttgctccttttgaatgcattttctgtatttccattcatttacttggagtcatctcttcttgaagtttctgtccctttagcatttcattccatatgaaaaataacattgctaagaagttttagcgtacaatgcagttacaaaagagaaaac

SEQ ID NO: 56353 - DNA, 737 bp, Populus trichocarpa
  Intron number 1 from transcript POPTR_0004s11140.1 (locus POPTR_0004s11140) derived from phytozome v7.0 (chr-ID scaf fold_4; pos 9739000 to 9739736 reverse strand)
attttgctttcaagacaattactcaagtgtaacgaattcacgctattaaactttgattctgtttgattttttctttaaaaaaatataatttttttaattttttttatattttcagaccgttttgatgtgctaatgttaaaaataatttttttaaaataaaaaaatattatcttaatatattttgaagtaaaataaaaaataatgactatcaaaacattctaaataaataaataaaaaacattattatactgcttacttcacaaacatatttgccttcttcctcagcatctactagtaaaaatacatgctcatgaacatttagcttaattgccacctttttcctttcttttttgattaataggttttgatatggataataatatatctaaaatccaaacaatgataaattccagttagatagatgaaaattgttataaagatacttaagttgatttttttcaaaaaagaaaaagagtgtgatataatactcttggagtactggtgcgtgcgtgtatataacactactagaaaattaaattaaataaaataaaatatgaatggaaaatatctcattgaataattaaaacccgacagttctcttttcatttccatgattccatttcttctctcttgttgattaaaaaaaaatccatttctttgaatctttacttttcaccatttttgtaaatttttttgttcagcttctgattaattcttttatttatttgcagaaagca

SEQ ID NO: 56354 - DNA, 318 bp, Populus trichocarpa
  Intron number 3 from transcript POPTR_0012s12300.1 (locus POPTR_0012s12300) derived from phytozome v7.0 (chr-ID scaf fold_12; pos 12514449 to 12514766 reverse strand)
tgtgagcttgcatatcaactgaaaatcaaattccatttatcagaagaaaaggtgtatcgactcaaaacataatggttgcttgtagttttgacatgcagttcatgtttatgtgggcaggatgggaaggtagtgcccacgatacacgtatttttcttgaggctattgagaatagaaatataaaatttcataaaccaccagaaggtagttatacaacagaacttgttatgtaattataagtataaaaatttgtttattatttactaattacatgacaaatttgaatgttgtttgtaattacaagtaaatactatttagttg

SEQ ID NO: 56355 - DNA, 689 bp, Populus trichocarpa
  Intron number 1 from transcript POPTR_0009s08180.1 (locus POPTR_0009s08180) derived from phytozome v7.0 (chr-ID scaf fold_9; pos 7529915 to 7530603)
cctcgccgaagctctggaggtcagatttttacttatatttgttatttcttttctgggttatgtttatttcttgagtttgtgtgttcatttgtgcaacttctttgctttagattttgagaaaacgtaggcaagaatacaaatataattctgtttcttttttgttttttttattttcgttttgcgattagggaggccgggtcgtgttgattatatttttgtagtcgtttttgtcttaaaaaaaacatttcgtttgtgtttaagtcttctaattcgtgaaagttaatatccagcatagattttgttccattttatatgtttagatcttgaaagatgcctaattggtatgggtttccatgtttttgctgatataaataagtgggtagcttgattttcttgttttgttgtttagttaatattgaacatctaaacttggcatttagattctggtgtttttcagcttttataatttttgggctgattgattcatttcttgaatacccctttctgatccttttcatttcactgtttgggataatcttctgagccctttacgggtttccaatcattttgtttatagacgtttgttaatcaattctgcaacttgcatgaaattccgatgacccaacttcttacacataatccaatgttttgcaggaagatctgcccgcccagcccctcgtcctgcacca

SEQ ID NO: 56356 - DNA, 615 bp, Populus trichocarpa
  Intron number 3 from transcript POPTR_0012s12240.1 (locus POPTR_0012s12240) derived from phytozome v7.0 (chr-ID scaf fold_12; pos 12483571 to 12484185 reverse strand)
cattggttctggatcgcaggtatcaacactttagtgatgtttgtggtttttgtgttgattaaatggtaggggttgaatgcatgaataataaaatagcactatttgttggttacttaataaactttttagttgatatgtagacagtttcctagttcttcctgttgattgtaggatgtgataaatgggcaaagtacattaaatgtctgaactagttttcctgcttttgagttggatatgtgcaagtctttaagccaggaaccttggtcaagtctattatatgttgccattctagaatggttttgcattttcttttgtaccaactgagagttccaaaatccggtgagaattttcaggaaatctttatccaaccattgtgtgcaaataaagtttttttttttattaatatgcaattgcagtttgatctgtttagcagtattatgaattttttaagggaatggtttgagttcttttttgtgctgtcctaatatatgtcctgcatcttgattttgctaaggcagtgtattctgtgatatgcacttgaatacttgtttctttgttcattttgcgggaattacaaaattgccttacaattttaggttgctaaccaagagacat

SEQ ID NO: 56357 - DNA, 385 bp, Populus trichocarpa
  Intron number 2 from transcript POPTR_0001s45250.1 (locus POPTR_0001s45250) derived from phytozome v7.0 (chr-ID scaf fold_1; pos 45756898 to 45757282 reverse strand)
acagcaccaacgacactaatgtaagccgtatcttccctatacttaattttattttatatgcttgaatatcctatactcttaccttttcttgtcttctctctctctttttttctatgaaaaaaaaatacctggaccattctttataattaaaagtgaagttgatttcaaagatgaaaattaaacaaaaatgaaaattatactgttttttaaacaggattcaaatttgagatctcatacaatatttcatgtattttgacttgaaggaaactacaggtatagatttcttctatgttcggttctaggcttctagcttatctggtattgatttgttcactctcttaatcctgcaggtctcaaatcctataggagaggcaatccctgaaga

SEQ ID NO: 56358 - DNA, 566 bp, Populus trichocarpa
  Intron number 1 from transcript POPTR_0011s09880.1 (locus POPTR_0011s09880) derived from phytozome v7.0 (chr-ID scaf fold_11; pos 12325637 to 12326202)
ggctgtttcttctctggtatgtttattctgttcctattatccttaatctttttctctgtacgctattgattgtgcttggtgttgctgtatataatggttagaatatggaggagtgttgttgattatactgatatgcattgtcctatctagttgtatgaagcaaattttgctgtcatgtatttttaaattatatatttattatactgttccatatgtttgatttgctctaatattgtggcttgaagttttgctcaatattgaagcttagtaaaatgttatcttctaagtttgatggtgatcgattcagcaattttgcttgagaaaaattgaaagaaatccttgcatcatgactgaacttaacagtgaacttggctaagcctttaggtttgaaagcagctgtgaacttaacagtgactgaacttggctaatcctttaggtttcttgctcaaagaagttgcttctttgattttcctgtcataaatgcaatataatctaatctgtgtggaatttttttggcctgtttatattggtttctacactatatagcagcaacctgatctgcacca

SEQ ID NO: 56359 - DNA, 555 bp, Populus trichocarpa
  Intron number 3 from transcript POPTR_0011s09880.1 (locus POPTR_0011s09880) derived from phytozome v7.0 (chr-ID scaf fold_11; pos 12326504 to 12327058)
ccgtcaggattcaaaaggcttttcgggcatacaaggtacatttcaacagtgtgattatagaaggaccattcatttcttccccgatgaatcaacccttctgtcaggaaaagaagaaaatctagataggtgtgattaagagcttggcagagaccaccgatttcgtttctgctatcatggcacacatgcatatatttggtatatgcatgtgtgccatgatttaagctcctagggccgccggcattgattttcttgccatgtccagtgacccacaacaagtttttgaaatcaaacgagtgaatatttattggaatcaactaaatagccttcttatttcactgagtttccagatcgtagcatttgtacgatcacaacaagaagaaatcttttgttagcgttgttggaatttttaagaaatttacttctgacattttgcttgctctcgtgggcttatagccattccaactgttgtagaatttgtacgatcagtaaagtaacaatggttttcttttcccattttcaggcaagaaaggcagtgcaacgtcttaagggagctgt

SEQ ID NO: 56360 - DNA, 473 bp, Populus trichocarpa
  Intron number 1 from transcript POPTR_0004s01410.1 (locus POPTR_0004s01410) derived from phytozome v7.0 (chr-ID scaf fold_4; pos 796738 to 797210 reverse strand)
ttagaagtggacaactttcaagtgtaagtgtctttcttactctaaaatgattcatcggctcatttagttcctgttttttaatgtgttatgtgtttgttttgatggaattgttattggttttgttggttctgggatgaagaatggaatatttttttgttctggttttacctggatgtttctgttcaatgttggttgctgttggttttttaaaggtttttgctttttgggattttgattggtttgttagtgtgattatgattatgtttttgtttttgtgctgctgattgtaatgtttttgttaattattgggattccattggcttttttgttcattgtggtgactgtgattataatttttaatctgtgattgagaattaattcattctaagcagatgaaagcgagtaaactgtattgtatgagtctactggatactgagttttttactttgttgtgtttggttttagcttaattc

SEQ ID NO: 56361 - DNA, 524 bp, Populus trichocarpa
  Intron number 1 from transcript POPTR_0015s14380.1 (locus POPTR_0015s14380) derived from phytozome v7.0 (chr-ID scaf fold_15; pos 14002735 to 14003258)
aaatttttgacagtcgtggaaatcccaccgttgaagtaagtctttcttgattcaattttagtcatccaatgataacccgtcattttttcctctcattttcgatgtgtttttttgttttgtacctcgttttttcatgtttgatgttatttttggatgttaagaaaaagtggggcagataaaatcttcagttttgatattttcttggtaataaaagaggaagcttttgcaaatgcgttattgagatgttttgggatttctttttgtgctggcagttgctgttgttctgatccttgttttttaaagtttgatgtttggtttggatgttaagaagaactgggtcagagagaaagtttggttttgatgcttttttgggattaaaagaggaagctttagtggaaagcatgactgggatgtgatttttgaagtccgtgctttcgttctgttggtggtttcttttgtatgtttttttagctgatgaaatggtgggttttaaaataataaacaggctgatattttgctctctg

SEQ ID NO: 56362 - DNA, 601 bp, Populus trichocarpa
  Intron number 3 from transcript POPTR_0009s14970.1 (locus POPTR_0009s14970) derived from phytozome v7.0 (chr-ID scaf fold_9; pos 11618935 to 11619535)
agctgaagcctctgggcctgagttgtcagaagaaggtgagattaaaattctggcttgtttccttctcttcttcctttgccatgataaaaacatcaatgtagagtgaaattcagttgatttgattggatttctacccactcagtttatccagtgaaactcatctagaactggctatgaaatttttattaaaaaacaatatttttttaataaaaataattaatacaatgattcatgatcagtttacccagtaattcaatatttttttcaaattagttatcaagggaaatataagaaacattgcaagtcagacaatccaatttttttttactatattatcagataaagatttaattatatatcttcattttttttagaacagtatgcttatttttcatgtttaagctacatggtcatgatactgggtttgataccttaagcaagaaataaaacttaatggaatattttaatgattattaattaactctgatccaagatttacagcactagttaattatgcattgaagcaaaggatgtcagtagcccctcaagagtttatatgattgcaggagagagaatacaaagaagcccttgaagcttttaa

SEQ ID NO: 56363 - DNA, 830 bp, Populus trichocarpa
  Intron number 1 from transcript POPTR_0015s00550.1 (locus POPTR_0015s00550) derived from phytozome v7.0 (chr-ID scaf fold_15; pos 343612 to 344441 reverse strand)
gaaagttggtaagtattctatctctcggtgccatttggtattgccgcgctttttaaattttttactttttgcttggaaaacattattttttattcattttcaaaaaaaataaaattaaaatgcaatcttcaccgcattcttcaagaggtcttaatctttacccccctttaccgatcgaaagaattatactgaatttgattttaaaatttaattacaagtttaggctatcattaatgctactccaccatcttaattattaatatcacacataccagcaatgaggcttgtggccagcggcagaggcaaggtttcttgcttctgtcatctgggttcgagcctcagtgtgcattcttgttattcccgtgatatcttacctgtctactgggcttgcaaggtgttcagtggatccgggaattagttgtgatgcgcgtaagctgacccggatatcccaggttaccaaaaaaaaaatatcacacctaccatagaataattaaataattgaattaattaaatgattcatcattgtttaggtagattgtgcttcttagaacttgtttggcagtgtggttgcgggtgtttttcaaataactttccgtgccaaaatgcatgtcaatgatgttttttcattttttaaaaattatttttgacatcagcacatcaaaacgatctaaaacatacaaacaatattaaattttaacaaaaaaaaaatttctaattttttgagaacgcaggttgatacgcgttcccaaacgtgctctaagaagataatgtgacttggttctgctagtgctacaggtatcatttgaaagacgcgattcttgaaggaggaa

SEQ ID NO: 56364 - DNA, 772 bp, Populus trichocarpa
  Intron number 3 from transcript POPTR_0011s13880.1 (locus POPTR_0011s13880) derived from phytozome v7.0 (chr-ID scaf fold_11; pos 16495901 to 16496672 reverse strand)
gacggggagttcttacgtatcgatttcaatatcaggtagaaaaaaaaaagaataaaatcttgccttatcaagaagagtattattttctcttttgtttatatgcatacaagtggttgcattgcggaatttgtgtcaattcaggtgcagaggatagtcagcaggatgaggtttgttgttgtggttatgcagggaatagtttcaatttcatttttttggaaaggagaggttcgaactcgagacctttttggggagggcaatggtcatgccagttgaacttgagatctctagtatcaattcccttgacctatgttgatgacgtttttttgttttattagtgattacagtgtcaggagtaaaagtattaacatggagatgcctaggcttaggtttcttgttttagtgtttagctttggggattttctcaggatttatgatgttaggttgcattttctgttcaattagcaatttttttcttttcagcttcttttgtttttgtttcatcaaagaggtccggttttgtattgctcctcgtgtgtttaactttgaacatgaccaataggtttaaatctagtttcaattgtcaaatctagttttcccccctcttcagagtttctaggtttgtggcttattttttctacattgcctctaatgatgctgtaatgctttcccgatgctttttcttgattttacataaatatttgttaagcttgtattaatctagttgaacttgactggcagattttctttttaattgtagctttccttcactctc

SEQ ID NO: 56365 - DNA, 936 bp, Populus trichocarpa
  Intron number 1 from transcript POPTR_0011s08250.1 (locus POPTR_0011s08250) derived from phytozome v7.0 (chr-ID scaf fold_11; pos 9306351 to 9307286 reverse strand)
attgtcaagacaagaacaacccacaggtggagcaagtaggtgactttcaccttcctttttcataacgttgaataatgaaatactttatcatgaatgttaccgtattgtgttagtacaaatatcagattgccaaatgcttaaatgttgacaagtggttgattagcttcggctaatggcatccgaatggatgaacgggacaaacgagtgattagcttcagctaatggcatccgaatggatgaccgagataaatgaatgattaacttcagctaatggcatccgaatggatgaccaggacaaactgttgattagctttggctgatggcatccgaagtggatggtcggggcgagtgaacaattaaccttggcaaatgatgccttaagagggtagccggatttaagattatggctgattgcaagaattggtgtatctatatgtactacaagttgtttataccaagtacatgaaggaactacaaatgtcacgcttcaaacatgggataatgttaatgtttcattaaactgccagaccatttattattattacattattaagtaattgcattcttataaatattttgtactgtagcagggacgtcacaccaacgaggtgcctaggaaacccaatacacaggaacctatttttacaaggaatcagtagttgcattctaaatcacgatgtattttgtatgaatcaatgtactgaacgcataactaagatgcagtctcaacctttattttaaccatttctatacattttgtaggagaaccttcccatcttaaagaaaaagatgttgaacttctttccaaccttagatgtaaaaaactcagtgacttctaatggtacaaaaacactttacttacccgagtatgctctgagaagattcaaaccaacctttctagaaagaaaaattctttgcttgtttgccaacccttct

SEQ ID NO: 56366 - DNA, 365 bp, Populus trichocarpa
  Intron number 1 from transcript POPTR_0004s21370.1 (locus POPTR_0004s21370) derived from phytozome v7.0 (chr-ID scaf fold_4; pos 20533913 to 20534277 reverse strand)
tcctttaattgaagcttcactccatcgattctaaggtaatcttcgatttcctcttgtaatttctcctaattttgactgtaactagtagctagggtttttcttcatctcttttgaaatttatattttttctaattttttcatgtcattaagtcaaggatttttgttctacttgcaattagtagctgatttctaaggattaacgtggaaatttcgattttcttgcagttttttcttcttaaaacttttttttttctactgtgaattttctgtttggttcctcagaaaatggcggggaaagaaaataaaatgagcgtttatctttgtgttattaagttagtttcttgtttctagcaggttaagacgga

SEQ ID NO: 56367 - DNA, 663 bp, Populus trichocarpa
  Intron number 1 from transcript POPTR_0012s11900.1 (locus POPTR_0012s11900) derived from phytozome v7.0 (chr-ID scaf fold_12; pos 12255184 to 12255846 reverse strand)
tatttcaagttccagagctggtttcacttttccaggttagtttgttttactgtggtgtgatacagatttttcaattcattatgtatgatgtttgcatgcttgatgaggtgtgatggcgcctcctaggccgttctgattctgtaatttgcttatagtttgattcttgtggttgaattgaactggccatgacagttgtgtggtatttgtctaccctagctaatcttttgctaatatagttaatcaactttgagaattggagatccaacctgttttgccaccttcacccaaggtgtgaatatttcaaatgggtcgcatcaagcagtgcgtgcatgatctgatgtattaattcatttgatttctatgctggactgtggatgtcaatgcccaagcctaatgaataacttgggaatggttgtttttctctactattatgttgtagtatttcctcatgtattctggcagtcagtaactatacaaaatgccattttattagctgaggaaattatcgagaataacttgacaagaaaaattaggttttgggcccttctattcatctcccaaactgtcctttgggatctataaaaagcagaagaaaattatagtgatccaaatcggcatgttttttcagagacgccttcttaactttgttcggaaagctcttgc

SEQ ID NO: 56368 - DNA, 782 bp, Populus trichocarpa
  Intron number 1 from transcript POPTR_0004s16970.1 (locus POPTR_0004s16970) derived from phytozome v7.0 (chr-ID scaf fold_4; pos 17341981 to 17342762)
tgaaggctccacttttccatcagcttgtacttttggtaaggagatgctccatgatttttttttggtgtcaaaattgaaaatgagaagatatgtgtccctcttgatgaggttatgttttgtgcccgagcaacactgttttctgccaattattttgcttggtaagattgagattttaggtggcctttaatatctcaggatcattatctcaaaatatagctaatcctgtgcatattcttaatacggtagcctggagagcttttcagctccccatgctttgtaatgcttgcataacaaaagctacaatgctttttaagactggaacaattcgattttcttataggctcatacaaattgtcaatgaacaaaagggaaacccatagtggattttctacctcgcatgtcatttaccatctgcctaatcatttgttttttgttaacattctgggaagctgaaggttttgagtaatccctgatcttagaagtgctgaactgtattctcgttgcagtccactgtcagatagttagagaactgtgaacagtggtgtgctggaagtacactatgcgagaaagcattgatttttggttcatatctattccatatacatttgatcataaccttttccattagctcattttttacattattgtacatctcagtgcatcaaactttaacagctagctttcagaaacataattccctgcctaattgcttcatctcattatcatttacccatgctctggggatagacagagtatttcgaggtaacgacactacaagggaa

SEQ ID NO: 56369 - DNA, 663 bp, Populus trichocarpa
  Intron number 2 from transcript POPTR_0015s06780.1 (locus POPTR_0015s06780) derived from phytozome v7.0 (chr-ID scaf fold_15; pos 7814392 to 7815054)
aagaactctctgtcattattgatcttatcaatacggtgagagtcatcatcatttcatctgcaactcattgttcctgtatcctctttctatttactttgtgatttttgtacaaagttcctgaattgctgtttattagccattctcttttgatgaatatgcacttcaaggaagatatttctgactgcattatgaaccattaactcagtgtaacgtgacttgtatatatctgtgactaaatatgagccttttggattggcattttgtgctagtagaatttgggttgttcaggaagtctgggaaagctaagaaattgattggagacaaattgtactttttttttactaggagttaggataaaaaatgttaacaactctactgaaacttttatttggagtacgtgtggatgctatttttcagaagagttgaaaatgtgctgcttgttatcaacctgtcatgtagcatgaaagtttttgaatattttgcactttacttataaaagcataaagagttttgattatcttcattgcttggtattggtttgtttttgtttgacatactctcttctcaagctttttggaaaagcatgatgatgccttgcatgcgtgtatgaattagtttgctttttttttttttttattttaaataatgtataggttgaagcta

SEQ ID NO: 56370 - DNA, 859 bp, Populus trichocarpa
  Intron number 3 from transcript POPTR_0011s02860.1 (locus POPTR_0011s02860) derived from phytozome v7.0 (chr-ID scaf fold_11; pos 2813452 to 2814310)
ggcctgcgtattctgctggtgtaagacaggtagttatgagtttaagactgttaacccaacgtgtcaatacctttcttgtttggtagctttgtcatccaagtgattattggtgcttgttgttatattgctatatttatatttgatggaattctctatgttgattagtgatgagaattcgcttcctttcacagcacattatttatgtaggagtttcttatcgagatgtgaatatattcggttcatatcatttgtttactagatatcattagtgcgatatggtttttaattgaagtgtagaatgagcttactatcgttttcaaaataggaaatgctgtttctagttgcatatatgtatggataacaaagaaatgatctcactaactcctcctttggagagaagactattctttcccttctcattctgccattttaagtgcaaatgagggcaaccataatggtgtgtttttctctgcaaaaggtgtttttatctctcttgtaaatatcaacattttgcccagcttctgagaaatgagacttcaaaatcatacaagttttagtactgaatctcatggtcatagcttctgaagacctaaatgctactcggttctagtgtattttttaaccctccaatcattgagtcccatgcctgcgttttctcccctagaataaattcattattctacctgaagctttgattagaacattctactaattagttgcgcctattgtttcatcgatttatctatttggtactgggttgaataaggcagacattcctatttggtagctgtattgtcttttcatcataactagtgtacggggtgagtttccttatgttctatcttcttttggcagggtg

SEQ ID NO: 56371 - DNA, 929 bp, Populus trichocarpa
  Intron number 2 from transcript POPTR_0012s11010.1 (locus POPTR_0012s11010) derived from phytozome v7.0 (chr-ID scaf fold_12; pos 11636718 to 11637646 reverse strand)
tccagttactggaaagaggattcaaggggtatttgttttataatctgttaatgattttgttttttattgcatttaatgtaattttgttacagccttgaattggtaagttttgtttaggatgatattgttttgtgtcattgattttacttgcttaatccttcaatttaggattttggatgaaatgatagtgcccgtttgtcgttgagtttgaacttgtttttccatcaaaatttaatttttttctgcttcaaactaattttttttttagcattttcagatctgaattgatatcagaaataattttttttaaaacaaaaatattattttaaaatatttccaagctaaaagcattttaaaaattacatctataacattctcaaacacccttttacttgatgtagattttcaagttgtaggagttggaaatttgatgttttggatcatatttaacttgttttacagggtcatggaattgtatcggggaggagggggagtggggatccgtgcgtgaacgttactataggggacaaacagtgatgcggggtggcgagcattgcttaaagcttaggagatagagtggatattatgcatgataatctagggacaagcagtgtcttctttaagtcaaactagcttaaatgtacttccctgcagtttcttatttgcatgataatctatgatatttagtctagtcggctaataagatgaattattctaatgtaattaaacagtatatgatggtatgtaaattttttattgcttatttgatacaaggttttcattaatatgcgaatgggtgatggtttcctgcatgttgttgaagattacccagtaaaacataatttcctactgctttgcagattcctcacttgagacagacctgctgaatacaagaggtctagattgtctaggaatcgcaggactgttaa

SEQ ID NO: 56372 - DNA, 898 bp, Populus trichocarpa
  Intron number 1 from transcript POPTR_0015s10220.1 (locus POPTR_0015s10220) derived from phytozome v7.0 (chr-ID scaf fold_15; pos 11211734 to 11212631 reverse strand)
cgtgcgattcgagctaggtagggtttcagcagcagaattgtaatttatctatgcttcgacttttcgagaagttgtattacctttagtgtcataatagtagattagtcgaagaagatagtatatttattctgtagctcattttgattaactggtgcaaatatagtattaggaagttaatcttttactagtttctgtatggttaaatttttaacgcctttaatttttgctgtgtgcagtaaatgtctctctgttgattttagaacttgatgcgagatagtgcaataaatagactgcactgagcttgattcgaattgagattttcgcacaagtatcatattttatgtgcttgttcttcgaagcttctctggggttttagtcgaccatattgattaaaatggtgcctttttattttgttttccacataagtgcagtttttgcacaaagcaactagattatagcttaattatctgtgcctggtgataaagaacgaaggtagcttggtagagtgcattgaaattggatttgatggttaacatgtcgctgtctgatgcctcgctttaggttcaacggcctagtttcaaccaacatgtttttcaatctatccaaaaccgtgaatatgaaaggcaaaaggaaatgtttccttgtcatttcttatacagtcttcattgagtttcaaaatcaagaaattactatatgaccattttgatttttaaaattggatacttgaacacgagtagttgtatatttctgtgttatacacgtgaggttgacttgttagaagtattagcttcgcagattgcctgggccattaactcactgatatctgacacttaacttttcttatgataattaaagcatttatttacatgctttatttttggtttcagatataacccat

SEQ ID NO: 56373 - DNA, 382 bp, Populus trichocarpa
  Intron number 4 from transcript POPTR_0004s16020.3 (locus POPTR_0004s16020) derived from phytozome v7.0 (chr-ID scaf fold_4; pos 16487955 to 16488336)
caactttatttgaggtagcatcttctatctgtatggtgatggtacctttgtttttcactttgctgccattcagattgcaggtagcgcctgtttgactggtactcaattatgatctggccgccagtgagcattctttgaaaactcgttaaactgacatttgattcagtgaaagattcatatgaattgcaataggattactcgaataaggatggcctggataaattttgtacaatgaattctggttgaaaacttcgtatagttatatctcatgtcttaattgctattattgcttcatttgaattatttgcaaattacagtggaatgtcagtggcaaaggtagatttcttgctcaagttttctatccactttttgcaggaagctg

SEQ ID NO: 56374 - DNA, 527 bp, Populus trichocarpa
  Intron number 1 from transcript POPTR_0015s12930.1 (locus POPTR_0015s12930) derived from phytozome v7.0 (chr-ID scaf fold_15; pos 13089134 to 13089660 reverse strand)
aattcagcattggaattcaagagcagcttgttcaagtaaacacaacattggtccctcaatcccatctcccccccccccaaccaggcaatgtggaagtgattttgtttaccaatttttcgcgttcttcgattgcttttttcgcagcttccacttccagctcgcaagcttctctccatctcacaacctctgcctcagtttcttttatttctgtcaggagttcctcaacctttgccgtgaaaataaaaaagaacataagaattgaagtcagcaaggaaaggagcttgctttatgaatgcatgcaatctcaatcaaaccaatgattacattttgagcttgcaccctctctctatcttccaactcttttatgtacagtatgttctctgcaatttctttatcttgtttttgcacaaggctttgtaatcgctcagcatctgacctgacatgtaaaaaccaattagtaatcacaagcaagcaagcaaaaccaagcatcttttttttcacaggaagcattcggtggtctaagaaat

SEQ ID NO: 56375 - DNA, 845 bp, Populus trichocarpa
  Intron number 1 from transcript POPTR_0011s16640.1 (locus POPTR_0011s16640) derived from phytozome v7.0 (chr-ID scaf fold_11; pos 18445706 to 18446550 reverse strand)
ttcaggtactaattctcaatggcttttttgttgtctgggttaatgggtttttgaaaacattttagtcttgatgggttctcttgaagaatagtaaatatctgtttggttgaaattgtgacagaagatgataaactaaggatttttttttgctatggtatgatttattcttaaacaaaaaatgaaaatgccaaactcttgcataagttgattttagtctatctattttttttgtaagttcttttgtaatttctggttcgtgataaagttgaatgttattgatctttgttttatgaatttttgggtttggtccatttggatattacaggttagtatgggatttggtgttggtagtttagtatttcttgtagcaatttgaaaaactgttacctatttttcattgtttggaactcttatctgcatgagaaatcagtggatttcacatgggaattgctgtagggaaaaagagtgagaaaaggaaaaggaaattgagttaaatagctatatgcacgagacattgtcacccggtaagaggaattcaggtactaaagtagtaaataacaatacaattagattataccactaggagatgtcaggtcatacattagtttcctcaggattgaagaaaatgttgttttttttttgtttttttatttcaactcttcttgtctccattgacttcccattacagattttgactttcctcaggtcatacatcaatgactgatttttggaacttaattgaatagattgattctccggtttggttccagtgtatgcgtgtgattttgatatttgaatctttaattacagttgatagagaaggatccgagcaaggctgtgtccct

SEQ ID NO: 56376 - DNA, 663 bp, Populus trichocarpa
  Intron number 2 from transcript POPTR_0015s12980.2 (locus POPTR_0015s12980) derived from phytozome v7.0 (chr-ID scaf fold_15; pos 13117160 to 13117822 reverse strand)
tgtgtgtgtttttcagcctcttcaaaaagtcccaggtcagtccttcctctcagaccctgatttcccattttgaaatttcttttcttttggtttcagatctttagttgtaaatttttcttacctttttcattttattttctttctttcttgttctctgcttgtaagctctacatgttagttagtggttttgagttaatagcctgtaggttggttaccgggaatttttgtgttttgaatttgttcattttttgagataataaagaaattttgagtctttttgtttggtttcagaagggtttttagaagaaaaaaaaatgaaaatttgaacttaaattggcagcataattgtcactggttcagtaaagttgaggctgctgttgtcttggttgttttgagaaatgaaatgtgcttgcttgattttaatttggatgggaattgtttcatgttggttgacattctaagctagggaagacaaagaaagtgggaattattcatcacttaggttgttacgcgtgttgtatttaagttgtgttctatacttctggccgggaatggaaaatattgaatttgttgatatatgcaacagaagcttgaagtgttctgtgttcacttatgtttctttttacaggaccgcactgttttgcaggttccaagaatatcttt

SEQ ID NO: 56377 - DNA, 728 bp, Populus trichocarpa
  Intron number 3 from transcript POPTR_0009s04400.1 (locus POPTR_0009s04400) derived from phytozome v7.0 (chr-ID scaf fold_9; pos 4781039 to 4781766)
aaagaggtatgctttgtttgttgtccttcttaatgttgtagtagatttcatttcctgacacatgtttctggtggttgtacttgttaaatatttctaagtcgacagaaaaactatgaaagaaagtggttcctagtcaaaagatgaaacttgttgtcttgaataacaaggttttttatttatcaaattttgaaaggttcctgatttccaatttgagttctctccaaggttaatagaagtggtaatgaagatatcgtaaagagatctagagttctatcttaaagtgagaaaaagaaacgaaatctcaaccaaaggagctatttttaagtttttagatacgaacaataatccttgtttttgctgcaatagcagtcttcttctataaagtgtgaagcctcagcaagaagtaattttaactcttaaatttaatttaatattaactgtcaaaaagatcacaataaactaaccattgaaagagataagacaggataaaccttgattgggaaagaccacctaagtagcctgccccttttgttttgtaaccttgctttcctcatttaccaggtaagatgccacgatcactgttcatgactagaatgattgttcaatgtccaaagatttatgtattttcattccattaagaagatctacctgtggaattgcatggacatcatgaacttttgcatgatgtttttggtagtggttaatttccttttatcctgcagcacgtg

SEQ ID NO: 56378 - DNA, 913 bp, Populus trichocarpa
  Intron number 1 from transcript POPTR_0012s08770.1 (locus POPTR_0012s08770) derived from phytozome v7.0 (chr-ID scaf fold_12; pos 9849753 to 9850665)
gtcatcaaggtttgttttattcagtgtttttgttgttgggttgttggttctttttgggtttgttgagtaaatatgaaagaagtttggaaattggggttttgtgttttgttctttcgaacaatttgatttatatacagtggtttattgcttcagttgtaccttctaagggaaaggattgatcttttttctgtttggtttatcgtttgattttagtagtgtttgttcgagggttattgatttttttgtcggtttgttgggtcaaacatgagaaacttggaatttgctgtttcatatcttggtccttttataacaatcttggtttatatattgtgatgtaatgctccaatgagataaatacttttatgtgtgtttttatgagctgtgttgttttttattttttcctttgttttgagagtaggattcgatcaagggtttttcttcttcttcttcttttcatgatatggttgttattttgttcagactagggtttaatgaggggcataaatctgacgggcttacttttgaaagattttttagcagcttgaactttggccttggttgtacaaggaatcttctttggattttttattcagttttcctttttttttttttgtaaatataccttgtcaatggtgcaatttttgttggtctcaaactcgtgaagattatctgtgttgatgttataaaggatatgaagaccaattgaccgcaaaaatttgtatattatctcatctttgttgaggattaaaaggtttatgctgaattatggagaaactatttgatttgtcttttaaattcttttgacaaacaaatggaattatatgttactctgcaagtcttcgtgtttttttatattccatattgtctcccctctttacttatttatgttttctggtgtggacacaggttaaat

SEQ ID NO: 56379 - DNA, 810 bp, Populus trichocarpa
  Intron number 5 from transcript POPTR_0001s26820.1 (locus POPTR_0001s26820) derived from phytozome v7.0 (chr-ID scaf fold_1; pos 25822908 to 25823717 reverse strand)
tgggacacactaaaggtatggcacaatatatagtatatcaacatgattttttttcttaagttattatgagaaagaaacatagaagacaaacataaacatagagaaattcatagcagaaataccataaacaagctagaaataccatcctatcccacaatgctgtttcgagggggaatagtttttgatgatgtgtgagccttgctatgcccaaataatccaatgtcctaactatagtgaacaaagcacacctccataagactccaggatccttttccgcccaaaacatacaaaatgctcgagaagaaattcctctaccttggatcatgtttcagcatgagttttaatttgcagatgttgtatgggttccatgtaattcgtagcagtttcagattctcctttagttttgtagtataaaatcttgtaggctcactagaaacagtggtccagcttgtctaattttatgattctttataatattggaggtgaaaggatctgctgagtcaaaaaaatcatctctggcctagattccatgatcctttttattgtgctgtaaaaatgtgagtgtttttgttttatgcatgcttactgatccaggtttgtatttgtggaatatttaattaaatattcttagtcttcatcctgcatctaccttatcctagtttcagttttccatgagctaattctcacaagaggctaaatatttatgttcttttaaaacttttagtaatttcaacattttatttggatacttttttttgttggcttattattttttccgaccaatgtcttcttacaccaggtgtaatagga

SEQ ID NO: 56380 - DNA, 554 bp, Populus trichocarpa
  Intron number 1 from transcript POPTR_0011s12260.1 (locus POPTR_0011s12260) derived from phytozome v7.0 (chr-ID scaf fold_11; pos 15007536 to 15008089 reverse strand)
gttgttcacgtggaaccaacttcaaggtattgagaattgtgctttttggagttttaccatgtttcgtcaatttcttcaaatttccagcttttctttttctgtttttattggtgttcttatctgggtttttattgatttttcagtttaactttctttatgggagttcccaagctatttattgtttgctcaaaggcaagcttggtaataatccctttagtctaaaatttataattttctttcattatttctgtcagttacttcattagtcaagatcatttcttgatcaggtttatgtaacaatttaagacttgttcttaaccataaatctatcccaatttgatttatagaatcaggatgttttggtatcaaatatgaccctccccccttccctgtttttttcttacacaataggcagcaatttgaacgccaatagtttagtcgctacacggatttgagattgtgttctgtttcttgcagctccactaataatcaccagctttttttttttttgtctttcagcttattggacgcaattgatctcatcctccaaggag

SEQ ID NO: 56381 - DNA, 665 bp, Populus trichocarpa
  Intron number 2 from transcript POPTR_0015s02150.1 (locus POPTR_0015s02150) derived from phytozome v7.0 (chr-ID scaf fold_15; pos 1465020 to 1465684 reverse strand)
aggctttgagattgcccactgatctgttctttcaggtatgattagttcaatttcttcactttacgcttgttttcttttgttctttttgatcaatttaattaaagagtttgcaaattctgactctttagattcattaagttgtgtctgttcaaatacctttacaccaaattatcaagattgtttttttttaacgaaaaacgatcatccatgaaaatattgctattgggccataagcttgacttctgttttggtttttaaggtaatacagaatgctagccctctgttgttgtgtgaaatatagtatcagaggccaattgattggcgtttatctgtgaaatgaaaattacttgtggaagagttagggaaaaatgatctgggaaagtattcttttatgaataattaccaaaattgtagctcaggaaagatggttttgttgatttcctgccgaatgatcatccatgaaacatattgcaaatgggtcataaatttgatgatcagttcttaaatatcaggaatcaaatttctaagttctcctatcttttgctaggaaaaacaactctgtgaatcttgctacctacaaaagattgttagatttacattcaaaatttgaattaatgccgatgtattaaaaacttggtcttatttgtgcatgtaacagaggaggt

SEQ ID NO: 56382 - DNA, 707 bp, Populus trichocarpa
  Intron number 2 from transcript POPTR_0015s10800.1 (locus POPTR_0015s10800) derived from phytozome v7.0 (chr-ID scaf fold_15; pos 11603404 to 11604110 reverse strand)
cactacattaaaaagtgccatgtaaagattctgaagaggagggaaaggaagaaggtaacaactgctcattatctctgctatttttgtttaagaatctgttggtgtccaaatacataactatctagactcttcgaggagagaaagagggtgagcagataagtaaggtggagagaaataaagaaaaagaggcttaattgagaaaaaacgaagtgtctccatatctgtcttgggtagcaaagacctaatccattattaaagactttggagtcttaattgcttctatttgctttgacctttaagatattgccactatttgttgattgcatttgctgatatcgattaacctttttatgctaattttgtaagctatgactttgcttgaacagggcgtgcagctgactggcaatccaacttctccaaaatttcagaagaatgtggaggtgaaagaactggcacctgttccaagtacggcttcttcaaagcttatgttttatgtattttggaaatggaaggattttgcaccttgcacagctttgagggcactagaccatcataaaatgattgcatttcattagatggatcctcatataacatcaaaataaaaaaactgaatgatctttgaagttttttaaaaataatcttttgcgaatacattggaacccctcaagtttattgctatgaaaaccaaaagccacttgatgcagatc

SEQ ID NO: 56383 - DNA, 894 bp, Populus trichocarpa
  Intron number 1 from transcript POPTR_0014s15905.1 (locus POPTR_0014s15905) derived from phytozome v7.0 (chr-ID scaf fold_14; pos 11989771 to 11990664 reverse strand)
aggtaattgattactgataacccaaatttcaaatttatttttgttttgttttgggatgtttgttaagaatttaaagatatttttttttataattatgttatttatttttatttttatttttaagatctgctagttttactaattttttttaaattcttgttatggtgatgtttttttttctaattaatttgatatattttatgagtttgttttgattatacttgaattttttttatattttatttttagcggagccaccaaaattaccaattttttctatgttttgattttaggttgaactatgaacaaaatacgaagaattgattttttttttttagaaaaaaagaaaaactaatgataactcacagcctagtaaaccaactccaatatgtaatgttgaagttatggttgagcagtctcaatgtgcttcagcttacgaagaacctgcattgactagtgaaccacctcctactagaatcgatattgctcatttaattagagatccaagcaattgtcctcaaatttaggaatacttggttaatcaacaagttgaaattcgaagggcatacattaatttggggtcatatcaacctttgatgtctgaatatccgctgactggtgaaaaacatccttgtcgatttcaatcttattggttcaaaagttatccatggcttgaatattcagagaaaaatactgtattttgtttccctaactatctattttcaagtgagccatatggaaagccaggattaaacacatttactgttaaaggattcaattgttggaagaaagttaatgatgggagcagtgtgcttttttgactcatatgggaaaatgttcaaattcagctcactgatttgctaccaggtgcttggaaaatttgaaaaatcagtc

SEQ ID NO: 56384 - DNA, 679 bp, Populus trichocarpa
  Intron number 1 from transcript POPTR_0014s00390.1 (locus POPTR_0014s00390) derived from phytozome v7.0 (chr-ID scaf fold_14; pos 211389 to 212067 reverse strand)
ccgtattaagctaagcacttcaacctgcaaggtacagactagattttcaattccataatgctcattttcttctcttaaaaaactgtgtacataacttcgattcatatgctttgaaaatgttatgctcattgttgtttttctctttcaatttagaacacttgaggcactgcaggtcaggtgattttaaataaggttttggttgagaaaacatccaattcatgcatttactggtgctttttaatggttttgatatgtcaaagtcaaaatcattcaaaagcacctaaaaatcatcaatctggtaccttttagacaaaaagcactttggaaaagcattttcaatcgcattattaaccagttttctttgtttctcacctctctttgaaattgagaccttccttgggctgcatcaggacgtaaaaccttgactgcaactggtgtatgatcaagataacagttgtaaactggaccataacctccttccccaatcttctttgattccgaaaagtattgtgttgctacttcaatctcctcaatactgtatctcctgtatctgataccatgataagatagattatcctttgctcttttcgtttttgcagcttctttgagggttttctctatgttgagtctcctttgcgcttctattgcagctctcttctcagcttcttcagcagcgtct

SEQ ID NO: 56385 - DNA, 667 bp, Populus trichocarpa
  Intron number 1 from transcript POPTR_0015s10150.1 (locus POPTR_0015s10150) derived from phytozome v7.0 (chr-ID scaf fold_15; pos 11170207 to 11170873 reverse strand)
tgctgtgagtcttctctctgtgtttctagtttttttgggttcttgtttttctttgctgtttatgttttgctgctgttgaagttttgtgaaaagtttcgaaatttggtctctgtgttataatctatccttttgttgttgaaggagaaccagaaaaattgcatgactaatgtgaattttgtggaagtcccttggtttatgatcaacaatttaatctctagttctcatggcttaattttcattttgattttcatcatcacataagcaagtcattcattttaaggttttcttttgactaaatactcatttgggcaattatggcttgttcacagtccattcttagttctggtttgtgcttgaagtttatccagcttgcataccagaaagatgcaatttcctctgtttttctgtattttgcattttgaagggcatgcattcattttagaaaatcccgagtttctgctgtgttgtgggtgcagtttgcagagttagccttgtttatgctaaaagtttagtttagttgctatattttttacggagtttggagcattgtagggcataagtgaattctgaactgctaagtctataatactacttctttgaggttcattcgtgtgtgaatttacttgagggttgatatttgcagggcagcttctattccaagagccaa

SEQ ID NO: 56386 - DNA, 949 bp, Populus trichocarpa
  Intron number 1 from transcript POPTR_0012s07190.1 (locus POPTR_0012s07190) derived from phytozome v7.0 (chr-ID scaf fold_12; pos 7969039 to 7969987)
ctcgaatagccaccaacttctcgttgatcttcctggtatatactcttataattataataattcatgaagactgttcattcgtttgatcatcatcataatttaataatttcttcttctgttttaaagtaaggcttaatctatgattaggttcatgcatgcctttacgtaatgcgtgatcctaatctgattttgcagaccactcatgactccaagaaaagatcaaataataaattggaggattagctcaaacttatttttatattttaaatcagatcttgaatatttgtatcatttctcaatctatctagtagatactcttatccatcatatatatatatatatatatatatatatatatatatatataaagatcaaacgtgagcaccaacctaatttatcaaaagaaattgaattgtcatgcatgttgtattaaaatttgattatttatttatttattcaataaattaagtgggatttgagtttttgatgttaattttgatagaaaaacatgacaaatggatagcttgaagaatggcggtatactcaagaataattggaagaaattagatttctaagaacaaatggaagatttagtctaaaatataaaaaagttaaaatacagtgttattatagacattaaaggtatcaaaagtcatctaccaaaataacactgctaaaagtgttatataatcaaattatatgatgttattttaataatttttattacaaaattaatcaaattgtatcacataaatgccttttttctctctctcgaaacacaaaaccaccactttaaaaacgttttcactgattatatatcaaaagtaatatattaaaaacgatttcactgatatatatatatatatatattcgcgattctgagcagatcatatatatttaatttgtatttgtagatttcagaaaggaagaagtgaagctccaagtagat

SEQ ID NO: 56387 - DNA, 688 bp, Populus trichocarpa
  Intron number 1 from transcript POPTR_0012s13550.1 (locus POPTR_0012s13550) derived from phytozome v7.0 (chr-ID scaf fold_12; pos 13669081 to 13669768 reverse strand)
tttgaacctttgtgacccccaaaacccttctaaaggtacacactttcgtttcttttcttttcttttctctctctgcatgtcttgcaatttatagaaatgctgcttcttatctatcaaaactctatttttttttggttttttagtttcatactttgcttcaagaaatgggtttgtttttagtgtggaaacaatgcccattttgagaattagagacccttttgtgtgtatattgtattgtgttgtagttagtttcaattcaagagaatttatattttcttgtgttattagtattattatttcctttattagtactggtgatgataatttcagtgacagtggaatttttagagtatatttgtcaagaaagaattcaataaattcagttttggtatttaatttcatagctaagagatttttaatgaattttataaaatatagatggactttttttttcctgttttgataatgttagataggatttttagtttgaaatgaatgtaaaaactgcttgtgttttttgcatgttgtcatgggcagatgatgattgtagttcaagaactgtgatcgttttgccagttgtgatttctgttggagtgagctaacggttgtctttgtatctttcttttttttaatgtctctatgttgttgtccttatttcttcctgttttctgaaggtcaaggagtagag

SEQ ID NO: 56388 - DNA, 762 bp, Populus trichocarpa
  Intron number 6 from transcript POPTR_0015s03510.2 (locus POPTR_0015s03510) derived from phytozome v7.0 (chr-ID scaf fold_15; pos 3075285 to 3076046)
gttaaaaaggtgagtgatcacttctctacacgctttaaacattcgataacaatggacacgaggttgaacaaaaggctaaaatttggtaaacctcaatttgtatatctttttgatcatttttggttaatgtggatgggttcatcgatggttcagctatatggtttccaggaacagtatattcttagatttttttgtagtttcttaagcatttcctgaagcatgaaaccaactagaatagattttgagcagtttaattccagatcagaagagtatgcttttcctgaagcatgaaaccaactagattagattttgatagcacatcagttagtactgtaaccgatagacgtttgcttacttcgaatgatgatgatgatgatgtgtgtgtttgagagagagagaggcagagaggataggtttgtgttatcttgcaatgctggttgttatggacagcaagaactagctttaagacatgcgtgggtattgttgccttacaacttgggcaataatgatgtttcgattcacaagattgtgaagcagaataatgtctgtatctattgagtttggattttgtcatagctggagctggtgacactccatgtttagttactgtccgctagtgtggacactgcttgcttaacctgatttattttctgcatgttcatagagctgatacagatctttggcacccttttataaattttgacatgggatttcttagaaattataggttccaagtaaggaagcaatactgtcaagctccat

SEQ ID NO: 56389 - DNA, 639 bp, Populus trichocarpa
  Intron number 3 from transcript POPTR_0015s03060.1 (locus POPTR_0015s03060) derived from phytozome v7.0 (chr-ID scaf fold_15; pos 2573759 to 2574397 reverse strand)
aagaaaaactcgtgacccgggatcataggaaagaggttgatgttttactttgtttgcatcaatttagtctggttgatagactgcaggataaaaaaagtcattaattgttggaaatctggaattaaagtttgtattttgatgtgccactgaagcattttatttctctttcttttttctcgccacagaatccattcccgaaccatgtttattgaagtaatatttgctaataaggaagtacaactttgctcttttcttgttttttcttatttaattgttttagatttcagccttattttccttttgtggtcattatcctcatgtacagtgcttgagctaaggaaaaagaagagaagagaggatttttagggcctagggatacatttgttatctctcgcatgagaggctttttttgtgttttgagtttccaattgttgaacttcctagtttcctcttccaataatctagccctgtcctcacagtccaagtttttttgccatttattaacaatgaacaatcttggtggaaatttgtgcttcttattcacaatcttagatgccatcatttgattcattaaggatatctttcctcctgcgttattgttagtcttttggtttgtcacagacggctaaggctgcgaag

SEQ ID NO: 56390 - DNA, 379 bp, Populus trichocarpa
  Intron number 1 from transcript POPTR_0011s01340.1 (locus POPTR_0011s01340) derived from phytozome v7.0 (chr-ID scaf fold_11; pos 902616 to 902994 reverse strand)
ggtaagttgtatctctgtatgaaactacacatagcataagactagaatgctggtcgtgaactcttaatttgtttcagttaagtgtactgataagaaaacatataagaaaaataaaataaaatacttatgatttcttcgctgttttttttcaatcacgatttggctttaactatcaaatcattgacacataacctgctttaatttcttagctaaatgttgtttatttctattgcttatagagaggctactaattatcccacgttgtatttttctttttgatggaggtacgaggcacagtttgtccaatctattgtggagaatgtctcaaagaatttggatccaaaaatattttatgtcccccttcatttcattggaagag

SEQ ID NO: 56391 - DNA, 723 bp, Populus trichocarpa
  Intron number 1 from transcript POPTR_0001s36280.1 (locus POPTR_0001s36280) derived from phytozome v7.0 (chr-ID scaf fold_1; pos 34833194 to 34833916)
tagctgtagagactaaccagtccacgaaggttcaggttattttaattctctatcagttactacatatatacgtgctttaaagagtgtgcgtgtgctttgctaatcgtctctcccttttatttttctagttaatataattatagaaaggttcgagttcaagacatcgtaagagatataagcagtacccacatcaattaagagatttatgcctaatgagtattagaactcgatcggccatatatatatatatatatatatattccttatttattgatattttttagtttttttaatcatgtttaattaattgcttgattatgtagccacgattcttccttgacttcccaaatagtgagatttgaaatctaattatctcttagaacaaaatcaaataattcaattaattgaattattgctagctagctctcaaaatgttagctattattcaaatatatgttatgtaataaatatgaaaaagtcttgaatttgttgcttacttctcaaaaagaaaagagaaaaaggccgtcttgaatgtttcaacttttaattcattgaagctaagaaaagttgagatatctcatgcactctaatattggaaagtggttaattaataaaccttgttgtgtgtgtgtgtgtgtgtgtgtgtgtgtatatataaattttttttttttttttgagttatatcatgatgatctgacttatggaatatatacatatagtggt

SEQ ID NO: 56392 - DNA, 641 bp, Populus trichocarpa
  Intron number 1 from transcript POPTR_0011s11680.1 (locus POPTR_0011s11680) derived from phytozome v7.0 (chr-ID scaf fold_11; pos 14461184 to 14461824 reverse strand)
aggcgagcctttaagtttatgatatatttattccttaatgtgatgatattgctgcgaatatatcatctttgttttcttgaaagtttcaccttttcccttttttgctctacttctacaccaataaaataagaatgaacagcactagttgtgaaagggttatttatttaatatggcttggatatgtgccatttaaacctttaaatgctgcatgagcaagggcgattgcagtggtatagagaggataaaagaataagagtttgtaaaaagatctgggttaaaatcaagggaaatgatttgatttatatctccccattttatgtccaatccaatctgataataacacgatattcaaggaagtagattgaccttttggtgacgataaagcttaatcttaatttcctggtatggacatgcttccttggagatacgttcttgagccttatgataatgtattgcgtatttggttggctttttcccattccttattcttcaattcaagtgcaaatgattattggtccactgtctacaaaattttattagagaaggacgagaatggcataaagaaacccaaaatcttgccttataaattattcttttattatgtaggtctgcattgattccatatttcctgaatttgaaga

SEQ ID NO: 56393 - DNA, 783 bp, Populus trichocarpa
  Intron number 2 from transcript POPTR_0009s02600.1 (locus POPTR_0009s02600) derived from phytozome v7.0 (chr-ID scaf fold_9; pos 3374452 to 3375234)
tgttgatattgagaatcaatattacaattctaaaggttctttattttctttctttatagttatttttttatattaaatgggtctttatttatctatttatttattgttatttggtgctaaatcgagtgttgtcattgataatcgataatgggttcttatggttttacgagaaagggtgatattgcttgttgaagtttatttgtgcaaattattgtttttatttttctttttttcaagttgggcttggatttgatttgacaagagaaaaagaaaaccctattttttctaggttaggtcaaatagattgggtgcttttgaagtgatgatctttagaatgtctctctgggtactttcggatttaaattgagcgagtgggtctagaatgatttttcggttttgaaagactatgtttagtcgcgaggtgtcatcagcctggacatagataaacaagtagtcgctgtatgttttgtttttgttgttgttgtatttcgggtcttgatttttttccattctcattattcttctcatatgctcatgtatgatttgttttcttggttgaaaggctttgttgcatggtttttttattttcattagcaggtttaattaagtagcattaatgtggcattatctgctatcttgtgattagcagttttcatgcagtcaaaccgttagttgttcttaaaatgctttttgtatattttgtatctgttgtaattttccttttccttttcattgttgccacacaaaggtttggttgaaacggacccagaaggagcacttgca

SEQ ID NO: 56394 - DNA, 998 bp, Populus trichocarpa
  Intron number 3 from transcript POPTR_0009s02600.1 (locus POPTR_0009s02600) derived from phytozome v7.0 (chr-ID scaf fold_9; pos 3375262 to 3376259)
gaaccagagaaggcagagtgagtaatttccaactgtcttgttaatgaaattggatctgcagaatgtaattactaacactttcaattctgctataattactttgagcatgtggctctcagtttcacctttcactctctccctctcatttcaaattgaattttgtaaggtagataatcttcattggaagtatggatatgcaaatcaaggttgcaaacattttctgcaattaagctttaggtgatatggaatatcagcacaattctaagttttgttgatcttgtcctgtctaactaatgtggttcttgcacttgatctctacaacagcgaatctttgtgtagcatgagctttatgtagctagcagacaagtggatgacttggctaaagaattacttgctaaaaactaattcactatacataattgtacagaggtattgtgggtttgaagctatctttttaagtggtattcactttcagagttcattcaagtagtatccagattagcatgatagacactcttttccatccagagaccaagtggctttaacatgtatctgagtgtgataaacaggtcatatatgtcatgcatgcatgtattatctcacttaatattaatgaattataccagtttaatgtgctgcagtctaattgactttagagggagttgaaaggttgacttaaaggggaatgacatgagtggataaaggaaaggggaatgacatgagtggataaagggacagtgacattcttcctttgtctgctaatatttgtcaatgctctttacactgctggagaggtgacatggaagtagctaatagcctttgcctttgtactgctattaaagttgtttctttgttcttatgaggcataaactgctttggttttgtatggctgctcaaataattacctagaattatttatttctgtaagctaatttttgataagaaaaatcttcttgttaccaggggattcaaagcattgaaacaaacagttaagcttt

SEQ ID NO: 56395 - DNA, 711 bp, Populus trichocarpa
  Intron number 2 from transcript POPTR_0012s07210.1 (locus POPTR_0012s07210) derived from phytozome v7.0 (chr-ID scaf fold_12; pos 8000011 to 8000721 reverse strand)
cttcaagtggaatttcgatctttcctgtgaaagtaatctgtctccctcttcattaagattttcaattatgataagttcaatccttacttttcatgcattgtctcgtgccttcattactgtcttctgaagaattggatgtgtaccttatgcgtgcctgttgcttcaatttgcatgaatgcggaacagagtaattagaaatggtgttaagagtgtagaaactacaccctgcatcactcgcatctagtttctgacttctcaggtttgatattcctgcattttttgaactttgacggagattaatctctatatagttaattataattaagttcctttttaactttgagatcatcagatagatgatctcaaagttttcacatttacagtctgttgtcatacgtttccctcccctcagtgatctgcattcgattgtgtaatgcatatgcttcattgctctgtataggcagccagatgggtagagtatacgggcatttcgtagctcaaatgagtttgaaagaatgcatataatcggatcactgataaatggatctgcctgtcttctttttgttcaaccctggaatctgaacatgttttccatctaaggttggatttggaaaaataaaatattgagctaattatctaataattgtcaacttgttgattttcgtgattcttgcagctcaagaaattttgccaggactcacaacagttttc

SEQ ID NO: 56396 - DNA, 875 bp, Populus trichocarpa
  Intron number 3 from transcript POPTR_0009s16920.1 (locus POPTR_0009s16920) derived from phytozome v7.0 (chr-ID scaf fold_9; pos 12766434 to 12767308)
cagctcaaggcgcttcttgaagatcttgaaagtatgttttttattacttactggaacttctacgcaagctctcttcattcactcttcactctttcggtttcgctcttcagtttgctactaatggtgcctgccaacttttattttattttagtacatagaaatttggtcttaggttgcaaaatgcgaacccagaccaccttaagaattttgttcctgtggaaaaggggaagcgagaaatttgaaatatgtgcaagttctttgttgtgtgtgggtattaaagaaccaaattgttttgccgagttgaaggttaattttgatgatgttttaccttttgttctcctttccttgatatcagcattgatttctgtcagttactgtctatctaggttttctttcgggcagtttacatttgctgttaacggttaatttttttcagtattaacggaaacattatcagaaacttagaatgttctttatgctaatgttgcaggaaaaggccttaaaaaactggttgataaggtacagttcttgaaccgtggataatttctgagttttcctcttttctttgtttttgttttttcttcttgcacctgtttcgctgggctgtttgtttttgcgtttcaaaaatatttttggaaaaaaattagattatttatttatttatttaaaatcaatatttttttggtattttcacatcattttgatgtgctaatgtaaaaaataatttttaaaaaataaaaaaatattattttgatgtattttcatgtaaaaaaagacactttgaaaagcaaccgttaccacaatcctaaacacccccgaagtcattgcttcaaattatagaacctatttccacctcttcttgcaggtaccagtgg

SEQ ID NO: 56397 - DNA, 711 bp, Populus trichocarpa
  Intron number 2 from transcript POPTR_0009s01470.1 (locus POPTR_0009s01470) derived from phytozome v7.0 (chr-ID scaf fold_9; pos 1808984 to 1809694 reverse strand)
ctgttgggcttactcttggtcctaggggtaaatttgtgtaccactattaccatatatataattcatagtcatagtcatagtcatgattaatttttgaagaaaggctaaccaagtaattggggtgttagttaaaatagattgtggacatggttttctatgcaaaagctaagcctttgttcttattaatttcaacgcatatctgtgaatacaagcatgaattggtatgctggtgcttagaaattgacgtgaaatagtagatagagtctggttggtatcatggtggatcggttcatatgcgcaggagttccaagtgggatggatgcgctgccgagaaacaaaaaggatagaaaatagattgcaactgtgtttgttgggttgttatgtaggcaattccttccgtaaatagatggtcacacactaaaaagaatcatatatcaatagtatttgcaatgtaatgctgttgttgtggtcgacagaagtgcaaaaataatattctctcttaacaacaattgacacacttacacgtaatatattttgtaatgcttggtagatctttccaactctgcctatggcttaattagtactctccttttgttttttgcatctttatgtttagtgaaatcttataattatcatgcagggaaatttagatattaaaaaaagaacacaatatactgattgcctagtttcttttgtgcattccaggtagaa

SEQ ID NO: 56398 - DNA, 881 bp, Populus trichocarpa
  Intron number 1 from transcript POPTR_0011s10580.1 (locus POPTR_0011s10580) derived from phytozome v7.0 (chr-ID scaf fold_11; pos 13066624 to 13067504)
accaggctttcaaatcgctcggtaatttttctataattttgttagaaacttgtgttccttttatttcgaattatttgattattggtgacctgctcgggttcgaatcatttgcttcttcttctttttgacaattaggtttgtttttgtttttgttcttgttttttatattgggcggtttctgatctagtgattgatgttcgcaccaaaatcattggagacttctgttttcatcacaagtaccacccaaactaatttagatgctgccagtatctgcacctcctccaattatgtaattgatttcaaagatgaatgtttaattttttatttttctgggtattaggtgtctgatgaaattcctagctgagatgttgttaaacttcggtgttcatttttatcactaaccttgagcctgtgaagttgtgggaatttctatcattcatactagaaagcttgtttatatagtgtatttatgtataaaacttaatcgtaaaagctaatttttcttgcgtggtttttttaatggtcccacacccaacctcaacccccacctccactcaaatacaaacacacacttaaagtgtgtttttctaagtttctgtgtttttgttttaagtggtggggcttgtagtcaccatgaaaagcaaataactgtggagggttgtacccataacaaacgctcttgtgtcttgtgttttgtactgtggagtttgtactgatgagggttgtatccacggcaaacacaaagccttagaaaaacacattcttaattatctttatgtttctcttaatgatgcttttattgatggtttttctccattccagcttactggtttttctcctttgcagctgtggctcttgtggataccccttgaatttaacat

SEQ ID NO: 56399 - DNA, 782 bp, Populus trichocarpa
  Intron number 2 from transcript POPTR_0009s11850.1 (locus POPTR_0009s11850) derived from phytozome v7.0 (chr-ID scaf fold_9; pos 9756348 to 9757129 reverse strand)
tggttgctgtcaagaatttacttaataacaagtgagtattcggtttttgtttcaattattttttagtttttgtatattttgttctaattgttatagtttctgttttcctttttgtatttaactgctttgtttatgatggcaaagttttggtcttttgatgatggagtagtagtggttgtctagtagggaattaaagtagagggttgctttgttctttagttctttttcattttcattatccaatggtttgcacttcctcaacattatcttaatacctttgagcttaggaggcttttttgttttttcttttgttttttttgacctttctctttttgtcctttcgatttatgaatggcaaggctttattttcttattgaaatgacaaaggatcgatctcattaaactacttatagtttttctttttctttttctttttcttttttggagctgaattggctttggaatttggagtgaagaagcgaagggtttttttttcgctgttggagagaaattcgaatataagaaatcctgaaaatgttacatgattttgtaatgtaatcaatgctaactaaacactgttgctctgattcgttacaggattttttttttgttttttcctaattattgttacagagttctctgactaggttatgaatattctcatcaaaagctcaagtcgtgtaatatctgtgcactataagaatgatctggttggaacttcatatgctgtgaactttgtatttccaggggtcaggcggagaaggagtttaaggtggaagttg

SEQ ID NO: 56400 - DNA, 545 bp, Populus trichocarpa
  Intron number 3 from transcript POPTR_0299s00200.1 (locus POPTR_0299s00200) derived from phytozome v7.0 (chr-ID scaf fold_299; pos 18230 to 18774 reverse strand)
ctaacaaaaattttgagattgaaagaggtacaccaaaggcttgtcataaattataaacctctgaacaaagctttaaaatggattagatatccaattccaaataaaaaagaaatattacaaaaattacattctgcattcatattttcaaagtttgatatgaagtcaagattttggcaaattcaaattcatccaaaagatcattataaaattgcattcacagttctatttggtcaatgcatattcaaaattctgcattgtatacattaatgatattcttatcttttcgaattctatagaacaacattttatacatttacaaacattcttttatgtcataaagaaaaatggtttagttatttcaaaaacaaaaatttctttatttcaaactcgtgttcattttctgggtcattatatctcccaagaaactatcacacctataaagatatcctttatttttgctagcaaatttcctaataaaatcttagataaaacctagttacaaagacttttaagaagtcttcattatgttctagattttcatccca

SEQ ID NO: 56401 - DNA, 644 bp, Populus trichocarpa
  Intron number 2 from transcript POPTR_0004s07440.1 (locus POPTR_0004s07440) derived from phytozome v7.0 (chr-ID scaf fold_4; pos 6139734 to 6140377 reverse strand)
gatatcaggtcccccccccttccttgtatttattaatttgttattatatgaatatccatttcatgattgttaacgaaatcattgtttgcttggcaatacatatttctttgtaacacccccatctatgtcttgtatggatgtgcaaattattgtacagggcatgtgagtatgtcagtctctagatattagtgcacaaaacccatgatgttagacaaatcttcttggattaaagaagatttcaaatctaagattttgatttttctgaaactaattagagtgtttttctgattaattgcttgtcatgtgatatggatgctggaggtggaggtggaggtggaggtagtaatattggtgttaaggcagtggaggaatgtaatagtgatgatcttggtgatgatagtggtcgtggtgagactgatagtgataatgattccatgatcgtattacattcatgatgtgtctagcgagctccctttttgataaaaaccgtgttttgaacttctgacaaacttggtgggtgtagcccaactgatcaaataaagtacatccataatatggccattcatttccttagttctgatgtgtttgttcgaactttacttgctgtagacttatactgagaagcctgggcacaactttagtct

SEQ ID NO: 56402 - DNA, 607 bp, Populus trichocarpa
  Intron number 3 from transcript POPTR_0011s09170.1 (locus POPTR_0011s09170) derived from phytozome v7.0 (chr-ID scaf fold_11; pos 11333814 to 11334420 reverse strand)
aaaaacgaggaggaggccaaggtatcaaactaacatcaccctcattttatatttgccgtttgtatgatctatttgcttgacgtttgacgtgtccatcatgttgtttgcttcaaatgtgctgatgagtgaatgacttacgctttagtgttttcgaaatgcctgtttagcagtgatgttgttgccagtgatctgaagaacaaaaataaagaaaggagcttttccaaatcgatcgatggaaatgcgatcagacagaattttataggttataattaggtttctgtaatttggcctgacaaggcttttatttgttgccgcagccagttaatacttaagccaagtggtagttttctcaccaattgactttttttcttttctttacctaaaaagggtcatgctgaataagcttctctgttttcttacaacagagtagtgcatttgttcctacaatatataggaggagtatgaagctaataggaaaagcttttgtctgttccattatccaacacctttgattgttgcttgttttgctgcatagctcacacatatgtagaatttcttgtttttacatgtttacttatttccaggattgatcttctgtagggctcac

SEQ ID NO: 56403 - DNA, 499 bp, Populus trichocarpa
  Intron number 1 from transcript POPTR_0004s12810.1 (locus POPTR_0004s12810) derived from phytozome v7.0 (chr-ID scaf fold_4; pos 12079251 to 12079749 reverse strand)
atcagctaaagcagaaaaaggaagacgatccaaaggtgataattacacaaataatataaagtcacttattttttttttgtcggatttttttatattagaaattaggttaacttcgagtaaaatgttgtaatggactgttaattttgtgatttaactcacttaattgagttgctgccttttaattttaatgaatttttgattaagttagttaattaaatttagttgctacttttaatttcgtagtatttttttagattaagttagttaattaacttgaaaaccttaattttgcactttatttagttagttcaaatttaaggacagtatctaggcgggcacgcgaatgctgaagttatgcaatgtattagggtatttggaatatgtaattgatgtgagaattttctcttcttttcgttttttctcgttccttttaagtttgtaatcgctgggttatgctttattaggtgcttcataatattgctattgcggagtatagtag

SEQ ID NO: 56404 - DNA, 586 bp, Populus trichocarpa
  Intron number 5 from transcript POPTR_0004s07410.1 (locus POPTR_0004s07410) derived from phytozome v7.0 (chr-ID scaf fold_4; pos 6112051 to 6112636 reverse strand)
gacaagttgtaaaatctgagtctgccacgataaaggtaccttttacttgatcctacttgttatattaggtttacattattttttttacttacaattcctagctttctgatattctattgagcttataactgtattaaaagccagattggttaacttctttagcaattcaatgaatgtatctttctgattttgatcttggtcttggttttttttccttctcttggatactagttctgtttctttagtctggacaaaatttttcattagaattaatgattatagtttggttgaggccttaagtcatagtgaagataaactggtatcaacaagctttctgcaaaatttatgccatcctttcttatattgtgaacaatgcatcattttatcctaaaacaaacttcctactttaggaaatgaaaatagaattatgagaatctttcagtagtagaatgctttccatcatccttctgcttttttttcaagaaaataatttaactggtggatgatgcattgacatcatttcctttcattcttttatctatcaattgcagattcctgaattggattttgagattcctccagaggc

SEQ ID NO: 56405 - DNA, 510 bp, Populus trichocarpa
  Intron number 1 from transcript POPTR_0011s08610.1 (locus POPTR_0011s08610) derived from phytozome v7.0 (chr-ID scaf fold_11; pos 10337749 to 10338258 reverse strand)
ctgacttcttgaaagtcttgactagtcttacacaggttaatatgcttacttttgtatccacattaaaaagttctcctcacttatgcttgtcatgattttcttgttcgctacagaaatttggttggtttttttttaatggttatatcatgattgtttttgcgttttaaaaatattttaaaaaaaaattaaaatttttttatttttttctttgctttaaattaatttttttttatgtttttagatcattttgatgcgcttatataaaaaataattttttaaaaataaaaaaaatattattttaatacattttcgaataaaaaacactttaaaaagtaaacaaaaccacaatcttaaaaaaatattatttatcttcatactagtcgaaatcttaatgttgttatttgattttatccatcttcatgattttgaagatgtctagtaaatttttcattgatgacactgcttgtcttatcaggtattatctctgtcactagaagacaatctgaagcc

SEQ ID NO: 56406 - DNA, 993 bp, Populus trichocarpa
  Intron number 1 from transcript POPTR_0009s12820.2 (locus POPTR_0009s12820) derived from phytozome v7.0 (chr-ID scaf fold_9; pos 10387697 to 10388689)
acgtaaaacagtaagttcgtaaattatttccttgatctatgtctcactttaacatcctcatgcattttttgaggtttcctatgctatgtgttccttatcttgactttcttttctggctcaaaaaccctattttttagtaaattttattcgagattgaatttgtttattgaaaattttcttgctttacttgaattaatttgttttttttatttagattaataatgggttgttgttagattttgagttattttttcagttgctaagatattgaggtttgtttacttgaaccgggtatgtttgaagcttgatttttttttccctattcaagggcttcttaaaagaaaaatgtgttagtacaacccaagtgttaaggttacggtttctaatgaaggaactgttacagttgacaaaattatttcgagatctgtctttattgtgtatatgcacacgaagacagcccatgtgtattaaggattgatgtccctatagagtcttgaaaactttatttaagttttggatgctttatgcttattaagtcactgatgctactgtctaactgttgttcacgagttcatgatctttgaattaaaaatggcagttgattgtttgttggaacttgacattcgagaaacttttgttaccgtactgcattgagctagagatgggttgtatcttagttgctttttgattttctgaatttcttgagatccaggtggaactggatgcatggtggcactttattgtaatacctcattatatatttgtttccatgtgtatgcttaatgtttgatctgttggatttttacttctcaaagctggatgccttccctgttaacggctagctttgttgtcttttcgatgaagccttgtatggtttaacattttggctttttttttgttcttctctttttggtgttgtcctttcttctcactgttgattgtaaaaaacttgaaatctgacttttggttttcttgttttcaaaatagggagat

SEQ ID NO: 56407 - DNA, 422 bp, Populus trichocarpa
  Intron number 1 from transcript POPTR_0014s14930.1 (locus POPTR_0014s14930) derived from phytozome v7.0 (chr-ID scaf fold_14; pos 10996611 to 10997032)
ggaccggatctcatcttttctcgtttttgatttacgtgagcagctcctttacttctctattcaatttgattagattttgttttgtgctacgtttctcgaattatctaatctatcagatcttatttttaattatttcaatgctgattttttatttagatttaatttcttctgattttcttgcttattatccacattggatcctaggattattaagttttaatcataatatctgtttttggttaatcaatttctaaattagtaagcaaaaaatgaaattgtttcgatttaaattcaatttccttttatgaaaacctaatctgtagttctcgtttcatcgaaagggtttctttcgtcgttgattcaattatcttgtgatttggcctgtaggtaaggattaagattaagattggcattgccgttct

SEQ ID NO: 56408 - DNA, 639 bp, Populus trichocarpa
  Intron number 3 from transcript POPTR_0012s13240.1 (locus POPTR_0012s13240) derived from phytozome v7.0 (chr-ID scaf fold_12; pos 13480412 to 13481050 reverse strand)
ctcggtaacaagtaatgtgctgtttgctctcatgtttcctgtgcattatcttttgtttggacattggaggatatgtatatgaagattgttggattcctgctgcacctgctatatttctaatacacttctctcagtttttttgaattcctgctatttttctaatttgttgaacttcaatttggactttgtttcatgaagaggaacttttgtatcccatgtcaatatgttcattaggatgaagaaattaatctttgcatagattttgctttctgttttatagtccctctaaaactgtatcagttgaaaggtctttatacggggataagccagatttgggatacaaaagatttcttctcattcttcccgatattcacgaattgtttagaagatgagttactgatctatggattttgtatgaatggttcaatcttttttctcttagtgataaaaagtgctggattctgataagcatgtcataaaagtaaagtattataaaaagatgatcaaatgtttaggattgctgttttatccttttcttatcagtatgctttccatgttttacataaaccatgccacatcttttggtctttctaagttttttttttttaactcaatgcactacttctcaggtgggcatac

SEQ ID NO: 56409 - DNA, 696 bp, Populus trichocarpa
  Intron number 2 from transcript POPTR_0012s13240.1 (locus POPTR_0012s13240) derived from phytozome v7.0 (chr-ID scaf fold_12; pos 13481160 to 13481855 reverse strand)
tcttggttgctggcgtagcctccctaagaacgcaggtttctttttctttttctttttggcatgttcagctttaaagtttcaaaatttattgaacccaagttaaaatttgaagaaaagaacatgtgtaatggctttggcttggattttggaaggcaaatggcccttcttgatgctttattattcaaaaggccatgttgtttatgccttgctgtttattggttgattggaatcatgcttggggtgtttttgctatttcaacttgttaaagaagaggatttgtgaccacccttgaaatgattttgggtttgcctgccttcttttatgtggggttttattcttttattttttcatgtcaaacgtgttgcactctagtttctaacccttgcatctccctgggaactcttaagtatgttgtgaaaagacctgcgattgtacaaaagccactagctagccttcaacacaaaacaattttgatgaatcaaagttagatatttggggataagctgccccaacttagataagtttatggttgaaccttaattacgtgaaaaacaaatctaataataatcaaattccagttggctttgctactaggaattccttcttaaactctgattttgagctcctcgaagtttctgaacattgatgtcctgaagtgttaaacatgaacaaaatattatgatcaggcctccttcg

SEQ ID NO: 56410 - DNA, 502 bp, Populus trichocarpa
  Intron number 2 from transcript POPTR_0014s03350.1 (locus POPTR_0014s03350) derived from phytozome v7.0 (chr-ID scaf fold_14; pos 2690887 to 2691388)
cacatattgcaggcggtcaggtgatatctagaaaggtctgtgtatttgtgtgtttgtttatacaacaattcctgctcaggatgtagaaacaatttctacattccggccttttaacctttgaaataccatattgaattgctttgaggtatggttaatctgtgccatcgtaacaaggtcatcttatgtgcaaattttaaaaatcttgaaccaagtaggatatgatggctgccaattatgattgtatcatggactttctttctaagtcaagctagctctttctttcgtgtgatgaagtgaaaaaagttccacttaaaccttgtgccatcttctagctggtgttgtcgaaacagaatcagttctatggatgagctaaagaaaaagggtccgattaaaacctgggcccatctttagtggttttccaaaatcaaatcaatcattaatcatgttgttttgatttataatttcaggtttctgacaagatactgcaaggaagagagctgga

SEQ ID NO: 56411 - DNA, 419 bp, Populus trichocarpa
  Intron number 2 from transcript POPTR_0009s10450.1 (locus POPTR_0009s10450) derived from phytozome v7.0 (chr-ID scaf fold_9; pos 8980903 to 8981321)
aagaaggtttggttcaagaaagaaaactaattttttttctgaattaaataaaatattacccatctcttaagtaagcaaaaataaaataaaatgctagcttatgaccagctcttttgaatacaagctcttttgaatacatatgcaaagctcatgcctcttaaatgcgttcttggcttatctagattatttaagaatatggggttgcaatttaattgtcccattcctcctcttttttactgcaatcgattagtaattcctaatttcaattttgtttttattgttgtgttcttcctggagtttctgatccctgggtcctccactctatgtttgcatcaggattctctaattagttttttttttttttccctttggctctccacgcagttttcttttgacgtcggcattctttctatctttgg

SEQ ID NO: 56412 - DNA, 516 bp, Populus trichocarpa
  Intron number 1 from transcript POPTR_0001s01440.1 (locus POPTR_0001s01440) derived from phytozome v7.0 (chr-ID scaf fold_1; pos 1084698 to 1085213 reverse strand)
atcgctctcactctgagatcatcaaagatctcaaggtcctcttcattagactctttttattcaaccgctcacaaatttagttaattgtgccatcttttagtgcaattaaaaccgttctcaaagaattatatctccgtttggtttaattgtgccatcttttattgttatagtttacaatttagcttcagttaaaggaattaatcgctttgttgttgagtttaattttttccgattaatggaccgttttttttcttttgcatgttttttgaggatctatttctttggttgctgagaaatcaaaagaaaatgaaattagaatccgagatcgtatgtatcatgttctgatttgatctgctataaacacagctatctctagaattagacagtatttcaccttgtgtttgatttaaatgcgtttgcgttttgacgctatcaaatccttttttaccccttgataaactaaccggctgcttctatacgcatgcatattctaattcaccagattcagagccaaac

SEQ ID NO: 56413 - DNA, 610 bp, Populus trichocarpa
  Intron number 1 from transcript POPTR_0004s24160.1 (locus POPTR_0004s24160) derived from phytozome v7.0 (chr-ID scaf fold_4; pos 22896925 to 22897534 reverse strand)
tcccttgactttgtgccctcagaaactataaacaggtacaaatattctctctctattcaatttctggtttttattttgttaaattttattatctgatgatggattcttgtttggttttgtttttttaaggcgaaattttgataaatttatgttctttatgctagtactgtcgtggatttgatagcttgtttgtttgtttcttctttttgtgttcttgtttggctggtgcaaaaattggagggaaggtgggatttggaactttttagcttagattaaaaggcatgtgatctgatgatgattttagtgaactgttaagctaaatcagagataaaagtttgtaactttttgatagctgattgattcactgattggttttaattactgaaaagtttgtgtttttagacggattctatttatttgagggagatgctgattggaatcaagctgtctgtctgtttgtttatatatttcttttcttttttgtctgcttgaaatttgtcaaggctttaagctatataaaggtatatacttctttgatggttttgcttcaacaagattcaattttaaataattcttttggaatttgctactaggtactgtgattggagag

SEQ ID NO: 56414 - DNA, 636 bp, Populus trichocarpa
  Intron number 1 from transcript POPTR_0004s01780.1 (locus POPTR_0004s01780) derived from phytozome v7.0 (chr-ID scaf fold_4; pos 1080364 to 1080999 reverse strand)
ctgctgttgttaccaccattggttgctctcttgatgtatgcctaccttctctcactctttcatttttttatgttttggtttttgtttaataaatggttttttttatttgttagttttggttctgataaaatgggttttcttgtttttttataatttcaaatgggtttgttttaatttcctgaatggtagctatcttcttgtttttttttctttgattttcaatgtgggttttgtgtttttgcaaaaattaaacattttttgagttattccttttaatttttgttgatgggttttattgtttttgaatgatttcaactgggtttctttcaattttgtgattagtagcttttgccttttgattttcaatgcgaatatcgtgtgttattttttattcttaatttttgaaggatgttaaaataattagtttggattattgtaggttgtgttagctgttgcttttgttattcacatcaacgactaggcttagggagttagattggttcattctgggtttatttttatcctgacatttgtgatttcgatggttttgtaaaggtgaagggactgatttatttacttttggtttgattgttttgtgcagataatatctccgtctaacctttacttgaaccccag

SEQ ID NO: 56415 - DNA, 717 bp, Populus trichocarpa
  Intron number 2 from transcript POPTR_0014s16550.1 (locus POPTR_0014s16550) derived from phytozome v7.0 (chr-ID scaf fold_14; pos 12600740 to 12601456 reverse strand)
ccacaggtcttctccttgtctttttatttatttatttttattacttttcgacttcatggttgccaaagtcttcttcttctcttttttatgctattgaagagttaaataaatattttctgattaagtaaggtggttagaccttttcttttcaaggtttttttgttgttatctatcactaggcgttgttgctgcatctttcaaccttcaagttgtgtttattttcaatttatggaatttgaaggtattaaaaaactttgcttaccaaatttggaatagaatttggtgaattgtactgattgtgtttttaaacaagttcatatcctggttatttatcttagatgcagctattttgtggaaatctttttcttgaactatatgggaacttcattttgtgagatcttttggattcatacctgctaggctgagaaattcatcctggccctgcataattgtctttggatactaaacacagagaagatttggacatgaaaaagaggttgaagtcaaggtatcatgcaatgtatgaaaaaatgatgctcagttgagaaagggctcgctgtttcagtatgcctaaaagggatattgctttgactttcttcatggtttaatgtaatgtatataaggaaccttttgtttatgtataaacttggaagaaaataagcttgcattttatttttattttgagaaattatgaatccaactatatttcaggtcccc

SEQ ID NO: 56416 - DNA, 611 bp, Populus trichocarpa
  Intron number 1 from transcript POPTR_0015s06260.1 (locus POPTR_0015s06260) derived from phytozome v7.0 (chr-ID scaf fold_15; pos 6697797 to 6698407 reverse strand)
caaattcaaaggtcaaattaaatgagtattggacgaatttgcataaaaattaagtccaataatataattaaatttttaatgggccaatttgatttaatcatgggccaaattgaattttaattatgttcaagaattaatttgggtccaattgaaggatttaattaagtgcaaggacttaattatactttaagcgggtcaaattaatttgagggcttaattggtgaaaaattaagtttgggagcttaatttggacttaattgaaaaatcagaattttaagagacccaatttaatttttaccaagtgaattgattgaaattaggggtcaaacacaaaacttgagggaccaatttggaagcccgaaaaaactactttgcctataaatagccttcattttcagccaaacgggggggcatttttgaccaaaaaaaaaaaaaaaagggaagaacaaaccctaaaaaacctaacccacctaaccctacaaaacttgttcttcttcttctccaagagcagccgccgccccccaccggtggtttccatttttcctcttccctctccgtcttttacctcctgctcagccgtcccagctctccctctcggctatttccacctt

SEQ ID NO: 56417 - DNA, 388 bp, Populus trichocarpa
  Intron number 1 from transcript POPTR_0014s09280.1 (locus POPTR_0014s09280) derived from phytozome v7.0 (chr-ID scaf fold_14; pos 6883679 to 6884066 reverse strand)
ctcttgttaagcacatcaaagctcctgcacaccttgtaagtttttctttttaccctctttttttttatcttttcattgattttatgtccgttgatttgtttaaaggtgttttgactttgttcttctgtgtcaaatctgtgaaattttgctcgatttcggctgattttgcccttcctcttaatgggattctctctgtcagtatttgtttttctctttcatttgtaataagccaaatataaaagaacggggcttatattttatttcttttcagtatcttattgggtttactctgcacgcataaacgaattcttattaagagaaattctgatttgattttgtatatgttggatcaggtttggtcactggtgaggcgatttgatcagccgca

SEQ ID NO: 56418 - DNA, 1061 bp, Populus trichocarpa
  Intron number 1 from transcript POPTR_0012s15210.1 (locus POPTR_0012s15210) derived from phytozome v7.0 (chr-ID scaf fold_12; pos 14850969 to 14852029)
agttattgaacccatttttgttatcatcaggccatgtatacaaagcttaggatcacttgttcacgtgacaagtctatttgatgtttggaagctcttcatttaagatctaagatttttttgtgtaatcacatgtttacttgacctaagatttgtaatcataccaaccatgataccaaaatgaaaaatcatttgactcaagtcggcctatgatgttgatgggaagttgagaggctggtcctaggtgttcccccagtgttgtttcagtggcctcagaggctggtgttggtttttttggaattccagaggctgttaataagctattctcttaatttatcattttatcttcaatttttgcctgaaacctgctgatgcaaaaaaacaaactaataaacacaagattggcactaacaatttaatacaaatgaatatacagtgacaaaaaaattaaatatattttgaaatcttataagaaaattaaacaatattaaaatcaattacaaatccatcaaaaaacccattaaaagcctatcaaaaagcctattaaaagcctattagaaagtaaaaatcttcaaaaaaacaatataggtttttttgattttttacatagaaaattgaaccgaactgaaactgattggttggaattgggttcggtttggttttgattttttttttttttaaaaatttgatttgattgtttttatagaaaaaaacaaaccgaacaaaaaaaaatcacccctacctaaaacctaacaaaagatacttgacttgggattgtggcaaagcttagagccttagaccaagaaggcccaaaatattaaagccccaaaacatggggtaagttagtcgtgttgggttgagttcttgctttccctgccatctcttggctctgtatccataacccgactacaacccatcttgaacccaaccccagatcttgacaggaatcttgtcttcagcccttaatcaatacattctaaaaaattcatgcactttcctctttcgaaaaaatgattccttgaatggaaggctgacactcttggttccttgaatataacaaaggg

SEQ ID NO: 56419 - DNA, 335 bp, Populus trichocarpa
  Intron number 2 from transcript POPTR_0011s01970.1 (locus POPTR_0011s01970) derived from phytozome v7.0 (chr-ID scaf fold_11; pos 1635491 to 1635825 reverse strand)
ctgattatatctatccttacagaaaccaggtaaagttgtggttttttatgtttttatttgaacgtgggattgttttgagttagtaagtaaggttgttgatttttgtggtcgaatttctttgggtgtgtgcatggataattgttatatgaagaggagtagttggtttagatgttgaattattaaataggttgtaatgtttggtagattaaatgatcaatgcaatttgaagggtgtgtactatgtgaaagttgtcttaaacattgttttctttagttattgaatgtgcatatgtttcttaagcggaacgtgatttctgatttggttgttacttcttt

SEQ ID NO: 56420 - DNA, 564 bp, Populus trichocarpa
  Intron number 1 from transcript POPTR_0004s18430.2 (locus POPTR_0004s18430) derived from phytozome v7.0 (chr-ID scaf fold_4; pos 18332765 to 18333328 reverse strand)
gacaaggcaacatcttggtaatccttattttcttcaacgctaaactgtaagcttcaatcgaccggtaatggcctaacttgttctgggtttcgattattatctgataattcaacgttacatacaacgttttaactgctattatgtgatttttagcatctcactgtctctgtctgaaagaaagcgtccatatcgtagcccctaatataaaactatgctgatattgtaaaatagttggagttattgcatagaaaatgaatcaaatattgcttctttagagtatgaatgagttaactttagctaaataggaaatatcttggttgcaaatttcaatctttgatggggattttcggtttttgtgtatattttggtacttaatcctgggtctctaagttaaccttttgacaatttagcaaactagcattctttgaactagttctcaattgtaattgcttctgagttattatgcttggctttaagtttcttgtaattcattggaaaatatggacttttctggtctcatgtttaacaggataaggattgataaaggaatcaacaccaggatac

SEQ ID NO: 56421 - DNA, 422 bp, Populus trichocarpa
  Intron number 1 from transcript POPTR_0004s03620.1 (locus POPTR_0004s03620) derived from phytozome v7.0 (chr-ID scaf fold_4; pos 2508528 to 2508949 reverse strand)
tctctcgctggaaaattggtgatcaggtaattcatttcaggttccctcaagaacgcaattctttgaagtggtgttttttgcttgtttttgacagcggattggatttcgactttgaaaagctgtgttttttatataaatattgttaattttttagtttcctcgggaacccaattcacagaaagtgataagttttgcattaatttttgctttaaagacttcagattttgatatgaagctgttaaagtcaagttctctcaagaacccaaaatttgtagacattgttgtttttgcttcttcttcttttttttatcaaagattgaattttggcatcaaagacttgatttttttttataaatattgttacttgattgaaaaatgtgttatgttatactaggtttgtgctcttcttagtggaggagggt

SEQ ID NO: 56422 - DNA, 674 bp, Populus trichocarpa
  Intron number 2 from transcript POPTR_0009s12060.1 (locus POPTR_0009s12060) derived from phytozome v7.0 (chr-ID scaf fold_9; pos 9910056 to 9910729)
ttattagagttattaaagaagctgggtgcatcaaggttgtgtatttttcacttctatttgtttctgtttagatgggcttttattggttttgttccatcttaattcccttcaattgtggtttgattgtactaatagtgcattggaaatggaaactggagaccttggaatgttaattaaaataggaagattacacatccgtagtagtaataaatttcatgtgacgaaaccagaatgaagggataaggaaacttttggtatttttcatccgtggacagaatttgcagtataagttgctagtactagacattgataatttcctcacctgctttctgttttcagtctaaactggaatagctcttgtttcctaaattgttccttttgattgtacaaaaggtgtttgtcaagttcacaggtacagttcaccaagtggcaaaaagtggcaaaatactgcaaaaatgaagcaagtgtgaccaattaagaaattaaataagaattttgtattttagcatcctggtaagtatgctaagaagaagaatgtgtggatatatgtgtgggccgaaagacaaagaaatgcgtgaaccattgtgaaaagctgattcttttgttgaattaaatagatgaatgtgttaatcattgcagaggtttattccttctgaatttggagccgatccaga

SEQ ID NO: 56423 - DNA, 847 bp, Populus trichocarpa
  Intron number 2 from transcript POPTR_0004s08150.1 (locus POPTR_0004s08150) derived from phytozome v7.0 (chr-ID scaf fold_4; pos 6666067 to 6666913 reverse strand)
caggtaaaaaaaatgttgagatcttgatgaaaactatgcccgataaaaacatcaaaggatattttaggctttacgcgtctgacaatgtactggtttgttctagaaaggccgtaacctagttcatttgtgttttaaaggatgctcgctccgatgttcaagtcaggaaggagaagggtgaataataaaagaaatacaacgtgagtagtagctagggcctcgaaaacatgttttagtataaactataatggtcatcgtctttctcccatgagtgcgtgataggggtattatttaccccatgtacagcagatcacatgacttaactggcaattagcttacaatcgcgaaggggaatagctcagagtaggacgacgatggtagtcagctactaaactgttgtttgcctcttgttctgaccaatacaaaatgatgaataatgtatgtgcaatgacgtgttcaatggtttattctaagagaatattctcttcatccacgcagaagacaattatgggatagtttttgtattatcaacgtcaagaattgtctgttcaatgaatcactgtgatattttgaggttttgtaaccttttctgcaagattatcaacgacgaccttgaagatttgagggaacattatcaacttgcatgagttgatgattcaagtcttttcctacaaaagttggaggagcctctttaagattctgaattagcccataaaagcttacttttacgctccataaataagttttgatctgtcattttctttttctgcaggttttccatttataaccattttacagtgtgatattaattgatgacctgattttgctcttcatttgcagctcatcacca

SEQ ID NO: 56424 - DNA, 681 bp, Populus trichocarpa
  Intron number 2 from transcript POPTR_0015s15740.1 (locus POPTR_0015s15740) derived from phytozome v7.0 (chr-ID scaf fold_15; pos 14960425 to 14961105)
atcaggtgagtctttcaatagacatgatttttgcatcctatttctacaatgtagacaaaacttactatgattgtgtaaaacctgaataaacatctctgtgatagaagtgttgccaaagtgtttttttttttttttggtgaaattacagtgtggttttgatagtgtattgctgcatcaaaagaaagaaaacaatctttgtagaaataatttatggcctcgccatcattattattgtatcttctcaaatccattttgaagaattcacaatgcaagaccaagacatgttttaattttccttttatgaatctggagcttcaaagaatttctactttcagtattctgaacagtggaaagaatttattagtttggaatctctatcatagatttagttctggaccagctatattaattattctatgatgttctttggctactgcagccactcaagttcagtgaaataaatactggcggtgattctgaatgttatatgttgtgctaattgtcttcagtcattttgatttttgcaccactgatttatttctcaaacaataagtgcttcccaattatagtaggtgtctctcttggccttgatctatgtaataaagatttcactgccaattcaccttgtttacaccatctattgcagccttgataccaatctcgagtccaaatccacctaca

SEQ ID NO: 56425 - DNA, 518 bp, Populus trichocarpa
  Intron number 4 from transcript POPTR_0004s04860.1 (locus POPTR_0004s04860) derived from phytozome v7.0 (chr-ID scaf fold_4; pos 3608508 to 3609025 reverse strand)
tggtgagctggactgtgggccttccaaagcgcgctgtaagttaaacctctattaattaatgcctatttcctgttctaagatgggattgtttggctgattttgatttagggaagatgattgtgttttataaacagtttatggttaccttatatgtaacatgtgtatagatcgtgattgatctttgacaagtctctggttttcaggggtaatgcctgtgaggaaacaggggttgtccttaaattgggaagaataccttgtatttgggacttggtgaagaaatatgaagattgatagtatttgtactaactattgccatttaaacatttaaagttcttattttttttggagggtatgatttttgaaggaaccgtgagtttcctgtcttaatcttattgtctatgtgtcatatggtattaggaagatgattgctgaagctcaagagcactgataatgcattacttatttgctgtgtattgcgtgcagcctattgactcaaatctcctgaagctgttgattcc

SEQ ID NO: 56426 - DNA, 531 bp, Populus trichocarpa
  Intron number 2 from transcript POPTR_0015s08740.1 (locus POPTR_0015s08740) derived from phytozome v7.0 (chr-ID scaf fold_15; pos 10070823 to 10071353)
caattgttggatctactggttccattggaactcaggtagttatataatttggatatcaaacaaactgtcccagttactgcaattacatttatgctttaaggttcttacttaattagctgctggttttttgaatattttgaaagagaataagccaatgaggcagaaaagctcacgcgataggaggtttattgtttctgcttgataacattctctttaaaggaagaggggatggtcgctcttagctttcattttatgataatttgattttcgataaatgtagcctttattggagttgggtatcctcactttttattaggtcaatcgcttaaccaagaataattatcattcttcaatgtgcgttgtcttgtttttttttcctcatatttttcttctttttttctccaatatttacttttagttattcaaatcgaaaaaaatataaggctgtgtaaacaagttctatcccttcatgttcaatcatttgtatatctcgcagacattggacatagtaacagagaatccagataaatt

SEQ ID NO: 56427 - DNA, 818 bp, Populus trichocarpa
  Intron number 2 from transcript POPTR_0014s10320.1 (locus POPTR_0014s10320) derived from phytozome v7.0 (chr-ID scaf fold_14; pos 7746894 to 7747711 reverse strand)
aggtattatataatactttttttttttggtattaaatcatacagtatacatgagattaccaccttttcttttgtttgcatctagggattaaggttagaccgttgtgtttgtgtggaagaatttgagtgctggagttcaatgtcgtgcttcgatgggattgtttgacatgattttttgaattatgactttggatttttagtcataatccaaaagttatttttcattaataacttgtgaaaaagatgagttaaaatgatttgaagttgaaaatatatttggttaaaatgactcaaagcaattttcttaaagaatagatgcagtgtaagttgaaagataaaaaatcaaaattttaactcaatttccttacaagcttttgattcaagtcaaatgttatttctaaccaaatatacatataacttttctttggataaagaatttaaaaacaacttaaacctatttgtaaaaatcataccgaacataaactaaattctttgccattattggatattgcttgccttaaacttagactagttaatcttgctcagcacactctccattacttttaagccatgggaaactgtcttccatgtgattagaagaatgtctgctatatcctagcttgtttgatgcttgagttctatttgtacaaactgttttcaatgtgatttgctgaatgtctgctatatccaagcttgtctgctatatccacgtgttgttctatcctgaaactttgggaacagactgctgcttgatttcttatttttcgagttctttttactgtagagggctattgttctttgcaagttaaagaacaaggc

SEQ ID NO: 56428 - DNA, 1027 bp, Populus trichocarpa
  Intron number 1 from transcript POPTR_0015s15390.1 (locus POPTR_0015s15390) derived from phytozome v7.0 (chr-ID scaf fold_15; pos 14677891 to 14678917)
ggagtcccccatcacagctccacctgttttgcttggtgagtgttgcttaaaaatcttgtttttaattgtctatcctatctgggttttgcttaatccttttgttttggccttaatttaaatgtgggggctgcttgttttatcaatctggagtttttgctatctgggtttgttcaatttcagctcataaaagaagctccttgggatatttttgcttagtttttcagaaagttatgtctttatgaagtatgtgctcagttttcaaataatcatgtcagtttttgccttcatggattggatatgtctaacttctttgtattggtttctcaaagacttgcgttgacttgctgttttatatctctatttgcagacttctgggtgatactgtttgtccttgattgctttctgttttattaaggttttctgcatggaaaacgataacattactccactacctatgtgtgcatttgttatgttaagtttctattcctgtgttcttctttcatttctcctgatatcctttgaataatttgtttcctctttgagcttttatcaggatagagatgattattattattattattattgttattgttttggtggcctgttctgtattccataggctccctagtctataagttaaacatctatttattctagtgcttatagcttcacattaagtggcagaatgcttgtgtcatatgttttggtccttgttttctgcaacatccacgatttcctatttagagacattcactacaggtgtttttgcaagtttatatatctggattagctatagtctggttaattgttatttcctttatctatatatttttttctgaaatattgttttgaagtgttccatgttattgtatagtgggattgttctttagtttcattaattattcttacccttcaagcaccgtggtttttcctgcaatcatcccttagctaagtttgagaattaaagctgtttaatttgttcttaagattatacagtcaatatgttttcatgtaggagagctgacag

SEQ ID NO: 56429 - DNA, 574 bp, Populus trichocarpa
  Intron number 1 from transcript POPTR_0009s09550.1 (locus POPTR_0009s09550) derived from phytozome v7.0 (chr-ID scaf fold_9; pos 8419408 to 8419981)
atcccatcctttaatatcccaaccctcgaacaaatgtaagttttttttttaatttttcttttcatctctacaatttgaacgccttttttctttagagattgaattctatgttaacaaggaaattcctcgaacccaatttgattatacaaagagttcagctacgaaattttaccttttgtttcttttgaactgaattgagggagattataaatgaggactctgtttttagttgaattgagaaatcaatttcgacccattaaatgtttttttgcccttttgtttcttccttgtattttataagttacagagtgagacgtaaggattggtggtgaaagaattgaaatttggtaatattttcatgtggggttatgtggaaatttggagaaaagttgcttgcattgaaaaaagaaaaggatgctggaatgcattgtcaaatttcaatgattactcgtcacgacttatcgaattagtcattgccatttttattgtctttaaatgtaagcacttgatttacaccgatttcttttatattttgattctggttttaggtacattgattcttgcaagaggcgtg

SEQ ID NO: 56430 - DNA, 249 bp, Populus trichocarpa
  Intron number 2 from transcript POPTR_0009s13540.1 (locus POPTR_0009s13540) derived from phytozome v7.0 (chr-ID scaf fold_9; pos 10753648 to 10753896)
ggcaacgtcagggtacagctcttttatctgcactattgaagaacttgtaataagaactaatattttggaaaatctcccctcttcttttccttaagaagcatcagaaagaaaaagcaattttctaaagtactctgattctattggtggttgtgtatcagattgatgtcccataagttggtttcctttttatcacttattaattttgattatatgtctggatttctgcaggtagaattgttattggattat

SEQ ID NO: 56431 - DNA, 802 bp, Populus trichocarpa
  Intron number 3 from transcript POPTR_0009s13540.1 (locus POPTR_0009s13540) derived from phytozome v7.0 (chr-ID scaf fold_9; pos 10753900 to 10754701)
gcgaggttgtaccaaaaactgtaggtatgtttttgataaaccatacatgtgatgtgatggacaatctacctacaatttgcgaaatccaaactcggagataatcagcattcccatgatgaactatattagtttagtacaattatattttagatggttgaatagttgatctaacctttaaacttcttgtgaaacttccttcagtctccacaaacaaccaatgtgtttctccttttcttgcttgcttgaaaaatggaaaaaacaatgtcatagttgcagttgcttatttaaaagctctggataacttagttaacatctcctagttcttgttcatgtatataagatcatccagacagtatatgcttttctagaggctctttcgcttctgctctctattgtctgatatattatatttccatttgttcactctttctttatgttcttggcattatgaattaagtaatcgtaattcaagataatcattttctagcattgatcacaattttgattgttctgtgactgttgtgtctgatattcgtggttcacttttcaaataagtatatactggaactgagtttacccttgaaccagtctagacaagtataaatctagacatagtctatatcattcaagctgtgctaggtttaacaagcaacttaaaccaaagggaataaattttactttatcacgatttatttggaaagccagactgtgcctttgaaactgaccttcatttgttaaacccattgcaaaaatgtgtatactaactaattttttcttcttttccagaaaatttcagggcttt

SEQ ID NO: 56432 - DNA, 516 bp, Populus trichocarpa
  Intron number 2 from transcript POPTR_0009s05830.3 (locus POPTR_0009s05830) derived from phytozome v7.0 (chr-ID scaf fold_9; pos 5818252 to 5818767 reverse strand)
ctctctggttgacacagcatttatcggccaaataggtattccttctgatcatgcaagtgtctttttttttttttttttttctaatctgttctcaaattgaagtgattctttctggagtgtgctatatagacaccatgaataaatttcatagcttatcagttgcctattaaatatttgcatgtcttggctgcatgattagtccatacctccatattcttggacatgtgacaagctcaagcgatcgcttttttccatgtggaatggtaaactagctttcgataaaaatgtgattcatacttgagaatgcagcatgttatgttggctgatatttatgaatgtaaacaagtttgcatgcttttggttgtaaaaccagattatgttctctctacctattcttccatcttgagaaagtttatattttgactttgttttttttcttttggatgatagcacttacctcttgtttctcataatcattcaggtccagtagaacttgctgctgttggagtttctatt

SEQ ID NO: 56433 - DNA, 427 bp, Populus trichocarpa
  Intron number 1 from transcript POPTR_0009s05830.3 (locus POPTR_0009s05830) derived from phytozome v7.0 (chr-ID scaf fold_9; pos 5818853 to 5819279 reverse strand)
tcaggtatatattgttgtttcagttttaaaaaattgaaaccaaaactatctttaatatgtactgtactgtttcagtgatgccattatgaaaccaaaactatctttaatcaaagagttggcgtgtaaatgctttgacaaaaagatttgtattttccaccgttttgctggtgcagtcgagttggctcatttatgcttccttgcaaaataccatcttcattcagcaggctgccccttttctttttccttcaaaaaccatcagatggatattctagcaaatgctcgatttggagtccttgataaaatcaatgcttagttttttcattttccttcgcatcattggaattttaagttgtcatatgaccctttacctccttctcttaagagatttttaaataatttatattattctcctatattatgggcagat

SEQ ID NO: 56434 - DNA, 1006 bp, Populus trichocarpa
  Intron number 1 from transcript POPTR_0009s11840.1 (locus POPTR_0009s11840) derived from phytozome v7.0 (chr-ID scaf fold_9; pos 9751004 to 9752009 reverse strand)
aaaaggaacttctcatcaaaatcaagcaaactcgggtactgatttatttattatgttttggaggttttagttttaacttaagaagttggcgccattaaaatgtatgtggtttttttggctttaatgatagaaggacaatattgagtttgaagtgattatgtagcttgaatttgatcgtgattcgttgtattagatagctcgtgaagtgaaagaattatagtttgatttaggtggttttggctgatttgagtttttttaaccgtctctagagggatttgttaatattttgctgggatggtttaatcatatatagattttgtagttttaactgtttgcatgatccggtacattttgatttgttatggatgggcgttgagtgaagtctgatttagtctcataataaaatgtagtttgacaaatcggttttatttagttccccgtaaatattttctttcgaatgaaagatttgatgagaatggccttctccccttgtaattagaacttgaaatgatacgagaaagcatggatatttcggttggtaagaaattatttgagaaatcactggtaattttagatttgtgcaaagtgtcttctctgaaatagtgtttcgttgacaaactctaacttagaatggctattgttgcatgataatgtgctagaatattgaataagaaaagtatatcataattagggagacaagatccttatgtgattgtacttctttagaggtgtgacatggacatagatttctgtatgttatcattgttctatgttggttaatgttgttgatgatgtaagcattgaaagagaacttgaagagggaataaaaaaaacgggttactatagaagtagtgaagggtacaaaagattggataggggagggttgtctacttttgatttcattggcagtatcatttccactgtagaaattgaaatttggtgatgttgaatgacttgttctatttgtgcagaaacctgatcttgcaggattggctgaatttctcaa

SEQ ID NO: 56435 - DNA, 551 bp, Populus trichocarpa
  Intron number 2 from transcript POPTR_0011s13720.1 (locus POPTR_0011s13720) derived from phytozome v7.0 (chr-ID scaf fold_11; pos 16397144 to 16397694)
tgagaaggttcgatttcagtttctttcatttgctttattcagtttcagataaacctgggtgttgagaactcaaaaatacacaactaagagtatctctttggtacagattgaaattcctgtatatatattatcaaaacctgactgaaaacattccaaccaaatgattcataattatgcccatcaacttaagatttcatgttatatcagcagagtgatcctaccaagtaaatgcatatctataatcatggagctactaagattccatgaatagcacttctgctccatagcactgtatagttcatttctccaatatcttgcttgttggcttggaatctgtctggtgtatgcaaatctgttggaaaatgataaaatgcttgcccacaacttgagcatcatccttaaagcatagaatgagtacaaatttaattatcccattagcagataaatacaagaagaactcagagtagaactgttttgttaacatccatgctgtgattgaagttataaaaatggattgttgttgcttgcagatacctgactgccttgcacaa

SEQ ID NO: 56436 - DNA, 1056 bp, Populus trichocarpa
  Intron number 1 from transcript POPTR_0009s13760.1 (locus POPTR_0009s13760) derived from phytozome v7.0 (chr-ID scaf fold_9; pos 10910524 to 10911579 reverse strand)
gcggttccaagcacaagaaacgaaagagtttgcaggtaacattgccacagctcctcactcttactcttctttttttatatacacaagctaaagaaagaaactttttttcgatagaacaagcagccagcatgagctcttgaaatatagttggtttcacagttagaacacgcaagaaattggctcgttgtcttgtctattgtatatctggatctttccagcttggatgatctgatatctcttatggttttagattgaatttttgtcattaaacgattaaagtattcctgaaggttttcgcacgctaaaattaacaactcacgaaaacgttttcttgacagttaattacattcaaacacgaaataataacaatgttgctgtgttcatagttgataaacttgacgagttgatataagaaatttgagatttagatctgagttgatttttaagttgaagtgcgtttttggcattgggccaaaatgtttaaaattgtttttaaaaaaatgatttagggttttgatgttttcatgtgtgtaaaatataaattttaaaaaataaaaaatattattctaatttatttcttaagcgaaaagttactgaactttcaaacataactctagtagaaaaagaaaggatatattttaataaaaataatggaaacatgccttgtaaattcacttattaacccaaaaactctgtttttttcattcttttcagattagtccctgtaccatacgtgacatttatggatttacccatgcactaataatggattgaattttaagaagatgagaagacgtgaaaattaggatttacccatgccaaattttctaatgttataattctctttttatgattttttgaatcttttacagtacagaaaataattttaaaaaataaaaaatatattatttttatatattttcttaaaaaaatattttgaaaaacattagttaacatactgacggacactatcttaagtttacacgctcacaatacgtgattgatttaatgtgatgatcagacggtggaagtcaaggtccgcatagactgtgaagg

SEQ ID NO: 56437 - DNA, 1010 bp, Populus trichocarpa
  Intron number 1 from transcript POPTR_0009s14830.1 (locus POPTR_0009s14830) derived from phytozome v7.0 (chr-ID scaf fold_9; pos 11546658 to 11547667)
gccgatcactgtaaattattcaaaacccttaacctttttttgtgggttttttttatgtttacgtggtgcgttctcattggcttggaaagtcctggcccgtttgcttgccacgtcggctttcttagtttactttgtttgttgcggcagtgtccctatgggtatttgcgcattcgccacttttttctttctatttgtaacaatgtaaccgtttaaatgacatgctttggccaaaatgcccccacttcctctcataattgcaaagacctttctatagaatcaatggtggaagctaagacaaggaagcagataagatgaaagaaaactactggaagggaaggaacgtagttatggggtttaaagaagcaaaaacaaaaaacccttttgtaatctttttagtctctttggatattaggcttttttgcaattgaaaatggcagagcttttataccaaccatttagcagcttcagctttaatggaatgaaactggaaagtagaagagttggtgatgtaagaaaagtaaccagtttgaaaccattgcaatgtgtgttgactgaggaggataacaggagaattgtggtggtgaagaatggaaaagactcattagatatgtgtagggttgttaatgggatgtggcaaacaagtggtggttggggcaagattgatcgtgacaacgctgttgatgctatgctcaaatatgctgatgctggattgactacttttgatatggctgatatatgtaatgagcttataaagaagtagctagtcttccaatactgtttttttgtgtgttgcaaagattacaattgatgctcagacttagaaataagttgttatttaattggcttgagtcagcagcaactttactgcttatgaactggataaacagaaatgttttatagatatacatacattgtcgtactgtataatgatgatattggcagtctattatttttaatatttgcatccaagaattgagtccctcattgtttcagttcttataactctgcag

SEQ ID NO: 56438 - DNA, 285 bp, Populus trichocarpa
  Intron number 1 from transcript POPTR_0015s04200.1 (locus POPTR_0015s04200) derived from phytozome v7.0 (chr-ID scaf fold_15; pos 4241125 to 4241409)
tggctcatttttgggctaaatttactgacgagaaggtatgcgtatataatggcatgagctaagatcatccgtttattttacagtttgtttcctacgttcattacatatgacatgaatttagatttttattttttttaattttctcacagaatcaaagggggattgaatatatatcctactcatattcacaccatatgtatctttatcttggaaattttgcctgctaaagaagtttcatgtcttgtgttttttcttcttcttctattattgcaagggcagtgtctg

SEQ ID NO: 56439 - DNA, 781 bp, Populus trichocarpa
  Intron number 1 from transcript POPTR_0012s04700.1 (locus POPTR_0012s04700) derived from phytozome v7.0 (chr-ID scaf fold_12; pos 4050737 to 4051517 reverse strand)
gtactaccgcaactgctgtcagtaccaagaagaaggtaaggcatttatttttgcccgttgttgtttcgtggttttatttttcagtttatttttgggttaaaaatacgttgttatattggttgaatctggatcgtaatttgataattttcttgtctatctaagattgtgttatatactcgagtttccttttcttataattaattgcaaattctcgcggttgcgcttgttaagagttttttcttgaagttttctgttgtagtgtttccaattcttacctgtgctaatctgtttgcatgttatgttagttgctacctagaagctgttgttttcagttgtattggacctgctacgctagttggtttatgtttttttttttaattttaattttatggttattcttttgtgttatcgtcttttgtttgtggacattggaaatgttttatcaaagacgtattcttggtttgttcatgacttgtaaaccatagagtggtgtctcattcgggcatttggttcatccgagatgctgaatatctggttgttgcgaaagattatttcttttgattgtatgctttagctgataatagtgaaactgtgcattcagaattggcagcttatcatgaatgctattattggtgacacattgagctctttatacctgtatgctactatgagaaagataatggtgcatgtgttttttcttgcaactagaaagcaatcccaattaacatcattttgctgtgtgttttgtagatctactgcacaagcttgaactggagtgctg

SEQ ID NO: 56440 - DNA, 509 bp, Populus trichocarpa
  Intron number 1 from transcript POPTR_0004s08620.1 (locus POPTR_0004s08620) derived from phytozome v7.0 (chr-ID scaf fold_4; pos 7164687 to 7165195 reverse strand)
tgctattgaagttcaaaggtgtaagcagccaagaggtttgataaaccctttacaacgcatcctctctcttgatcaaaatccacttatttttcgagtataattggcacacaagttgaagaacgtaacggacagattagatgctattgccaaggagagacagttccatctaatagcgggaggtggggacatcgaagctgatagttctgatgggcgtcagacctggtagccggttgatgagtcagaaatttatggaagagctcaggagaaagaagagctaatgaagtcactggtaaacaattcaggcgatctctctatttatgctatatgtggaatgggcattttgatcttacaatctggatatgcgtctctgatgattccactgtagaaaagttgacaagtgccatgatagagtctattcaaaacagcccttgtgacatagaagggttggataactagcagcgatgtcttcgagaaaagctaagtggaaagatgttttttgattgtgttag

SEQ ID NO: 56441 - DNA, 225 bp, Populus trichocarpa
  Intron number 3 from transcript POPTR_0009s04540.1 (locus POPTR_0009s04540) derived from phytozome v7.0 (chr-ID scaf fold_9; pos 4871166 to 4871390)
atagacttggacaaaacagaaaagaaggtaatgctttcttttcttttccgtctttgattatcagatgctcactccagttctctgtacttgctactggttcactgtccataaaacagaaagaaggtttcatttgagatgattgctgatctagttcttagattgctaacatgttatgaggcatcctgtttattactgtaagtcaactgcagggtgaacttggagcaa

SEQ ID NO: 56442 - DNA, 514 bp, Populus trichocarpa
  Intron number 2 from transcript POPTR_0012s08720.1 (locus POPTR_0012s08720) derived from phytozome v7.0 (chr-ID scaf fold_12; pos 9820444 to 9820957)
caactatccgtgatcgtatgtttttattctttatattttattttttagttttctcaaactgggttttgtttgctgggaagaaatgttgggcaagatgagtgaatgtgaataaatgtttgctttttgtggtgaaaattactgggctttcatgcctataattggaatataattataagtagcaaatggtttcttaatgaggattgaattagttctagtcaattgctctgttctgattcgggattgaatccttagttggtttctagagccatttaaaagggattttaaggttcttgtggaggttttgatcttatatgtagcttatcattggttggttagatatactattgcgtctcgtaatgtgatttatttagatatctatctaattttgggttcttgtttgttacaaattaataatcttgtctattacttagatttgttttccagaatttgatgattagtttgcttttgacaattgcgctgtgtgtcattctgcacaggtgtcttttatttatat

SEQ ID NO: 56443 - DNA, 584 bp, Populus trichocarpa
  Intron number 2 from transcript POPTR_0009s16830.1 (locus POPTR_0009s16830) derived from phytozome v7.0 (chr-ID scaf fold_9; pos 12708692 to 12709275)
gttcagagctagaaagtgtctgcaaagctcttgaggtctgtttcttttccttcttcatcttcttgttcttacatgcatcacaactataattgttgattttgctcaaagaacaatggaaatcaacatatggacgaatgttataatctgtaatgtctagccaaagtgcccatttgcattttaaatctgacagcctttcttcattgcaagttatccttaggctatctctactcttgaacatgcactcatctatcatacatgatgagtatttgtaactggctggtaagctattaacatttggctctatcctctgtggttttactcaagtctcccttactttcttgtttgttttgattgttagtactctgttcctttaaaaaaaaaaaaactttttcatcgacttctgtttttttttattgttattattattgtattgagaacctttcaaaagcaccaatagtcagtggtttattcataatataacttatccttcctttgaaccacaacttatcctgccttgtatttttgtctaataagtatagtgacatgcaggctgttgatcttaggagtccaaaagacttccgccc

SEQ ID NO: 56444 - DNA, 682 bp, Populus trichocarpa
  Intron number 3 from transcript POPTR_0014s13850.1 (locus POPTR_0014s13850) derived from phytozome v7.0 (chr-ID scaf fold_14; pos 10125693 to 10126374)
ttttgcaacattcagctctacctcagggtgttttggtgagacactctctctctctggttgcaaatgctgagtgattatttattttttttgatcagtttttgtatcattaattattatagtgtgaataagtagtaaagtagattaatatatcgatcaaatatgataaaatcatgcaaattgaagcaaattagttgaagtggatgagatttaattgaagtccatatttcatctgatattattaaagatcatgattacatgtacttcaatcttattgaattaattttaaatggtcaattagaaagcaaatgataataatgctactttttgcagtatcattatttgaattctaggcttggtaatacgacacaaagtttctttagaacttagtatatgtacatctatatttttcattagtgaatctaaatagttcgtaaaatcttacatttttaaaatccgattgttcgatctattcttttcctgaatatcttttgacacatttaaaatgcattgttagcagtgttgatcataagtgccaagagatggagttgaaactcatctatagcatcaagaagtagaactataatgttgtttgctataaaattaaatgaagaaatcttgttacaagttgaggcatgatttcttgaaagttcctaaatttgtattgcaggatattatacaggct

SEQ ID NO: 56445 - DNA, 376 bp, Populus trichocarpa
  Intron number 1 from transcript POPTR_0004s24420.1 (locus POPTR_0004s24420) derived from phytozome v7.0 (chr-ID scaf fold_4; pos 23097689 to 23098064 reverse strand)
cttcgatctcgatcacaacaccgctatctcaatcggtacgataatgcatctctccctcttctcttctcctccccttctcttcttactctctctgtcgtctattattacaatttcttgaaatcaattcaatccttttgagattttattttttcagtgatttttggttttcttcaagatttgatttaatttggtatttcactccaattaacaatcatccatgatcatttttaatagcttgtatttgagaccatttcaacgagattcaatccctttgatttaagtgtgaagatatctgcagacaaactaacagttttttctttttttaattttgtaacaaaatatgcaggcacagtttgttattcttccctgacaaaac

SEQ ID NO: 56446 - DNA, 489 bp, Populus trichocarpa
  Intron number 1 from transcript POPTR_0015s10200.1 (locus POPTR_0015s10200) derived from phytozome v7.0 (chr-ID scaf fold_15; pos 11203212 to 11203700)
tgatttcacttttatctaagcaaatactatcccaggtattactaatccttaattaatctcatagtacttgtgtctcttctgtgtcgttttggctgtggaaaaagtgatttgatgacttattgagatgtgattgtttctgtatatttgacagcagagttgtattagatatgatcttgtaatgggtttttgcttcttttgattttaaccaggtttagtcttgaattatggtctagtcaatttttttcaggcaatgttttttacacttatttgatgggaaattgaaattttcgagttatggataggtccatttggattatgaaatgattgagttaagttaattgttgtttgattctgtgtatggtcagtggagatcgtttgtgttagttggtactgttttttaatgcattgattaaaagttgtgttaatgattttaaaaattgtttgctcgtgttggggtttttcttttttctttttcttatctctggcagg

SEQ ID NO: 56447 - DNA, 860 bp, Populus trichocarpa
  Intron number 3 from transcript POPTR_0015s00870.1 (locus POPTR_0015s00870) derived from phytozome v7.0 (chr-ID scaf fold_15; pos 507207 to 508066 reverse strand)
gctagaagatcctgtttccgctcaaaattctgttggtgatagcagcatcagtgccttcgctgttctttaacactgttaactggaatcatgggctcatttatgtcacgttacaggttgaacaataataatgatatttttttccttctctggatggtgttttgatagaatatattaaaactcttcagcttaggttgaagttcattttcattttcctatctcacagggcaatttgaagacctgacaactgttatctgtctcaatttatgacaactattggccagtgcagaaggtgctcccctttctctttcatgtttcctccaccatctttttctatatgaggtttgatttttacttacaggcatcaatgtgctcattagatattttgtcctgagctctactttcgatgcttggttagtatttgatcaagacagaaatatatctttggtttgagagatacagacagagacaaaataaatttgggacaatcctgacattgacaatgcctggtaatggaaatttggtttggactctatgatagagagctaagcgaaacttctaggactaatatttgagcatctaggtgccgttgattattaaagatgatgttcatactggaaattgagtatatggaataatcgttagtcaaacattctcttccaattgactgctgtccttcatcactttagattgtcaaatatcatgaattctgccaagcaatgtgtttgctggccaaaaacagaaaaagaagtggaaaaggagagagagggagagttgattccctcacttgtgcagtacttatcctttctgatcttctttttcctggagtgatcaacatctgcttagcttctttaataacttct

SEQ ID NO: 56448 - DNA, 434 bp, Populus trichocarpa
  Intron number 1 from transcript POPTR_0015s00870.1 (locus POPTR_0015s00870) derived from phytozome v7.0 (chr-ID scaf fold_15; pos 508436 to 508869 reverse strand)
gcttttgtcaatacccgaaccccggcccgtgacgaaggagtaatgtcgtaaggacatctcatttatatatcataaagcaaattatataaaaactttatagattcataatcttttaaaatataatattcttcgaagtaacatacttcaaattaatctctttattatcaaactcttaaattgttccatcattaaattaagataaaaaccctaaaatctaccttaataaaaaaaacgttttgtttcttcaacctttcttgaatcataaacttaaattcaaaactgaaatcccttagaactaggagaggaaagtcacgacggggggataagaaaaagaaaaatcaatcctcgattagttgggataggtttgggctgaactttgagcttgggtttgtcggaccaaaacatgggttgtaccggaattagtgaggcaattg

SEQ ID NO: 56449 - DNA, 923 bp, Populus trichocarpa
  Intron number 1 from transcript POPTR_0011s08720.1 (locus POPTR_0011s08720) derived from phytozome v7.0 (chr-ID scaf fold_11; pos 10720013 to 10720935 reverse strand)
atcttcgtgaaaacgcccttcttgagctctctaaggtaacgacaaaattaccacttactttttagaaaagaaattgagaattgagaaattaggggttttggttgaaaccctaataataatgaggggtctctcgctatattttattttatttgtttttgtttacaagaagacgaatagataatttcgtgagaattattgttttgtaaaacatctttaataaattacgatagacagttgaatgtatgattattggcttaataaatgggaaggaaatgtatgattattggcttaaaacagatccaccacctgctgggcaccacccattttggcagttgaggaagaaaaaggctgccctgaactagtgaaacttagaattcaaggcatattcaaacttttcttgcaataaaacattgtatacttaaacacgaggtattttttcgttttaaatcggaggccattaaagtcgtaaactggctgtcaaaacgcttcttcgattttgcatgcaaaggaatctttaccttggctggttgcatacatgtgagggggagaaactatttcattttcattgtaaatcagttctctttatatgcttaaacatgaagagatacatgcacgcatgcacagctggacatagtttcatgtgcaatagctgcatgtaatcaacttgttatatgtggaccttgccaaattttttccttttaagtgattgtgccatttagctgttgaacattcattttctgccatcataaaccagtgtctacctttgctttcattttttagaacaaggatttatttcaagatttggctcctttcgtgtggaattcttttggtactattgctgcactcattcaggtatgcctaataaacttgtttttgtttttattttagaagagagaattatttcaagatttggctccattgtt

SEQ ID NO: 56450 - DNA, 916 bp, Populus trichocarpa
  Intron number 1 from transcript POPTR_0004s03590.1 (locus POPTR_0004s03590) derived from phytozome v7.0 (chr-ID scaf fold_4; pos 2494119 to 2495034 reverse strand)
caaagcacagaaaggtctcttctttatattcgttttctttctgacttaacgttttgcttccttttctttttggttgagtttggaattataagttttttctttgataaagactttcttttatttagtcttagattcattttagtaaaagcttactgggtttcttgggtttgcttttgtctctatggattttaagtgtattggctagttacaagcaggacatggtcatcgttaatctgttttgttttgcacttgttgtctgaaaatatgttcttgttccacaatttgaattggctttttcttcaaattaaacatttgtgagttctctgaataggaattgattgctttgtttatgatttatataagaaatgagtgaataaggaaagaaacttgtttaagattcatagtatagctgtcaaaggtgtttggtggtgatgccatggctgactcaattagtggctagttgtaactagataagagttgctgagttggtgattctttcactatggattttgtgcaacaacacttgtagggctgtctttttttattagatatcatatccatgttgcctatcattttcaacgagttgtagtatgtttttgaagttgttattgtgatattcacatgctttatgccatatgccatcaccatagaagtcaatgatgatttttgcaaaataaaaggttaataaaaataagatttttacattttgagaaatgaggactgtcttctgcaatatgcaaaccaaagctctgtgattgttgtactgccttctttttcttagccagcatcatggccttgctaatgactttcttgtaatttgaagtgtatatggtattattaatttaaaaagagattcacctccgtggctcttttgatttcagatcttggaaagcctccttaaattaccagagaatag

SEQ ID NO: 56451 - DNA, 812 bp, Populus trichocarpa
  Intron number 1 from transcript POPTR_0009s08380.4 (locus POPTR_0009s08380) derived from phytozome v7.0 (chr-ID scaf fold_9; pos 7695720 to 7696531 reverse strand)
agcctcctcctccacctctcctccacctctctcaggtaagaactaagaacacagtaccatacctaaaaacaaacttaataattcattgaacatctatcacttgggctgcttgtctctgtctatcttcctttcctctcttttttcagccattagaatctcatcttatcgacttcagttttttacttgtcgatttggtaatcgcgtgtggtgttttctttctttgttcgtttgtttttatgtagaaatgcaggcgttctttttgttaggttcttagataaattctgtataccttttactcagtgtgattacttaatttttatttttttttgctctttatgaggtaacgttgatgaatttagatttagtttgtgtttgaattttgaatctccttagagaaacttcaaccttacttgctcttatgttttcaatgcatacctgcttcttagtatgatggatgttgatacattccaatttgcctggtgatttcatctgcttcatcttaataataatgaactgtaatagtaaagtggggtgagcgaattttgttatcttaatactgctttctaagttatttttctgattgtatctcttcattttgtcagttgtccctattgtagttcatttatgaaatgattactgatttagttgattgtgctcggtaaactagcctgtattatcctccccccgaaactgaaacccattcattataaaaatgtatctttgaccgaatctttttttctcttcattaatggtattatttactcttgtttttaaaagctaatgaatgtttttactaggctcggttgcagatt

SEQ ID NO: 56452 - DNA, 502 bp, Populus trichocarpa
  Intron number 2 from transcript POPTR_0004s17540.3 (locus POPTR_0004s17540) derived from phytozome v7.0 (chr-ID scaf fold_4; pos 17702481 to 17702982 reverse strand)
agcattttgttgaattggggaataccctaggtaaatactcagtgcttctgtagctatcattttttttaatgggtttgaattatgcgatgctgatctctgctgattagagtcagacccattttcttgtaatgttttggaagaaagttactgatagctacaggttctgaattctttgcttttatgacctgcgttctagttgctgaatgtattgtatggttgttctatgaggaccggggggttggacctgacttaggtgcttaccttgcccatttacattctccaaggaatgtaaaatttggtataatagatcacttaaacgttctttcaggttgtggataaaatgttccttaattggtttatgatattggagaatcagctgattatgatcagaatggctgtttggggcatattgttttctaagattttagtctatgtttacatggccatgcagttttgatctccatgtggtcattttgatatacagatcctgatagacctaaaa

SEQ ID NO: 56453 - DNA, 426 bp, Populus trichocarpa
  Intron number 4 from transcript POPTR_0012s11160.1 (locus POPTR_0012s11160) derived from phytozome v7.0 (chr-ID scaf fold_12; pos 11719614 to 11720039 reverse strand)
cattctggagaactcctcaaaagccctttcggcaggtatgctgtttttgctgcaatctatatcattatcaatacattcgtgttaaggtctaaacaatggcatttgtggcaattgtgtccccattcaacttgtttttttgcttaagtttgatatttgcatcaatatatcttgagggttttttttattagattgctgttccttgaaaatgaattcccacgaaaggcttttgctatctgtatttgaagtttaaaaggttaagtggttgactggtccaaaaagaagatattgttgcgaaaatgatttaaaatttagttgtcatgttatccgctttaattccttactagtttacatactttattctctgttcagttttaacaatgcttatgttggagataactggcaagtttatttttgcagaggttttat

SEQ ID NO: 56454 - DNA, 807 bp, Populus trichocarpa
  Intron number 3 from transcript POPTR_0014s12580.1 (locus POPTR_0014s12580) derived from phytozome v7.0 (chr-ID scaf fold_14; pos 9271313 to 9272119)
tataccaaccaggtgaggtgcgacttcactttctatatggtctgcagataaatttttcatgtgaacttttatactgctaagcaaactatggtcgaaccatatcattttaatggcaatgatactttccttcgtatgcggttgctttattgagcatttgcaatgtttactaaattgctataatctgcatacatggataccagtatcagtttcctgtatagagatccaaagcgaaaacagaaactggaaattgaagacattgatatgcattttgcctatggcatttatattatagaagcatttcaaataattgccaaaccaatcaatttactctgttagtctttttttcttaacaagtatacataggtgggacagatagctataagttgtggttagagaaggctaagaatcattccttgtactgtttatacttgtaaaatttcaagtacgctctattttgctgttatacatgtcttgcttgaagtctccgtaatgcataatttaatgtgtcttatgttgccttggaaacatagcttgagagcaattggggataggactgcctgataacgttaacatcaattcataatgttgcaattctatacagtaaattttatcttttagcactttgcattaatatgttccatcttgagcaactaagataatcctgtttgcttttggttgctagttgagcttattttttgattccatcactggtagattcaatgttctgtagagacagagtgaatatattactttacctagatgttccttcaatgataagatgtttgcatttgaaggggatctgtgcac

SEQ ID NO: 56455 - DNA, 631 bp, Populus trichocarpa
  Intron number 1 from transcript POPTR_0001s34420.1 (locus POPTR_0001s34420) derived from phytozome v7.0 (chr-ID scaf fold_1; pos 32564508 to 32565138 reverse strand)
cacaatcttcctcttgtatctattcctctatccaggtgattggcatttccttctttcggtttccagcattgcactctcgttttcttcataccaatattatgtgctcgtgtttatataaccatgcatatatgtatgtaccttcatgtgtctcaaaatagaggatcctataacaagattgttataaacatttctcctctgttagatggtagcgcttttgtttaaacaatgaacaaaaatagaaatctacacagaaattcgttgcttgtgatcatgctgtaaactacatcttagtgcatgaattcttgtgccttttctgattgcatgaaacccaattctcagtaagaatccgtaagcatttgattttgaaactcactctttttccattttctctgaggaaggaatgctgaactcgtgcttttctgattgatgaaacccattttctcaggtttctgcttttagcaaatcagggagttggtgaaaatttctgggtttaggatgaatgctataaaacttcattttcatccattaacatggaacaagatgaaaataacttgtcctgctcaacataaaagaaaagatagaaatctgatcctgccttttgatttgttcaggtcatccaagtgttgctgaa

SEQ ID NO: 56456 - DNA, 763 bp, Populus trichocarpa
  Intron number 1 from transcript POPTR_0012s05490.1 (locus POPTR_0012s05490) derived from phytozome v7.0 (chr-ID scaf fold_12; pos 5159239 to 5160001 reverse strand)
gattcaacatctcaaaaggaagtttattccaccacgtgagtgtttaaaaaaaaacagctttaattagttttacatggatttgtttccttctggttctgcaacattttaatgcttctttggtattgtgcttttgaattattcattatattggtgtttgttttggtgattagtagagttggctcatttccggcactagttttttggttgctagagacaaaaattgagtcctgaattttatggttctcgtgcacagtttgaattctccataattataatgtttgatttggtaatttggtagctagcccattttttgaaataagtttcggatactagaaacacaattttgagagctgaattttatggttctcgctgcaatctctctgttaatgttgtctacgacatgtcatggtctttgtactcggatatgggatcacttaccaaatctctgctaaatatttgaagagtgataaagttaataagtctaatgattcaatggagtcgctgtttagcgaatcacattatgaacaacttagtgttgttgttagtttcctacctcgtattttctgagcaaccaaacagaatataaggttttcctgtcggagaaactgcagctcaattatttgtcccggcgtttcattttcacaatatgaaacgtcaggggaccgtatgtgtgtatgtgatagattgcttaaccaacaagatgggtattcatttgaattgcatttcaggactgcagatcttctagaacaagtattgcaaggaa

SEQ ID NO: 56457 - DNA, 746 bp, Populus trichocarpa
  Intron number 1 from transcript POPTR_0004s22500.1 (locus POPTR_0004s22500) derived from phytozome v7.0 (chr-ID scaf fold_4; pos 21383283 to 21384028)
gccatcggccttattgtcactgcttccttcttcatgtaagctaagctatgctgaaatgaattgttgctggaattattgttgtgcttttgcttcattagcagttcctttcctccactagatcagatctacatgtgatgtaatttgcccaaaaaaattcaattaccagtcaaggtgatttgtgattttaatttagcgcttttttgtatttgtttttcatagaatggtttctggaaacgactttctagattttcccacgttgaattttaggaaagttagtcaatggaaatggttcctagtcacagcttaaaaattaaggctttttgttattattaggaaaacgttttcctccatggaacttttcgccaagcaaacaaacgaggctttaatttgatttattcctcacattttaatcttctatttaggttttccatgagataataccaccaaaatttgcttcagattaattattacaaacatcatcggcatacttaatatactgtaataacaaagattaacactctatggagcaggcatttcgttttcttttctagaacaaagagtattttatttaaatttaaacatgttgttgatgaattatgaaaagatctgctagtttgtttaatcatgttgttgacgaacaatgaaaagatctgtttgtgttccaacgtgtgccatcttgtttctgatgttatacaagcgtggtttatgcagttacgaagcgacctcttctaggagaaatcgcagtt

SEQ ID NO: 56458 - DNA, 975 bp, Populus trichocarpa
  Intron number 2 from transcript POPTR_0011s04340.1 (locus POPTR_0011s04340) derived from phytozome v7.0 (chr-ID scaf fold_11; pos 4350070 to 4351044)
cgcgtgagttccactcaatgactgcgtttcttttgtttcaattttggattttctaaaaaaagtagttgattactcgggttggttcttttatttcaattttggaggtttttttttttttcttgggaggagtagtggaccgtgtttgtgtttttgttactaaatttagcaagtggttatggtgtttttggtgtggagctaacaaatcgtaggtcaatttgggtaaactggataggaaagaattcaataccgttaaaaataattaatctttttttaactaagtgtttctgcgtgtaattttggaatatttatgtttttattatttatccaaatttcatccctgtgtatgtgtaaccaaaaggagtaaaattcagccacactcattttatgtttcggtgaatatgtattatttcggattttattttcttttggaattaaatttaatgcagtttgcaatcaacgagtgtggctgtgatttagctgttcatgattgtgttttattagtctttttggcaatggctagcttacagttgtgagagaaaaccatcaaggaattagtattttgtttttacttttgaaaattttgggaattgtttttatggagaatggtttgagagagtgatatatcagtaaggctcaggtaaaatctcagactatggttttggtaaggcgtggaacggaaagtttggcgtgttgtctttgggttgagaccataaatggttactatgagtggaatttattttatttcttgtcccttttgttttcttgaattggctttgcctctagagagtagaggagaggaaagaaatcctttgataaaacttcaaacaggtgcttatcaagacaattttctggcatgttcttagttatacttaaccaagtatcctttttcatggttgcgatatcattattgttgatattatcattattattttattaacttaatggttgtctgaaccttctattttagttctgctc

SEQ ID NO: 56459 - DNA, 944 bp, Populus trichocarpa
  Intron number 2 from transcript POPTR_0011s02640.1 (locus POPTR_0011s02640) derived from phytozome v7.0 (chr-ID scaf fold_11; pos 2553129 to 2554072)
gataagtttgataaagaagaacaaagaaggctttggtaaatagtttgtttttccctttttaatgtctatagcttgtcaattgataaatttgttaacgggttagagagaaacggagaaccttctgtagctggcgaagtagaaaatatagctaatgagtgaattgagtagtgattgctaatatatctttaattattaattaataaataatctaaagtgcttatttcagttcgaatattatttacttgaattgccatcggctcacttctctggtctggttccattgttatagtgctccctgtttatgtggaagacataaagagtgacgaaggggttgtttttttagaattgtattgctgaccttttatcttgattatgccaagaaataaataaataaaatcatgctaggttagtgatatgactatgcatgtaaatttagtgataatgaagttggacatcaatgtctgctttctatcttctaactgccttctgaaactcttttgccatgcagtgccatgattttttcttctttttggagttacgaatttaccctcttgctgcttcgatacaagaccatctccctgttttatttatatttttactcctatgatatagttgtttctccatttgcaaattctatcctttctctcctttatatgttgtatctacacaacaattttgatgattttgtttgtacatttgaattaaccatcttcatacttgtggaattgggagtctgcttgcactacttcatcaaagtatgaaatgatctgagttggagaatggtttcccttggcttttgtagacaatcttgttatgatttaggcttctaaatattgctaattgttcatacatgttaccgtgatgtttttcatgtaatagttatacacattcatggtaagtgttttcttgcagttcctatcacagttattgcttcttttaggaaa

SEQ ID NO: 56460 - DNA, 787 bp, Populus trichocarpa
  Intron number 2 from transcript POPTR_0012s05470.1 (locus POPTR_0012s05470) derived from phytozome v7.0 (chr-ID scaf fold_12; pos 5123695 to 5124481)
cttcgcttcctaaaggtaataaaaaaatggtaaatataagatttaatttttgcgtattttaattgtaagttgtttgttcagttttatttatattatattttttcttctcttggcttgttattttattaattttgtgatgttgcaagtttgattttttttttaatttttagattgaatttttgaatcgttaatcttcggttccttctgagagattatcgaatttacgagttaagagtttaagaattatagttatgagttagggttttgacatctgtgactatattcgcagcaaattgcaacagcgatgcatattgaagggttttgggacaagtaggaatagcaatgacctggtgttgttgtgttttgtagtcatttaggcgtttctctgtgtgatatctgtttggtgttgtgtttgtaacttctaaacgcttttggttgagggcttgtgacttcgtagtcctagaaatggtgatgaatggtcaataaatggtctattcttgtgaggttaggtttgtggggtttgatcaatatgatgcagttatgatcaagctagaactaatgaggtccacattaacttgttctgatcattgttcaattgaactggacaaatagcagaaacactatacataatcatggatgttggtgtgcacacctgtgtgagagtttggagttatacttgattttgagtcggctctgatgcttaaactatgtagctgaaaattacttcatatcgtgttttatttgactgtttttctgatgctagttatggatattttttccagcaacc

SEQ ID NO: 56461 - DNA, 320 bp, Populus trichocarpa
  Intron number 3 from transcript POPTR_0004s21970.3 (locus POPTR_0004s21970) derived from phytozome v7.0 (chr-ID scaf fold_4; pos 20913932 to 20914251 reverse strand)
actggcctgcttaatgtatgtttgtcaatttccattgcatttactaatttttactcttcagttctttgctttgttttcaatttcatttgcggagtaaaaacattagataagctatcattttggcggtgaaggtcttgccttctaatatgcccacgtgtcctaagctaaatccacttttcacattgaagctcattttgcgaacttgttcttacttcactctaatattgaacaattttgccatatttctctaagggtttatagatgtctatgctttgatatatgtaggacccgagcatcaaggagttagccgagcagatagc

SEQ ID NO: 56462 - DNA, 404 bp, Populus trichocarpa
  Intron number 1 from transcript POPTR_0011s15900.1 (locus POPTR_0011s15900) derived from phytozome v7.0 (chr-ID scaf fold_11; pos 17916790 to 17917193)
cagctaagcacactgtatgattatcatccctcctcatttttttccctttgaggagcatgcaagtttgccaaaaaagctacactctttatgctcttttcttcatcactgaatgtatgtgttcaataccaagaaattagtttctgttctagctttgatctgggattgcattttttatacgtttcttgatctcaagtgtggatttcttgaaattggtttgattgggatttgtgttaggacttttgggttacaatctagagtctaagaatcaacaagagactgagaaaagaattgataattcacctgcattgtttgtgattttccatgcaaatgttaactgtggtgaatttacaggcaaattggttgccatgttcattttctaggttgataaacacatacaaagtggc

SEQ ID NO: 56463 - DNA, 478 bp, Populus trichocarpa
  Intron number 2 from transcript POPTR_0011s15900.1 (locus POPTR_0011s15900) derived from phytozome v7.0 (chr-ID scaf fold_11; pos 17917263 to 17917740)
actggggctttaaaagatatagttggagtacccatgtgagttcatattcccaatttcctgaaattatcaatgatggcattgtctttttcaccattcaaataggtttctgtgctgcttgatgaatctatatgatcgcctttttaatgtatatacaaatattagagagcagagttcaattcctaccaacttgtcttagtttcgtcttttttcttttcttttcatgaaaatttatcataacttaatctcatagatagatagtatgctatatacatatatatattcctctgcggcatttccttcagtctttatttgtgctcgagtctcgttattgtagatgatagcacacttatacagttatacatctgttgtgttcggctttcactatcttttaaaaattttgattcttttgctagaatgtagatcttgttttcatttgcttccaggtctgtaacaagtgcaagtgaagcagcaaaggctg

SEQ ID NO: 56464 - DNA, 856 bp, Populus trichocarpa
  Intron number 2 from transcript POPTR_0014s15870.1 (locus POPTR_0014s15870) derived from phytozome v7.0 (chr-ID scaf fold_14; pos 11958184 to 11959039 reverse strand)
ccattcagtttttaggtgagtcagattttatgaattatcaattggcaggcgttactttcactgctcatcaagttcttgacagtctttatgtgagttagatttgatgaattatcaataggtatgtgttactttcactgtttcatcaagtttttgacttgaccacacaagaactggaaactgctcttttttcgttgtgctgttgagaagttgcactgttgaatgcattaaaaggcttatgccacgtgcatctgctgttacttctgtttacatatggttgtgaaattatttagagctcgtatcaatcccctgctttcctccatttcgaccttgcataagcatctgtgtttctaaatgctaaatcaagttttctttgatttcttaacttagatgatcaattatgtcactagttcaatttatggttctgatcatggtagggtttgttcaggatgcaccttttttatgagggccaatgtctattgttctctcacctctgagaataatgaggggggaaagatcttggttggtgatgttgtatgggtacttgattagaggaaggaaatcttccgtgttgtattccaataagatgaactgtaaccatgacgcattgacaaaattgtagccctgaagcctgaaatcatgtttcttctgattggagaattcacttatggaagtacttatttttttgaataattggctcgtggtcaaccattaagtgataatcaatcaataggttggttgttagatttgtaaattgcaatttgggcagaatttatcaggatttgttacatactgcaatcctttatatttccatcgcggatagagtgtaaagtaatgcatgcttgttttttgcagagca

SEQ ID NO: 56465 - DNA, 863 bp, Populus trichocarpa
  Intron number 1 from transcript POPTR_0015s08140.1 (locus POPTR_0015s08140) derived from phytozome v7.0 (chr-ID scaf fold_15; pos 9407865 to 9408727)
agaaagtatggctgggttttttttttttgaaataattaaaagggcttttgaatttataatctgatagtttaattggaggctatgctagtctacaggatttactcgtagtggaaaaaaatggaaatgaagggtactagtaggtttctgcttcaagtttagaattgagaagatgatgatattgtgtagtattagtccaactattgattatacaccagcactgttgtgttgccaaaccttgaatactaaacattacgtaggtgagacactcatttcttttgatttgttgcaagacatggaagacagtgtttaggctgttgaatgcttgagggatactagcctgtccttgcctaaaacaaaatcagaacataaatgtaagatatatcagtggaagatggaacatatcgtgtttccctgaactctcaacaatatgttcgtgttggatttggcatctggggtgggaaaattggaagaaatttcttgatgactggtcaaaatagtccaacatgctaattgttgtaagttgtaacctctgtcatatcactggtgaaagaaaaaaaaaacagagatttaagaaaatatcaagaaagcaatactagttctgcttctctttgtataattaagtcgaaactagataatacccccaaattgctccatgtaaggaaagaagaaagtgtatcttgcttccatctccaagttacttcaaagaactactaactaaaaatcttttatttttctttcctacgtggtttaataattgagtctattagctatcttctatctttaagaagctcaaatctatttctttctgctgttgactgggtttccttgataaacagacaccagctgaaagagtcaaagctagg

SEQ ID NO: 56466 - DNA, 528 bp, Populus trichocarpa
  Intron number 1 from transcript POPTR_0012s08590.1 (locus POPTR_0012s08590) derived from phytozome v7.0 (chr-ID scaf fold_12; pos 9690560 to 9691087 reverse strand)
tgttctgatcttggtgggttctttctcaaggtaattttcattcttatatctttactgcgtacggttctttgatcttgagagatttttgaagttgaattatgtactgaaaggagtctaattccattgagttttgaccttttttctttctttctatgcaattatcttttcaattgtctaatctttatgtttcttcttgtttttttattaatttaaagattttggttattttttgcctaggggtctgaagggtgttcgtttttctgctttagaaattgtattaggaactgtttgattcctcatcttttcaatccgttatgttcttcatcatctttttcttgttagtaagctttgtctttgccccccccccttttttttgccttttgctgtccattttgattattggttggtaatgatgtttatgttgttttggtttgagagagagctacattttactatatactttttgtaattaattttattggatttaaattaggttgctcaaatcattgggaagcctgacctggctcc

SEQ ID NO: 56467 - DNA, 407 bp, Populus trichocarpa
  Intron number 2 from transcript POPTR_0001s04770.1 (locus POPTR_0001s04770) derived from phytozome v7.0 (chr-ID scaf fold_1; pos 3673953 to 3674359 reverse strand)
ttaactgtaagatctctctaaaatttatataatctgattgtctatgtgattaatctgatggaattactaatgattttactaatctgaatgatgagattaataactcttaaaactttctaggatttcaacaactctttcccgtttcagtttttgtttccccaataaactcatttttgtatttaaaccataaaattatgagcaaagttatcaggaaccatgttttttttaggcattgtttgttgttctccgtcttccaacatgcttaggtaaaacaaatctgtagaggagtagacgttaaacatgttcttcatagtctaatttgtttgaactgcactttgatctgtaaatcttaatggtctctttctccaacaggtttttaattgttttggccgacagttttgcttgca

SEQ ID NO: 56468 - DNA, 546 bp, Populus trichocarpa
  Intron number 1 from transcript POPTR_0160s00240.1 (locus POPTR_0160s00240) derived from phytozome v7.0 (chr-ID scaf fold_160; pos 32599 to 33144 reverse strand)
ctggtaactgttcatcaaatatttcgtttatcccatcatccttgctatgtattttttctatttcctaacataggcaaattctcggggaggactagctatttctgattcggttagcttgagaatttggacaggttaatttcttgattagtctatgaatttacatagacaaccaacctttaaacaatgatgctaatccctgacatattgacatgaaaaggcacttgtactgtatgaaaagttcaatgcttggatggagttgtgcttgcatcagagtatttgtctgtttagaaccatgattctttcttttctctctctttccttccatattttttatatgctgctttgtatggaatgctagatgcttctacttattggatcgatctcttcaacagcacaagtactatgcaaagaaagcttcagttttgtttataaagctgttctgatcttgcagaaatctaaaatttcaatttttttttgtattaacttttttcatgagaatattaacacctcattgctttgaattattctatccaggaactagtttgc

SEQ ID NO: 56469 - DNA, 770 bp, Populus trichocarpa
  Intron number 1 from transcript POPTR_0004s07270.1 (locus POPTR_0004s07270) derived from phytozome v7.0 (chr-ID scaf fold_4; pos 5991396 to 5992165 reverse strand)
gctattcaggtatgagaatgaactttatttgattttattttttggatcagtgcccttaatttataaattttgtaactcaaaggggtatgatgaatttttttgtttgttattgttgtggttgtggttgtttgcaagaattgacttactgtaattaaggaaagatggatctaaaagggagaccatataatgaagacttgtgttaaaagtcttattcttgacacaaagagttataatattcatgtggtaagaagttgtctggtcgaaaaggtgactatctgtggcaagtggcaaaatttatgatgatatattcttgttgatgttgagctgtcttttgtctgtctatatagttacacgagcaagtttctttatgagtgtagttgtttttgggaatttgatattcaagtttcaggtagtttctgctttggtgaacattcattatttataaattcgattccttgccttttttggtcttgcaagataaaggagcataagcacattgtaactgttattttaattgtgttttagttagatttatgaagtacgatactcatttggatcttgatttgttgaattttattgtagctgctcaattaatgaattttaatggatattgaattttctgcaagttaaaataatcgtgtgtccttcatacagagttgcgtgctagcactggtaatggtggaagctgggatacctttctgatgtctttgtttcccatatttgatgcaggatcagtgtggagggactcgactgaatctggttctcccagc

SEQ ID NO: 56470 - DNA, 873 bp, Populus trichocarpa
  Intron number 3 from transcript POPTR_0011s09270.2 (locus POPTR_0011s09270) derived from phytozome v7.0 (chr-ID scaf fold_11; pos 11491961 to 11492833 reverse strand)
aaaacttgtaaatttcttcgagctgtggatataaggtacggaagttcggatataagtaatgaagctggaaagtattccctctaaccaaaaataatggatcatttagtgtgagctcacagtgctctgggcagcttttctaaatatatttaggtatttccactatgtcaacttggtttctagattcttactgcaaaaggcacgcttgtgatctcatgtttttttcttaccatgtaacatttagcgtgtttgataacttattgagcaattaggaggaatttttgttgactttttttaccatactctgctggtgaacaagttagataagtggatcttctgttgcaatgcttgaaaaggaaagaggatcaaagtttgtgggggaagactgaccaattgaattggttttctttgtagaaaagcttcaaaactagatatttatgggtcatatttctagcattaacattggccataaaaaaaaggtatcatgtggaagtatgaatgtgtagacaggtgactaacaaggggaaagaagtgcccttgtattggtaatacaagctacaccttcagatggttcttaaaaaaagaaaaaaagaagtgtaggaaactacatagtcatttggactatggacagactctctctttggcctattgttacagattgatggatcctaaatgatgctaggtctcctggatttattcttcaagcacatcttttgcatctatcattagacctccatgatatttattaaaatactccttgctataatttatttcattcttttaagcagtaatttgtctaattccaattcagcgggctatcagttttccattgctttagtagaaataccaatcatgtgacactattttgtgcagtcg

SEQ ID NO: 56471 - DNA, 1001 bp, Populus trichocarpa
  Intron number 2 from transcript POPTR_0011s09270.2 (locus POPTR_0011s09270) derived from phytozome v7.0 (chr-ID scaf fold_11; pos 11492969 to 11493969 reverse strand)
gtgacatttctatcgcctttcctccgcatattaaggtaagcttctctctttatttctttacgcctccaaaaaattctcaaatttgccgtctttcttgtccgtctctttgctagcatctctatgtcgcttcatttgttagaaccttttttttttcaacttgctaggtggtggtttagggatggattacattttcaactgttgaggatttagtgcctattaagaacaggattcttccctcttcttttttttttttttttttttgccaaataataaataactcaacaggtcttaggaattcttatacgtaaattattatctccagtcatgattttggatgttcgcatccgtagtggagaatgcccagatgtagtagtgtgtgagagtgtttaaactagacaaaggacaattgaatttgatgcgcactaatatgagaacgtagaatgttgcttgcacagcttttgaattgttctcattttggcgcgcgcacatccctttctaatcctgattacatcttgtgtagccctgcactctcctagaagggaaaactaccttatgatttcgattttttgaggtaaaagagtggctaatctattgaagagaaactagaggcctttctgtctctctctttgttctgataactctttcatttatccttgaaaatatgaatgtaatctctatactgggagcttagagaattcttcttcccttgtactcttaggccctgtttgttttgcttctcaacctcaaaaagcaggttgagaggccttagaacatttggtatgatgaagtatttgcaaccatgaaaattacactagttagtccgttaattttatccaaactttacgaatacaatgccaagaatctatgcattcgaaaaaacatatcaaggttacattccactcgccccaacatgtgtcaatcttctgctttaatgattgtgcactggcatgtgagtcttcttgatcatttatcctaacactctatgtattattgcaacacag

SEQ ID NO: 56472 - DNA, 412 bp, Populus trichocarpa
  Intron number 3 from transcript POPTR_0012s11640.1 (locus POPTR_0012s11640) derived from phytozome v7.0 (chr-ID scaf fold_12; pos 11986710 to 11987121 reverse strand)
cattagatatctcaaaaacagtaagccagagtcttatttttgcattgcttgtatttaattgctttttcttttcttttgaaagaatgacctacactgtctagtagacatgattttgatgttatctttttcaccggcagtagtagatacttttaactttgaatgtgctaggtgtcgctcaactattttgacattattttgatacaactttgtaggccatcgggcgcatgctttcatggcattttggttttttggatttaaaatgctctttaatccaacaccattgttatatgtggacaagtagcttttttaatacattctattattatttataccgtgatttcttatcttggttcaattctctaatcataagttgatggcatgattttgcatcaggcacgtgcagtgttaataa

SEQ ID NO: 56473 - DNA, 407 bp, Populus trichocarpa
  Intron number 1 from transcript POPTR_0012s11640.1 (locus POPTR_0012s11640) derived from phytozome v7.0 (chr-ID scaf fold_12; pos 11987472 to 11987878 reverse strand)
gcagcaagtaagttttgcccgttattttttttattgatttctttgtttggttaacattttcaagatgaagattttattagtatttgattgttattctgcattttctagtctcaagatggtgttagcattgatgggttttttctggttttgttcttgagatgaccaaaaatgttagtgcatgaaaatcataatgagtttttgattaattacaagttaattaccttaacgattagtgctagaatcaagatggaattttatctaatattttattttattttttggttattattcttgaagagcttttagttaacagggcgtctttatttgattttcataaaatggtgaccaagtttgcaacttttgtgaggatagattcctgggggagttactgctgcaaaggggttcaa

SEQ ID NO: 56474 - DNA, 392 bp, Populus trichocarpa
  Intron number 2 from transcript POPTR_0011s01350.1 (locus POPTR_0011s01350) derived from phytozome v7.0 (chr-ID scaf fold_11; pos 920426 to 920817 reverse strand)
cttggaaaggcaaaccggtatgtatcgagtctctctctatagctatcttttttgaataattcgatatattgaaagggctaaccagaagatagccaaaaaaaatcacaaaaacaaaaaacaaatacaaaaaaaaaagaaaaagagagtcaacaaatacaaaccgaaaaaaagaagaaaagaacatcaagattggagaaactgatacattatgcttaaagccttgttttggtgtttgaccaatctataataccttcaggtcccatagttaaagtagtgccagtagccaatcttttggtctctctatagctatctctctcgttttcaattgataacaattaaattcatgtatttttgcagtttcttccaaaattgaaaattcttgatctccgtca

SEQ ID NO: 56475 - DNA, 572 bp, Populus trichocarpa
  Intron number 1 from transcript POPTR_0004s09470.1 (locus POPTR_0004s09470) derived from phytozome v7.0 (chr-ID scaf fold_4; pos 8003026 to 8003597)
aaggttaaattgcctaccccagaaggagtttctaggtatttgttttttataaaagtttcgatttttatgttctcttttgagttttaaggttagttttgcatttgttgttggataattttgaaaagtatggaaatcgagattcttaggatgttaaaagttctgttcttcttagtggaaatgtagttaagttagatgattgcatcgttgattgctatataatccattacttggtattatgtagtaagtgttttatttttatgtttcgggaatgagtttcttgaatctgtcaattatctgttttttggaaaattttgaaaagaatgcaaatgttgtctttttgtggtaaagttattttcttttgatggtgatcaatataatctgttgttaattgttagtagtttttagtttttaatgttttatcttgtgtacgagtttccaaggtttgctgctgttcttttttttaatgaacatctttgaagggagtaaaattggatattttagaggttaaagttatgttcatttgggtgtaaatgaatgtaatggttgttgcaactttggttattgcagtgatc

SEQ ID NO: 56476 - DNA, 667 bp, Populus trichocarpa
  Intron number 2 from transcript POPTR_0009s06790.1 (locus POPTR_0009s06790) derived from phytozome v7.0 (chr-ID scaf fold_9; pos 6499927 to 6500593 reverse strand)
gagtggggtaattccacgtaccctctagttcctgggtatgaacagactgcaagagaaatcttttaacttcttctgtatcttgattttcattttaaacatttttcctttagtttttgcttgcaccaacattttctgttctgagtttcaaccttcacgctttctgattcctccattttttccctttaaaattgcaactatgatttggatctcttttttgactcaaaagcaatcaaatttctagtattcctttaacaccccccctctctgttacaatctttatcttgatcaattgttgtgggaggaacatgataattttgtaaattgaagtgatatcatttgttgagatttattcatgaataatttattgaaaattctctttcatgattaatttatcgccactaatctattgaaattgcctaaaataataatcatatatttactaatttagggatttggtaggtttgatttttattatattacaacatgataatattttttgtgtatataaacattgcgaacaatgtattataaaaggaaaattggcagtccagcgaaaatgtttagaggagtttttactagtataaagagcagttttgactagtataaatttgattcatgcattgcgattaaaggtgttattaaattaaattaaattggcaatgcaggc

SEQ ID NO: 56477 - DNA, 989 bp, Populus trichocarpa
  Intron number 2 from transcript POPTR_0012s06260.1 (locus POPTR_0012s06260) derived from phytozome v7.0 (chr-ID scaf fold_12; pos 6474039 to 6475027 reverse strand)
ttgttgaggtcagtaaaggtgttttgttttctctgtccatacgtgatgattatcattagtgcttttaagccgaagttgatatagttgcataaccagacttaagctttccatccaatagtttgttcttctaggaaatcatatcagaatgtgggccaaattttctactttttttgtgaaggacaatttacttttcagtggttattgaatatgttttatgtagctatattggtggctgaaaggtcaaattgcttctgtcaagtttctttactgtagcgagtcagtgatgattttcatcatggtgcaataattttgaacttgctcatattgtcccagatcgttgctggcttgcaccttctctttgattcaaaattaacattcgaagctctcttccttcttaaaaactttcttttattattttttcttaccaccacacatggttgccaatggtaaattttatctctgaaatcttatcaaaagattttgaagctattataaatctgttgctttatgtaaaggagtgtaacaaactcatacttccgctcaatacaactgttatttgtattctgaggtgaatttttagcttgttcttgatgggaatctatggaataaaaccaatctgttaagaacctctttactgtttgaccatcatttagaattgttcaattgccttggtcaactgcaactccttttagttgtctttgttgtcacatgttgactcagccctgatgccggaagaaaattggacatggcatttgtttttgtttgattcttattttttcagtgctctatttctggtgctgttaagttgttctttttgggtaatttagtggcattacacatctctactaatttttctattttcccttggttgattttatattttcctgtttgtatttctaatcttcacccacatatttgttattgtgctttgacgttggctgggcgctagagcaggatcggaggcaaatagagagagattttttcagtgg

SEQ ID NO: 56478 - DNA, 758 bp, Populus trichocarpa
  Intron number 1 from transcript POPTR_0015s13600.1 (locus POPTR_0015s13600) derived from phytozome v7.0 (chr-ID scaf fold_15; pos 13477707 to 13478464)
gggtttgctctttttccttttatctcttatataaaatgagctacggtttcttttctctttgcaaaacggagggaaaatagggttttgtcttttggtagtacaaagaacgaattttttttctgttttcccacactgcaaatgaacgaaatgatgaatttttgctatatttgaggtcattaggaagattttgcatctgggactttgtaattttctgctatttgattattttttgtttatattgttaatcatgctctttggttgttttttcatgattgaagtttgagtttatagtgccaatatgattgttatttgatggaaatttttctgctttgttgatattgtaagcccatgaagtaatgattttgatttgataagcagttgctctgtgtttggcttgattcaggtgttgttggtagaagtatagataggttgatgtggtcaatggtttggcttgatttcgttataatttgatattagattcgagactaagattatgctggctatttgattgctggaagcggagtttgttaatttttgtataggttatagaatgtttgattctgtgttaatgtcccgaggtgacgttacggagtgtgttattttagattttggaaaccactcgaatatttgtgactactcagaatacacgcatcatgcaaattctgtgttcaaactccttgctttttggagttattttccccctttctgtctggtgttcaaataacatgtgtaaggttttctaaattgttgttgcagat

SEQ ID NO: 56479 - DNA, 338 bp, Populus trichocarpa
  Intron number 2 from transcript POPTR_0004s10750.1 (locus POPTR_0004s10750) derived from phytozome v7.0 (chr-ID scaf fold_4; pos 9300521 to 9300858)
ctgctcaatctgcaaaggaatcagtgcaagaggttcacatatttttgttcaatctctcttgttctgtacttttttagagaattcattctcaccacaatggcacaatggattgtgcataagatttaagaatgacaataaaccaaaaagaaaaggcaaaaaagagtgaggagcactcatgaataaaattcgcaacactctaagtgttaataattagttgtatattttggcacagatattcttagcgagtgagtttgcagtagtgttttcttttattttaattttgatagttccttctttgtgtaggctggtcagcaggtgagggctaagacacagggagc

SEQ ID NO: 56480 - DNA, 703 bp, Populus trichocarpa
  Intron number 2 from transcript POPTR_0014s06540.1 (locus POPTR_0014s06540) derived from phytozome v7.0 (chr-ID scaf fold_14; pos 4960085 to 4960787 reverse strand)
atcctcactcgcgattactccaaaatctgtaaactgtatgtcttcttaatctctttttttgctattcgcttttttatttatgctgggtatttttgttttttgttcttcaattgggaatttagactgtattcagtgaaattgattgataattgtggctttttataactgggtttttacttttatctaatgtgaacaaccctattgtaaaattggacgctgatctagactactctatgtgaatttgatctaacttttgaaaaagagtttgtgcctttttcaaagaaggatgaattgattttacatacattccctctctcacaagggcacgtgtaagaatcgagcttcttttcatccttggatcaaatgaatgcaagaacagttcaaatatggaatttgattcattggggacttcatttgaatagtttattacatgatgtaaatcggagaaacatgaaattagtgatatctgtctttgaacttgtatttgcacactcaatcgccattgcctgcgtacacatttgggaaagtgaaagagtggaatttagtgctcactggatagcttgatttgttattgaatcaatttttacaataatctgcaagtactagcatccattactcagcttgttaatgaaggtttctttccttgtttttttccctctccataacattaacttgtttgctttgttgctctcagagcagacaa

SEQ ID NO: 56481 - DNA, 652 bp, Populus trichocarpa
  Intron number 5 from transcript POPTR_0004s07340.1 (locus POPTR_0004s07340) derived from phytozome v7.0 (chr-ID scaf fold_4; pos 6060809 to 6061460 reverse strand)
cgattttgaaagatcatcaagaagtagcagtcaaggttggttggtgtcagttttagttgtaaaactcccttggtttcattttttgctttagcaactaagcaattttcttgacctaaattttggaagttaaagaatgcttttaactggagatgatgtgattcattgacaccattgatcctttgataacatgtttccaattttactttgattgtctttagtttgttgaatctttgcttactttccaatattaaagttgtctgtgactattaatgctgggattcttcttctctctcttgcctatctattttttgaccttttcaaaagcaaactctttgccatacagttatttattggatatgttggatcttgattcatatgtggaacttaatccatcattatatatccaatttgcagaggaaaaacttgatatcattgtgatttgattcttccaataaagttgatgattacattaggagaatctatatgatgttctctggtgaatgtggaacatacccttccaaaccttctttttaaatgttagaaaattttcttgttcttcaaaactttacggattcttgtgagttatgtatttaattgtaacatgcttctctttttctgcatgtaggtacagtaccctgggttagaaagccag

SEQ ID NO: 56482 - DNA, 812 bp, Populus trichocarpa
  Intron number 3 from transcript POPTR_0014s03830.2 (locus POPTR_0014s03830) derived from phytozome v7.0 (chr-ID scaf fold_14; pos 3059816 to 3060627)
aagttcttgtaggtacttatcagtttgagttcttgcaatatttgctcttaaaaagtggcgtggaactggaatatttgactgagcacaaaaaagaaatgcggaaattaaccgcctcttaattttcttgcttgcttcatatgtgtgcgatgctcttttggtttttagccaattaactcgatttgaacaccattaatttatcatgacagattatgtttaataggaatatagatagcattgcaaattgtaagtgcctattgtcaatttcgagcatgatttatttggatttcagtgatatgttttttagggtgggggagtggggagcctagttgctcccacatttgtgtacactaactatcattagtgagtttgtgggaagtgcttgtgctcaataagaaccgagttcgcttttaagactttggaagaccctaaccaagccagtctgtgaggtccgggaaagtcaccgaggttattggatcaatatcagagtgccaaactggtgttacaggaaaatgcaatggatttcacttctttgattagatgtttattgtgctatgtggccttgcaattgaattgattgttgtcttgtcaacaactttcagggtaaacctggttggtcatttcaatatgatgatctactgttgatactttgtatgggaaaaaagagtacccgaatcttgtcaaaataatatcatgatttatttatgctgcttgagtgtgcatttattatgattaagatgggaaaaagaaatctacaaagcatcttatatgccaattattttgcagagattgcgacatcattatctttcgaggcc

SEQ ID NO: 56483 - DNA, 641 bp, Populus trichocarpa
  Intron number 1 from transcript POPTR_0001s10165.1 (locus POPTR_0001s10165) derived from phytozome v7.0 (chr-ID scaf fold_1; pos 7852526 to 7853166 reverse strand)
accaagtaggaccaatcccatcgaagctccaaaaagtaaactaatatgccttcctaaaattgacaaaactctattactacaacatgactctttggctagtcgatttttggagaaaaatataaaaattaattgataaaaatagaatcttattaactaaacatgaacaacaagccttcagatttgatttcactctcattaatttcttgaccctgtaggatctaagtagtcctatataaggacagggagtgtagagggaatcaacaagtgctagcttgagctcattcatctagtagctctgcttttgcatactcggcttctttcctcttcagatcatctctagaaagaaaatgagaactgcaggctgcatcgttctttttttctttatgtttttccgtatcttcagcctatccaggccggaagaagcagtacaaaccatgaaagaaattagtcctctacttccatgacataatttacaatggacagaatgctgctaatgttacagcagcaattgtggcagcaccagaaggtggtaacttaaccatcttagcaggcccttccattttggaaaaattgcagtttttgatgatcccattacccttgacaacaatctttattctccaccagttggcagggttcaaggc

SEQ ID NO: 56484 - DNA, 520 bp, Populus trichocarpa
  Intron number 1 from transcript POPTR_0015s14950.1 (locus POPTR_0015s14950) derived from phytozome v7.0 (chr-ID scaf fold_15; pos 14343655 to 14344174 reverse strand)
gggaatctttctgaattctgcagtgagtcgtccaggtaaaaaaaaaaaaacaaaaaaaagaccatgatgctacaaatggtctaatttgtatctgtctaaatcactgatggatttcaagtagtcagctaatgttttcttggaggaaaaatgagttctttgatgatacaactaattttacaatgagatgattaatattttctgtaagtatgtttacaattttatcatgttttaatcatatgttttgatcacttcttgttgtcttttaaccctgtaagtcctcttccaaagttgatagtcatttgtctccattgataagatttcttagctcctttagcctctgcaagatccaaagtttggccatcattgactcaattttttgaagctttttttcttaaggaattctaagaaagttgttgccttttagccttttacatgccattcttaaaattaaaaaaaaaagggtacaaaccattaccattttatcttgacaaatgcagcataccacacatcatcaaaaggt

SEQ ID NO: 56485 - DNA, 917 bp, Populus trichocarpa
  Intron number 1 from transcript POPTR_0009s01930.1 (locus POPTR_0009s01930) derived from phytozome v7.0 (chr-ID scaf fold_9; pos 2402570 to 2403486 reverse strand)
tcacacgcaaagccaacttaaatcgagccaattctgttcaaactaatgcttgatgtggtcatccaataagtctaaatgactctcaccaactccctctgttactgctatgtctctctcttagattttgggcatcgagtatattttagtgtcattagttagtattgcgtgatattttacaattatgactactcatcaggttgttaatcatttcagtcttttagaatatataaacaaaaaatgttccttttcttttccaaattcagagcatattagtagtgttaggaagataaacattcaatctaagctgtaaaaaggtgcgcccccacaggatccagaagtgaacaccgttagattggagtgaagcaattcagattacactaaagcacgaaggaaaccatgtaaacaccttaaagaaaacaaagtatactgctatcacaaccattgggatagcaaaaaaaaactcgtgaaaccacagcccccacaggaatggttacttatattgttcgtggatctgttaccatccagagtcgaaggggaaaaaaaaaaaacttaagatctccctattgaatcactcctcctaatggttaaacaaggttacccagatataagctaacgatttctatacaattttatttttcttgtttaaaattaaaaagagaaggaaagaaaacatgcactaacaattttatgttttaattatattgcatcaaatttcattaccatgtactgaacattagctagaatagaaatagatgtgaaacagctgctctgatgagcaactcattttgggggacatgaactatcacacacatttggcttctttcatttatttgtgatgaagagactggttcagcattataaatcaagaaccattatgtctatatagcaccattacctactacatttctttgcagaat

SEQ ID NO: 56486 - DNA, 413 bp, Populus trichocarpa
  Intron number 3 from transcript POPTR_0009s11890.2 (locus POPTR_0009s11890) derived from phytozome v7.0 (chr-ID scaf fold_9; pos 9787119 to 9787531)
ggaaatcaaatatctaggaaggtaacgggaatttctttttcttaacatgaaattcgtcttaatggtccttgtgattagtccgataatgttttttttgggtattattaagcattgtgtttttattaaggaaaatattttgctggtaaaagtaaaattaagcttagacgaataaataactaagaatatcttcccttgctctcaagtcaaaacacgctatcttatttcaaatctcaacatgatacctcttcattctttcagaattccatgtctacacccaaatatcccaaatatcatgaactgggttttatcttttcaaaagaagaaacctagtacccaccttgtgacttttgttcagtcttgcatattgttctggtgtaattatagttctttttcatctatgtcataggttcaac

SEQ ID NO: 56487 - DNA, 969 bp, Populus trichocarpa
  Intron number 1 from transcript POPTR_0011s02350.1 (locus POPTR_0011s02350) derived from phytozome v7.0 (chr-ID scaf fold_11; pos 2229008 to 2229976)
agaagtgagtcttatgctatgcattatatttacgtattttagagctatacttaataacagagcttgttgaaaactgcataactaggaaagaaagctacaatttctttcaaactgaagctccaacaagtttttttttaaaacaaataaaacaattcttcgataccactgagtttctgttttgttttacaagaatcttttattatgtttgttcttaataataaagcaagctagcttaaagtattttgatgttgttctcatctctttctatcaacaaagagagaggctgatctgggagaggttgcaggttaacattttatcggtttaaattagcaaaacgaacgagcttaatgtctttgacaagaatgttgttttgcggcaaagaagagagtagatctgtgagttttggctgttaggaagtaaagatctgtgtgagctacgaagtagtaaatacaaatggtgaaaaaaagggttcttaactttaaccagatggttgtttccatgtttattgagttttaagaggttgacacctgtagacacaactagcatcagtgcaagtccttgttggtaattttgaaacactggtttcatgtatgttttgttttttgtctttgtcatttaatgttattaatcaggtggtgagcagtggtgtctgccatttttagggtcagcgaaagctttaaatacaaaccattgctgagatgggctacctgcacgcgattactgcttcttcttagcttaatttccaagcaaacccaccaaccctttaatcatgtttagctagctaattgctagttttaaattattattttttctctataagctgtttgtgtttaataagttaaacctagctacttcctagtggtagtgatatagttaataagtcagatatatatatatatagctcatgctgttttgattattatgatagtgatttgtgggttttgggttgcagggctgatgagagggctg

SEQ ID NO: 56488 - DNA, 499 bp, Populus trichocarpa
  Intron number 3 from transcript POPTR_0004s05780.1 (locus POPTR_0004s05780) derived from phytozome v7.0 (chr-ID scaf fold_4; pos 4535416 to 4535914)
cctagtatcgcgaatttgagtcacctaagaacaatgtgagccgctgttactttctttctctgagttcttcacttgatttgtacatgaattcttctgctattaattgtttgtttctgtgagtgtgcgtgtgtgcgtgtgttttttttgttcttttcttggagtataagctaattattggctagtctcatggctaatgaaatgttgctgttatgattattatgacaaactggactaactcaattttccagttaagaagtccacgtaggaaatttgaaaaccgtttctgtttgtaataacttatgagccttggtattgtaaaaccatgctattcttttgaatttgctgatgctctgtcgaggatgatgttcttttttgttccggttacttgacataaacgcaacagattcaagttttgatatcgtatcttgcattacctagctaatcttcatgagctatgcttgcaggttattacagaacaatcatttatctggtcccattc

SEQ ID NO: 56489 - DNA, 540 bp, Populus trichocarpa
  Intron number 3 from transcript POPTR_0327s00210.1 (locus POPTR_0327s00210) derived from phytozome v7.0 (chr-ID scaf fold_327; pos 6343 to 6882)
cctgtaagcaaccaggaaattcaatttcagcagcttaatttgttttattaaagagctttaattcatattcttgggattcaaaaatttctaattttcttttgagaaaaagtaaaagatagtgaagggttgcagtactgcagttacgaatagaggagctgcagtgctaagaatggcgcccttcatgagagcgaaatttattcaaaactagtgtaaagctacagactaggcgttgtcctttggtttttttttttttttagcctagattgtgcacgtctagtagctagaatcgcgcatgcctagttgtgattttaaattattggtctagtttagattgatatataggcctctgatcaatagatttctcaagatgtgatcttcagttcagtattcacacagccggaaattatgtcctataaactcaaattaataaaacacaacattaagatacggagggctattattcaagatatgccttttctctattacaagtgaaatgaatgacaaacttctctgcatgcaggaattgctgtggttgctgtt

SEQ ID NO: 56490 - DNA, 460 bp, Populus trichocarpa
  Intron number 1 from transcript POPTR_0004s14800.1 (locus POPTR_0004s14800) derived from phytozome v7.0 (chr-ID scaf fold_4; pos 15437946 to 15438405)
caataccggtaactttactcgctcttaatttattgctttctttggaaacgaacttaaggatcacgtagaaaagcttgtgcgataatccttgatttgcagcgcttatttgtttttgcaggatatgtgagttttcgctatttttaatttttcgtatataatttattatctaattgttgttagagtttcattgtcaaaaccagtcaaattttacgccaggaagagaaaaaggaaatttttttcccatgatgtcagattttggaaatttgttagggagttaattaatttccttaactcgttgttgttgttgtagcttgtgtttaacgtgaaaattagtcttaatcattcgtaattagctgattagttcttgtgttctatcacctggtggtaaatttttagtattctttttcttttttaattttatttttaaagcagggtcagggtccatctgccgcgtggacag

SEQ ID NO: 56491 - DNA, 668 bp, Populus trichocarpa
  Intron number 1 from transcript POPTR_0009s14860.1 (locus POPTR_0009s14860) derived from phytozome v7.0 (chr-ID scaf fold_9; pos 11559960 to 11560627 reverse strand)
aacaggtggagtatggcccttttcttctcatttctttaatttgatgtgatcttgaatcttaattgctagaaagatatcaccttcttttcacttatgtctctttttggctgtaagttctttgtggtcttgagttttttttttttttactacaacagaacattgttcataaattgtttggttaatgtgaaactgttcaagaaggaaacagaggaaaaggaaaacactgaccaataaattggtcaatgtagaccatggttcataaatcttttggttaattgtctttcaagagcttaattgctttctccaaataaagtaaaacacaactacaaacgaggttttcttttttcctcttatgaagttttcctcctcttttatggtatcatcacatgcatgtaagaaggataagggcgagtttttggttcagcattgaccaataaaagaagatggaaagtttcctactgaaaattaaccaaaagacaaaaaaaaatatggtaaattttttggaaattctgtggcttatcttatggaaaattggaaatagacggtttgcttccatgttagagtatatattgtctcaatttttcacttatcctaagaaaatgctaaaagattttgcatttttcaccaacttttttgttcattgcaggggatattagacagtcgtttcg

SEQ ID NO: 56492 - DNA, 829 bp, Populus trichocarpa
  Intron number 1 from transcript POPTR_0014s16600.1 (locus POPTR_0014s16600) derived from phytozome v7.0 (chr-ID scaf fold_14; pos 12691286 to 12692114)
gtgggtcttgagtcgccaaacccgtttttataccttcttatatcaaaccagtggctttctccacctgctctgctctgttgaagagaaagagcatcatgtgctgttcctctctctctctctcttctcccgagctggatagaggaggccaatcttgtaatcaaaggtgaagaaagatttactactgtgttcattgaagtaataattaattcatatgcatcaccagttttttttttccctcgcactaaaactattactattgagaaagaaaaagatctgcatgcttcttcttcatcttctttttttttttaattattatcattgaaagataataattatatggctgtcaacaaaagagcccagagttggggcagtcaaaataaagtaggttacatggctgtaaaagaaacggaagactggaaactcttgacttttctaaatctttgatttttttctctttgaataggtgtggttgttggaacaagaagattaagggcatgtttggttggtgtggaaataaccagacatgtatagtatctcatgttttaagagtaaatgtccaactcaaaacaaaattttcccctaggaatcataaaaaaaaatttccttacgattttacgatccgagtttattttgtatttttcgtgccgtgtcaaaaatatgtttttgacaaccttgatcttttaggtcttctgagttttctattccagtgaccccaacactctgtggtgatttaagtgtaaatgaactctttttctcgtgtgccgagtctgatcttttctttcgcatcttggtcacttttacttttttgttatttcataatcttcagggt

SEQ ID NO: 56493 - DNA, 576 bp, Populus trichocarpa
  Intron number 1 from transcript POPTR_0004s20060.1 (locus POPTR_0004s20060) derived from phytozome v7.0 (chr-ID scaf fold_4; pos 19708768 to 19709343 reverse strand)
tggttctggtaaactgcaactcttggcttcccttggtgagtactcaaaatctgcaaaggcttttataagcagtagttaacgttatgttgcttccttccttcctttcctttctggttggattaattgtttgaaatttttttcctatttattatatgcaaaatttctgtatttttattagtatttgtttcgtttctttctattaaatcttgattgatgtttagtatcaatgcatggtagaattgtaatggaaattttgatttggtgttaagtggattaaacaattaatatttggttggatgaacaaaaacatgattccaattccaatttcgaagataattattattttgaaattgaatacacatgaaaaaaattcaagtttaatttcctgttgaaagaggaagcttaaaactatcttctttttttttttaaaaaaaaagggatatatatatagtctgattcaaatcaaaatgtgtgatatattgtgtattacattttattttccatccctcctttgacttttgttgaaattctctctgtaaaggtggttttgcagcagaaacagcaggggggagcttc

SEQ ID NO: 56494 - DNA, 849 bp, Populus trichocarpa
  Intron number 2 from transcript POPTR_0012s11500.1 (locus POPTR_0012s11500) derived from phytozome v7.0 (chr-ID scaf fold_12; pos 11906991 to 11907839)
aagggagggattagatatcatcctgaggtgtgtctgatcattccttttctttttcttctgtactaatctgcgtttcttgttttttctcgatgatttgatgtcttattaggccaaatggttgttctgtctgatttatattagttaagggcatgcttggatttttctttggggattttgccatggtattggtgaatcataggtgattgtagcttgaaaagtaaaaaaaaggccctactgattcatgccaaattttgactgattgctggatctgaatcctgctttcttctggaagtttggaaacaaagaagtttatcaattaccctactagatatttgtatcaatgcagttgcatcgttaagttgtttcagacattgggttgatgctgttgttttttctgtgcaaatgttgtacattttagatttgttttgggctgttctgtctttttatcgagccacatcaatttgctttggtttcctgtcattacagaaagtggttaggacttgagagtttcttctggagagaacagtttttatatctcgtaaaatatttagcatccttttggaggaaggccttctgactacttataaatgttctaaatgagatttctccaaagagtaaaattagtatagaaaaaaataaataaaatggaaatagttcatgttccacatacataatcttcattcaactttcctgtttttatgttaattatgtgccaaattttccagagcaatgtcacgaagatatctttgttctgttgtccctgtaacagtattgggttttttttttcaaggacttgtctttgagattgatgttgatggcttcttatttgttcttggaaggttgaccctg

SEQ ID NO: 56495 - DNA, 734 bp, Populus trichocarpa
  Intron number 1 from transcript POPTR_0009s08160.1 (locus POPTR_0009s08160) derived from phytozome v7.0 (chr-ID scaf fold_9; pos 7500110 to 7500843 reverse strand)
ttttgtctctgctcctggtcgccgtattgtagctggtaatttacttgtcatcatctccctttttggttttggtgtttttgttttactctgtctgagcttggttcttagtagtatcgatacagtattgtcattttctggtattggtgagttctttatatacttcagcttcatgacttaacgaacttgaattgttggaaggcagtcttaatgttgcaatgcaaaatttgaatcatgtaacagaaactaagttagtcctgattatttttgttgaacgcacccaaattagtaagtttgactaaattttccgagaactgaaacgcatatttgtatccattctgcatgttgatatacactagtatgagtgctggtaattttcatttattaactcaaaggataatatacagattcttgatggttactggaggatgtatgcttaacttaattggggtttccccactatggcattcaaggtgccattttgctcggctgtgatgtcttttgtcattgagtcctattttggaaggagatttgtgaaatgtttttgttagttttgtacaagtcaaaattgattttttttcatttttcaaagcgataaaagatatctttgtgaagatttcatgtggagattgaagagaaacaatataatctctatcaatttattgtgctggcttttatgcatgccattcatttactttttcttcactgtctactttgacttgtattcatagttggag

SEQ ID NO: 56496 - DNA, 641 bp, Populus trichocarpa
  Intron number 2 from transcript POPTR_0004s07730.1 (locus POPTR_0004s07730) derived from phytozome v7.0 (chr-ID scaf fold_4; pos 6357326 to 6357966 reverse strand)
atcatagcaccaggtaaataattatatacaaagttgagtatcgttgattgtggaaaagcttatatgaagggaaaggctaataggtatccttggagcacttaaaattcgttggaggagcttgtagagcctgtttgtaagtatagtaaaaattatattttaaagttttttttttttttgctagaaaatgtaataaaacaatatttttttaattttttaaaatttatttttgatatcagtacatcaaaataatccaaaaacactaaaattaattttaaacaataaaaaatcaaattttgagcaaacaagcacacaaatgtagtccaatgataggtttctcgccggagattatgagtatgaacattagaagtatgaacttctcaaaccaaaatgaggtccctagttgattccaaagtttttttctcgaggaaatacatgcatgacggagttgattccaaagtttttttctcgaggaaatacatgcatgcatgacggagaaataagtgtgacattaatataagatgcatgatggtatatattaataaataatcaatgtttaaggaagataaattattgaccaatgaatcaatgtttttcttgaaatatcaggttcatttctcggattatcttgttgaaacggccgg

SEQ ID NO: 56497 - DNA, 804 bp, Populus trichocarpa
  Intron number 1 from transcript POPTR_0012s02400.1 (locus POPTR_0012s02400) derived from phytozome v7.0 (chr-ID scaf fold_12; pos 1981114 to 1981917)
aagtttgcatcttcttgtgataatttcacaatcaggttagtcatctgaattttatacacaaaacccggttttttttttctgtttgtttcatgagaaaatgttaggggcaaggttaaaactggcccagcaactgttaaagttgctgttttgattagttgagggatttgtaaagttcaaaactttgatattcatggggtttcctgtgaagtattcaaaaactttcaactttcgttattcttaaggattggttgtcacttacttttcatgtgcttatatttaattattgataattagagtattggtgaagattcagacaaaatgagctttcttgcaagttgtatttatgagggaattgagtgtttactgtaatgttttttttttaaaaaaattgtgctttgtttgtgtagttgcagaaatgtgcaacctgcaacgagtactgtctgccttgtactgttggttttaattatgttgaaatcttgtttggaatatagatgcttttggtatctttttatctgtggcttgttgtgatagagagttcctgtctctctgtctctccctctctctcttctctgtgatacttcagggaatttgaatttgaatttttttttgggtatgatccttctctcacactggatcacaatttttagtattttaattggtttctgattttgggtcctaaacagaaagcagacttatgatttagggtttgctgtttgtttcctgctcctgacttatgtgagtgctcacttcttagttactgttattgacattgctgcagggcaattaagaggactcatctcctcc

SEQ ID NO: 56498 - DNA, 814 bp, Populus trichocarpa
  Intron number 4 from transcript POPTR_0012s02400.1 (locus POPTR_0012s02400) derived from phytozome v7.0 (chr-ID scaf fold_12; pos 1982694 to 1983507)
ctggaacagagtttcgcgtgtgttgcattgaacaggtacacatgaaattgatttttggtaaaatgttggtaagtttggattctgttgtgattgagatcttctaaagataatcacttatgacctgatcttaataatataagttgttgaggcaccaatagggaatctactttgaagttaacagtcctgcattcatgaaaattaaacttgagagggagagaaaaaatgccttctcagcaatgaaaagcctcagtgatgaaacaaggctaggctggttgtctagaacagtatgactttgtgcttagttagacatgatttaggattagattgctttatgacaaaaaatacgaacagaaaaaaaaaatggcatctataaagcttgattgctttcatggttgcagaatgatgaataatgttaaactgattgaatccgaaaatggagtctcactaggatttcgatgcacttaaggactattttttgaatttcataatacaaacacacatgtttggattttaggtatatggttgcttgcctaaggttttaattgataaggtaccttgtctatggagcttgagatggaaaactatatttgtaattgaattactaacaaatgttaggtatagtagtagagggccttttcttgctcctatgattcccctctcgtatgatgacagattgtgcaatgatgattgctctatagataaaacaccaatatgtttctaattatagtcatcactgaaggatggcaacaattccaatttactgacttctttttttatctctttcctccaacatggtatggtagagattacggac

SEQ ID NO: 56499 - DNA, 515 bp, Populus trichocarpa
  Intron number 1 from transcript POPTR_0011s15130.2 (locus POPTR_0011s15130) derived from phytozome v7.0 (chr-ID scaf fold_11; pos 17292519 to 17293033)
ctttggtaagacctggcagaaccttagcttatttaagagtcgcacttcaacgcttatttttcgtacggacaaacagaacacaatcaatttaccactcttgcttctcaactgcttcacagcactacatctttgcagtaataacagaatctctttcaatttgatatctagtatttctctgcgaatttgttatttatggcgttcactttgattgcccttttatctaaatcttgcttagaattacatttcaatcccatcttagattcatatgttgctgtatgtcttcaaacattagttacaatcaaatctagaggcaagttccattcaaaagcatttcaatctttcttttttttttttcaatttactgtgcaatttattagttatgtccctagacggtgatgatgtttgaagattattattttatttattactgttaccatatctttttcttgttttccataccttgggaaactgatgtgccatggcttttatggtgatttagttaattctacttggca

SEQ ID NO: 56500 - DNA, 376 bp, Populus trichocarpa
  Intron number 2 from transcript POPTR_0011s15130.2 (locus POPTR_0011s15130) derived from phytozome v7.0 (chr-ID scaf fold_11; pos 17293088 to 17293463)
tctggagtcctttctccttacaagtttagtcgcaggtatgctttaggttttcccttgaaagttgacttccgttttttacatgcaatgtttataccagccgttgcgatttacagcctaagatttcgaataagagtttttcgattaattcatggaggttttgtcatgtataagctagaagaactggtgacaaaatgtttgctttcttcaatagattctgtattgtttgttgaaaataacaatcaaagtcacgagctgtttgatgttgttaccaagaatgaattggttgtacgtctgcatttctttcttcttctttttttcttttgtaaccgttggctaaaggtaatctgggaaattctatccagggctcttggaaaag

SEQ ID NO: 56501 - DNA, 783 bp, Populus trichocarpa
  Intron number 1 from transcript POPTR_0009s12200.1 (locus POPTR_0009s12200) derived from phytozome v7.0 (chr-ID scaf fold_9; pos 9987328 to 9988110 reverse strand)
ttcactctgagatcagctactcacttactcaaaatgttgcattctatcttatctgcgtatattgcacgtttctctgttctctcttcttttttcaattcccctgtaattttaactattttttattatttttttaatctgttgttagcgttatggattttattttgtcttgttttagttagtttagtttagtttattttgatatagaattatataaatcatattttaggcttcaagtttttaagctgatatggtttttttgacatgcaattttttccttttaacatgttatcagagttttgtaactaggcggtcatgagttgaaatctcaccactcctattctatttcataaaaattaagcacaagaaattgtacccaaaattgacatattgttttagatttctagtgaattttattaactggtaatatgcgtaaaaactgtgaaatttactgttctttattttaccttccagtgtatgtttctggatcattaattgtttttgatagatcgaagaggtcgtattatttgttttttaagtttagcatttcagacttaatatttttggtttttgttatagatttccaaattttaactgtttaggtaaaaattgtgaagtttactgttagtgattttgatttgtaatatattatttacggattatctattaaattcctttatcatctagggattatttattgaattaattaatttggatgtattgaagtgaacgtgttatttgccagtttcagggtttacagctcaaccaaaaaaagttgagcgtgca

SEQ ID NO: 56502 - DNA, 618 bp, Populus trichocarpa
  Intron number 2 from transcript POPTR_0009s14370.1 (locus POPTR_0009s14370) derived from phytozome v7.0 (chr-ID scaf fold_9; pos 11271303 to 11271920)
ccccttgcccaaggtacttatcatatacattaatctcagctttgatttttttattaactcttgattgaatgaagtgtttgtgttatttcttatttttttgggggggagataagttagttttaaattatttttacttataatcactatcacttgttaatttaaaagaaaaggccaaaggaaaatagaactaattaaaaagaccttcacatagttgttaggctaattctgatttcctaggcatgaatgtggccaagaaacctcccacagttgttgttggtttcaaagaatcaacatctcactgcaatgaggattttaccttttgcaaagaagggacaagatgtattaattaaggtcaagttctgtgttatttccatgtggaatattgctgtaagctgtagtcaaaaggacttgtatcattcaattccattctattttgaagtgttcgctgtttctgaaatttctcagtaacctgattcttttttctgttgacaaagaaagatacaaagaatggacccatttttggaataacttgagatggtgattctacgctgtgcttgtattaattttctgacatacaatgcaggacatagtcttgtgcaagatatacaggaaggcaac

SEQ ID NO: 56503 - DNA, 823 bp, Populus trichocarpa
  Intron number 1 from transcript POPTR_0004s05150.1 (locus POPTR_0004s05150) derived from phytozome v7.0 (chr-ID scaf fold_4; pos 3892039 to 3892861)
aatctcccgaggatctcgcctccatttgggacgatgtaatgtaccagaattctttatttgtttgtgattggtgctatagattggcttacttgattggaaactgcctacttaaagattagattggtgtaaactgagcttaacttgagtttcttgttgttggttttgttttcttcatacatattaatggagtcaagtttgagttcgctattgaattattaactgagcaaaaaactgtagaaatttttgaagtaaggggtttaaactcacacagtacatatcattaccttagtcacataaatgaaccatgtagtacatatcgttacctggtttgagtactacaaactacaaagctcatggaaaagtaaagaaaggagatttctttttatgaagacaaatgttttggaatatgataatcatttattattcttcggatcgtgaaacactaatgcactacttgaagaacccagaaattagcttatgagctaaacattgaatttatttactagttgtttatattcttttcttataagttcaaacactttcataaaaggagattataatttaatcgcagtattaactatatatctctcaatgtgcagtccggcatctttaattaagagcattttttaatatatttactatgccttcatttgggatgattattcttaaccattatgtttgcatatttgagaaggatctcaattagtgatagtgtattattaatggatagagtttctgggtgatttttattgtggatattacttatgggtggagtttgtctttgtcagtatcatttgggaagaggacatatcggggcatccat

SEQ ID NO: 56504 - DNA, 595 bp, Populus trichocarpa
  Intron number 1 from transcript POPTR_0014s05290.1 (locus POPTR_0014s05290) derived from phytozome v7.0 (chr-ID scaf fold_14; pos 4000409 to 4001003)
agcttcgaggaaatctagagcctcctgcttctcaggttaaggtacttgggttcttcatgcactggttttttctcctgttcatactcccttgtttcattaattatttttgttccaacaactgagaacgtttaaagctcccaaattattaatttcagtgttacaaagctcacatggtatgcattaccaataaaccttcgatcacctttgtaccctgaaatggtcagggttttcgcctttcccccacttactttccaagggatgaagttcggttatagtttttttattttttattactccatgtattcctattaaagtttggttgcagttctttttttctagatcaaaacactaggctgctagctgcttgtttgttttagtaccttctccttcttctagctaacttggggcaactgcatgatgcttgaggaagaactcttggctgtacatatacaatatctaggttcagaaacctccaatatccatgatatatggaacattatgctaaaaccctgaaccgtgtattttactagaaaatctaatttggcttgtttggttagtagaagaaaccgagcaagcaactagttgctccaaacga

SEQ ID NO: 56505 - DNA, 987 bp, Populus trichocarpa
  Intron number 3 from transcript POPTR_0004s07380.1 (locus POPTR_0004s07380) derived from phytozome v7.0 (chr-ID scaf fold_4; pos 6085397 to 6086383 reverse strand)
ggaagtaggggtttaggtgctatcaaaaggtatttttcttgtcaatcaaatccaagtgcccttatgtgaatttctttttctttttttttcatttttcatttccgtttatctcccatttttaaactgtatttattttaaaaacatcaaattccaacttgttcatttatttcatgtgtatattcatgatgtttttttgttaagaaaagtaacttggcatgaattatgagttagatgaatgaatctgagttgacataaaaattaatttaaaatgatatgattttaaggaaatatttaaaaagtaaaacaaggtggctgtaagtatttttaaaagtaaaatcaagttaaccaaattaattttcattatatttaatttaaaatctggttccaatcaaatccgaatctgttaccaatcaggtggtcaagaagttggagtgtttctggttttgcccaagttaaaaaaaaaactttaaatttgaccgaatattataatattcatagtttttaaacttggtcaatcgggacccgatcgatctggggctaaaaccgggttaggttgaagaaaaataagggaagaaaaaacctggtgtgacccagcaacccggttgatccggcaagatccggttaaaaacccggttgcaacccgttgacttttttttattaaaacgacatcgttttaatttttttaaaaaaattaacccaaacaacccagtcaaaacccaaaatctgaaatttgaaccgaccgagtgtaaaaactataacaatacttgatcatgtagcatttttattcttaatgctgaaaagtaaaagtcttcgaagacattattattcttttagatgctgaaaagtaaaagtattcggagatattattattttgtaatatatttttgtttttcaaaagtatttaaaaaaataatatgtttttttcatttattttctactatgctgatggcagggtgttgcttgggagtgtcagcaactacgtggtga

SEQ ID NO: 56506 - DNA, 967 bp, Populus trichocarpa
  Intron number 4 from transcript POPTR_0011s09560.1 (locus POPTR_0011s09560) derived from phytozome v7.0 (chr-ID scaf fold_11; pos 11896734 to 11897700 reverse strand)
gggccgaggtatcccacttaaagatatacctagtatggtccatcttttatttctgaattccttcttatcttgaatttcaattttgatgctgtcagaaaatttcttgttttgcttgtgctctttttggtgtaacaaatatattaaatgaaagttgatgatcttgaaagtgtttactgttcagtattgattctattgcaccttggatatccaatttctttttaacctgagtttcatcctattgggattatatgccttttcattgtaatattaaaaagtgctcaatttatgtcaatacatttgttattgacattttaattaatgtctgaaggctaaactacgtgttcagctgttttgattttttattgtcatcctcttagagggttgtaaattgattataaattgtctccaattttcattagtgctcctatatttttacctacatattgatttggaggtagttttgacttctgattctataataaatagttagattttgtgcttgtgaaaaactcaggatatcgtttatgttgtggtgtaatatatgacttttaaatgtgtaaaccagagttaacaggatgtctaccatgccccttgaatgccattcttttggatcatgcgatctagaatggcattcaagggggatggtagccatccgagttctactctagtttactctggatcgcatgatccagaagttgcaacttgacttttttgtatttttatatttagtacattcttttgtcatcctttacttttcccatgcaccctcctccctcttggtttagccttgtgatttttttccaaaacttgtcaactatggtatttcttttcttttctctttgtagcaattgtttcttacatgaatggttgttaccgtgtctatgagggtggttgaagaataagggaatatctctttcataaatctctcattttatagtgggtgtgttgaacatatccatgcagagca

SEQ ID NO: 56507 - DNA, 714 bp, Populus trichocarpa
  Intron number 1 from transcript POPTR_0011s09560.1 (locus POPTR_0011s09560) derived from phytozome v7.0 (chr-ID scaf fold_11; pos 11898440 to 11899153 reverse strand)
atcgaatcaacaaattagagtaataataaatcactgtaagtttctattctcttcattttcatgtctgttatgaacaatactcgttaattttgctctttcttgttatgcgagagtgtctttttaactgctgtttagggttcttttttgtgaagtttgactcttgatttttgggtttggttctgacatgtaattgaatttgtatgttgcctttggtttctgtgaaagtgctggaaatgaagggaaattgtcgatattttaatttaggttttttgtttctttaattcacaaagactacggagcttgaattccgggaatttctgcttaattgagcttaagaaagtaactttggcttaatttcaacttccattaaaaaaaaaaaaaaaacaatacgacaaatatatttaaaagatctgtggtttttaaaccaatacgactggattttttttttttttttgtaaatctcgtgttttgggttttctctaaatttgtgttattattccttgtttccttcagaggaaagttgccacttttcttctttcaaatggacttttttgcctacttttttaaaattgtgccatgtttcgatttcccctttgtacattcggacttgtgtgcttttcttggcgttcttcatttggtacttgttaatcgtgaccttcttattcaatatgatttcccccctgaatgcagcctttttctgtctacgctaaacaa

SEQ ID NO: 56508 - DNA, 757 bp, Populus trichocarpa
  Intron number 2 from transcript POPTR_0012s11950.1 (locus POPTR_0012s11950) derived from phytozome v7.0 (chr-ID scaf fold_12; pos 12294092 to 12294848 reverse strand)
gtcaggtgagtctctctaatgacaagatttgtgtatcctacttctacaatgcagacacaactcactatgattatgtaatttgatgaatacctgaataaacatctttgtgataaagcattgcctaagcattttaatttgtgaaatcacggtgtggctttgatagcgtgttgctgcatcaaaagaaagaaaacaatcttcgtagaaataatttctggccttaaaaaaagagctcacgttacttcatgactgtcattattattcacagtacaagaccaaggcatgtttttattttccttctataaatccggagctttaaagaattccacattcagtattctgaataggggaaaagatattttggtttggtgtctccatggtagactcctatctttaatttactgagaccagctttatttgctattctattaatacttgcctgctgttctttgatcactgcagccactcaagtttaggaaaaacaatagcgggggtgattctgattgctatatgctgtgttactaattgtcttcagtggaacgaaaatgtagtttgatttttttcaccactgatttattctggaacaataagctctttctgattgtagtatttatctctcatggctttaatatgtgtactaaagcattcaccaccatttcaccttgttcacaccatctattgcaaccctgacaccaaatatcttgtcttgtacatgctctccacgtggctttagttgattttaacttctgacagataacaa

SEQ ID NO: 56509 - DNA, 689 bp, Populus trichocarpa
  Intron number 1 from transcript POPTR_0011s14650.1 (locus POPTR_0011s14650) derived from phytozome v7.0 (chr-ID scaf fold_11; pos 16986160 to 16986848)
ctaaaaaggttgaaaatttattgtaaaggaagtagttttttttgcgggattttgcggttgctgtaagggtgcctgtactgtttttgtgtttttggtggtgggattcatggaaaatttgtggaaatgggtttgtgttgtttttgctgggtttttggaattggaattggattttctttattgggtttttttgttgggtttttaattgggggcatttttgaggagttggtgaaagtgttttttttttttttggagatgtttggttggtgggtttcattgggttttggaattgtattgtggagtttcgattttcgttttgaagtttttgttgttacttttagttatagagacgagtggatagagaatttcgaaaatggaaagaatttaattgaattttccttttttcccgcttttgttgccaagaaaaattagcgtttaagttagtgttatccggattgcatgagacttgacaaaattgaactgcttttagtttttcatttcccggcctttggattcattatgctgttgtgaaatttgcatgctcgaaatgctttttgaggggatttgttgattatttatggatgctgaatgtggatttaaatagtttcctcagttaatggatgaatggactaatagtggtgcttcttgttggtgtagctctttgagactataaagacgcaagaagcaacgag

SEQ ID NO: 56510 - DNA, 357 bp, Populus trichocarpa
  Intron number 1 from transcript POPTR_0012s03750.1 (locus POPTR_0012s03750) derived from phytozome v7.0 (chr-ID scaf fold_12; pos 2976086 to 2976442)
aagaaccctaaaaagctcacttcatcttcttccaagtaagtgcctttatctttccttgaaatactacagtcgttactgtctatcctctttcaaaaagatttgtcagacagatccaaggattcgaagatctttgtttctgactatgacccagatgcattttttctttatttttcggcttactagctctgtcagttatgacttcttttggtttcaagtcacaaactttactatgatttaacaatctgtttattaatttcttaagctgtgtgatttgggtttgaattaattttcatgtgtctacaatctttttggagatttttaggtgaacccaatttggagaatttttaggttagcaca

SEQ ID NO: 56511 - DNA, 486 bp, Populus trichocarpa
  Intron number 1 from transcript POPTR_0015s14710.1 (locus POPTR_0015s14710) derived from phytozome v7.0 (chr-ID scaf fold_15; pos 14208860 to 14209345 reverse strand)
gatctgatattggtgtaagtggctatgtctttccatgcatattcaagcacgcagttcacaaatttgctcaatggacttacaaattaacgtctgatttgcttttgtacatgctagatttgctaaatttttatgctgtcaaatttttttatgtaaatttgctcaacatcattccatatttttttatttttaaaatttattttgatatcaatatatcaaaacaataaaaataacacacaaaattaattttaagcaatttttttttattcttaaaaaataatattttgacgttgcaacgttagacttcgctccattttcataataaatcaattgacattatttaataaaatggacgcatgcacaaatacaatacataataaagtccaaccaactacccaaaatttaacacatttatgccggcccgattgaaatctatagttatgtgcttcctgttgacaagaaactatgatgttcttaacattcttgtag

SEQ ID NO: 56512 - DNA, 399 bp, Populus trichocarpa
  Intron number 1 from transcript POPTR_0004s18250.1 (locus POPTR_0004s18250) derived from phytozome v7.0 (chr-ID scaf fold_4; pos 18214642 to 18215040 reverse strand)
tctttcgtggtctctgtgtctttgtaagctactaagctccctgtcattttttatctctcgatcttgatttagtttaaaagctctggatcctgcttcgttgttttcttataaagttgtgacttatttgcttgtcgagttggatcctgctgttttcttttcttgaactggttcgactttctggggtctctctgtttggtttttgagaaaatcttggcaaagacactatgatacaatactcgttgttcaccttgattggatcgtttctttacttgaaatcaagaactgaaaagcttagcttaacttgaactttttgcttagttcataagctgaatcaaataagcttcatgaaaaactaaacttaattatgatctgctttgaaatattggttgttttcagcta

SEQ ID NO: 56513 - DNA, 877 bp, Populus trichocarpa
  Intron number 2 from transcript POPTR_0011s16050.1 (locus POPTR_0011s16050) derived from phytozome v7.0 (chr-ID scaf fold_11; pos 18025694 to 18026570)
atctcatctccaacgaatctggggatcaagagaaggtgagtaattaagaattgtcttgttaattaaacttagttgccccacttgtttctatggtatttaatatagttgaattttgattcctatgcaacttttagtgtgtactcatttttttttttaatcttgacttcattaattgaagttgatgatgatgataatatatagtatgattaattaattattcataggaggatcaatgaatttttttggaacttgagacttgagtaaaagcatggtgatggtcaggatccaaggaatttagggttttcagataaagtatatgtactagtctttcattgactgtacagggagctaggggggagggggggtaaagcctttcttttcaggtgagattgttcaatgactgcctacattacataacagaacatcaaatctttgatgggatttaatcaagtaacctgaaaaggtagcctcactggtgtcataataacattcacagacttagctttcatggtagtagctatctctcaagcaactttatttattatttatttcttaatttcctttcctcaagtgatcacttgaaaagatagctatgtgttctgattgatgtataattgtctttaagaacataccatccctttcaagcttcatagctcaagctcaagtattcattgctgccccaaaatggaaatcgaattcttgtacaaatatagtttgataaatttttttatctttgttcgttgcttcttcatcatcattgtcattaaatgcttctatcttgagttttagattttggaaatgaaaacaaaattccaagattaatttttgtattgttatttcaggaagagtcaagcaaagaaggtggtttgtattccag

SEQ ID NO: 56514 - DNA, 793 bp, Populus trichocarpa
  Intron number 1 from transcript POPTR_0004s24220.2 (locus POPTR_0004s24220) derived from phytozome v7.0 (chr-ID scaf fold_4; pos 22928508 to 22929300 reverse strand)
tctttgcttctctcatcacccaccgaacagcaaaggttagtaatgatcaccgcttcttctttttctttttttctttttttttaccactgtgctttttaatttaattaaaaatgatacaactgtgtctatgtcacgatagtgactgttaagttatataatattatatataaaaacctatttcaactcaaaaaacttatggaagttttactcttggttaaagaagagaagagtgattcagcattgtagttttgattctaataatggaaattatgctgcttgatctgttcatgatatattttatattcatggttattttctttttacatttttttttttttgaaaaaaaaagaagaaactttgagggaatcattggtggtccggaaattctaaagctgaaagcaatagaaaagattgaaactttaatggttgccgctagattttgcggtgtctttttctttatattcaatgcatatgggttggtcggtttttacatgtttgtcaggttgccccattgtctgttttgacttatttatttttacaatcttagcactaaaaatgacagaccccatgatttcttttataatatttaaagattctctgatcatgggagttcacatttccatcttctgttgctagattatgctgtagtattgtataattatatgtctgttccttgataattctcactgccattccctattttcttttttgcttttggcttcttttctctttgcatcacttctttgtgtcaacctgtgtttataatgtgtaatttctgtttggcatgtgcaga

SEQ ID NO: 56515 - DNA, 529 bp, Populus trichocarpa
  Intron number 3 from transcript POPTR_0009s00840.1 (locus POPTR_0009s00840) derived from phytozome v7.0 (chr-ID scaf fold_9; pos 945945 to 946473 reverse strand)
ttgttaagaagtatgcaaatggaaatgcaatattgttaagcaagcttacaagtgaaatgaagttgtttaggaatgcagaacatgactttggtaaagtgttcgcgagaaatgatcgcacccttttacctccaagtatattattattttcatattcaaagtaatcttaaaatattatcttgacataatcttacatattaattttgtatatagatgaatgatggatgttgtatggaagttgtgctccaaatctccaaaagctagttatacgagttttaagtcaaacttgtagttcttcaggatgcgaaaggaattggatattttttagcacatccattctaagaagagaaatcaattggagcatcacaaacttaatgacctagtttatgtcgattataatttgagattaaaaaaaagtattttcttttctctaattcttcaaaagttacttatattattaagtagcatcattaatacttatatttggtaccttaactttgattttgtagaaattattggaaaggacagactt

SEQ ID NO: 56516 - DNA, 417 bp, Populus trichocarpa
  Intron number 1 from transcript POPTR_0015s13030.1 (locus POPTR_0015s13030) derived from phytozome v7.0 (chr-ID scaf fold_15; pos 13154728 to 13155144)
ctgctgttcaacaacttcgccccaaagtctttcaggtactgtctcttcatgtgttttggccgtgttttttacaagattttggtggattttttagtgggtttgttttgttttccttatagcttttgtgggttttgttttttagtcggtgttctgtccaagctttgactttttgttgttttcttggtgagaaaacaatccaggaaacataatgtgttgctttttttttttaattaagctgtgcatttaattcctatcatgggtgttttgcgttggatttttgtgtaaatcctggtccattgaaggaaagaattaaagtgcagttattagtggcatattaatcagggattttagggcagactcattaaaagtgggttgtttctagttgtgaaggggttccagaggccggaagttatacca

SEQ ID NO: 56517 - DNA, 544 bp, Populus trichocarpa
  Intron number 2 from transcript POPTR_0015s13030.1 (locus POPTR_0015s13030) derived from phytozome v7.0 (chr-ID scaf fold_15; pos 13155154 to 13155697)
tattaggatttgtgttgctggggtttcggtttgaggtaggtgtcaatgtgttttatgttgttggttttactggtttgagttcgtagagctgatcatgaattttatagtcaggacaccctcatcatttgcgactgcctgtttattgtctgactgtactgacttggtctgataaattctcacattattgtctcaaattgatgccaagtattttaggaaaacgttaatggtatcgatgcattagcggttcaaattgagaaaataatacatcttcgtttctacatggtttatacatgtagggctaatcaatgtctaagcaattttactacaggctcttgaggttgtttcactctttgatgcaaaatgctggtatgatacattaggatgttgtgagatattgccaaatggtcgaatcatgtaaagatgcgcacaaaaaagctatctccctttttttatttttaaaaaaaaaacatcatccttgttttctatctttttgtggttctctaccttaggttctccagacacctgattttcgggattgcaaagc

SEQ ID NO: 56518 - DNA, 831 bp, Populus trichocarpa
  Intron number 1 from transcript POPTR_0001s24330.1 (locus POPTR_0001s24330) derived from phytozome v7.0 (chr-ID scaf fold_1; pos 23643602 to 23644432)
ctcgaccgatccctataagaagaagcacaatcgtgagtagccctttacttgtttcgatctctagtactgctatctgtttttaagtgacgactgagatgaccgttgatgctctagatctgagacttgatctctaattcgacggcagcggcagatttaaacggcttcgtcttttgtccctgtgcctgcaccactattccgctagatcttacgccactagttgatactgttaattttaatcattcatgtctccgatgctccatttcgtgtatttattttttcataatggtcctatccgaacagtagttaaactcagtgctgtgtttctttgaatttatagatagtgcggctttttgtccgatctagtcatcttgttttgtaaattattttaggttacttgtataatctctgattattttttttattctctagatgtcaggatttatggttcagttgatcaccaaataatcttgaaatgtgatttaatagaccaaaactcaaaaaaaaaattaaaaaattattcaacgtggtcctttatcatcctgaattgttcgagtttttgaagctttgatggactaatgtcatgaatccgaatgttatttgttcggatatgtgatccatggtttataagctgcgcctgcttatgtgatatctcctctaccaaggcttatctcgtcaataagaaggaattgaggaaataataatagagggaggatctctgctgttaggaaccttgaggaagctgttgcccgagtgccttttgttttctttgcatttctgtctcaccgcgtgttatttaactctctgcgtgtgcaggccaacgcagcatctggt

SEQ ID NO: 56519 - DNA, 545 bp, Populus trichocarpa
  Intron number 1 from transcript POPTR_0009s05420.1 (locus POPTR_0009s05420) derived from phytozome v7.0 (chr-ID scaf fold_9; pos 5529600 to 5530144)
gcaaagactgttgatacacaatccgtgcttaaacggtattattttttttcttgttttttcgcttgatctgctcttcttatttgtcaaatgatgtaacatatcacgaattttatctggatttatttctttggttttcttttcttgtttatgaatgtggtttgtgatctaagatcagatgatgtttgtatttataatgaatatggtagcatttaagctattgatttttatgtaattggttctttatctaagagtgattttgaatgaatcaattgggtttctttaagtctgttatttgtcttaattggttatctgcttttcattagctaattgattgtgtgataagcttgatttgaaaactcgtcttttttgctataatttgcttgaggtatttcacggttaaatttgactgaactttttttcagaattggttgctctgtaacctgatctggttgctcattgtctattaatcggcttgagaattttaagggtttttttaactgattgttacctttttttgttatgaaatcaggttgcaatctgaactg

SEQ ID NO: 56520 - DNA, 949 bp, Populus trichocarpa
  Intron number 1 from transcript POPTR_0014s00320.1 (locus POPTR_0014s00320) derived from phytozome v7.0 (chr-ID scaf fold_14; pos 130161 to 131109)
atcactatcacaacctgatccagatcgtccctctggtacttctctacctgccccacttcttatcttcatcataattgtatacagtttttatctttttcctttttctttttaattcaaagtctcctttttgttgttggggtgttttgatttgatggagattaagtcatttaaaggatgaattggcttgtggattgtttggtcatgttcgtttgaatataaaaagtcaatctttctttttctttctttagtttttggaggatccttgtctttttgtacgctgagatattgtaaacatgtatgaggtattaaattgctttgatctgggctgtgctgggtgtttcattttgagatctgagatctgggttgtgtgaggtgaccttaattattgcaacttctccgttttgcttgtcatgtatagctaattattcagtgaagtattgtgaaggggaggttcaagaagcttaattgatttcttgacatggttgctttctggaattatgagccagtggcatgaaaagaaaaatgtttgatatgcttgagaattcaaggtgatgtctgtttttatgagctaacttattgttgtcaagctgatatctttgactgatcaaagaatggttatagtgtatagaatttggttactaatgagtggttgctcattgttttgtattatgtatggcggtagcctgtttaattcttgtatcgaatagatcttactggtttttttgtttttttgtttttttttaagtattcacgttcttatatttatcatacgtgcataggtctgaatgtgtggatttgtgcgcacatattcatagcttcaagttttcgtatctccaattttagctttgattggtcaataaatttgtagtgcctgtgtttctaagactctactaagtcactgagcatactgatcatggatgcagaagagaaacctgctgaatcagataac

SEQ ID NO: 56521 - DNA, 672 bp, Populus trichocarpa
  Intron number 1 from transcript POPTR_0015s15800.1 (locus POPTR_0015s15800) derived from phytozome v7.0 (chr-ID scaf fold_15; pos 15008351 to 15009022)
tatttcaagtaccagagctggtttcacttttccaggttagtttattttattgcactgtgatgcataattttttattcactatgtatgatgtttgtattcttgatgtggtgtgatggtgctcttctagcctatactgattctgttatttgcttgtggtggaattgctcttgtcctgcagttgcttagcaattgtgaacttatgcttacaagaaattgcccacgcttgctattttgctaatatagttggtaaatcttgagaattgggatccaacttgttttacttcgttcgcccatggtgcaaatatttcaaatgattcgtttctagcagtgctggtgtgatctgataatattaatccatttgatttatatgctgaaccaaccctgtgaatgccaatacttaagcctaattaataacttggggatagttgctttcctgctattttcctgtactatttcctctcggagtctggttttcagtaaataaataaaatgccatttttgttagagtaaattgacaagaataacttaacaagaaaaaataggttttgggcccttctatttattttccaaactgtcctttgagctctataagaaacagaagaaaattataacggtgcgaagctgtatgtttttgcagagacgccttcagaactttgttgggaaagctcttgt

SEQ ID NO: 56522 - DNA, 921 bp, Populus trichocarpa
  Intron number 1 from transcript POPTR_0004s11260.1 (locus POPTR_0004s11260) derived from phytozome v7.0 (chr-ID scaf fold_4; pos 9884361 to 9885281 reverse strand)
ctaccagggtttctctcgatctcctcttccgcgtacgatcttcacttcttgtatacccttttcatattttcatgcatattatgttccctttgttctgtttggtttcttttgtttgtgaaataaatggtttattttttatggattttgtgtgtgtgtgtgtgtgaatggagactctgtcatttttcctctctacgtggtatttttattcttagtgacccaacagcttaaaaacctgcttcagtggtgttttgtttgtctgttgacagaactctttttttttttttttttttttggggggggggatgacagttcatctgggtggataattgaaggtttgatatcagtgtatatgtagggctctttatagtggcaatgatatgatttagatattggtgaatgattgccaatttagtaatgaatctgcaattgatatgagtagccccagataagctatgtctattggcttaccatcgcaaccaatgcagagctgtagaagtttcaagatgggactgtaataaaatgcagtgtactggttagaagttaaactaaaaacgttgcatactactcatttcattttttagatggattttcaataagctcgggagcattatgtactttttgagaagttggaattctggtcattgtgtggaacagttgtttgtatttacaggctccagacaaagaatataatctgttgcatgatcaataatgtaacattttgtcatgtaggtcctgctgcttttttatttgctgtatgaattactactgttcatgcctcaaatattttgaaatggtgtattgattaaaattttcattgaaaagtttgtgttcttagtgtttctatccccacttttgattcattagcttgtttatgtacttactacaggctcccaaaagaggtgtgaaggccccgttagcagc

SEQ ID NO: 56523 - DNA, 818 bp, Populus trichocarpa
  Intron number 1 from transcript POPTR_0009s09950.1 (locus POPTR_0009s09950) derived from phytozome v7.0 (chr-ID scaf fold_9; pos 8689150 to 8689967)
cctctgttaaagctggtaatcaattgcttgcattttctttattttttgtgtttgattgagtttgttgagtggttaaaggttttaaaaaatatgggttttgattaaaaagctgggattttggatactttgataagtaaaagtacattccttctgaagcgatgctgtttttaggtactctcggttaagggtggatctgggtttgttatgctttgttttttccttatccttttttttcttggtgagatctggtttgcatgtggttttttatatgcttaagagatttattatggatactttagtctcttaaaagatcaaataagctgatgattcaaaacatacttaacatgcacgcaactgaagatgtttattttacatatccaggaaagatagcggtgtggtgggtttaggaagggtttaaggataatgagttttagagaaacatgtaaattttgtttgttgtcgtacaaatttcaaaggaagattcgaataaaaacatggacataagtcaggtagctgtttcttttgtattatataactttaaatatcggtcaaggaaagttatggttaaactatgtcctttgactgcacaacatcttttcgtaatggttatgacaagtttatggttaagtggatatattaaatggacatcataagattacaattattgagtttttccatgaatgctattatttgtttctggtgcaaattttgttaattcgtatgaactttttcaacgggacaattggatttgatactgtctagaagcacttatttcaaatgtttcttgattaatgtaggaaagtggcagaggaacaaat

SEQ ID NO: 56524 - DNA, 480 bp, Populus trichocarpa
  Intron number 2 from transcript POPTR_0011s13640.1 (locus POPTR_0011s13640) derived from phytozome v7.0 (chr-ID scaf fold_11; pos 16353586 to 16354065 reverse strand)
aaagacagcaaaagtcatagaaaagattataagtacactgcattaataaaaaactgggtgctttttgtgtatttttactgcattagtaaaatactgggtgcttttttttttatgtaatttatcatttggagctaatccttcttaaatttagatgcaaaagaactgcgtgttgttattaattttttgtgatgtaatctgatgttattttgtttcatttttgtagccaaaaggaagaaaattagatgttaaagaattgatttttgtaatgtaatgtaacgttattgttagccaaaaaagaaaaagaatagagtatttaagttatagttctagtttggatatctgggttcatgcaagaaaaaggggtttgatcattttctgcaaattggtgctttctgggttgttgttgttgttttgttagatgtggttttgattattttttcgaatttgtgtttattgttttttcccttgttctttttgtag

SEQ ID NO: 56525 - DNA, 749 bp, Populus trichocarpa
  Intron number 1 from transcript POPTR_0012s11040.1 (locus POPTR_0012s11040) derived from phytozome v7.0 (chr-ID scaf fold_12; pos 11662911 to 11663659 reverse strand)
acaacctgcgtcctcacagcttcaaattttctcctgtaagaagattttctgcttcttttgatttaaatattttattgctgaatagaaaactttctgcttcttttaatccaactttttttattgctgataaactgtgttgtctcaatcagttctgaatatatcaattcaaagcttgtttatgaataataatgttggatgccgactggattagtttagcttcttgggctgcttttagaattggttttctctgcaagaacagtaatcttaacaatatcttggtggttttgtctctttttttatttttcaatggtattgaaggatttttttatatatataattatgtgcatagcagtgtaaagggagatattttgtgcagcattgtcagttttgcatacaaactctttaactttggagaatagttgataaatttgagttttagtttagaaagaaatgacttgatgtgtcaaattttgatttttttttcaagtttgttgatgatgtatgtaatttattgtggattgaaggtgattgatgaaatctattgcgtagctgcattagtaatttctcttcttctttttttcttctgataattaaatatatatcttctttggaaaaatgtctgttttctttataatttttgaggtttctttgttttgtctcttcaattacgttggaaatacatctgtgtctgaacagcttgctatgacattgtaggtttgttgaattcgtaagtaatctttccagtgcct

SEQ ID NO: 56526 - DNA, 686 bp, Populus trichocarpa
  Intron number 1 from transcript POPTR_0004s21290.1 (locus POPTR_0004s21290) derived from phytozome v7.0 (chr-ID scaf fold_4; pos 20481634 to 20482319 reverse strand)
agttatgtctcaagatctcaagttgttttctttttgtgtcgttttattgctttggcctttagtgcttcatggtttggaaggaaatatgatgtggggttatgttggttcatggtttttgaagcattttggtatattttgaaaggttgttttgtccattgaaatggttagaatgggaaatttgcttggtcgaattgttaatttgtgttaaaattgctttatgattataataaattgaactgttgattatactcagattgaacttggtcttagattgtatttactcgactggcttcttgaatatcaaggctaaattggataaaaagtaaaaattcaatgaaggtcctgtaggagttggttgagggccctttggtttcttacaatgaatgctgatagttaagcaggttaggagcaatgcaattcaagtttaagaatccatatgtaaagagaagttatattgtgggtgatgattttgaaatagctaatggatgcgtactcttttggttgagagttagtgacgtcattttgagtttttaaggctaagaaggaaccctggttgtagaaagcacactgaagcaacttaggttgatctagtgggtgacttatgttaaatttcatgattcgaatgttttatgttttgtttgctgcagtaagcttgcgggtgatacaattcgtgaagctgttacaac

SEQ ID NO: 56527 - DNA, 542 bp, Populus trichocarpa
  Intron number 1 from transcript POPTR_0009s10720.1 (locus POPTR_0009s10720) derived from phytozome v7.0 (chr-ID scaf fold_9; pos 9144403 to 9144944)
aaatctcttctttcctgaatcaggacaaggcctaggatctggggagagtttctctcaggtttttgttttttaattgaaggctatcatgttttatcatctatttgttagttttggcatattgagactcagtctctctacaattgcatcttgagtggacaattcatatattggactgaaatgctcgcatgaaattatttctcgtgtcatcttcgttatttaaattcttgatgatgatttggagaatacatctagttctaaccaggttaagctttcagatattttatttgattgtttttatatatatttattagtcgttaatgaatggctacgtattttttctcagtgtgaatgacaataagtacgacgtcgtaagtttttatttttcttcccattagagaaaaatgaatcttgaggcccagctaatttaatatttgctgaccagtacgtcgctatgtccatgtcatgataggtttccaggagggtcatccatgtgaattttttggacttttccaattatatgcagatattttcaactctcattc

SEQ ID NO: 56528 - DNA, 998 bp, Populus trichocarpa
  Intron number 1 from transcript POPTR_0015s01870.1 (locus POPTR_0015s01870) derived from phytozome v7.0 (chr-ID scaf fold_15; pos 1291803 to 1292800 reverse strand)
ggttctccgacttttgccttataaggtaaatgtattgtcaagtgtttcatagagtcaaagaaggatggaggaaaaatcctttcaagtttgcaaataatttcaatgatattcatctgcaacatctccatgtgttggacatttaaacttgtaccactaatgtcccgaaaaaatactaacaattcagttaatgactcccacaatggcttaggcaagtaaggtcgaaaagcaattggaagaagtctttgcataaaaacatgacaatcatgacttttcatgcctgaaaccttacattgtgcctcttttacacaccttgagatgtttgaagcataaccataaggaaaggacaattctttcatccatgacaacacttcttgttgttgtttcttgaagagataataagtgcctttaggtttgtaaacccgaccacttgcatcatgttgcaaatgtaagtttgacttcttacaatacaactgaatatccaacctagcctttacattgtccttgcttctatcaggacaatccattactgtataaaaaatattatcaaagaaatttttttcaatgtgcatgatatcaagattatgacgaatcaaatttgtatgccaatatggaagctcgcagaaaatgcttttcttcacccaattgtgtttaataccaaagcctggaattttgtcattatgagatgaacttctaatatgttcctctgtaaaattagacacttcaaataacatttttgaactagatcgacgaggtaaaggagggagccattttgttactcctttcaaaaacttatctgattaatatctatatgggtgattcataggtagaaatcgtcgataacagcaaaaaaaagttatttttcctccatgctttaatctaaaggctttgaagcactacttcattgattaagttgtgtaacatgtggtttctttcttgcattgatgtcttactttgtgaaacttctgaaattataacttttcaggtagggatactagaga

SEQ ID NO: 56529 - DNA, 380 bp, Populus trichocarpa
  Intron number 1 from transcript POPTR_0011s17260.1 (locus POPTR_0011s17260) derived from phytozome v7.0 (chr-ID scaf fold_11; pos 18850532 to 18850911)
cttaattctataggagctaactgcccctttctcaggtaaataaagcaacttttagtctctttaacattattactattaaggatttggggatgatgttaattagcaactgattaaaatggttatgatattttcttctcactctttattggtgttttatcttatggagcaattttctttaaatagttcataactttcattcaaagttttgttttttgtcatttgatcagccactaccactctctttccggttactacttttaaaatatcaagtactaattactgattaaagtgaaaaaatcagctaatggtctatattaatggagaagattttgtttggggtgtcagggtgcttgcagttgaattcgcagaccagggctcgc

SEQ ID NO: 56530 - DNA, 558 bp, Populus trichocarpa
  Intron number 1 from transcript POPTR_0001s22830.1 (locus POPTR_0001s22830) derived from phytozome v7.0 (chr-ID scaf fold_1; pos 21743023 to 21743580 reverse strand)
gcaagtagttttacaatattacatatattagattcttgcttggaaaactctattatgcatattattcactttgattattctccttgctcttacatatatatcttctgtttgcatatgcaatataaattacttctcattattcaatggatttcgtgaatccaataaacatatccaggagggagtttccggataaaaaacaaaaaagaaaataatatattaaaaaatatatccggttatgttatctttttaaaagaaaaataagtgaattaatgcaagattttaaatattgaattatgtacggacgtttagtcccgtagagaaaacgaaggccaagtcttagattcaagtcctattctttttatatgaaaaaaaaatataaaaatagattcacataaattagagtttgatgtatttaaaacttgtttgtgtttttatttgataataaaaatattttcgagtcagtttactcgtgaaccatgactgtttaaaattttctttgaatcgaccaagatttaattattgatatcaacaaaaataaatcttgcgcagcttgcacgc

SEQ ID NO: 56531 - DNA, 792 bp, Populus trichocarpa
  Intron number 1 from transcript POPTR_0012s01640.1 (locus POPTR_0012s01640) derived from phytozome v7.0 (chr-ID scaf fold_12; pos 1247223 to 1248014)
cactccgctctaatccccttccagtactagtgaaggtcagttatttgtgatcaaagatctcatctttgatttcctggcagttctcaagtttttgtaatccgaggtgctttaaagtttgaagcttttagttgtttttggtgtttttagggaggtgggtgtgtttggttgcttagaaacttggaatcttaaacttcattgaattgttgattttgattgagctcttcatttggttgtttatgaagtgagtaacaaaaggaaatgaaaaatatggctgtgtagaatttaagtttttgttacttaaagtttgaatctttttgctgtttttgttggattggatgtgtttgcttgcttagagaatggaagtaagaaaatttgaatcctcaacttgattgaattgtttattttctgtgatttgattttttttgtttatttcttatgaggtctataagagggcaggaaaagtgaaactctgtagaagttaaagaaatatttttttttatttttggtttatcatctacttcagttagagttatgttcgagaataacaactatgtgattgtggtgtaaattactgattttgttttttggtttatcatctttttttcttgttcttgttttaaaattctgttatttaccaagttaacaaaaagggtgtaaaacatacaattgtgtaggattagaagaatcattttttccttatagtatgttatttctattgtttattatcaaattcaggtgaccataatttcatgtacagcatcaagggagatcccaacctcaaacaaggaaagg

SEQ ID NO: 56532 - DNA, 827 bp, Populus trichocarpa
  Intron number 4 from transcript POPTR_0004s16800.1 (locus POPTR_0004s16800) derived from phytozome v7.0 (chr-ID scaf fold_4; pos 17144999 to 17145825 reverse strand)
gagaaagtaagtttatgcgtcagtttgattataagttttcccttcttctcattaaaaaattatcaatgttatacggctaactcttaaagtctcttttatgcagattttgcattaagaaaataaaaataaaaataaaaatgaagctctatagttatcagttcttcgttccttgtgcttacagatatttgtcgtacttgattttgaatagcttattgttaaatcacttgaatgtcaggttcctataaaaacctttgatgggtaggataataggcattgtttgcatagaagaatggaatgtgaaacaatctttcgattagaaataagatggaactctgacgttcattaatccacgattggtttaaaaaactaagaaagggctcgttaaatttacagaatatagactctcaaatgtctagtcattaatttgtgttcctacttggattgatccctggacatttgttgagttcctatattggggctgatgaacattctgaaattgattccagcagaaaagaagcatctctgggggattagttatcaaattcttacaagattttcacgaagttgtactccgaaccatcccctcatgcatggaaagaaagaagtaaacgacttaagtggaatttcttttgctccctctttccctcgtgtttttcccatgttggattgcccttggtttcgttgaattcaaatagcagcataggaggagcaaaaatataacgttgtgtgattgttaatggtttcattcacttgtgttgaacttatgcaactgtctgtacattcattcatcaggatataattcagagggagcaagaagggcagctaga

SEQ ID NO: 56533 - DNA, 593 bp, Populus trichocarpa
  Intron number 1 from transcript POPTR_0001s20870.1 (locus POPTR_0001s20870) derived from phytozome v7.0 (chr-ID scaf fold_1; pos 19114751 to 19115343 reverse strand)
ctctatgtaagcattcttttatatacttatttagcttatgctagctagcagtactaaattaaattgtctcaatcaagcatatatacaacttaacttgcatgattttttttaagatttcacttcactgttttcaatgtagagtgatgtttctcaagccccctttaatcttgaacattcaataattttgtccagtctgttagttttagtgaaataaatatttcaagtttttgggttacacataaccatcattttcttactttttgaaattgttaagagtttttaatataagattctgggtcgaattgttatttgaggtgatatcaaatgtttgaatttgaaacatgagtctgtgtggcaatcgattaaactgttcagtgccatttttagcgaaggcatatctatcctttgttttttgaatcaaggagctcaagaagccatatcatttcagtgttgttcatgtagtctttttagttgaataaaattcgttaaaacagtagtgcttgtcattatgtcaaaaaaagaaatatattctttatcctagcattcattcatttcttttctgatgcagaggatagaagacaagggaaaggaaa

SEQ ID NO: 56534 - DNA, 586 bp, Populus trichocarpa
  Intron number 2 from transcript POPTR_0004s09060.1 (locus POPTR_0004s09060) derived from phytozome v7.0 (chr-ID scaf fold_4; pos 7607948 to 7608533)
ggttttctccaagtttccaaggttagcttctgcaagtttttaaaccatcattttccctctcttttatttgttttttgttttaagtttcagtgtctgtcaattgaatctcataagttaattgcatgtgaaagatcattaacgagttgtgttgttgatgttaatggaagtattggctatgcagtctatgtatttgtagaaagtcctcacagaacccatttattttattgtctttatgtcctgtgctggaagaataaggttactgcacttcttgactaaatctttggtgctctttgaatttaggatttgtttgtctttgtttaaaacacattgaaaaagagatggtgataataattgaatgatttttttttgaagcacatgacttggttatattatttttctatgtaatagtatcacaatgctcaagaggataaaagtgttttaagtagatagcattttgttaaacagtgaacctgcaatattagcattgaggcagttgctgttattcacaattgcaattagtctctgctgttggtcattgaatatgttacatgacattatattggattttttgcagttataagatcat

SEQ ID NO: 56535 - DNA, 453 bp, Populus trichocarpa
  Intron number 2 from transcript POPTR_0004s01090.1 (locus POPTR_0004s01090) derived from phytozome v7.0 (chr-ID scaf fold_4; pos 545329 to 545781)
cgaggctcacaagtcacaatattgaaacctcaagggtacttaacaggccttaaatatggaggaatggacaacattcttgacctaaaatcaaatgaatctagtagaggataaccttaaaaaaaaaaaagccccacaattattcatacttcaattctttttttcagtagtcttggataagcaaagaacatgttctaatgctgctgctgcaattgtaagatgatctcactagtccatgttcttataatcttgatcataacttgacaagtcaactatataacattgtctgtgtataatttgcaaatattgggacatcaattgcaacttgccgggagggcaggacagatatcaattgtatgaccatcacttgaacaaaatagctatgatactttcttgtcatacttcgtttctcttaaatgattcaaaatatttgttactttgtatgttgcagattgc

SEQ ID NO: 56536 - DNA, 847 bp, Populus trichocarpa
  Intron number 1 from transcript POPTR_0011s13770.5 (locus POPTR_0011s13770) derived from phytozome v7.0 (chr-ID scaf fold_11; pos 16428937 to 16429783)
tctctatcaaaatctttaaacagctctcattcaaggtatgcctctcgtgtccgattgtctagttttttcttaaatttatttttaaataaataattgttatacgatctgttagtgttttatggatcagtccttaataatcgtttattgatgacagtaatctgtttttttttttatctggatattacgacgttgttattgattctattgtttagatctcgattgatgggggtaatcgaggaccctttccatttttttttcaaattttgatcaattgatttattctgttaagatctgttagtgctttacggataacatagatctgcctgatgttcagatttatttatctcgatcttagggctctattattaactctgtttagatctcgattggtcggtgttttcaagggcctcttaagatttgattaattaattaattaattaatatggatcatgtttctattcgtttaattttgatgctattttgattaaaagaaaaggttatcgtttttttttttaaatgatcaattgaatttgtttgctattgttaatgatctgaaggattgttatatgttgagatctgaatctagtttgtctctgattttacttttttggggtgtcagatgcaaatcttcgtcaagactcttactggcaagaccatcacccttgaggtggaaagctcagacactattgataatgttaaggccaagatccaggacaaggagggaatcccaccagaccagcagaggctgattttcgccggcaagcagcttgaggatggccgcacccttgctgattacaacatccagaaggagtccaccctccacttggtgctccgtttgagaggtggc

SEQ ID NO: 56537 - DNA, 240 bp, Populus trichocarpa
  Intron number 1 from transcript POPTR_0014s04740.4 (locus POPTR_0014s04740) derived from phytozome v7.0 (chr-ID scaf fold_14; pos 3661374 to 3661613)
atctgttcacttttatcactaactcaaatattcaggttgctttcttcttcttcttttttgatgaaaaaaaaatccaggtttctgctggtgccattcttgagaatatgcaagtaatatacagctcaacctctacaaattttatttctctccaattctcttgtttctaactttgatttgtccttcccttgattgaaaatgcacacaggttaaggcaagaaaaaagagagcagcagcagagat

SEQ ID NO: 56538 - DNA, 718 bp, Populus trichocarpa
  Intron number 2 from transcript POPTR_0014s04740.4 (locus POPTR_0014s04740) derived from phytozome v7.0 (chr-ID scaf fold_14; pos 3661764 to 3662481)
ataattaaggtacgtacaagtctatattgaaaacttggctcataaagaactacttttatctgatgtttagccgtttcgttcttgcaaaatcaaataaaaaagagaggagaaaaaacaaaggtttcctctaactatgtcccttctctttcgttaactagtctgagatttctgtactgaactgctcagcattaaccctcaaggttttcatgtggccagaattgaacaataaaatttcatttcgagaccaaaccctcatacgggcctttttatttgggctttggcccgttatttacccgaagaaaagtccatgaatgttttttttcatggcttcaatcattgaaaccttaggttagtcgacatctaacaaagtctccgagatgtctcttggtcctcggggtgtcgatctcgaacaatgtctccaagatgtctcctcttggcccgttatttacccaaagaaaagtccatgaatgttttttttcatggcttcaatcattgaaaccttaggttagttgacatcgaacaaagtctccgagatgtctcttggtcctcggggtgtcgatctcgaacaatgtctccaagatgtctcctcgcagctttcatctttatatcgacacttttagtctccgtatgaaattcacatcttccctactttctctgaatattggctagcctttctttcttacgtcgtcctttgcttaattttccattctagcaagct

SEQ ID NO: 56539 - DNA, 890 bp, Populus trichocarpa
  Intron number 2 from transcript POPTR_0015s13200.1 (locus POPTR_0015s13200) derived from phytozome v7.0 (chr-ID scaf fold_15; pos 13261031 to 13261920 reverse strand)
aggaccagtgttgaagctattttgctggtaatgtttttgttttatcttcattcctttttaactagtttttgtgtttgaaatgtgttataattgttaaattttgtaaaatgaagctgtttatgattgtgttttgcaattctactagctttgattgtgtttgtagtttgttagtttgaaaggtttgactgtgtttctagtgttagtagtgtgagaatataatctttgattgtgttttgcaattatactagctttgattgtgtttgtagtttgttagtttgaaaggtttgattgtatttctagtgttagtgtgagaacataatctttggttcacttgaaatgaagacaagaattgtccagccattttctgttaatggtacttattcacaatgacctctctatctctctgattactgaacaatatattttcccttgttttctttgacaattcgagggccttttgcaaaaaaaaaaaaaaagataatttttgggaataatttctatagataaatgttagattcataccatgtggagcaagtcatgctgttataatttgcctctaggatagctcaatgtcttcattttaggtggttgaaatatgtcttctatccaatatcgataagaatttctttgatgttgatgcttatgttgtgtcatgtcttcttttaagtcttttatatctgttctgtttgcgatagcaacttgtttttgccatgtcttctatataactcaatttcttctctgtgatcttgtacttatcgaccttaatcactcatggcctcgtctgtgatagctccatacatcttttttctaattattatgatctgtctcgtggtgcaatatattatcatcttgcaggtacaggaacacaatcatcctcacatacttcttct

SEQ ID NO: 56540 - DNA, 670 bp, Populus trichocarpa
  Intron number 1 from transcript POPTR_0009s06480.1 (locus POPTR_0009s06480) derived from phytozome v7.0 (chr-ID scaf fold_9; pos 6241217 to 6241886)
ttttccagtttcggcggctgatatcttcctctaatgtaaaccttaatctctctgttattttctcataattatacagcaatatgttcacctacgaaaaactatttgggcttaagccagtgtatttatttcaacgtcttgttcctttcctgtttgattaaatgcctgttagagagtactttctcttctttcatccccaatttcctagcacccagaacagtttattcttatgcattcaccataacgcttagctccaacaggaatttaatagtctaatggtaagaatcccaagctcgagatgtctccgagtcctttcaagtcctatctttactatctaatccaaaatttgaatagaaaagaaaggaaaaaatatatcattttggcttgaatgaagtcgataattcaagaatgtgaccagtttaatatctccatagggagatttgttgtagagcatgtcaacttggttgctgcgtataatataatttatatgatgatgtagtttctatttaatatggatataggcacctaagaggagcaagctttctctgattaaagagagaaagaggtggtgaagtttcctgggtattctttgatcttttcatttactccttttcattgttttattctcaaaaaaacagcgcagattgtcagcattagatttattttccaacaa

SEQ ID NO: 56541 - DNA, 838 bp, Populus trichocarpa
  Intron number 1 from transcript POPTR_0009s09540.1 (locus POPTR_0009s09540) derived from phytozome v7.0 (chr-ID scaf fold_9; pos 8400964 to 8401801 reverse strand)
ctttgcctcaccttagcattaaagacacccccattgtaaactctctccctctccctctatttttctttattgttaataatgtaaaaagggtttttgttgtgtgtgtgtgtgtgatttgtaaggtttttttttttgggaggggggggggtaaccaaaataaaggtggaatattttttcaatttattaattacgaacactgtttgtttggattggaccttggctaagtaagattattagttttgtgggtttctttttctttttgggttttaatgttttccttttaagaatggagaaagttagttttggggtgtttatatctagactaacgatttttttttttttttttgtgaacgtaatggttttgtttggtgagctactggatacttgagagttattgtactggtgaattgctaaatccatggaatcttttttttggttgggtttttttatttgctttttttgggttcatcttttgtttggttgctgagaaaacagaggaaaagtcaaagaattaaaagttcatgatgttatgttacatgttttgctgctcacgttattgaaaaaatgtgatgctgtaaggattttctttttttctttttccacataagttaaaactgatgcttgcatcgtagtgtgaaataggttgttgctaactggcagtgttaatgttcgtattttctccaaatttggacacgacttcatttctctgctctataacttggtggaaatcgctccaatttttttgaaaaattgaaaagagccactcatgatattttgtcttccatgggattgtattgctgcaggaaacttcctctgctcaatacatattgcagcagta

SEQ ID NO: 56542 - DNA, 465 bp, Populus trichocarpa
  Intron number 2 from transcript POPTR_0004s18390.1 (locus POPTR_0004s18390) derived from phytozome v7.0 (chr-ID scaf fold_4; pos 18298252 to 18298716)
ttggtatccgtacagcataattcccttttaattatcttttccttttctggagtcagttgttccacgttttcatccttactagatgcttacatcccttggctcatatttaaaagagatgaagaaactgataattgcaggcaggcagggtctctaatgagatttgctaagcaggaactttgctgcttcatggatgaactgtttatgaagttatataaacactgttgattttgtttttcttcttcctagtcttagatgcatgagtttgaataggatgtagaagagaccattcaaatgggtctgtgagcctgtaatatctcttcttcaactgtgtcacatccacattgtgtttcaacagtatgagaaaattatgatatattaatttttctctcataatttgaaatctaatatctagtttctgctttatatttaggtttttggtatccctacaaaaacatatttagcctt

SEQ ID NO: 56543 - DNA, 500 bp, Populus trichocarpa
  Intron number 1 from transcript POPTR_0012s05400.2 (locus POPTR_0012s05400) derived from phytozome v7.0 (chr-ID scaf fold_12; pos 5044196 to 5044695)
ctctcgtgccatccagaaactctgctctcttttgggtatttcatttttttatttgctcttattatgtttataattttcttcttatgttgtttactttaattctcaagtgggttttgtgaattatgtagaatttgatttgggttttcctttgttttgaagctgaacttgaaaagttgaaaccttttaagaataattggaatttgtgtagtttgtgtgtgtgtgtattggttatcccttcagtttttgttggaattagaaaactttagcagagttctcatgatataacttaaggatgaaagtatgaaatgacatacagttgcaataatattggaagagccaacgcattattgctgcatcaatatattgattctcaaatttctcttatagttatggaatgagtgacagttcgttatgtgcttcattatttagcttgctagtactctaagctacaaatttccgtgcactgctctgctgttgtacagacacggttggccctgctg

SEQ ID NO: 56544 - DNA, 1016 bp, Populus trichocarpa
  Intron number 1 from transcript POPTR_0004s09860.1 (locus POPTR_0004s09860) derived from phytozome v7.0 (chr-ID scaf fold_4; pos 8380913 to 8381928 reverse strand)
cttcctgcttttgctatcctcaattctcactcaaggtatgatctttttgcttttttcagtgttatggactatttgtttttctcttctgagtgtctttgttatcttttgaataaatgaatggatgagttcaggtgttttgtgtagtataacgataattgaattgaattgcaagtgtttgcttggggatcttttagctgtgtttatgcagttttgggaattcttgatgttactgcttttcaagaaaaactggccgatttaagtggttttggatgaatttctctttgattggaaatgggaagttgggttaccttcaattaagttaatgtagactttttatatatctgttgaatttctgcaaatcaaagatgccttttccacccatttgatattagagggattatattttggggttgcctttatgagagtttacctttgtgttgtaaatatatgaagtaaatcagtgacagcctatatttgtctaactgttattgtctactcgaaataagcttcaacataaattgagttatgtttgggcaattggggtcgttccactagctgaggcttatgatgattcagtaatgtagtgaggatctgtctcagagataagctgttgcattgctgcagtttctatgttcacacttcacctatatgtggttattttcttttctaatttcctccctcgttacacagttgattttcttagcatttctttcacttgaattgcttgctaagttcacagcaatgtattgtgttacctctctctattgttcacatgctctgagcttattgttctgttatgatgttatatcacagtatgatatattatgtattctatatgtcttgactagattaaatgggttccagttctatgaaattgttgtctttccaattgaagtgttttatgcgctgaatttgagtttgacttgtctctagagtgcaccacagaagtgaatcactcagtttatattcatgagcttgagggcttttcttaaggtttattttgatctcttatcaga

SEQ ID NO: 56545 - DNA, 700 bp, Populus trichocarpa
  Intron number 1 from transcript POPTR_0004s09670.1 (locus POPTR_0004s09670) derived from phytozome v7.0 (chr-ID scaf fold_4; pos 8188444 to 8189143 reverse strand)
tctacgtcttcttttctcgcttcttgttatttggggtaagtttctttcttgttttaactactttttatgcctgcattgttctgtttggtttcctggaaaagtactgaaagaaaataaaagaaaaacttaaacttgtgggttacctaattgagtagtataattctttggcttcattgggctgcttcttttttttttttttttttgagcatattgttttacttttacactgtattttattcaagcatgaaaacacaggttttttaatttcaatttcgtgataaaattagtgggattacgtgctacttctttgtttttgtatttggattactttttttttttttttttgtatttcttctcttgattgtgttcttattatgaattgggatttagaattttagtgaaactgaagcttaatgtcaattatgatgaattgatgatatcatgatagtaatatttatttttactctatatattttcagaaaaagtttccttttctgtgtcctgagattttcttaaaaaatattcattcttttctgttaatttttgaaccaaagatttttattttctttttgttatgatatttgatgattcttgtgcttattcgcctctttttttgctgcacctttcttgattttagttttgttcacataattaaaaactctgtttgtcactcttttctcaggttcagctgtccaaatcc

SEQ ID NO: 56546 - DNA, 865 bp, Populus trichocarpa
  Intron number 1 from transcript POPTR_0011s03270.1 (locus POPTR_0011s03270) derived from phytozome v7.0 (chr-ID scaf fold_11; pos 3410098 to 3410962)
atcatcacctacatctcttcctgcaccagcacaaggtaggccttggattgttattaactccctcctgcactttgattttgatgttttgatttagtaattttatagtttaatgatccttaaatcattcaattttaattaggtatggcaaaaaaaagaaaaaagaaaagtaggagtgcttgtaccatgtttaattaattaatattaacagtagagtaaattacaataataaccttcttgagatattataaaattatagagatcatcaagaaaaaagcctttttcatataaaaaaacatattacagaagctttatccaaaatgcatttgaaaagatatttaaattaaaaaattaaacaaattagagaaagaatataaaaaatgggacttggttattttattagtacatcagcaataatattaatttcagccatttcttatttcttatttttatatttttatctacttttggaatttttttttatttaactatttttttataacagcaattaaagatattttggatatagtcgaggtgttttgtcaaatattcaaaattttaaatgtttgctataattttataataggagttattgtaatttagccttaaaaatctgtttattattttttgtggtttagattatggaacatgataggatttgaatatattcttttaaaagaaataaaaattagctgattgttaagcttttgcgagtcatggggacaactttgctttgggtcataaggcctcaatcattgggactgtccacattcagaacacacaagtctagactcaagttcttcaacattttagggccacgttggtttatgcaggaaagaagagcaacacagttcggatcattgtcatt

SEQ ID NO: 56547 - DNA, 747 bp, Populus trichocarpa
  Intron number 2 from transcript POPTR_0004s22350.1 (locus POPTR_0004s22350) derived from phytozome v7.0 (chr-ID scaf fold_4; pos 21273676 to 21274422)
cttttaaggtaacacaaatacccttttcttttctcgtcaaatttatcttggaaattcgcaatgttatttgattttcttttcgaaagatttgcgattcatagctatgattattaataattatgatgattacttgtagattacaatcgatcgtggggaaagagggagggtgatagatctgcatttcttttctatctttctttgtattttgtttttttccaaatctgcaagttttttattactttttatttttgtttgaaatggaaatggaagtcattttcattcattatatctattttgactttccttgaaattgattttttatgttaacataacttgtgttagagtttggcatggtaatttatgtttctcgtgtcatgtttttcacccttggtgaaaacacaatctggtaattacctttatggttttcttcggtatcttcttatttattgcctgtttgagttctgattttttttttcttgagaaacaattaatcatgcatatagcatcttgaccttttctgctcattgcatttataaattctgatatatttttggagttctggtatggttctccgttgactgatctattttatatttgcctatttattttgtacctcaagtggttgtgcgcataattatttgactaattattgcttttgactagtgacttgattttttcttaaagaagtggacaccttgctgagtacgttactcgtcttttcagattagccaaagggtttttgagctc

SEQ ID NO: 56548 - DNA, 777 bp, Populus trichocarpa
  Intron number 2 from transcript POPTR_0004s03270.1 (locus POPTR_0004s03270) derived from phytozome v7.0 (chr-ID scaf fold_4; pos 2210805 to 2211581)
ccagttgggaaattacaggttggttttgttgtttgtttgctattcgagttgtgttttgaaagttttgtgtttgagttttcgattgattggtctttgtaggttttgccaaataagagggatgcagtgagattgaggaaggggaagaggaagtgccattggtgtaggagtggatcaaggacattgattaggtgtttgagttgtcgaaaagagttttattgcttgtgttgcatcaaagagcagtatgttgttttctccatgttaatttgtttaaattggcttgtattctttgttgggtgtctgatggcttatccctttggagcttgtgtgataaaagttgtcatttttgtatagaacattcattataatatgtggattgttaattaataattgtatcctgtaggccagctgttttctagatatatctctggcttgtgctcaaaacagtaactataagcacacatcatgtctctctgatttcagcttagtgctccgtctttaggattaaactctgacttttgattctttatttttgaaatgaatttaggtatttagagacacaagaagatgttaggatgaaatgtccagtgtgtcgtagaacttgcagctgtaaggcctgctcagcaattcaatgtagggacattgaatgtaaggtctgacttctaattttgccaagcgaactagtgctttcatatttcttactgaaccatgctgtctctaaatatatgcaaaaactatgtttcaggacctgtccaaggagagaagtaaagttgacaaggt

SEQ ID NO: 56549 - DNA, 843 bp, Populus trichocarpa
  Intron number 2 from transcript POPTR_0009s09010.2 (locus POPTR_0009s09010) derived from phytozome v7.0 (chr-ID scaf fold_9; pos 8105114 to 8105956)
gaagggtaggcaccaacaccctctctcccatttctatttcatttttgcaattcgaaattttgttatatctggttttgataatttagatccgggacgatgtttaatctggattcttgttcaaaagaatcgagtcaactcggttgcttacatctcgtgtttatcttgcggctgtcgaaaagattaggtatttttaggtttgaagtttctatattgccgtctacggataactgatgaagaaagatggtttgttcatttaattttctattcatatcttggtcaaacctgacctttttttgtatttccgatgttttggaacccgccacagtaatagagtatcacgctgcaacgttgtcagagttatcttaactagactgctgctagtttgttggtttagccatttttaataaattgcttgcttgttctgagtcacgccctgaaatatatctcttagcagttcaattgtgttgtccacatgcacttgagttgcgattgtgtaatgggtgttgtgatcgtgttgccccccatatacttgagccgtgccactgattgtgttgtgtgtgtttgtgatagtgtaatgtcatgctaattttttgttttctgggtttatagagttgtaaatgcagaagttgagtttgagttgtgtgatggcgtctctgctttctgtagggctataatttcatggcgcagtgtttgctctgggaaattatttcgtgtctttgctttctctagggctataactccgttgataatgtttttgtcgcgatatatcataatgatgttttaattttatgtttgttcttttgacacgtagtttggctgctctgtgctgctgctgtctcctgg

SEQ ID NO: 56550 - DNA, 765 bp, Populus trichocarpa
  Intron number 1 from transcript POPTR_0011s14150.1 (locus POPTR_0011s14150) derived from phytozome v7.0 (chr-ID scaf fold_11; pos 16676441 to 16677205)
attatcttcttagcatcttctctgcaactggagaggtaatccaaaatttaattttggttttaatttttttttaaaaagaagctttaattttaatttgtataattgtgtacgtgcctgtgcttgagaaagaaagtaaattttatggctggtttttttacgagtgtggcatttcttttttattttgttaactttcgtgtggatatatagatttgtgtgtatttgctgtgaattgaaaaaacttttaagaaatcgagaattgttttgttttgtttttaatggcgatctctttttgagaattgggttttttgatggaaacaataggttattgatgcagtataaaaaatagagagagaaagaaacatggggtatgcttgtttctttgaattgggtttgtgttgataagaaaataaatggtgtatatgcacttgtaggaaaacgagaattgttttgtattgttgattaatggcgttctcttttcaagaattgggttttttgatggaaacaaggggttattgatagtcaaaaaatagagagagagaaaaagaaacatggggtatgtttatttgtttgaattgtgtgccgtgttgatgagaaaataaatggtgtatattatagaaagaattttgacaagtgctatacttgttttgtgatttggatgcagctttacacactgctcagctacattgttgtgttgttttctgagttgtcttcctcttgtcatgtataacagattgttcaagctaaggttattcgtaataagcaaac

SEQ ID NO: 56551 - DNA, 998 bp, Populus trichocarpa
  Intron number 1 from transcript POPTR_0012s00630.1 (locus POPTR_0012s00630) derived from phytozome v7.0 (chr-ID scaf fold_12; pos 314763 to 315760 reverse strand)
attcgcttcagtctgtgagtgtgaggttggatggaaagagttattcgtattggagttatgtgatgataattttttttaagagtaaaatgatgaggggatatgttagtggaacttccgtgatacctaagaatactaatgaaggttatgctactttgatatatgtatggaaatgcaaagattattatttggattaacaattatgttgagcattccataggtatatagttggcgaagtatgagacagcaaaggagatttgagatcatatgcaaaggttatcacgcaatcaaattttgcaaagcaatatcaattagagaatgatatacgagctcttcaccaggaaaatatgagtatacatgagttttattctactatgatagatctttgagatcaattggctattatagaatcggcagaattaaaggcatgtggtgcccatattgctcttaaagagcaacaacgattgatacattttttaacagtgattcgcaatgattttgaaggacttagaggttcaattttgtatcattctccactaccttctattgacttagtcgttagtgagttattggatgaagaaatatgtctttagtcttattctgaaaagagaattctttttatttctaatccttatgtgctaacagtattttctaagtcattctctaataataaaaataagccttacataagggttgccttcgacgagtgctgtttctgtaagcagaaatgtcattaaaagacttagtatctcaagttaagacatcagaattaagcttggaagcctggctatcagttacaatctaatgcttatagcagcaacaatttcatcgggtcttttcaccgatcctagcattttggttgagcaattttagaagtttctctccttacagccacaacctatatctgcttctttttctgtatattagttgcctcatagttctttaaatatgtcactttctgaataggttttagattttggtgtttcacgtcatatatctct

SEQ ID NO: 56552 - DNA, 812 bp, Populus trichocarpa
  Intron number 1 from transcript POPTR_0004s00340.1 (locus POPTR_0004s00340) derived from phytozome v7.0 (chr-ID scaf fold_4; pos 95719 to 96530)
agatatctgtgacagctgcaagaaaattttctacatcttttcagattggtctctcctgactacattccagacctcttgatcccaattcttctgtcttatcttataacatttaaccattgcattggaaaacactttgtttttttgctggaaataaatggtgttcacaatggatttattgttaattcttgtggttggatatttcttttccttgatttctgcaaatttgctagtagtgaaggcaaatgtgtcttccgcctattgttcttcttcttaggtatcaccagccaactctccatcttttcctaaataagctggaaactctttgtatagcaatttctgtgataagcttgtatattgttgctgcatggtgtttctgcatcaacttttgattgttcgcaggccaaattatcttaatcttctgatactgaaagaattgacctatgatcttttgatattgtagctgcagcttgattgaattattgcccctatattaatgcctataatatcttttgtttctttgtttgtttctgttttaaaatactaaattctgtgttgggatgatacactcacagagagtacccatgtatggaataagttatgcaagccttatgcgatgttgcgtgataaagaaacacatttagtttatttatccattttcttttactcaaatcttgagatgatccttacagtactttcctcaaatatccaagatgaaaatgctggttgcttttgatgccataacagataagttgcggattttgtgtgttgtagttaagtttgttttttcaacatccttcaggattctccaaaag

SEQ ID NO: 56553 - DNA, 258 bp, Populus trichocarpa
  Intron number 2 from transcript POPTR_0009s06560.1 (locus POPTR_0009s06560) derived from phytozome v7.0 (chr-ID scaf fold_9; pos 6313836 to 6314093)
gaatcagaaggtgaaaccggggtaagtatagatggcgattcaattagtttttggtttgattgaggaatttatagaaagagagacagtactgttgctcacttaaagcttgaactgtgactgttttctgtgatttttcttcttagaatactctgggtgttttagtctggtttaggtcactcggtggaactaggttcattcagattccttgtatggtttctgaaataatgtgcattttgcttggttgcgcaggtgaagccc

SEQ ID NO: 56554 - DNA, 913 bp, Populus trichocarpa
  Intron number 2 from transcript POPTR_0009s02250.1 (locus POPTR_0009s02250) derived from phytozome v7.0 (chr-ID scaf fold_9; pos 2968879 to 2969791 reverse strand)
ctcgacgaggtacgtacatatatctgtgtttataaaacaagttgcacatggatatctctgactgcttttctttgatggctgctttagatttttcatctttgaagatgtaaattactaaaaacttacctttcatatgctccatgtaatttcacgtgtgccatttcaatagtggaaattgaagttcggttagaactagagtaaggtctttgtcaattgatttttgtaccttctaaagatgaattcatcactaaaaaatcttgttgccactaaatctatatacaatccaaattaggccttgctattactatatatatgtagtttcttttctcgtgaaatttgaaattggatgcttattcctgttatggctccatgttcttcaacttgtaaacaaagattagattttatctagcaatcaacgggttgcatttgggttcatcttggtggtttcatggacattaacaattaaatcttgaagaagaagaagaagaagagatgacttatagcttagaacatgatggaaatttgtagagcatgagattactttcattaatatataaattatatatgttcgtcttttatggctgttaagttaggtcccagtaaagagggtccattaacaaagtcgatttcatttcagacaaactatggtatctctggttatatcaattaccccagctgtttttcttgtttcttcctttttctttttcttcttttttgtgtggttgtgaagaactaacgaaatgcaagttacttgaaacatactataaagtcatagtcctactttcttttcttttctatccctagactaagtgctcaagtctaatgtggtcctatgtatagtacttaaaatctgttttcttgctttggaaactttcaaggtggaacaaagatacaggcaataccaccaccaaat

SEQ ID NO: 56555 - DNA, 466 bp, Populus trichocarpa
  Intron number 1 from transcript POPTR_0009s02030.1 (locus POPTR_0009s02030) derived from phytozome v7.0 (chr-ID scaf fold_9; pos 2650455 to 2650920)
gcttccgccttttctctactctcaacaatctccaggtatctaaccccatatctcggaggatgaagattcaacttttgtcttcttttcctaatgttatgttagctaggtttttttttccgcacaaatcaatattgatggaatagtttttgattgccatatatagtggatgtgctttctttcttattttctgaaaaatgtttgccattaagaagataccacacaagttgatacttggaaacgggtaattgattttatcatctggtaaataaaacaactctggcattgtgctttcagttgtcagtcaagttttaccccttgtgtttctcggcgataatatgttaagtttgacaaagtcctttttggtttaatcacttttcaaaattttaaatttattactaaagacaatttgttctagttatatcccatttgagtaacactatattggcttctaaatgatgaagggaaa

SEQ ID NO: 56556 - DNA, 688 bp, Populus trichocarpa
  Intron number 1 from transcript POPTR_0009s15380.1 (locus POPTR_0009s15380) derived from phytozome v7.0 (chr-ID scaf fold_9; pos 11914270 to 11914957 reverse strand)
tgacacccgccgatttcgccaggatccagcaacaggtttgcttctgctcgtttgtttttgtttttttataataattttgatgtgggtttgtttttaattgaatcaattcatgtgtagttcagttcaattttgggagaaactgttttttctttgtgaattttgatttgattatcgtttagaatggaaagtttgaattttggctgttgattttttgttttttatggttaaacctagcttttttgtgtgttttttgttgaatttaaataatgggctgtcctgtttcccttattttttgttcgaatcggtggagattttagaaactgcaagtttaattctttgagattttgtggtcgtgtgttggtccgaggtttatctgacgaagtgtgtgcacccgagttccttttcataataataattctttaagattgtggatgaatctaattgatttgggtacctttagtcctgcacaaatcagaaacttagaaagagaaaagggaaaagaacaatcattaatggctcgttaagcacttaagatgaatatattgtaatgttgcgtcgtgtttatctgaattgactatcggtagaaactggttgtcagtttatctggtgttgtttacatccatggtttggtcagattgtgattgtattgattttgattgttgtggtgtgttggttggtgttgcaggta

SEQ ID NO: 56557 - DNA, 295 bp, Populus trichocarpa
  Intron number 1 from transcript POPTR_0015s08710.1 (locus POPTR_0015s08710) derived from phytozome v7.0 (chr-ID scaf fold_15; pos 10028765 to 10029059 reverse strand)
caatccacaacttctcatttcctagctagcaaaaggtcttcgtcttcttcttcttctttcgccctctcattttgtgtaacttatgcttcaactttttatgtttggtatcaagaaatcgttcacaatattctgttagatttacctattcaaatatcgtgtgcattgcattgagaatgaattgtaaaattttctatatgttattattctttttatattatcattattttatgattgagtagagcttctttaatataaaaatgtttctttaattttgatttcatgtagatatacaggc

SEQ ID NO: 56558 - DNA, 673 bp, Populus trichocarpa
  Intron number 1 from transcript POPTR_0011s11300.1 (locus POPTR_0011s11300) derived from phytozome v7.0 (chr-ID scaf fold_11; pos 14023669 to 14024341 reverse strand)
ccgtccgatcgacagggacttcaacggtatcgaacaattctctttctttcttaaaaaagaaaaggtttgacattttagctagttatcgcttgaatcttgttaggttcttttgcttgtagatttagaaatgagaacttgagttcttggttttcttgtttcatgaattaggatttttttttcttttttaattcattgatagaaaacaaagaactctaaaagaaagaaacaatgctgatatgttactcatcttctataaattttagcatccaacgagaagagatctcaagattctaaatttcaagctaaacaattgaggatttgatgttttttcattaaggaatgtacatttggggatatattttgtccattttcgaggagaataaaatcaaaaagaggtgtgaatgtgatcttgaacagcaatctgtacatcatagtctagttggatggtttatgttatacaatatactgttgctattgctgaactcttgatttacttcctgtcaaaaactgtgcaatatagtttctttttttagactctggttgtccatgtttttgaaaattgctgaaaactagtaacttgtagaaggccttttttcccccatcatattttggtaatttatagattaattggcttgcaggttggaagaatctactggtttggctttcaggttta

SEQ ID NO: 56559 - DNA, 372 bp, Populus trichocarpa
  Intron number 4 from transcript POPTR_0011s15120.1 (locus POPTR_0011s15120) derived from phytozome v7.0 (chr-ID scaf fold_11; pos 17289556 to 17289927)
aaaggtaaatacttttgtaatttctgtctttgttcttatattttctgtttattttgttatacatcaagaaatttagagatgaactatccatgagaaataagttgactttgctgttgctttgtcaccatgaaattccaatgatttgctgtatttcagagcctagccatctcttcagtatcaaatagtaacataatgcatgttcttagtgcaaggatctaacatcaaaaaagaaaaagaaaaaagaacaatcaatgctaaggcttctagagttaatatgatactgttgacctattaatctgctgtttcgaaaactgagccagctttcactgcatcgtttgtgtcgaatctacaggtactgctttcggatacctg

SEQ ID NO: 56560 - DNA, 341 bp, Populus trichocarpa
  Intron number 2 from transcript POPTR_0004s10710.1 (locus POPTR_0004s10710) derived from phytozome v7.0 (chr-ID scaf fold_4; pos 9238697 to 9239037)
ctgctcaatctgcaaaggaatcagtgcaagaggttcacatatttttgttcaatctcatgttctatatttttttttagagaattcattctcaccacaatggcacaatggattgtgcataagatttaagaatgacaataaaccaaaaagaaaacgaagaaagagtgaggaacactcgtgaataaaattcgcaaaactctaagtgttaataattagttgcatattttggcacagatattcttagcgagtgagtttgcagtagggtttttttatttttattttaattttgatagttctttctttgtgtaggctggtcagcaggtgagggaaaaggcacagggagc

SEQ ID NO: 56561 - DNA, 411 bp, Populus trichocarpa
  Intron number 2 from transcript POPTR_0014s15460.1 (locus POPTR_0014s15460) derived from phytozome v7.0 (chr-ID scaf fold_14; pos 11519171 to 11519581 reverse strand)
gtagctaccggcccttgaagtcgaggtaataatttatttatttttacttatactacattctaaatttgttcttcgttttttactgtttgtttgtttgttcatttgtgggttttatgaaattattacatgtttgtaatttccttttgtttttcatttttccctttttcagcacaggtgctttgggcttctctgattctttattttgatattgggacttgaatgtaagatgataaaattcaaagttagttgctactttgagctgacgttgtactttcctgtaaccaggaatagcaggtggagctattgctggcataagtatagcagcagtagctgtggcactgttgttggcagttcttatttatgtgggattttacagaaagaagaaggagaagggagcaatattgctgtcgg

SEQ ID NO: 56562 - DNA, 332 bp, Populus trichocarpa
  Intron number 1 from transcript POPTR_0014s15460.1 (locus POPTR_0014s15460) derived from phytozome v7.0 (chr-ID scaf fold_14; pos 11519591 to 11519922 reverse strand)
tcgagggactggtgtggtttatattcctaccaaaggtgatttgtttatttgattatttttagaagaatcggagagataatgttttgttttgataattagttagttgggggtaattgaattagggaaattaattaagaaaacacacaattaataagtactggggtatttgtttggagaacttagtctatatttcacggtccggattattaaatttatgtaattgaatgttcattaaattctaaagctatttattgatgcctgaaataacagtttttagcagttagatgctatcaatttgtcttaccgcgaatctgtttcttctttatttacag

SEQ ID NO: 56563 - DNA, 319 bp, Populus trichocarpa
  Intron number 1 from transcript POPTR_0012s05560.1 (locus POPTR_0012s05560) derived from phytozome v7.0 (chr-ID scaf fold_12; pos 5198252 to 5198570)
aaatcgaaagattgtcgtctgcgattaattaattggtaaacaaacaagcatattttttttcactgatctgttgtttgccttttgatatcccaattttttttttttttttgaggtaatcagatcagattagattcgatggattgctgtgtttgttagaatcttaaataataataaaatcatagattataaggtgaattggcttcttcttctttttcttttttttttgggggggggggggggtgttgattatgattgaataataaataaactgtgttgttttgcaacaggtagacagtgtttatctaagaaaaaaaaaggt

SEQ ID NO: 56564 - DNA, 572 bp, Populus trichocarpa
  Intron number 1 from transcript POPTR_0009s08790.1 (locus POPTR_0009s08790) derived from phytozome v7.0 (chr-ID scaf fold_9; pos 7926136 to 7926707)
tccttgccgacctctgcatacgcggcaaccctaaggtctcgctaaatctctctctcgttaatttcagtgaagttaattgtcgtgtagttttttttgttcaattagtgatcagtgatagagttactagaaataagcaaagctaatttgaattaggtttttgtactaattactaattgagttactagaaatattagaaatcaagaaaggtgaaagtggaaacgtgagtgcgttgagttatgcgttttgttgttttttctttgctaaattaattttcctggtcttgaatggaggggtgtgtttcttgtcaggtttttttgtttaattagttattcgtgattgatttaatacttggtagaaattggtacaaagaatttttaactaggcattcgtattaattactaaccagtattgaagttatagaaagaccacaacagagaatgagaattttaggcttttttattgtacgtgttgctctttttttttatttaaatttttgtatgattttgatggtgaaatgctcgtgctgttatgtaaaaggagggcgcaacattagcattgagaaaacatctaga

SEQ ID NO: 56565 - DNA, 567 bp, Populus trichocarpa
  Intron number 4 from transcript POPTR_0001s02880.2 (locus POPTR_0001s02880) derived from phytozome v7.0 (chr-ID scaf fold_1; pos 2276634 to 2277200 reverse strand)
tgtttcagagtcgaatttcaggcaacaatccttttctttgtctgttattgagcctccttttgtcattttcaatgcattcaagcttaatagcatatgttgtctcttgaatgtatcactcggtcctattgcctgtcaccagtttcccttttcattaggattttcagaaatttgagctaccccaagagtaaaatttcgaggtttacttacaaaagattaagctttcgaagtatttgtaattgtgggtcagaaatttgagctatactggccattcaaagtctcttaacattctgcaactctcatctcagtgatgttgcttttcttttctttcttgtgtgtgagcaaggcactttttgtgatttaagattctgttgcaacttgttattgacaatttggtttcttgaatttggaagaaagctgttttgttatggttctgctgaaacataaagaaatagttgatcatatgcttcctagtggacttgcaaattatggaaagatcattttatctcatctgattacatacaaggccagtttgtgatcatctgttgttttgatgtttaattgatccag

SEQ ID NO: 56566 - DNA, 572 bp, Populus trichocarpa
  Intron number 1 from transcript POPTR_0011s01150.1 (locus POPTR_0011s01150) derived from phytozome v7.0 (chr-ID scaf fold_11; pos 675216 to 675787)
cttgggccagtgtacatcagtgcccagctcttaagtcaagtctaaaatttattttaaaaatacagttatggtttctttttaaaatatttattttattaaaataatattttttttattttttaaaaattatttttgagataaatgcatcaaaacgataaaaaaatatataaaaaattaatttttaacaaaaaaaattatttttttaaaaaaacaactacaatcgcgtttctaaaaactcactaaagatatcaacgccgcctcccaggccccgataacactaacaatcactaatttctctactaattatatattttcttctacagaattattttttaaaagaccaagtacataaatacacacaacaaaaccaggtaagcaaggtaaagttcaaactatcatacaagccaaatctcatccgtgccacaaaaagttacacttagccattaaaagccaaactaggctagaggtcgtacacacattcgaactcacgactccgtttcatttttctctgtacgtggtgacttttcacttacatagtgatcgtgcgccgctgcaggcacacatcttctgcg

SEQ ID NO: 56567 - DNA, 1043 bp, Populus trichocarpa
  Intron number 2 from transcript POPTR_0015s00235.1 (locus POPTR_0015s00235) derived from phytozome v7.0 (chr-ID scaf fold_15; pos 61538 to 62580 reverse strand)
tgcaaaagctcaatagttttgaaggtgggactccattagtatttgaaaaatttgatgtccatgagagtttggcatagataccaaatgaaaacagaatatatatgtcagtattgatgttgtcagcactggaaacatcagaagttcgagcttgcgcatgtatacatgctaaaattgtatgccctaagagacagaggatacagaacctttcactttctcagatgtttacaacaaggatcctttttgcaggtctcataggcatagcccttcttctctttctgatatgtctccaagtccaaatttgcacatcacagattaatcatctttgtgctccatcttcttgtggtaatctccataacatcagccctccttttcggctaaaaggagatccaccaaactgtgattaatctttatatgagctagtttgtgagaaaaatcaaacattcctgcacttgtattcaggaaaataccttgtacagtccatcaattaccataactccataattagagttgtcgacgcccgtgttaataaggataccttctcctctctccctcagcattctttgacgggaaacaactgcagttgtgaagacccttttgcctggctttgattcactaaagagtcacgtccgctaattattttcatgaagtgtgcaaatccagcgaagtctcctcttcatgcgaacacatctccttggaacactcttatgttctaattactgataatatgaaaaaagtggagcgcttgtgcggagtgaaggtgactgctaagacatcatttccgagaagatatcacagaaacatttcctatagggacatccgcaaaaggcttgtttaaggatttaaacttagatggtatggagttaaatgtggtatttgcagaggaaaggggaggtgctacattgaaaacaaaggtcgtacttcaatagttttcttgtaacaattttctctgatctgttaatttcatgttcttatttgatgattttattgtattgtcattttgttttgcagatattgttattgctgaagaatttctgcaacatcag

SEQ ID NO: 56568 - DNA, 929 bp, Populus trichocarpa
  Intron number 2 from transcript POPTR_0011s07560.1 (locus POPTR_0011s07560) derived from phytozome v7.0 (chr-ID scaf fold_11; pos 8386140 to 8387068 reverse strand)
catctcttcaaattcaattcctgcatttcgtagaggtatatgagttatcacttgtatgttcttgaagtttctttcttttcttttgttttcttgttattaatttattcatctatgcgtatttgcgtgtgactgttactcttgcggcttgagatgcgatgatttgatatccagttttagttgagaagtgaggatttgttgtggattcacataatagaatgatgagattgcaaacgataccatctctcgtgtgttgtttttagaatgggcttccgtagtttcacagactactggatttccactattgaattccaaaaggtcaaagaaagaaagattgattggaatagaatggaataatcaagtagagagagctttaagaagtttcagattgtgataagttttctgggaagatgattacatcaacagcatccatttgttgaatatgatttcaattgtttctgtggaaagtgttgctgctctgcatctttcctttgttgagaatttccaagcataagaataaagcactcagtggtctgcttttttatggatgtcatatactggtaaagtcagaactcgtacgctttaaattatcatttagattgaatctcaaaattatctacaggttcgcaacataccatcaattgctacaaacacagcttcatgcattgtgcatgatatcgtttgctgaatttttattgcatacacaccagacattcatggaagactataattctatttgcctagtgaggtttcttcatgggcttttctgaaaatatttcctgtcttttgctcaatgccaagtgaggaggtttctctttatcaatctccagattggtatgagatggctttgtgcctttgttgtgacaattgttgcatatgctataataagatcaaatggtgcagggtccatacctggggtcacatttggccaa

SEQ ID NO: 56569 - DNA, 652 bp, Populus trichocarpa
  Intron number 2 from transcript POPTR_0009s14500.1 (locus POPTR_0009s14500) derived from phytozome v7.0 (chr-ID scaf fold_9; pos 11359215 to 11359866 reverse strand)
gtgctactgggcgtccagaagagcccattaaaacggtatgtattatgtaatgttttgaaagattcatatctgtttagtttcttcatttttggtttctattaaggactctattagcctagaaatgtccatgtgcataatgccttgcctcaatagcaactgtttgtttgttcatagtcttaagaaagcaatggcatctgccttgtattgaaattgaattcaagaaaaagaaagaaaaaaaaaatccttttgtctgctaaagttttccacataaactggagatggtgtggtgatgccctcttctattagtttttacattgaatatgattggatcgacccatagacctttctcatcttccatgtgttgctcgatattttttctttcccagagttttctttcttcacagttattaatattttccatctggacagtgttttgattctaagaagaattgagtagcatctgccttctttaaaaatgaacttttctaagaaaggttaatatcttcgatgacctttatatttttcctctgaatgtaatgcctggaaatcttacgtggatgttcctgattgtgttttaatatgttcttgttggccttatctgatccatatattctgtttaggtagactgggaaggaaaagttgctcttataca

SEQ ID NO: 56570 - DNA, 999 bp, Populus trichocarpa
  Intron number 1 from transcript POPTR_0009s05670.1 (locus POPTR_0009s05670) derived from phytozome v7.0 (chr-ID scaf fold_9; pos 5725772 to 5726770)
tggttacactgtcaaggcctctgttcgtgacccaagtcagagtcactcactctcacatgcgctgtttctttcttgtttactgctatttttttcttatatatataaatagcatatgaattatgatgttttttaattgcaaaattaagatgaaagcgatgatgggttttgagagaccagattatattatttttttcttttctgttttaggtgatcgaaatttttgcaaagaaaatgggtcatattatatatataagagggtggattttgttggaagtagaaattgttgttgattgagaattacagatagtgatttgaaagttcttatcgttcttagtaaagatcaaaatcatgaagcgatgatgatcatgtattctgacattacctgaaaacatgaattgtttagcaatgagaaaaaaattgcttcttatcgatttcatgttatgagaaattcaaaggtgattaaattgtcgttgcaaatgtcagattggtttggcatttaagcccatgatctcccctccctgtttagtaattgtccagcaatgtttttggcatgtatcttttgtggatgttatttatttatttatttttatccaatttgaaccatcattcgacatatattgaataacttgtcatgtgattcctgaagtctctcatgtttattattccatcttgttttgttttcccttaaatacgaacatgcaaatccatatgcaaaatgctcatcactaaaacacaaagcttcctcgtcatacgttaaatcacacccaacactgaaagtaatctattatagtgtaccttggagaaatttaaagcgattcacttctagtctgggcatatactccgttgatcatgacagagtggcccagcttatgttttttttttttctgtgaagatgacttgggtgaaatagtgtacttgttgtccatcacaattgatctttaccaaaaatagcttgctatttcagttatttactaactgctttcaatttatattctgtag

SEQ ID NO: 56571 - DNA, 308 bp, Populus trichocarpa
  Intron number 1 from transcript POPTR_0015s04510.1 (locus POPTR_0015s04510) derived from phytozome v7.0 (chr-ID scaf fold_15; pos 4632685 to 4632992 reverse strand)
tactctcttcactcttatattctcccacatttcaggtactaactcgtgccctcttcgcttttgagtccttttttgcctgttttcttaggcctaagtaaagatctagtcttttttaaaatttccctatattttcatgtgctgttgtttagtttggcctagaccataccacattgcctatacacacagcttcttatgagcaaatatatcagttcttaattgttgattattgttaacattctaattgttattattatttgtttctacataatgcagaggtctcatcaacaacaataacacttcacaacaag

SEQ ID NO: 56572 - DNA, 475 bp, Populus trichocarpa
  Intron number 1 from transcript POPTR_0014s10260.1 (locus POPTR_0014s10260) derived from phytozome v7.0 (chr-ID scaf fold_14; pos 7686119 to 7686593)
gaggtaatgtcatctcataaaattctcatcttgtccagcaacattttaggcgatgggttctgggatagagtggcatgattggattattgaggtagcaaaaatttctgctcaggcttaatgcatctgatctgacaatattatcaacctaaatttattctcctttttgtgttcctgttttgatactggaaagttttttgatatgttactatatttggtttatggcctattcttctcaatcaaaataacatgctttctcagagttcatagaatagagtttcacactatatattagaagttttagagaaacatttgtcccataatagaatattttcccgccgaggtgttacccatgattgtggactactgccaaattgcggagcagatctttttcttgtatttttcttctttgttgaggatgctaacaaatatttcccttgcagttggagaaggaggctgttgttaaaggtgttccaat

SEQ ID NO: 56573 - DNA, 602 bp, Populus trichocarpa
  Intron number 1 from transcript POPTR_0015s01180.1 (locus POPTR_0015s01180) derived from phytozome v7.0 (chr-ID scaf fold_15; pos 739926 to 740527 reverse strand)
cgatcctggttttgataaggtaaagactcgattttcctattatgtgctgtttgatttccaagaaaataaccttatttttattcattttaagtactgtttttgtttctatgaggtaattactgaatttttctatcatggttgtttggtttctgagaaaagaaccatactttcactgccttttaagtacagtttctgtttagtttgatagtttgatattattctctactttgtttgccatctatctatctggaatagcttagagcttatagtgcaatttctttaagcttaatttatcattatgaataggaaataacaataggctagtatcttgacatacagtaagtgcaatattgattagatgatttactggataatgatgtgaatttggtgttaatccttgtgttagaaaggaatcgaatcagaagatggttattggtttttcaatttcatttcgttcagcataatctaagatgttatgggagattgaggaaatttgtggtcattgattaaagaggattgattggactttgtaatttttttttcaattgttgaacactggctgaataggtggagccgtatctggacatcactagcatatacta

SEQ ID NO: 56574 - DNA, 956 bp, Populus trichocarpa
  Intron number 3 from transcript POPTR_0015s11720.1 (locus POPTR_0015s11720) derived from phytozome v7.0 (chr-ID scaf fold_15; pos 12268503 to 12269458)
ttcttgcattgctgatttggcccttaattatacaggtaacagactaaagttgcacccaatttctattgcttagttttgtagggcttgtttctattgctatccatttgagaacagttcatattggtgtgtttctgatttattagcatttcacaagacctgcaaatctttagcccatgcagttagcagaatttaagcaatgttttgagtatggtatggtatgtctttacagcgatgcatttttaaatttagctagatgtacagtacttggttttgtcagagccatcaagttccccagtgtttgttcaatccaagcattgcaccaaacttgacagaatagctgattattatgcatatgtgacaaagctgattttatggtgatttttttaccgcagtgcatcatccccaacactttcatttagcacactgtactgtaatatgtctgatgattacgttcctctttgggtcatacctgcactagcatggaccgagttaatgctgatttttgttggtgcaactatgaaatgatggttgcacacttatggggaacaagtatccttctacctgattcttttgagcttagtttgacagaggcttggtcaagctgacgagtaactgttcattcttgtgatgttaactaactgagttgggaggtttaatgctgctcattgcatattgtcttctaattccttgtataattcttcagtggcaggtcaaactctactaactgattcgtaatggaacttgccataaggaaaaaccactaataaacaatcgttcctaagcagaattatgcattttatgaatacaattccttatgatgcttccttggaaaaaattctaagctgatggagaagttatatttgttcattgttagataaatcttgattaaactaatgaagtgggtgctcttttgaaaatcagaacaacttgcgaaggaacttgaggcatttgcacag

SEQ ID NO: 56575 - DNA, 410 bp, Populus trichocarpa
  Intron number 1 from transcript POPTR_0011s02750.1 (locus POPTR_0011s02750) derived from phytozome v7.0 (chr-ID scaf fold_11; pos 2685263 to 2685672)
cggatcttggagggaataatctatctaaggtttttccttgattgtttttgttttcttgtcagtttggttccttttgtgtttttatttctgggatttctttatttcgttgttttgcttcgtgggggtttcgtatttttttatctgatgattgtttttattggcaaatttaagtattttttatataataaactgaatgtctctacgaaaacggtgaagatattattcttgaaagtttaaattatgcttttagtttattttgaattgagtggtatgtgggggtcgattggatttggtatttggcatgttgtttgtttatttgttcgttggatttggtatatgtactttacttctgattgttgtaatgtatgtttgcagattgataaggagaaagctggtgtgcttgttggaac

SEQ ID NO: 56576 - DNA, 652 bp, Populus trichocarpa
  Intron number 1 from transcript POPTR_0004s14940.1 (locus POPTR_0004s14940) derived from phytozome v7.0 (chr-ID scaf fold_4; pos 15581877 to 15582528 reverse strand)
ttgtgaaggatagcttgaggtttctagatctagaggtgaatttgaagttcaaaacttagaagttggctaaattttggtcatgttttgtttctgtttgttcgcagagaaaatagaggaaaaaataaacaagcatttgagatgcttctggaatcttcatgcgagtttaaaactcttctcagtttgcgtaaactttcctttgttttctcagtgaacaaacagaggcgttcgttcagattctatcatggaatttaagttttgcagtgtgttgcagcttgttttgtgaggaaagaaagaaaaacaaccgggaagttttagattttgacaagctttatgaatatgaagtttttctcagtccacacaggtttttctcactaaacaaacaaagacatacaaaatttgtgacgtggtttgattttacagtttgttactgtttgtttgccgagaaaacgaagggaacaggatttcacactctctctttcaaaattaaataagttttgtttgttcgtggtcgttactattttttcctttattctttaaatctcagtttctcgcgtttagataagagtaccgaacattaattagcagtaataattatgaaatcttatttatatttgcaggcgaagagtcccgaaacggaaagctcaacgtgcaa

SEQ ID NO: 56577 - DNA, 353 bp, Populus trichocarpa
  Intron number 1 from transcript POPTR_0012s10990.2 (locus POPTR_0012s10990) derived from phytozome v7.0 (chr-ID scaf fold_12; pos 11617950 to 11618302)
atcttaagcaacgcctttcttattataaaactcaggttccttcttcttcttcttctttaattttcaaatctcttcatttcgtatttttttcaataaaatattgtttatttttggtcttttttttattgttataattaaattttgggtttttatctgatttttctaattatcgattggaagttaacagaataaatcaattctcgaatattaagtaggtttttgattgtttgatagattgattgaaatagaaagaaaaatgctgaaattagtggtttaattaacaaaattaaatcggtgcttgattatttgcttggaaaggtgtgcagcttgttgaagcggagaagaggttagag

SEQ ID NO: 56578 - DNA, 963 bp, Populus trichocarpa
  Intron number 3 from transcript POPTR_0012s10990.2 (locus POPTR_0012s10990) derived from phytozome v7.0 (chr-ID scaf fold_12; pos 11619030 to 11619992)
atcagctttttgtatccaggtgatttgcccgattaattttgacattgtagtcatagttgtcacgaatgaatttaagttcttttgacatgatccttgacttgagaatctattgtctctaaatttcacttataaatgaatcacctatcaaactaaagaaaatgaaatgaaatttgaccacatgtgattttcttagcctttcaccattaggatggtggaggtggtttaaaaaatatttgtgctatcacctagagatgataagttgttgctgtttcccatttctttttgacattttagattgtggttttccatatgaagaacatcatcaacttatttcacttaatcaaaattctttgctttggacaactttcataacacattagctcttacaaatatgtagaagcattaagcatcatcaaatagtgcttgttggaaggttagactgatttagccaataggtagaaagaagatcatctgaagcgcacatgggccatgaagagatggatatttggtactcaagttcttagcgagagagattgagtcatgaagagaagaataccatgtggagtggcagtaacaaaaaaaatgaaatgtacataaccagtattccttatccgaacaagaaggctacaacaatggcatttactttattacaatcacttaaaacaacatcgttcataactcataaagtgcacttgcaagtggcttcgaacatggagaatttttattccagctataagttctatggtttgaaggaagtaggtgcatgactatcggtggatttatgaggagaagttcatctcaatttgatcttgcatgtttttcttgcttaatgtttttccaatttataatgtttgttagggaaatatgtaaaatggccatgtcgtattaattttctcttattcaatcatataatctatgaaatctaacctctgtataatgttttgaatacatacagtgctttag

SEQ ID NO: 56579 - DNA, 343 bp, Populus trichocarpa
  Intron number 2 from transcript POPTR_0009s07790.1 (locus POPTR_0009s07790) derived from phytozome v7.0 (chr-ID scaf fold_9; pos 7234187 to 7234529)
gtgggaattaagctttgtcgttccatctaatcacggtaactaattcagtttatttgtacgtttctgcaactcttttgtttcgttgcagagaaatttagagaaaagaaaagtttttaggattactttattcatttttaatgcataatttgcctccatttttcctgaactcggaaatttattttcaaattccaatcaaacagtaaacttaaggcatggttatttattttagtaatgattttctaaaattttctcttgactgccttttttttttaaaaaaataaaatgttttattgcttgttggatattagaaactttggatttcaagttcctgttgaagccaaag

SEQ ID NO: 56580 - DNA, 960 bp, Populus trichocarpa
  Intron number 3 from transcript POPTR_0009s07790.1 (locus POPTR_0009s07790) derived from phytozome v7.0 (chr-ID scaf fold_9; pos 7234776 to 7235735)
gcaggaattgaggtgcattttcagctcacagatgtttttttttatcattttcttttgctgttgttatatgttgcataacgacatgtttccatttctatgagatttcatttctacagggaccaagagtgagaagaggtggttttagttagttctacgtttctttatatctattatctatacctgcctcatgattcctgagctgcaaacatttgagttatcatgaatttatagctaattaaagaccggtaaactatatacttaattggctcctcgacctgtgagctaaagttttagatgtgatgctctaatgtataccatcatttgttgttgtttcctcaactatgctgtttttggatggtggcctattcactattgttctcgtgaaaccacagttgattagaattgggtattgctgttgtttgattgctagtattggctacctatgggatatgcccagtttttgggctcagtccatttgttatcgttttcatcaattacgttttcttattcgtttacttacatgtgagagggtggccattgattaaccacatattgattttaagtattaactttgctatgaccttatttactatatgggctgccccaccaactatcttaaactttcaagttggatgcttagcttggtattggagcttgctgtggtaatttgttattgttgtcctccagttcaaatttctctaactaggtgcattattgtttcttttgttttcttttccacccttccatgatgctgttataagcaaagcaaaagcataacaaaaacaaaaaactcttccaagtcagattgagaccttttttaaactcatttgcaattgtggccttctgtgctgcagttgatttccatcatttttcactgggtgtattgttagtttcattatactgtttaatctattaacttgtgcacactaaagaaactgtccttcaatttttttttacaga

SEQ ID NO: 56581 - DNA, 793 bp, Populus trichocarpa
  Intron number 1 from transcript POPTR_0004s23810.1 (locus POPTR_0004s23810) derived from phytozome v7.0 (chr-ID scaf fold_4; pos 22439323 to 22440115 reverse strand)
ctaatctctccacttacaaagaacagcttcaccaggtaccttttttattgtttctttattttcgagattattgtgaattggttcctcgaattagggatttcttttttgtttcatttgtcaatttggggttagttaagagtaattttgaggtttaaatcatattttaggttattattctcttggaagtttgattgaattttgggatttttttttgcatttaatcttggattgtaatgaatttttatatcgaattaaggtttttgtttcctctttttttctttctttcttttttatggaattaagggtttctcttggttagtattatactcttgatgcctttttatggttctgatttcaatgttgattattattaccctaagtgatagccggattgaatttcaaactcatgtgatgtaacagttataaaataacaggggtttgcgctgtagataaagagatgggttttcttttcatgatttatattggttatatagcttaatttctgatgatatacgtgtatatcccttaataaatgcccgcttcttattatgatcatgtgattaggcggttttgatagtgtcaagaagtgttgtgttttagtggactttttgccatcacaatctaatataaaagacgagtaatctgtatcatagaattataattttctgtttggacatttgctgtattatctgctaagtcagcactagtgtttttctcttggtttgtctccatgtgttgctgcatgttatgacctctcttgtgcttgtggaccaggtcagacagcttttggttg

SEQ ID NO: 56582 - DNA, 596 bp, Populus trichocarpa
  Intron number 1 from transcript POPTR_0014s09640.1 (locus POPTR_0014s09640) derived from phytozome v7.0 (chr-ID scaf fold_14; pos 7194673 to 7195268)
gccacgggtgggtagatatttgtttgcttaattagtattgtataagattttcttcgtacagttgtgacttttctggtttttggcttttaagtttatataccatggagcatgtcccagtagttttttttgagagatcgaatattatttgttgtttctctttttgctcttttgtttgtctttgagatcttcaagcacagtcctgaaggacccttctatttgaattttctttatggaaaggttgttctttgaaccatgcatgaaaccactgaactttttctttctacttttttgcttatgcgagaacatataaaggaaagggaaaaggcatcatttgttattatcgtttgttcttttaaggcttttttcttttcttttatggagtatattaatttcctgtttcatgtaattctgcagacaaaaaccctagctattctctccttttctttttctttttgatctactgattgttatctcatcgaccatcttttaattaggttccaagatttcatggcccttatttctttgtactctatagttatagatctccttttgttgtctgactctagggtttgcaggattttaaaccggtaaagccc

SEQ ID NO: 56583 - DNA, 128 bp, Populus trichocarpa
  Intron number 3 from transcript POPTR_0009s02070.3 (locus POPTR_0009s02070) derived from phytozome v7.0 (chr-ID scaf fold_9; pos 2687077 to 2687204 reverse strand)
ccgatttctaccaagtactgtccattttattatctttgttttttaaaagaaaaaattaattactgtgttttgattggtttcttttcggtgtagcttgctggtgttgttggtgttgaaatcactggtgg

SEQ ID NO: 56584 - DNA, 383 bp, Populus trichocarpa
  Intron number 3 from transcript POPTR_0009s04710.3 (locus POPTR_0009s04710) derived from phytozome v7.0 (chr-ID scaf fold_9; pos 4979595 to 4979977 reverse strand)
ttgcagtaagttttacttactcgaaactcttaatcatttctactgtgcatgctttgaatttcaacttgctgatcattgttcaatctcaacttctgcttatgaagaggttgaaactcaaaagagctttccattgatttgattttgatatgcatcactgtattggaatcatattactaggattttctttctttaagaaaaattgtgtgcagtaaaataattgacaagaaaaaagatggtttgtcttcgatttatacctcgcatcactttttttattgtcaaacttaatccattctttgtgattatcttcaaccgtgtagtccttggaaaggatcagctattctgggataagtttgttttaccttgagcttcaaatttcacagggg

SEQ ID NO: 56585 - DNA, 1034 bp, Populus trichocarpa
  Intron number 1 from transcript POPTR_0004s08540.2 (locus POPTR_0004s08540) derived from phytozome v7.0 (chr-ID scaf fold_4; pos 7114988 to 7116021 reverse strand)
cttcacatttctttccgatctttgattctctccaggtattctccctctcctgtgctgtgttgtgtttttagggtttcgaattttctagggtttttgatttgtgtttgttgactaagttattgactatatttacggatctgaaagttttttttttttggttttgagctctgtttatttcagttttttacaggcaggaattagggtttcgttgatgtgtggctattttggtcctatttgtttgtttgtttagagatttgaaagtatggttctcttaagaaaaaatttagattcgtaactgcagcaattagcgttttttccttttttttgttttgcttcgtgcatgatccgaatctaactattcttgatatttatcaagacgtctttgtatattgatgaaacggttggagtggaaaaaggagaaccgaaattcggggctttttgttagtttttgaatggttaatgtgctaatccgagtgtttgaacttttaaaatatatattcgacaacagtttgaagtagtttttgttgcttttttgtcaaaaagtttagaagcagtgtactctggctcttttgtgggtaagaaagaggagcttggcatgctaattatgatctgtttcttttatattgttgacccagcattttgttaaattattgggctttttttttgcgagtttatgtttataaagtttttgagtgatcaaatatgtggattctatttctctgcgtgatattttggttggtgatgaagatcgggggaatatttattttctaagatcgggctcaccattgcttgcttatatatgtaacaagggtggaatatgaacaatttctactgttaatttgttgtggtccttcgtttattttgtctgtaactgctccaaaagattttctttaaggggctattggtgaacgatgaatatgcatgtattattttattatgccaaagttttgatactgaccattgcattgttttttcttttcttgtatctgcattttgcaggtttacttgctactcatttgctcaaaaaaagtttg

SEQ ID NO: 56586 - DNA, 554 bp, Populus trichocarpa
  Intron number 4 from transcript POPTR_0004s20700.1 (locus POPTR_0004s20700) derived from phytozome v7.0 (chr-ID scaf fold_4; pos 20140546 to 20141099 reverse strand)
ttctggcaaataagaagcctcttacttctacagtaataaacttgtagccatccttattagtttgtgataaaaaaacaattatgggactaggggcttttggatcttcaatccataattgtgccattttgtttcatgtggaattgcgtgagtaagccaatgaacttgtatgtttcaactctgaaattacagttatactcttgctgataaaaatttcattgctgatgtttaatccatcataaacaatgcatttggtagccttgctgtgagagtgaagatgataagagggagaagtcagaagtgaggtgaaagttcaattttttttctactaggttttatgatgaatgatgatttaaataagattgtttgctctcaatttccttttgctatccttctctctgtccccaatataaacacacttttcttctgaccattattttaacggtaggtccaatttcttttacatttctattattgttgagagcttttgtagatttgatttcagttaagcatgtgaattattgtcgagagcttttgtaccgtcatgcaggaagatt

SEQ ID NO: 56587 - DNA, 612 bp, Populus trichocarpa
  Intron number 2 from transcript POPTR_0004s05920.1 (locus POPTR_0004s05920) derived from phytozome v7.0 (chr-ID scaf fold_4; pos 4662687 to 4663298)
ggccaaaaacccatcaaaggctcgccttaccccaggtacgtaaccctcttcctcctctcccaaatccaatcacacgtctttcctttatttattttttctctcttttcctcctagcttgttcagatgcatctgggcaagttctttctattccagaaggatgaaaaataatgaaaattcgtcgtaagaaattgcggcgacgaagatttgctgctaaagcaatccttttgtaaatgtatgattagttagataaccattcaaacaaatttgatcaagatcattcaaatataaaattaaactctaaactaatccgttgttaatgaaactattttcgtcgccgaagttaataaatttacaagtttttctcaccgcagatcttgcaagcatggtcgtataaatctaagacattgtctagatttctttctgattttgagttattttatgcatttaatcacatatcaaatgcaaagatgattataggaacaggttttctatttgatgattacaagggtagataaaaaatgttgatcaagattttcaaggcactgatctacttgttataatgtttttttgtttacagaggatactataggtgtagtagttcaaagggttgtc

SEQ ID NO: 56588 - DNA, 879 bp, Populus trichocarpa
  Intron number 1 from transcript POPTR_0009s09670.1 (locus POPTR_0009s09670) derived from phytozome v7.0 (chr-ID scaf fold_9; pos 8495570 to 8496448 reverse strand)
gtgcctcttcacactctggtggttctcttatccaggtgcttagttcttttccagtttcttttactggtttctgttctttaaactttgactgtttttcttatttgtgccactctattgatttttgtgggttcttgtattcaaatagtgatggtgtaatgcagttgaaatgttatatgaattcttaatgttttccttgaaattcttggttcttgataacggcattgacttaatttatttgagtgattgtatcagattcatgtgtgagaatcttgatcttgaattcaactttaattaattagcttctgtataatcatatctgtttcctcttgtttctactttttctttgatatgtaaaagattatgtgttctttaattttatattagaaccctgtctttgttttcttgaatttatacttgttgtgcaagaaaaaaaattataatacgcaaatggtgcttgaaaggagtgatcgatgtggagaagggaaggagaagtcgttgatttgctttggacggatagtgaggctcctttcataagcattttaacttctggttggctccccaagataaatctgtttgatatgtatgataattacacctcattaaacaaaataattgtagtaggtattcataaaaaaaaaaaaatattgcagtcggttcaatcggatgaatctgatatattttgaacagcaaacaatctcatattcttgaaattcatttgaattcatcttcctaactatctattctaagcaatgaaacggaaatatgcttttatggtcagaaattaatctatgagaattagaaatcactgatatcatcttatgttccctagttaattacattgtctcttttcctatgaaaaagtgaacttggagatcaagg

SEQ ID NO: 56589 - DNA, 220 bp, Populus trichocarpa
  Intron number 2 from transcript POPTR_0004s07750.1 (locus POPTR_0004s07750) derived from phytozome v7.0 (chr-ID scaf fold_4; pos 6375237 to 6375456 reverse strand)
tgggactcttctcttggctttcttgttaggatcaggtaataatcaaacttttgatagtcatttcttgtagagaaaattaggttaaatgggttgtgatatataatggggatgggtttgtaaagaaaattgtttgttcttcttttctatccggttagaaattggtttttgagggttttgttgtgtgacagttgcgacaacagttggaacagtattagcctat

SEQ ID NO: 56590 - DNA, 617 bp, Populus trichocarpa
  Intron number 2 from transcript POPTR_0004s10110.2 (locus POPTR_0004s10110) derived from phytozome v7.0 (chr-ID scaf fold_4; pos 8678771 to 8679387)
aatatttgacagattgcttctaaacttttaacaaggtttgattcttttttctttattcccttccttgaatggattgcttgttctcttgtctttagattttggaaaaatcttgctttcacaatctactttcattttcgcttgtattaatactcattgttgttgctagatgtgtaatcccaaatctctatatttcatgctattctgtttgatagaggattcaaaataacgaaagtatgatttgtgatcaatgcccactgttacaccagatgttgaattggtttcacgaattcgtccatcttcttgacaagtagtgtatgttttatcttattgattattcagttacaatgatttacatataccatgcttggtagagctatggagattctaagaatttcaggaaatgttatgggagtatttgtcctagagtttagctggtttgttctgacttgcttcgtgtggggtttgtgctcttgggggtaactttttttctttactttttgaaactgaatttatggaataattcggtcatcctttccttattttacatggtttatctagggtattaaccagttccaatgcttttgcagaatatttctttgaactcatttacagcacga

SEQ ID NO: 56591 - DNA, 1007 bp, Populus trichocarpa
  Intron number 2 from transcript POPTR_0012s03170.1 (locus POPTR_0012s03170) derived from phytozome v7.0 (chr-ID scaf fold_12; pos 2516791 to 2517797 reverse strand)
aaaccaaggattgctggcttattatctctggcaaggtcagatctccttctcaaagtttcattttttgtaccttttgagattaagaagggaaattctgtttggttgctgagaaaattttgtgtgagattgcaagatgggaactttgaccttttgttttgcctctttggatttttttcttaattgaaaattaaatctttgcctctgctatcgtttctattgcatgattaagagctgaaagtttgtttttatgcttataattgcaaagtctgttcctttattatgctttatgaaccaagtgccacctcttctgtggaaggaaaaattacttaggctatgtttggctgcgcggttttacctgtattcgtcaaaattagaaaataaaaatttattgaatttttttttatgtttaagattgttttcatgtgagttgtgaaaaataatttttttaaaaaaacaaaaaacattattttgatatgttttcgagcgaaaagtattttgaaaaacaaccctcgtcacactcccaaacacaatttaaacctatcaaagcaatgctacagtgcgctctcatcgcatggtttgtatcaaccttggatcccatattaatttgtgaagtgtgtaacagaataattcccttatggaaggggtaaagaggaaggccttgagaagctaacttgcattatatttggcaaaatcactttgataggtcttctatgatgattttggaagagtaacgcctgtacataatacatatggtcattcaccttgtttttaatatctgtcagtgcaatatctgattgcttagtgatacactgataatttatctcttgcatggaaaactggagttatggtaattactctttgcagtaggatgtgaactgcccgcactactctttttcattgatatgaaaaataacgccaatgtgtgtttgcaatggaatctgtacttgattctttgtttctttttattttaattgtttattgaagttttgagcattatactcaggtgt

SEQ ID NO: 56592 - DNA, 452 bp, Populus trichocarpa
  Intron number 3 from transcript POPTR_0009s15590.2 (locus POPTR_0009s15590) derived from phytozome v7.0 (chr-ID scaf fold_9; pos 12022994 to 12023445)
ttgggcttggagtgaccaggcaagttttttttttctctttaattttgaacaaacaaggttatcttaccattttttatccgattagttaagattataaattcttgtcttgtactcaactgcttgtcaagtttgtctttgtttaattttagagaactcgtgttagctgtcaaggtcatcttaaagattaatctatgtaatgtatgctgttgcttaccgcttttttaaaacactgttactgattgatgatagggactgaggattttctgatttgtagttagcactcaacaaatacgcagattaattgttagattaaagtgtgaaaaaatctagtgtttgaattgcagtactatagagtgattaaatgatatcagctttattagaattctgacattctttgcttccaccagggatcctcagctagtcaaaaagattggtgaagcaactgctcttga

SEQ ID NO: 56593 - DNA, 495 bp, Populus trichocarpa
  Intron number 2 from transcript POPTR_0004s07460.1 (locus POPTR_0004s07460) derived from phytozome v7.0 (chr-ID scaf fold_4; pos 6156859 to 6157353 reverse strand)
gatatcaggtcccccccttccttgtatttattaatttgttattatataaatatccatttcatgattgttaacgaaaacaagcatgttagtatgtcagtctctagatattagtggacaaaacccatggtgttaggcaaatcttcttggattaaagaagatttcaaatctaagattttgatttttctgaaactaattagagggtttttctgattaattgcttgtcatattggtgatgatagtggttgtggttgtagttgtagtgagactggtagtgataatgattccatgatcattttacattcataatgtgtcaagcgagctccctttttgataaaaaccgtgttttgaacttctgataaacttggagggtgtggcccaactgatcaaataaagtacatccataatatggccattcatttccttagttctgatgtgtttgttcgaactttacttgctgtagacttatactgagaagcctggacacaactttagtct

SEQ ID NO: 56594 - DNA, 474 bp, Populus trichocarpa
  Intron number 1 from transcript POPTR_0004s10420.1 (locus POPTR_0004s10420) derived from phytozome v7.0 (chr-ID scaf fold_4; pos 8967230 to 8967703 reverse strand)
cgcttcagttttcacagaatcacaaaattaccctcgtgagtattctgtcttccccctaatttatgtctcgaaaacatgttcaaattgttattttctaattgtttgcgttaaatttatgtggttgcctagaaaaaaaatgagacaagttaaaaggtttcaagtatgataaactgcacaaccctggtttgagttttttttttttttttaataattttgggttcatgagaaaatgtgccaagtacaatctccatttgtcaagattcggtgatcatcaaataattacatggttgctatgctccaaggagataaaagaagcggcttgaattagagcaatattttgatgaaacacgatgatgcttgtgattgatttcttggcaaatggttgccattgtattactggagaaatactttctaatgcgaaacctaattgttttttcaggtgaagggccttcagtaagaactgatttaaggctt

SEQ ID NO: 56595 - DNA, 368 bp, Populus trichocarpa
  Intron number 1 from transcript POPTR_0009s03700.1 (locus POPTR_0009s03700) derived from phytozome v7.0 (chr-ID scaf fold_9; pos 4297895 to 4298262)
ccttaggaagattggctcagtgggctcggaccaaggtctgctgaagaaaggctcaaggtatgcacgcacccctttcacttggttagtctgtcatcacttttacaagtcgcaacacttgtagctcctagtactttgattcatcttccagaaccctattacatctagagcaatagaaaattgtcttttctgtagtgttatcatggaaacctcatatacaattttctcttttagaatttgggttctcctcctcttgttaaaaagtcagcataaaatcactcatgggactatcactaaataatttaaatcttttgtttcctaagagcttgttttttttttttcaatctattttgtcagatttctgattatac

SEQ ID NO: 56596 - DNA, 976 bp, Populus trichocarpa
  Intron number 1 from transcript POPTR_0009s07100.1 (locus POPTR_0009s07100) derived from phytozome v7.0 (chr-ID scaf fold_9; pos 6727921 to 6728896)
aaatcttgttgtttcttatcaacaacaacccagaggtaaaaaaaaaaaatcggttttcgggtcttggtttcttaattttttttttctgggttttgtttctttttgcgtttctgtttcattttttgtggttcgaacggctatttgtggtttttatgagtgaaaggttatttctttgtggttttggttctgctttaggtttgatcatggtatttgatatggtttaggtaaaaactacttgttgggttttggttttggtttttgtttatcgtttgtttcctttttgtatttgaagggttctttatgatctggtctgaatgcatgcataggtgattctttctttgggtttggttcctttatagtttgttcatgtgtgtgattaaggttttgatgcatgataatttggtttataataaaaagaaatttacttttaagagtcctttattgaatctgcaaaatgggattgatttctgttccttttttgaggcttactttctttctttctttgctttttttgtttgagggtatttcctattctcttatagtatggttttgttgtttgattaattgatagaatatagaggcaattgccttaagatttcgctgtctatttgcatattagatttctgtccttaccaatagtaattctttcacattttcagttttgatattgggattgtcttgtttgatgggaagcatggttggatcattggcattctgatttcacgagtatctttcagtccttccttttcttctttgatgtattgattttttttgtgtgtcctttatcgtattctcttgaatttgatgctgatattatcatgttttaacacaatgggtgtcttttatcaattttgtactgtcttgcaactttttttttttttgtaaacatgttttctgtaaactttacactgctagattaattttatttccttttcttttaggagaagcgaagcagaaggcttttgcaccagcagat

SEQ ID NO: 56597 - DNA, 810 bp, Populus trichocarpa
  Intron number 1 from transcript POPTR_0015s10540.1 (locus POPTR_0015s10540) derived from phytozome v7.0 (chr-ID scaf fold_15; pos 11431069 to 11431878 reverse strand)
gtggcggggctatcttcacttggtcattgaacaaggtaacaaaacctcaaaactccttttgtcctaaatatctgttgtcgtaattggtctatagtctctagtgatgaatcaatttcactcaataatttcttgcaatttcttgtgattttcttttgatcgtcattggtttggtggatattgcacctaaagcctggatccattaaagaaattgaatcaagtaggctgcttctcctttttagctactataatgtcttctttttttgtttgtttttttatcgaggatcatggaggttcttttttatatttagcagcgaaagcccatcagaagtattaagcagggtagttgaagacctgaactgggttttgaaaattttgaattatgattctgcattaatataaatttgtttatataattgatgtctacagatgaactcagattttccaaatagttttgagttctgttataatttcctcaatttcccttcccagacacgggaatagaattatttgcatgaagcagatcttataaaaagttttctgcatacttcaatcacatttacttttcttagctattagatgtaataagtttctgattgggattggtaagatactaatatgatggaagtgacttttctttttttttagattttgcttctttcttttttttgctgctctgccacaaacgtattagaaaatggggaaaagtagacgaaatcaagccagagattctgaattgctataaaaatcttgctcattttatgttctgatgtttcagcctcaacaacctcttcgaagctacccgcttgaagc

SEQ ID NO: 56598 - DNA, 744 bp, Populus trichocarpa
  Intron number 1 from transcript POPTR_0015s08810.1 (locus POPTR_0015s08810) derived from phytozome v7.0 (chr-ID scaf fold_15; pos 10164972 to 10165715)
gattcaagtgattggttgcaggtatgctatgctctccttttgaaaactcgatgtataccctatatctagctacatatatattcccatcacatgatgacattttcgtagttatgtgaaaattttagcttcattaattaaattcagtgtcattgtgttccaaataagatgatgagtaacatggctggataatttcaacatagaaaatcctgtaatttttgtggtttaatgccttgttgtatgattcgaattagtgaaaatggcaatgcatataatgtaaattatactatataataaatagttacggaattcaactcttctttcatgtaaaatactactacagtacttgaaagaacatttccaaagcgcaacattgtagagagctatattagaattatcaacgcagataaagatatgttattccaggctccaaattcgatcatcatctgtttttactagatttgttagtgcatgttttgagaacttcttggctttagagtatcttttacattttagcattcttgacattctacttgatatatgttctttgattttttttttatgattctgcttgatatgttctaaaacgacaaaagaatgtctggtcctaatggcacattattgatatcttgaacctttaaaggacaaataatcctttgcattattgcaaatgacaagattttgacacattccccgttaaatttcttgctttccgtgtgtcagggcacgattaacgaggagtctgga

SEQ ID NO: 56599 - DNA, 300 bp, Populus trichocarpa
  Intron number 2 from transcript POPTR_0011s11010.1 (locus POPTR_0011s11010) derived from phytozome v7.0 (chr-ID scaf fold_11; pos 13708243 to 13708542)
acttagataaggatagtgaagatcgcgagatcaatgtgagttttttttctttttttttcttatgctatttttaactggcaattgagtttttcttttgaacatttcaagtcttgttctttgtctttcacaattcgcttatgaatttttgaagaattttttttggtgctttatattagttgattgtgataaagatgtggattatgtatcttgaatatacatagattatacttgtatttatgactttgaattttggttagtgaaatgctgtttttctgttttggaatagatttcttcagcaat

SEQ ID NO: 56600 - DNA, 915 bp, Populus trichocarpa
  Intron number 2 from transcript POPTR_0014s08050.1 (locus POPTR_0014s08050) derived from phytozome v7.0 (chr-ID scaf fold_14; pos 5980481 to 5981395 reverse strand)
aagctctgacaattgatcaggttgattctcattttgattcgactttatttgtgttaatgagaaaatggagcattataagagaacagtgaattggaattctgtggtaaattgttctctagaaattcaaatatttgtcgccctacattttatagttttttcactattaagctcgattgagttgaggttcttggttaaggaattggataaggtgtaatttcaaatcattttattttcatatctgctttgagagaaggcgagcctgaattgtggaagcttttggagttccagattgtgaatcttaagtgaaagtgattaggtcaatcaagcagatttctcactgttcttttgtgacaacatgtaaacaattataatttaccatcgtacagtaaaagattacggaggggattagctgtcaaactgaccttcattttatttctgatagatatggaaattataagctgtgaagatctagttcctttagctgttttgttgttctattgctcaatgactatgcttacacctagactcactcttgtcgtaagggctcttccatctgctattcacttctattgtacatattatgtctaaattagaggggcgagaacccccttcaaagtgtgtgttttgccactttcaaaacgtttttgattcctttacagggaatagttgcctcgtctggacccctttgtagctcccttgccaaaccttcatgaatagaatggtgtctcatgtaatggttttggactgtgatggaattaattgagcaaaattaaacgaaacaattttctatgagctctttgtttattgtatataaaatacaactgaatatgaattcatcattccactattttcctttgctttttcttcattttctatgcagagattcagttctcaggagcaagagaactctgtgaa

SEQ ID NO: 56601 - DNA, 996 bp, Populus trichocarpa
  Intron number 2 from transcript POPTR_0012s12070.2 (locus POPTR_0012s12070) derived from phytozome v7.0 (chr-ID scaf fold_12; pos 12373336 to 12374331)
ggtattctggtaagcatgttatattgtaaccccggaattttttttatatataatttttatgatccaatatggggaaaaaatggtttcttgcgtacataatgtgggaaataatttgagtcggtttgattcttgttttttttcttagtcattgcttttgtgtgggtgtttccaatattttttttgattgtgtgaaatggtgtaaaatggtttctttggacttggagggtttttggccctccttttggctgcagcagttaaactgatagcttaaaattttgagttgggtggttctgtgacaaagccctcctcaaaggggtagtatttcttctctcatttgtggatcatatgattaattgagaatttggcaatgttgtgatgttggttcaaattaatttttttttgtttttgtatgtttaattgggatagcgtgttttgtgggttattgtagcaattggagctggaatgtgaaagttatttatacagataccattgtttttacctggtagtactgcgtatagattggggtggagagtggttaaaaaactctgataagaactatgacctcattcaaagactgaaacatagaaaagaacatcataatctcttcagatgttaacacgcaaacacacgtgcacacccaaattttgaattttaagttagaaacaactactttggaggctaaattgtatctcctcacaatagtttttaaatcagtcaagaggatggttctggcaagttcgtctcattatcgagagacctgaaacaagatggtttttgagattttttttgcattcttttgatttcacaaatgagaagaaaccacctagtttaggattgaggcttggttgttcttttataccttcaatttcataagaatggtttggtttcctgatgcgaatgagtttatgaaatattgcagaacaagttcaagctggtacttatttcttattgttgtctgcaggctttgtcataggaaagaagagtcttggcaagaga

SEQ ID NO: 56602 - DNA, 452 bp, Populus trichocarpa
  Intron number 1 from transcript POPTR_0001s23160.1 (locus POPTR_0001s23160) derived from phytozome v7.0 (chr-ID scaf fold_1; pos 22424708 to 22425159)
agcaaggtcgtggttacagaaaacaagacaggcaagtctctcctcgcttcataaagtccctgctgacctccatagaatctgtagttcttcatacagattgcgtatctgggtttttttttttacttttcctttttaatatctttttgtttggtttgcatctttttctgatttgaattttggttatcttctctgagtattattcctgaaactgcaaagaattttacgttctataattgatttgatgtactgggttgatgacagatgttgataattttattgttaggatatgcaaaatgggcataaagattagctgggttaattatagattttggaaactcttgcctccccagagattatattctgataaaataatttgttcattctgttggtttgtgctgttgattcttgttttgatagttaatctgctaagtatttgcctgcggccaagctgg

SEQ ID NO: 56603 - DNA, 996 bp, Populus trichocarpa
  Intron number 1 from transcript POPTR_0011s00810.1 (locus POPTR_0011s00810) derived from phytozome v7.0 (chr-ID scaf fold_11; pos 411835 to 412830 reverse strand)
aaggtgcttctgttgttatctcttctcgcaagcaggtgctctttctctctctcttttttttttcttccatattcattgcttttagcatttcctttcttttctttatcatatgatttcttgttttcagcgatcaagattgattttttttttctgggtttgttttggtttcttgaatcttgattgcttaggccttttctggtttctgctgctattggatttgaggaagtatatagactttggactagatttcacctaaaatggtttagaagatgttgattttttaagagcagcaaggatatgccaaatcctgttcagttgaatgaccttaattcatcactttgaattggatttagttttgtttcccagtgcacacatcatggtctgtattttgttgtttgaagtttgaactcatatgggatgagctgaaagtgattctattagtactgctaaatggagtgctgcaagaaaaaattgcgagggccaaaatatattgatactggtagagaatcaatgctgtgatagtgttgttttccagaattggctaagcacacaagggggtgtagaaaagaatcggcctataacagagagagggaaagagagaaacaagaacatgtgtgagagagaggactttcatactttcattgattgatttcccatatctctcgagataagttttgttacaattatatagaaatacgaaattcctacaagataacaataggatatcctgctaagtgataaaatcacaccaccctcttctccccaataatgatgtatcgatacatagtttgctacttcctgatgccatcctttcccatctttcattcatgtatcacgtggcttttggttctatttgatcacaagatattttgaaaattgaagtactaaagttagcttttttatgctgttttctagccgtaactgatatgggctttttctttggattactttcgggatggaatttcttttggtcttttgttgaattgatccagaaaa

SEQ ID NO: 56604 - DNA, 718 bp, Populus trichocarpa
  Intron number 1 from transcript POPTR_0004s10880.1 (locus POPTR_0004s10880) derived from phytozome v7.0 (chr-ID scaf fold_4; pos 9447811 to 9448528 reverse strand)
gttttccttaatttctccggaattccatttccaaggtgcgtacttttttttgtttgtttgtttgacaaagatggtactttcttagtatattcttgtcttgtatttttttttttttttgctttagagatctgagcggagaattcaaatcagaagtgttcaggatttagtttataacaactcctattagcttccaagtttggcttttgattttttaatgtttctgggatttattatggaattggtgatctgggatttgcaggtctctgcatgatcttgctagtgaatttggttttgttgtgatcatagtacagtttgaaaagtcaaagtttttaatgatttctttgatgagcttgggaaattcttgatcagattcttgttgaacagcttcgttggttcttctcatttttttaaagttgattactttcaaattaaacggattgatccattgtttttttttctaatcatggccttctgagtagcagcttgaattaagtttcatttgaaaatcttaccgtcatttgttttgatctttaactttaggcctcgcaatatgttccaaaattgaaaggaatgtgaaagaaatatgtttgctagcatttatttaacaatccaaactctttatttatttatttatttttgccaagattcttgaattgcttttagcgtttcacaaacttttggaatttatctcattagagatcatattgtcaggctagct

SEQ ID NO: 56605 - DNA, 765 bp, Populus trichocarpa
  Intron number 1 from transcript POPTR_0009s16250.1 (locus POPTR_0009s16250) derived from phytozome v7.0 (chr-ID scaf fold_9; pos 12406058 to 12406822)
agacaagaccgcaacactaacgatacattgttcaagtgtttaacacctgtctttgccttttgtttccctctcaagatccatgaatcaaacctccaccaaatttccttctaacagctaataacattccatttcttgacagtttgtccacgccccactttcctttcttcctttttgggttcttgaatccttgatttcccactttttcttcctttttttgagtgttctttgaggaattcaaggtggttgtaagtttggacttgccaaaaacagtaaacaaagagatgatgatgggtcactcgtatcaactttaaccttcaaatctctaaaatctttttgagagtttgaaatcttgtagtagtagtagtataattcttgagttttgtgccaccacttagctagctagatcttaacaccttttatttttctcttcttgttttgtttcttcacaatcttgaaaatcttgaagcaaccataattcttgctttttgcttgttacatcaatgccaagaaacatgatcgtgtgtatttgcctcataaatatgctagaatctctcattgaaactccaaatctttcaaatctttgaaaatccctggaaaacattttttgatgctagtgattatcttgttccaatcttgagaatgctactatagggttattagtaataatttttaaaaggcattttgctgaactgttgggattgtgatataattttatggaggcaaaaagcagagagcaacagcactgtaaggtaagaaagagaggga

SEQ ID NO: 56606 - DNA, 893 bp, Populus trichocarpa
  Intron number 2 from transcript POPTR_0011s04780.1 (locus POPTR_0011s04780) derived from phytozome v7.0 (chr-ID scaf fold_11; pos 4750961 to 4751853)
ttctcgcaatcctggatttcctcgaaattactaaggtactgctgcttttacggttttaccctcgacccccaccccatcgtagaaaattttaactgcagtacaataacctgctgtaacattaatttttgtttccccaaagtactcttttgtgaccttaataaccccaagaaacctaggggtagtttgggtattttcgaaacaacgaaaggaattttaaaaaacttaatggtcatcatagacaatcaagagactaaatcatggtttctgaaacaaaaggactgagttattatatcgcttaaaccacagggactaaattattattttgacgtcaacgaagtttgtgtatccctcatcccctgcaaggtctgggttcagacatcttttttgtaaaaaaaatattgcatgcacaccaggtctacgctgctaaccgcatttcaaattgcggttggtcgctcaaaaagcatcaaagtgatccttttttgcgcggccaccagtaacatgaaacgtgggtggtctcatagacaaacgggctgttagtcccgactctcaaccggtctgatgataccttaatgttaaagaaacgaaattccacatcaagaatatttttgtaaccgaaattttccaagaggaaagtgatggtatggaaaatatagctagaaagaaattactacagtacgtgagcagctgttttagtatgggagaagtgacgaaaagaagagacttttgaaatgttgacttctgatgggttactgagaaatccaagcaaaattaagaagaaatctcagagattgtgagttttatcatttgtggggtgttattgatttgattctctccgttttgttacttgaatgatcataggttgttcttgttgcaaaagattttggagccaagcc

SEQ ID NO: 56607 - DNA, 1027 bp, Populus trichocarpa
  Intron number 4 from transcript POPTR_0011s04400.1 (locus POPTR_0011s04400) derived from phytozome v7.0 (chr-ID scaf fold_11; pos 4390017 to 4391043 reverse strand)
gcatcaaaggggttgtcttcttttgcttttggcaggtaagtatccttcccgtactcattctgcttcctgttcatcttttctctctccctcctgctttgatgtgcaaagggtgggtgggtgttcttaagccaaaggtacaaaccaagccctcaagggctccaagggcacaaaaggagacctaacaacctgaagcaaaccaaccaaatctccctcatccccgataggatagacaaaaggagaatatctaggttaatccgatcaaaggaattttacaatctttgaagattttggcaccttgtgcaaatatcattttcacgacttatttaagaagaaaataggtgggcctctgcaagtcacttaaaacagagccattctaacgggaagctactctatatgctagctaaatcttttgctttgagatggttcggattcaagttttattgggatatttggtgtgagtggttcagattttaattggctcgaatttatcagattagtgctttcgatatggataagttactgaaaaaagatggctgtggcttgtttgcttgtgcctttaaatttgagatcagggccatgcatatttgattaaattccatttggagattcttcaaaatccttgaaatagagctgtgcagcatacctaatgcattttgtagtttgatgggcctatagaatgccttcgggaaactcattgtaaatgcttttcaaatcaccgctaatcatttggactgtctaatcagagttccagaactgaggaagtgggttaacatgttctctagaacagatcaggaggttatagctgtggctataaatgtctaaatatatgtaggtttttgtgtagaatgtatgtgcatctccagatcacaaaggattgcaacttccttctgcctctccctttccctgcttttgtcttgcccagttttattcatggtgtcctttcatctgtgttatttaatagcacatggatgccatcacttgtccatgaaggccatttttttaccatgtgcagggaatagtgcttgag

SEQ ID NO: 56608 - DNA, 955 bp, Populus trichocarpa
  Intron number 1 from transcript POPTR_0011s04400.1 (locus POPTR_0011s04400) derived from phytozome v7.0 (chr-ID scaf fold_11; pos 4391907 to 4392861 reverse strand)
agaaaatctcagtctcacttcatcttcttggtcctgtaagtgtttcttttttctacgttaaagaaacctcacaaactttatattgttcagttgtcttaagattacactgaggttggtatcttcttgaaatggttgctttagttcttactagaatgtagcttatggtttgattaagaggattagattgctgcggcatcatgggattaatcagtagttgcgcttcatgacattttatacctgccattattgatgaccctgaaaatgttaacttaaaagtgttgatacatgtgcctatttgcatctgcatatatgtgcatgcgtatgcattactgccacagttatagattgatgaagttcccaatatatctctgaattcattatctcaaaaagaacatacaagtgagccaaactttggtaattgtgttggattgttgctttgttttttgaaggatttattttcgtgacgggcttcatttgctcctaaaattttgttcgtgtattagatagctgaatttttcttctgaaactagaggattgcatttcggttgtgccatcattggcaactctgtaactgtttactgtaaatcttgatacttgtgtgcctatttacatgtgtatatatgcacggatatgtatgttaccctaagtttgatgcatcagtaaagttcacacatttatcatccactgatatatcctaaattgatgttttccagttgcagatctgagtgtgcagtatagaggaatagtagttgattgcttctgctatcaccatttgccaccttgcaattgtttaatttagaatttaacttattgtttctccttttattatctgactttgatctgttaaagcagcatttgctgcatttattcctaccactgagaactggtaataaaggttctgatgatttgctgatgttcttttgtagatttttgcttctcaattagctgtttaatt

SEQ ID NO: 56609 - DNA, 768 bp, Populus trichocarpa
  Intron number 1 from transcript POPTR_0009s05560.1 (locus POPTR_0009s05560) derived from phytozome v7.0 (chr-ID scaf fold_9; pos 5637043 to 5637810 reverse strand)
ttcttgctctatcagaatcaggaatcctatttcaggtactagtctttttttcagctcataaaagttgctgtcttgtctatatgatcatggaagaaaccatatataatatgaggcatctttgcagttatctatcttaatcaaaaaaagctcgtggtttcaattacttctaagatcatctatattttgctcctttattttatatctacctatcctgtttctacaagttttagtttggcgaggcagaaatgtttgctaattactactatcagacctgcaaaccttgattgcatagtagttgcaagagccttttgtcttccagtagtactggattcaatcaggaaagttatacatactttttttctagctaccatcaaatctgcaatctgtgtcatacaagcacttgtaatcagtgtaaccatgtcaaaactcaagtcaaacattcaggcatggcactcttgcataaactgggctggctctatgttaattagctctaacacatgttttgtctttgaagttgcttgtgcaatggtcccatgattttcttcatgcatgagcaattttctcgtattagttaatactgttcaatcgaaaccaaaactagttcttccacttcaggacatatgtgctaacaatcagggagtgctctgaatttgatggtcaagcgtgctttgactttgatgcctgcttgataaaaatggatttgctgatcactataactgtcaaatgcactactgtttcatgtgttggatcattttttctcctttccag

SEQ ID NO: 56610 - DNA, 652 bp, Populus trichocarpa
  Intron number 1 from transcript POPTR_0011s05360.1 (locus POPTR_0011s05360) derived from phytozome v7.0 (chr-ID scaf fold_11; pos 5293798 to 5294449)
cctcgtcaagttcttttagggaggttacatgttgttttgactttggattgtttcaaaattttacttcaggagtttaattcgactttaagtactattgaaatcagatcacttgacagcattttcagaaagattcttcccatttttaagctagtttgaatgcttttaaaatgtcttcttaggttgttcttcgagtccatggtgcctgttattgagaatttgttttttgttttttgttttttgttttttttggctaatcatcacataacatgctatcaatggacattattttgtggcggttccccttttttttggtttatcaaatgattgacttcttcattatttgattttagttccccttagaattatcttggagtactttaggaaaagtttacttccgttttatgtttccgtagtcaatacttaggaagcaacgcttgttagttgaattcatcgggggcatttactcgagctttatcattgctaaatatcacgagcttcaatattttgtatgtgatgactagaatccatgaatatgaagatttatctgggatataatcacatctttgaaattggaatttggggtttagtttattcacttacattacgttgtctggtaaatgacaggtcagaaaaggctttttccactccagtc

SEQ ID NO: 56611 - DNA, 511 bp, Populus trichocarpa
  Intron number 1 from transcript POPTR_0015s00910.1 (locus POPTR_0015s00910) derived from phytozome v7.0 (chr-ID scaf fold_15; pos 522648 to 523158 reverse strand)
aggtattgagtgattgcttttttggttgatgggaaaatgtgagggaaaaagagaaaaaaatggttttatgttttgggtttttgttatttggttgggttttatggaaatgatgtggtatttttttcttatcatgtttttgacgtgccaaacagggaattagggttcatttcttgcttgcgtgtgttaaaatttacttatctagggacatgtaaaatatataggccacacccgtgctgtgtaatgctcggtttcctttggtgggagattgaacaaagctaataattcgtctctgttttcgtttaaatgtttttgtgttgtgtttgtatatggacatttaaatgcaaatcaaagcaacttttttctcgagtttttcagtttatactaggcaaccaatgtgggtattagatttctcagtatttcttaaaaaaatttgggtattagatgtttttggtcactaagtgtgggagttgttgatcacagaacttggaacagtcaaagctggggcaatcag

SEQ ID NO: 56612 - DNA, 748 bp, Populus trichocarpa
  Intron number 4 from transcript POPTR_0009s00720.1 (locus POPTR_0009s00720) derived from phytozome v7.0 (chr-ID scaf fold_9; pos 820639 to 821386 reverse strand)
gtggtttgtcgaggtagcaagcttttctttgtatttttttttaattgccagatgaattatacatggtgtggtttgtgatttatcagagaatttatgatttttttttatttgtttaaaccagttatctgtggcaattaagatttcatttttagatctgtttgcatggtccagcaaacaagattgctatcattcttcttttgaagtggcattttctaatctcttttatcatttgagttttgagccaactaaacatggttgaagatgcatgtcaaaatgtgtttgttttggcatagttcaactctgttttggaaaatttagtggactagtcatactggaaacaacttattagtttaggcttttatctcaagttagaatgggtaattgtgtcttttattatccactttgttgacttttattggaaaaaaacttgactaacgaatgtatcttgtggtagtatttgaataataacatctagcgagacatttgatgcctgtgtctattcccttctttaagcatttgacgtttcttatcagtatgattgaaaatatttaacaaccatgtatgtgtacgtgtatgtgtttaggcattggcataagttgctagatcttggaaattatactgtctgatttgaccttagatgtctcacattacttaataatgatcaacattgaatattatcttaagctaatctcagattttcttttacttgacagggaaccttcactaactatcaaaacaaacgcttacc

SEQ ID NO: 56613 - DNA, 597 bp, Populus trichocarpa
  Intron number 1 from transcript POPTR_0015s13080.1 (locus POPTR_0015s13080) derived from phytozome v7.0 (chr-ID scaf fold_15; pos 13186718 to 13187314)
gtatgctccttctctctaacctttttatagtatatattctgatagttatgatacgatggctaagaaaaagaaagcatctgccattaatcttctacattgatttgcataatttatacagaacctagcatgatgtgctgttggatcaaatgcgtggatattcaataagcattgctgtttcatcaaatttttcgttggggccttttctttcttttctttgttttttatctgagcatcaaggtcgtttctgttcactcattgaatttagctgcttaaatgattcatgccctataatttcaatcaccatgtctatcatgcagtttcgtttgttctaggctttgagaactactctgattactattttttatctttgatggttgaatgtttggaaacctgccactaaatcaatatggttactgcatctagtttgaatcttgtaaccacgtcggagaattgagaaagatttgaaggaaaagggagggaaaaaaaaggctaactaatgaaaatttatttggccaggattgttaatatattttctaggaaattctgtgattcgtgtatttttattctgttctcttcacatttggaataattaggcga

SEQ ID NO: 56614 - DNA, 519 bp, Populus trichocarpa
  Intron number 1 from transcript POPTR_0872s00200.3 (locus POPTR_0872s00200) derived from phytozome v7.0 (chr-ID scaf fold_872; pos 2086 to 2604 reverse strand)
caaggaaattagacacgccgttaaacatttagaaggtgatttttatttatttatagcaactaacatttagcaatctaagaattaatctatctgagtttgattttccggttgctaagacgatgtttttgtgggtttattcaggcgtggaaggtttgaagacagattgtgccggcaacaaactaacggtgaagggggaagtggacccagcaaaaatcaaagccaggcttgaagagaagaccaagaggaaagtcgagattatctctccccaacctaagaaagacgatggtgccgctgccaaagttatttccgtttacaagctggacatgtattgtgaaggctgtgccaaggaaattagacacgccgttaaacatttagaaggtgatttttatttatttatagcaactaacatttagcaatctaagaattaatctatctgagtttgattttccggttgctaagacgatgtttttgtgggtttattcaggcgtggaaggtttgaagacagattgtgccggcaac

SEQ ID NO: 56615 - DNA, 350 bp, Populus trichocarpa
  Intron number 1 from transcript POPTR_0009s02110.1 (locus POPTR_0009s02110) derived from phytozome v7.0 (chr-ID scaf fold_9; pos 2732270 to 2732619)
cgggctgggattgataagatcgaacggtcaaaaaggtatcttcttatgatcgtatggtgaattctgcatttgctgcttcgtgatctgtgggggatctgcatttgtttcatggattttagctgcttttgagctttaattgggttgatttggttcaaattcacaaagaaagctcgtttcttcataactggaattatctagggtttctttttcttttttgtgtggcgattttacctgttttcttattcacagtcttgacaatttatttttatttttttgatagtaaataagaagaatttaaatttattaattttttttacttatcttgtgcgtgtgacaggaagtggcaccat

SEQ ID NO: 56616 - DNA, 167 bp, Populus trichocarpa
  Intron number 2 from transcript POPTR_0009s02110.1 (locus POPTR_0009s02110) derived from phytozome v7.0 (chr-ID scaf fold_9; pos 2732669 to 2732835)
ctgaaaagtcacagtctttggacaaagaggaaaatgtgagtttatttatttatttttattattatgctgtttttctgtatcaagttttgattttgatggcttctatacgctgttgttcttcgatcatagcagggggcgactgctagcaagtctcgacataggagaaa

SEQ ID NO: 56617 - DNA, 948 bp, Populus trichocarpa
  Intron number 4 from transcript POPTR_0015s09070.1 (locus POPTR_0015s09070) derived from phytozome v7.0 (chr-ID scaf fold_15; pos 10390394 to 10391341)
aggtgatttataacggaattttttttaagtaatcaattttccttttatctggcatgtaggagcctgattatcaggcattgtagtgttgcaaagcttgagtgtatagaatttttgagatcaaagtgggcctgtttgcctatatatttttgacatgccaaactgacaactacttctttattcctgatggacgaaacaatttacaaaactggccaagatcaatgagataatctgcatatcaggggactggtgggacaccagtccaggtgatctcctaaaactggaggtcataaaactttcttgttttgataatatagtacgctacactttttttttcctaataattatttcaaatgcaaccagagattagatcccctatccccacaaaaacacattcaccatgacaatgaaactagcaacaagaaatctgaacaactgctcaatgtctagtggatatgaaaccaatatttatggaacttaatacatcacatgtaagtttttttatttcttctacatggtttacttaaacttctaatttaaaaggacctcatatttattattcaatgtgtgagaatttaatcattattttatacatgtacatccaaatatttatttttaactatatgaattggtgtgatgtcatggctttaccctgttacttagtctcctatctaaatcaatgaatgggctttcttaaggcatctagcattttgatttgacaatttgagtctcaatatatgtttttttttctttcttctttatgaagtctagcttctatcacattaacagcctttcttatgtctatttctctctaatatatactaatgttgctggtctttcaatgttttgggatgttttgcaccatttatttctggctatcattttgctacatcttcaagcttcaaattttacttttcattccctttcccttttttactttttagatcgaaa

SEQ ID NO: 56618 - DNA, 930 bp, Populus trichocarpa
  Intron number 2 from transcript POPTR_0015s08970.1 (locus POPTR_0015s08970) derived from phytozome v7.0 (chr-ID scaf fold_15; pos 10315385 to 10316314)
gaggtagcaaggaggctgctgcatctgtggtttgttctctttaagatttgtcacattttttcattgccttttcttgctctaaaaggaattagctgtgaaataaaaaagaaaatgggtattggaattttcatgtgtgcttattaaaaatcatcttgagtttgtgactttgaaattttaccttggtatgttaagacttaagggttcaattgggttccatcagcaacatatgcttctgtatgggagaagggaagaggtaggaattcactgtttccgttctaagcagaaattgaagaggatggatgatagtttcgtccagtgtaatgcataagcgttggtttatagccttataagtgataatactcataatctttgcgtgttcttataggattttacttgatatggtgatatatgtgaagtaaatgatattttgtatgtagatattttgaatctcagtcttccataattttggttcgctcaaagctattttcttatagtatgtttttgagattacaatgctctgggtacgtggcatatgggaacctctttcatagcattttacttgacatgaggatatttatgaagtaactggcatattgtatattgaaattatgtatgctgatgtaccataattttgatcttctgtaccatctactaatcgaaaaaagaccttttgcctctgattgtaaaaattggctgcctttgcactagcataatgccttcttttttttccttcttttttatcttgtataattctgtttgttcttaatgtgtcctattgatgtttcttcttcttctatgatttttttggatttgtagaggtcgatgtttttttgccccccatatattagcttttctctagttgtcttcatatctttcacatataccacatgtactgaaactcaggacttttgtcatttcggcagagcaagg

SEQ ID NO: 56619 - DNA, 902 bp, Populus trichocarpa
  Intron number 1 from transcript POPTR_0009s02670.1 (locus POPTR_0009s02670) derived from phytozome v7.0 (chr-ID scaf fold_9; pos 3429936 to 3430837 reverse strand)
ctcgatccacatcgcctttcttgttcgctccacaggtataataataatagtttgattgaaaaagtattgagttttaattcaaagtttatgtctttactagcattggatgatgacggggttcattaagatctgtaataaggaaggaagaggaagcttgttggtgacgaattgcctttcgtgattggattttaggcatcttgagaaataagtttcctttattttctcgttttgtttgtaattttaaggttttcattaaggtggtttagttcttttataaagtgggtttgatttaaatttgattcatctcttttagaatgtttgatctttgtgaaagtatgtttcaataactgaaatttgtgatcaagtcattatgaaagaaggttattaggggctggggtgcggttgagtttagccgaatgtgaactgaagattctatcctgactagagttcttaagaatgttatgtgatttgggagcttcgtttgtttctgttcttttgatgtcgttattgaacttttgggaatcaatagtgactgagatatgcaattctggatatgtaagctggtgatctacgagtttatggtactagatatgtttgttttctatgaggcatatgcaatctgagtgtgatgctgagagtctgttttagtgttggattgggttgattttagctgcccaattactgttttatgtgtgagaatgtgtgtaatttatctggcggatagctgcagtctaggtttatttcggctttccatttttgtacttgttggggaatctaaaggttaaacttgctctatggaccggatggtggattctgtctatgcatgtaatagagctgtagctaatgtaactgcttctgtattgtgtgttcgcaggttcctgttgctcccttgcagaggcctg

SEQ ID NO: 56620 - DNA, 550 bp, Populus trichocarpa
  Intron number 3 from transcript POPTR_0009s03650.1 (locus POPTR_0009s03650) derived from phytozome v7.0 (chr-ID scaf fold_9; pos 4260438 to 4260987)
gttcgcagaggtggtgcttttactggagagattaggtatgccaatgctcgtttaatctgtatttgggtcaaaccataaaggtgctggttctagtcttgagactgtgactaccaattgccatttcatgtaaaagtgctaaagataaggactatctccatttcccccttcttagtgccccatttcattgggactgtgactaccaattgccatcgctttatgggctaatatacaatatcatctgaacagtatttttatatatctttgtagttatcaatgtcatgtctgtgactaatagtttgttttgtttggatgggaaagaagaatcccaattggttgacatgtgatggttacaagatatggtataacaatgttgtatgaacaagttaaattttaagatgatctttagctagagagggacaggttttattttttgttttgaatatctgttcctgagatcttttactttttctaacaatatatttgatctttttactctcatttttgttgcctgactattgggaagtctatgtctcttgtggaaagcgttgag

SEQ ID NO: 56621 - DNA, 725 bp, Populus trichocarpa
  Intron number 2 from transcript POPTR_0009s04990.1 (locus POPTR_0009s04990) derived from phytozome v7.0 (chr-ID scaf fold_9; pos 5197820 to 5198544 reverse strand)
ttgttatttgcccgacaagagaacttgctatacaggtaaaggaatccttgcactgcagatgtatccttgtgaagcggcatatcaatcctcttttagatagtgttagacaaacctgacttcatcttcaattaggaagcctatagaaattatctgtgagccagcagtagggtttcatggactagtagttgttacctcttttctccccatgtaattatgagatgatgccaagaaaaaaaggaatttattcatgtactttccttcttgtaaattgatttcccccctttgtacgacttataaattatgcttgctgataaattctaattttgatggttgagttgaagcttctgtgatattttgaagttagatgctaagtgtttgatgtttttgacatggaaatgtgtgatttaatcctgtactttgtgttgacatacccatgcttcttaccgtctgtgattaccatcttatatttgaattgtaaattagttggcagtatgtcactttgctaatggactttgctttgatggcttttgcattttgaatttactttttttagctttagaggaaagtgatgtgattttatattggtagtgtgctataatttgtgatcaacttgccacagattgaaaagagaaaaaaaatgtgtttgtaaaagagaaaatttcatggctctggatagttcacttgctgttttccttgactaattcaacaatcaactctgcagactc

SEQ ID NO: 56622 - DNA, 555 bp, Populus trichocarpa
  Intron number 2 from transcript POPTR_0004s11750.1 (locus POPTR_0004s11750) derived from phytozome v7.0 (chr-ID scaf fold_4; pos 10604027 to 10604581 reverse strand)
ctcaccagaaacatctagtttcaggtaatggactgttggtagtgtctgtcacttttgagtattctttgtacttggaaccttcatacaatgcggactgtggagtaaattacttttgagtctctttccctattcatctagcctgcccaatctgatgacttgttactgaaaaggaccttatggatgaaattcttgcttttataggatgcagattttggataatcaatcattataccattgactttgtaagagtctattggtggatttttcatgatgactgctgttatatgcttgctatggttctgataattctgggcaacaaattcattctggaccttatctgtcattttttttgcatattagcagtctacaaatttacaaattcgctggaagatgcttacattctagttttacagatcatatagggatcaaaaaactcatttttgtgttttttaaatcactttcatgtgttcccataatcacatgccatattttaattctttcatggagtttcctagtttatatatctgacctgctttcaacatgatgatgaaggtg

SEQ ID NO: 56623 - DNA, 503 bp, Populus trichocarpa
  Intron number 1 from transcript POPTR_0004s11750.1 (locus POPTR_0004s11750) derived from phytozome v7.0 (chr-ID scaf fold_4; pos 10604669 to 10605171 reverse strand)
aagtttgtatagtgaactcttaatggctacatatttagagtataggttgaccatttttattagtactgtggatactaaaattccccaatgcataaaagtatccaactgctactgctatccctttggttgaccatttttattagtattttggataccaaaattcccaaacgcacaaaattcttcgactgctagtgccgtccctttcttaatttgggtttttcccactcagccccttcttgtctgttatgtcataggaatcttacctttctaccctgaaattttcagaaatgtaatagaaagtagtaagaaaattatcccatctaggctgcttatgtcataatcaggggattctcgttgctaagaaaccattttgctgcatggtagtttattgaaagcacttgtttctttgaatctttgctttgtttctacgtgttgctaatatgataaaagataattctgatatgcagccaaaattaaaatgattcagaaacgtgcttttgctg

SEQ ID NO: 56624 - DNA, 762 bp, Populus trichocarpa
  Intron number 1 from transcript POPTR_0015s12460.1 (locus POPTR_0015s12460) derived from phytozome v7.0 (chr-ID scaf fold_15; pos 12702999 to 12703760 reverse strand)
gaacgttacgttttcaagcgccgcaacgacggttagttacttataattacaaaacacggagtcaaatattgttcttttattagtgaaatggttagttttgcgattttgtgttttgaagtttgtgtattgttcgtgtctgaaagaacaagcttttggggttctaatctagtttgtcttgatgggattttgtctcaagtaataaattggctgttttttcatgtttggattctgggtttcttaggctgtatattttctgtttttgctctacagtagttgttaaaagaattgtatttttgtggtttttgtcaagaaaacgtgggaaataataaaaatttattattctaatatgaagtttattgttgaatttgaataatgtaatattgctgaattttttttcccgaaattgcttcgtaaagaatctcaaccgttgtatttatgggactcaatccactcattcaatggttgaggatttcgggaagatttggtgtctggttggtattgctctttgaattatgattagttgttaattaggataatgtagcttaattaatgacttgcagttaagataatgtatcttagaagggttctatttttatgttaaataaatcacttgcttttaagcagatttgcgtttgttgatatttggttcttggttgcttttcaaatgtattttgttaaattaggttgtgattgtttatgttttttgagttgctctgtatttttttttgttacaggtatttacatcatcaaccttggtaagac

SEQ ID NO: 56625 - DNA, 743 bp, Populus trichocarpa
  Intron number 1 from transcript POPTR_0004s18450.2 (locus POPTR_0004s18450) derived from phytozome v7.0 (chr-ID scaf fold_4; pos 18343999 to 18344741 reverse strand)
ttctcaatctctaagctccttaatccaaaatagaggtaaagttttcacctttattttcaatttgttacttttgattctttcgcatctgggtattgattatttcatggtagtgtttcttttaatccagtggtcttattttttagtgtttgggtttaatggctgtagactataatgaccctttttgtttgtaatctttgtggttcgtgtggaattgtttaagatattgataaatctagtttgaaacaagagtctaaagttttactcaagtgattgaaactgcttgcaagaaaactgagcttgccattgtaaaagatagtctcggggaggaattttgcatggccatctcgttcattcaggagtacttttgtgagcctggaaagttttttttatcctctctgttggagattcgagaagggaaatgagagaggggactaggcagtttgagtcggattcaagttatttgtgctgatttctcatatctcttcagttatgcagagcttagtaaaagaatagcagtttaaaaagaacgttttgatctataaatgtgataccatttcttgatttaggtaggaaaaagttttctttttggaataataggtcgtatgcgtccatattttatgctttatctctatttgtcgttgctttgtgacctgtaatgttgtttttattatgtaaaatatctttgcaatttgatttttttgcagaatcatagagattcgttgactaaccaaaattccgttgct

SEQ ID NO: 56626 - DNA, 510 bp, Populus trichocarpa
  Intron number 4 from transcript POPTR_0014s10780.1 (locus POPTR_0014s10780) derived from phytozome v7.0 (chr-ID scaf fold_14; pos 8062426 to 8062935)
tcaacaatcacaaagtgccttctgttcaccttcaggttttttgtttctacttaaaataattgcttcaagtgatttgtagaattctggtttatggttttcgtgttcaatcaataatttgaatcctgggtttgtagatgacgggactcatgaaatgcaagatgtgaattgtatattataatcttttctatgttatgccatctgctgctagaatgaaagcaaacttgcttgtagcacttgttgcttttttgtttgatgtagatattcactgaagggagaattttgaaggatctaaaccatagttgtaataatgcctttcatattacgaggacaattttccaaagttttcttttcttttcttttcttttattatgtttttgtatggcatttaatcagaatttttatgactcggaactctatcctttgatttgtggatgtttaggaaagattgaaaatagtgaatctctaatcgtgtgtgcaggccatattaatagcttctgattgcaacccaaa

SEQ ID NO: 56627 - DNA, 709 bp, Populus trichocarpa
  Intron number 3 from transcript POPTR_0015s11630.1 (locus POPTR_0015s11630) derived from phytozome v7.0 (chr-ID scaf fold_15; pos 12182310 to 12183018)
ccctctaggtctgccatctcgctctgtctatgtcattatttatatcaaccatcaaactaattatggtgattagttcagatagactgaatgctgatgatttattgttaattttactcgtgaggcagatagttaatgagcttataaggggaacctttgaagtagatttgcgataatatgggaagtgagatgtgagaaatgtgagtgcaggaatttaaggacaactaccttagacattcaacacaaatgggaacttttcttaattcatgtatgtaattctagtgttgatagaagttatctagtttttgtctttagatgtttataattttatgatcattggaaatgctcttaggaacgataggaatgcatcaccagcagagaaataaagtgaaatttgtctctcataattgcatttcttattgtcatgccaagaagcacctactataactattgacaagaagcctgtgataaaccacctgcctgtttcattacagcaagtgaatgagggggagatcttgggtagttctatgatcatataaatgaaactgcaaacatttcatactagtttttttgtttttgttcattaaagcatgatgcacatgcgctctctctctctctctctaatatatactcagagtgatttttcctttcacctagttttcatgattgctatgcagtcggggagaatctcttgttgattcaaaaagcccac

SEQ ID NO: 56628 - DNA, 569 bp, Populus trichocarpa
  Intron number 1 from transcript POPTR_0012s11890.1 (locus POPTR_0012s11890) derived from phytozome v7.0 (chr-ID scaf fold_12; pos 12247813 to 12248381)
aggaaacccacagccaaaacccttctcctcctagggttttaagtctgacggagtaataattttcccatctcatttcttttcatgagccaaggaatttatattctgggttgagaatagtggatataaaacaatcaatttccaaaggtaagcaaccccaaaactcaagcttcttactgattttcatggtttctgtcttcaatttgatttgtgcaaatttggggtctacccacttcacaattcctcaaaaagatccaatctcttgtaggttttaatctccccttttactctctttgcctccttgttttacatccatgccatgatattgactataatcaataaaagggtgtctaagttctctgaaatgatagctcaagtcaataaatctcttgttttctctcctgttgatattgaaatttcctataaaaagcaaaacccttttctcagttcccttaaagttcaatgcttttgcagttccagatcgtcccagaatgcaaaagtttcacattctgggtcagttcaatcacttgttactcttcatagtactcgtgtctcacgggttgcgagaactg

SEQ ID NO: 56629 - DNA, 489 bp, Populus trichocarpa
  Intron number 2 from transcript POPTR_0004s10130.1 (locus POPTR_0004s10130) derived from phytozome v7.0 (chr-ID scaf fold_4; pos 8691057 to 8691545)
gcaaggtttttatttttcttacccttctctggctttagctggaatactagtatgcactgaatagtttgtttgatatcaatgataaaaatttgatttaagcttgtcttattagcttctagtaaaaaaataatgattgaaagttcagccttttgacttatagtaaagttttaaatttcaagtcctttaagtaagctgatgattaaagtagttgaatttttttttagtgaaataaccctgaaatttatttggattaaagtaattaaataacttgattagatttattgacttgttattgatttggactgagtcaagaataaaaaaagaagaagctcaacttgaatgaattgttgaggacacttttgtttatgcatgcagcattttttttggtttacaatatgttggtgttaatgtaaatgggttttttgaaaaaaaatattttgattgatattgctagttgtttacttggggttggaaccaaagagggacatt

SEQ ID NO: 56630 - DNA, 479 bp, Populus trichocarpa
  Intron number 3 from transcript POPTR_0015s06150.1 (locus POPTR_0015s06150) derived from phytozome v7.0 (chr-ID scaf fold_15; pos 6420682 to 6421160)
ggtctctgacgcattttgaggtattgagttgactatagcattcggatttgaaaggcccttctcttttaatttccttgcctttctagtctcttattgaggatacttttttatgctttgtgtaaccttgttctgtttcttcattaatgatttttttttgtttcaactattacagctatatttcgtagtttggttgtcagaatggtatatattcctctctgtttaaagtttcgtatttgaaatttgatcttgcaacattgatcaagtcttgggtggaaattgcataggatgtgtgtggaccttgcttattcataattctttccatcgttgatttgaatgttaccttatttttcatgaaatctctgcgtattaatccttgccttttttatgcttgtaacctttctctctaaattatagtttcccatttttggcactcaacaacgaaaacttttcaggtcctcactgctacagcattcacctta

SEQ ID NO: 56631 - DNA, 177 bp, Populus trichocarpa
  Intron number 1 from transcript POPTR_0004s10070.1 (locus POPTR_0004s10070) derived from phytozome v7.0 (chr-ID scaf fold_4; pos 8618376 to 8618552 reverse strand)
aagagccacgggtccttcccttccctttctctcttcttttattaaaacgccttgttttttaattcttcgaaaatctgcaggtctttagttttttttttgttttacggtgcgttttggattttctttgaattatcgttttgtttttttggtttaataatgtcaggaatctattttgtt

SEQ ID NO: 56632 - DNA, 400 bp, Populus trichocarpa
  Intron number 1 from transcript POPTR_0001s43310.1 (locus POPTR_0001s43310) derived from phytozome v7.0 (chr-ID scaf fold_1; pos 43352286 to 43352685 reverse strand)
aatatcttcaagaaaaaaacttctcctaaaggtacttgttttttgttataaagacatttttaagtgggttttgtttaaaattagtgattgtgttgtaaaatcttgaactttttcagttttgatggagtggagggtgctcttgtttatttgggtttaatgggctgctttgaatatgttgctgggtgtttatatattataatctaatgtcaatgattttcttgtttagtttaagtttttgaatggaggatcagagtttaatttgtttgctttgctagttttgatgctcaatttgcttgttagttttgaatatatgttgtaagttattgaaaagtgagatttatgaaggcttttcctttttcttcttaattcaacagaggctctcaggactagcaagagagaa

SEQ ID NO: 56633 - DNA, 900 bp, Populus trichocarpa
  Intron number 1 from transcript POPTR_0009s09580.1 (locus POPTR_0009s09580) derived from phytozome v7.0 (chr-ID scaf fold_9; pos 8437301 to 8438200 reverse strand)
gattcgagtttaatcgagagtctgctgataaggttggttagtatctctatctctccatccttttccttttctctttcaattggattggattggactttgttttttatattgggtgttatttttatagaattaattagtttttgttatggatttgatgatagttgatgggatttgtgaagtttaggtttaattgagcctctgaacttgttgaattattggggattaggtttaaggcgaaacaactgaatttgatactattggctttgtttgaattcatgagtgctttaatgaatgaaattatgaaacaaatggattgtgatatgatttgggatgtaaatatggcgcgcttgcttaaatttaggtggtatgttagctgctggtattgaattttggcaaaatgtaagatttgaagtgaactgagttgtttaacatttaaaagtttttataggcagggagagcaagtaagaactactatagataattcatcagatgaaagctgttattgtggaatgagagtgtacatcgtgaattttcaatgataaactggtttgttttcattttgcaatatgagctgggtctataaattacatctgtttctcttccatgtcacgaagtttgcatttggtttgtgattttgttcgctacgctctatgcaactactgtttcataattggtcaatttattgatcactttgttttactaccaagtcgtggtaattttgtatgtagacgataacaagcaacaggaaaatcaatttgcatgttgagttcaagattgtttgtagttggtatttgattaactgttcaatttaattcttgaagggtcatatgatattcgtagtgattaagagtgtctattcttgcagaaatcagttctctcagatttgatacaagagataga

SEQ ID NO: 56634 - DNA, 966 bp, Populus trichocarpa
  Intron number 2 from transcript POPTR_0014s15240.1 (locus POPTR_0014s15240) derived from phytozome v7.0 (chr-ID scaf fold_14; pos 11318308 to 11319273)
gcagcgccatttctttcaggtactttgatgccatgcccatgtctctcgattagttggatatttttaatgtagatatttagataaattgtcaaaaatccaggagatatagaagatgtcgtctgaattccaattctaaaagaaacatgcatgcacaaggaacatatatacttcattggtgaaagattctgcactaaccctaacaatgacatgtggggtcgttgcagcaggagttaaagtatatgcagttcttaatgttgagaatgaaagaagaagatatgttaggttcagtaaatatttttgttaaaataaaggggaaagagcaagcgcagcctgaccttttttcaaaagggaaagttctttgttggtaagctattattttattgatgatgatcatcaaaacagttaagcgagctcccagttgtggccgatgcttttgggttgtcttctttgaaattcttttctattttctattgaactttttctttcagctatcacgattcacagctacgggagattcctaattaaaaaatatatttatcatgacagccagattaattaagcaaccaataatgatcgacaatgcgatcttaacaagatcattagaatatatatatctcttaatgcgaacgtcagctattatagagtcacgcttctaacagaaaacgatgtgaatggaaaaacgcgaagagtagagaaatccttcgcaagattctgaaaaaaagaatagcattaagggacaagctgtgtataaattgtacaaagtgtcgttgtctaggtattaattaggtttaaaggaggtcagttttttatgctaaacatccagcccttccatttgaattattgaaccttcaagagagacagtgcagtctagttctttggtggaagtaatgttgtggagattttgtcacaatgcctttcagtattatgattgaacacagcatttaaaatcatgcagtggagctgagg

SEQ ID NO: 56635 - DNA, 306 bp, Populus trichocarpa
  Intron number 2 from transcript POPTR_0004s07500.1 (locus POPTR_0004s07500) derived from phytozome v7.0 (chr-ID scaf fold_4; pos 6181751 to 6182056)
ttcttctccaaggttacattaacaagacactcactattgaaaatgggttttcctctcaggttttttttttttttttcttattttatttcgtgtttattaatattatttgtttttcgacatcatatcgtactttaagttaggttaaagtttatgttgcaacaggtctttcggcatttctgtttcggctttcctcctgattgggaagaatgtggaaccaagcttctgaatagtaactgtgttaaagcgcggcagagcctccggtgtctcaaaatgaatgccggcctattttcttattattgccagtag

SEQ ID NO: 56636 - DNA, 331 bp, Populus trichocarpa
  Intron number 1 from transcript POPTR_0009s03070.1 (locus POPTR_0009s03070) derived from phytozome v7.0 (chr-ID scaf fold_9; pos 3770706 to 3771036)
cagtactggtagcggccgccgagtctctctttccggtaagtgtccgaccacctttctcaattttagtttaagatcatcattgaaatgattttcatcttctgttttttaaaattatttgattttggatccgttattttctatttatttatttttgttttagctttggcgaagttagctaaaaagaaatggaaaagtttgtatccgtcagttttaatttcacttacctatttcttatactactttgattttctgttcttgttctctcaattttcctagtgattgattgtcaatttcaggtcaaagggcgggactgattggatttcactaagat

SEQ ID NO: 56637 - DNA, 698 bp, Populus trichocarpa
  Intron number 3 from transcript POPTR_0004s14150.1 (locus POPTR_0004s14150) derived from phytozome v7.0 (chr-ID scaf fold_4; pos 14651774 to 14652471)
cagtgaaggaatacgaagaagctaagaatttgcaggtcatttacaatttactagggacagctaggtacttagtatgacgcccttgagcaataattttcccagtctttttcttcttcaactcgacactgacaactccaacagctttacccacacgaagaaccctagcttcaatctcgatttcttcctggaagaacagaaatagaaaacttcaaatgaataataagtcagaattcgttgtgctcaagttattttacaagtacagaggcacatcatgacatgcatacactaatccattgactagacagctgctatgatgaatgaaattaacacccagaatcaacgttgatactgagatttattttactccctcttaccgtgctaagaatttaagatttccctactcattttgttctcttgcttgtcctacataccaaagcttcttgttcattaacaaacagtgtaaacccagtattttatcccatctaataaacaaagcattgctcaaaagagggtagccccattccaactttaacttggtatactctttagtgagtcaattgcacaacataaacatgtaaaggctaaaatagagaagttcagcagggaaaattttatggtggaagtacctagtggtatcctattagttactccctggacttatcttgaaaaaaaagatagatacaaagagaaaagagaag

SEQ ID NO: 56638 - DNA, 1006 bp, Populus trichocarpa
  Intron number 1 from transcript POPTR_0011s16740.1 (locus POPTR_0011s16740) derived from phytozome v7.0 (chr-ID scaf fold_11; pos 18514431 to 18515436 reverse strand)
tgtttctggttgctccaatcataacagcgttggaggtatttttgttgttcttttttgttacccttttgatttttttttgtgtttttcgaatggtggatatagtggttggtgtttgatttagttaaagtttgaatctttttttgtttttgatgtgggttgttttgggttttgattatggtgatcattaggttaatgatttttggtgagtttttatgatttggactgactcagatgggaatttggttgaattttggctcttttccctttaatcggactcaaagtttggtactttatggggaaaaaaggaaaataaaaatggaattagaccttcaccttataatcttcggagatctgctcttaaatttttttgtccccaattatttttagttttacaaattggagttgatttgttggtaccaatgctaagctatatgttttggcccctaatttaatctgattgtatgtttatacggggaagtttttagagtaattaagctgctgtagagtggactcttccctctgattaatatctttaatgtttgtgttgtttgcacaacacttgaactcacttttttgaggttgctgatctcttagctttgccaattgtcgcctggattttttttttttttttttggttgatcaacttgatttgttcatgctttcttttgagaataggggttcttggatgcttaaatgaacttctaagttggtagtttttaagaattctaatgcataatgtttgttgtcttctctgtatcagttccaatatggacgctaataatcaaaattttctgataaaccttcaattattatagccctatgtcatatcctttatgttctccacaccattgttgaatacataaatataatatcaacattctctcacattttcaacgttgaagaatcaaaatggcaaaacattgtttcattttctttgctttttttagttactgttcatgtatcatatcctacagaaactgctgccagggacacattggaagaggtt

SEQ ID NO: 56639 - DNA, 422 bp, Populus trichocarpa
  Intron number 2 from transcript POPTR_0001s25120.2 (locus POPTR_0001s25120) derived from phytozome v7.0 (chr-ID scaf fold_1; pos 24345941 to 24346362 reverse strand)
agactcccactgctgagatactcttccctcctgtgagtaattgcgacttgcttttttaacaattttcttgtcattaacactgaatttcgtcaagtgattccgctggtatactcgtttttagcacttctttgaattctctgaacctgaaattgaaacgagctagtggaaacactttcctttcacattatccagtctttgtactggtaaatcgtgattttagttgagtagtttttgaattcttaagtaattgtcggtggcagttttgatatctgttagttgtatgtgatttttgaagcgattcatgagttcagttattttggctgttggaatttctatttcttacgtgggtttttggaattgcagacacctttgcaaacccccatgcagacaccattgccaggaagtgcacaaacacctttacc

SEQ ID NO: 56640 - DNA, 623 bp, Populus trichocarpa
  Intron number 3 from transcript POPTR_0009s12800.1 (locus POPTR_0009s12800) derived from phytozome v7.0 (chr-ID scaf fold_9; pos 10379777 to 10380399)
ccttgtgcactttcctgtagccacaaggcatactggtgcttgcttctactcacttttgttttgccttgttattatatatatttatgtgcatcagtctatgccttttggttggatttccaactcctattatcggtgtagttcgataatctgattagctgaagattcttatgatgaatataggagatggcttggagagatgatgaagatttatgattaaactttatctatttcattgcttagatggtgcacattctgaatatgaatttgtaaggagacttggtgtgatcaatttcgttctagctatcatagaaaaggttttgttggctccactgcataatatatggggccaaaatcaaaacagatggaagaaaagacataaagtgggatcaattacagagattagatacacggaagttagatggaaaaaaagtatttgtttttcccatttatcttctctacttgtacgcctgatttacaattttctacttcaaccagtgaaatttgcaccaggaagtaaatcttctgtttagttgattagaagtctgacataaacaataatattgtgttctgaaactttatgatttgtttgcatgcaaataggagtgggtgcgactggcagtgca

SEQ ID NO: 56641 - DNA, 363 bp, Populus trichocarpa
  Intron number 4 from transcript POPTR_0015s15270.1 (locus POPTR_0015s15270) derived from phytozome v7.0 (chr-ID scaf fold_15; pos 14602856 to 14603218 reverse strand)
aaggtgattaagctgctagttctcaatatggtttgaaaaatcctgtcagataaatcactggaaaattggcattacatcaaagtttatgttagaagtttatgattttatgttatatcattagtcatagtctgaatggttaaaccattcattatctgtaaatatttaggttggttgagcttctgctctttgtactttccaggtgaactattttgttttttcagtaacagggtagcaatacttgtgtaaacactctgcctcctatgagtggataaatttttcaactttttctctgtttatgaagaatgtatgttttcatttccagttaagtttggtgttctttctctgcagtttgacaagggttat

SEQ ID NO: 56642 - DNA, 952 bp, Populus trichocarpa
  Intron number 2 from transcript POPTR_0004s20640.1 (locus POPTR_0004s20640) derived from phytozome v7.0 (chr-ID scaf fold_4; pos 20104452 to 20105403 reverse strand)
attctgtcccacagattgctttatttaaaggcgttgtaagtgtcatagtggaatttgattgattttgggagacatttattgttattgttgttaaaagctttatgatgatggtcatgttgcttgtttccatgggatgactctgtagaccgggaaatgatgatccctgtgatcatttcaccgatgcttgtggaatatgtgttttgggagttgtttttgttggggattctctgtggctgatttgtagtttgtatgcaaaaatgggaatgtaaggtgcaagtgttggcttgggtaggttttcataagaaatggattagtttgagtatattaggcaatgactaataagtaggtaatattgaaactttaatgagatttcatttctctaatatacacctttgaatgcattgagttatcctctttattaaatgccatgctgccacacatctaagcctgatgtttggagttactgtttggcagcttaactttccctttcagcagtaaaggcatgtaatatggaatgagaaaaggaaacccatgctgtggattctgtattccatagcatactgaaaataaaattaaaaaatcacacatataagctcctttattctcagattcttgtgtgtgtgtgtgtgtgtttgcttttcaaaagccaactgtttttgtgatctaaaaatgaatcgtgctggtccactggttttgccagattgtgaatgagtaaatttcaggatttgtcttgtttttaatttattgagcatgagtagctagttttgtttctgtttttttccctccattcttgatcattgtatacaactttcttttcactgtagtctgttataagttgaacaactgtgctattgaagttctgcctttaatttaatgggatttagattcatgttttttatgttatttatttgtttgtttgatttcatttgtcagatagaagcgatagtgcagg

SEQ ID NO: 56643 - DNA, 494 bp, Populus trichocarpa
  Intron number 3 from transcript POPTR_0011s02520.1 (locus POPTR_0011s02520) derived from phytozome v7.0 (chr-ID scaf fold_11; pos 2425043 to 2425536 reverse strand)
gataggtaactattctcttctttctgggtttgttttatcaccatcacctttactactttttccccattggcagggcatgtttgataattaatgatcatttgatgcttttgtctgctcatcgttccttcgttgtgagttttgagataatcaacacaaggactgaagtctatttgatgaaagtaacttgaacatctattaagacttctatagttgataagatttgaaggtttaaaagaggaaagataactattttcctgccagtcgagtcatacttatgcaatataactatagtatagaagtgaatactctacaacaaaccaaggtcttatgcagacttcctgatcatagaacttatttatgtggtgtgccattcgtttgatttattattgtactttgcactttacttcaatccgacttttaacattacttgatgtcactgcatgttttgtctttgagcagcattgcagagaaattcccttacttggtacagaaac

SEQ ID NO: 56644 - DNA, 782 bp, Populus trichocarpa
  Intron number 1 from transcript POPTR_0001s04960.1 (locus POPTR_0001s04960) derived from phytozome v7.0 (chr-ID scaf fold_1; pos 3808649 to 3809430)
caccggtttagcaagtatacctgagatttgattgatttaaaatttagatgggatgaattgaagagaaaaaaattggctaaggcgattaaaaatatagggcaattcattagcttagtcaatcttgcttaaccatcaattcattaatttttttaattttttttattaaaatgatattcttttaattcttaaataaaattgaaggtaaatctagattgacattttcaacctgtaatccaaaccttatcctgattctgagtggatctttatttcatgttttagaaatatgatttgaatgaaaaattatcttttcaagtattgttgtaatttattttatttataattttttttgtcagattccacatttcaataccataaaaatgttttcctacatttccatggctcccatctataaaatcaacaacagtgttcaagtaattttaaagggtgtagtttaattagtcaaatcttgggtttgttcctcaaatatcaacagttcgagtctcacaaatctcaaggccattggagacttacatggttgttaacttcaagatctcgagggaataatcgagatgcgcgtaagctagcccgaacaaaaaaaaaacttgaaattaactttaaaaacttgaaattcagatcatgatttgagttgaattttgagttaaatttgattcaaacaggttttagtgaccaattaagctgatttgatgtaatccaactgaattaatacaaaaaaaataataaataatattgattgttgtatttcaggagcacgcttacttggt

SEQ ID NO: 56645 - DNA, 941 bp, Populus trichocarpa
  Intron number 2 from transcript POPTR_0011s11080.1 (locus POPTR_0011s11080) derived from phytozome v7.0 (chr-ID scaf fold_11; pos 13752500 to 13753440 reverse strand)
acgaaacagagaaccttactcgtgagtataataatccttttcttttctgaattcatgtttgaaaagatgaattcattcttgtaaaacattccctgcatctctgatgtcggatttactattgaattctacattccagtgtcaaatttgcaaacatgatctttcaactctgttttatatatatatatatatatatatatatgatccaaaagggaaaggaggggaagggggatgttagttattacatcattgttaccattgttttgtttgagtcttcatggtgtctgtgcttttcttgctgtttacaagtaatgttaactgatgttgcagtttccaattagaagtaatatgctgattaatgagttttgaggatcttgaggtttatttgttgatgagactttctgttttaattttcaatcaactttgcttgggtttaaaatatagtagtagttaatctcatctagataagcctttcctttttgacatatggctgaagagagttgcttaaagaatgtgtatatctctgttgcctctttcttgtcatcgttttagaatttgactcttcataatgaaaaccctgaatttcagaattttttagtcatcttgggaatcaaaatacaaaaaacaaaacaagtgatgaaattaatatcttatttatgattctatgtgccaaaaaagcttcacaaataaattccagatgcgactcgcccacttgaatttgatgtgctcatttctttgatcatcttcatgtgcaatgttgtatgaaatgatgaccatgtttctctaaataagccccacatgctttagtattgggtgttttggcatatttctataccactttacatggttttacttctttcccaagttgctttttttttggttagatgttgtgtgatgctttccattggaagaaaaactttctaaaacattctggtctcccacag

SEQ ID NO: 56646 - DNA, 592 bp, Populus trichocarpa
  Intron number 1 from transcript POPTR_0011s11080.1 (locus POPTR_0011s11080) derived from phytozome v7.0 (chr-ID scaf fold_11; pos 13753469 to 13754060 reverse strand)
ccgcgctggtgctgagatcgaaaccgtcaaaaaatgtatccatccctcttttatattctcccctccgtgttgtttagatgcttaatttaactcaatcagtcgatccaaacaatctttttttttttctttttatcttttctgttattgatgatgatgatagtgaagttagggtttgtttctttatacaaaaaaattaaaggacatttaatatttgtttcagatctatctatgttcttattattttggaatctattgtgacaccaagcaactgtagattttttttaggaattagggtttctttgatagttttataccttattattattattattattattattataaataagcaaattaatatatctttgttgttcctaatcgaagacattcaaaaaaccctaatcttatgttccaattccaaatacacgcttgcacttgggtgcatggtacgggaaagaaagaagataaagtgaaacatggcagctagagatgataatgaactgcgatgatgtttattttttgtcaacttaaaatgattctattgtaacgaactgcagcaactgctggtacaaacaaggccgcttctagcagc

SEQ ID NO: 56647 - DNA, 827 bp, Populus trichocarpa
  Intron number 1 from transcript POPTR_0011s13810.2 (locus POPTR_0011s13810) derived from phytozome v7.0 (chr-ID scaf fold_11; pos 16449481 to 16450307)
aatctaacgcgtcgaaaccctaatcaccggataaggtaatttatttttgttccagttagtcgaattgatcatcttatgcaaattattagcttagttgttaatttcttgcgttaattatgtggatcttgtttaaaaagagtatgtccttgtaacttaattgcaagttttaatcttttcttgaaaggttgcttttctgatgttttgattgttagttttgtttgtgttattttttttttcatttactgtaggtgtttttgtgtctgtggtctgactagcttttgggcttatgggtgtgattatttctcttcgattaatcagatagttgagatatttgatctttatttagtgggattttgatgaataaagcaaggttacttgttatggattacatggatatccgtgtttccttattcgtattagtttgcgatttgatatattgtgaatttatcagcttgtatttgcactgatttatgacacttgagcaacatgtattaatctaggatgttgatttgatgttttggttgttaactttgtcatgtgaattttttgtggcatgttctattgtagaaatagagcaacttggtcttgcttcctaagaaatatgttgtagtgttagaaaggatgaagtgatacctttgattaagttagttatccgtagtttagtccctgtgaaatatgttgttatggtagaaaggatggagggacatcaactgtcctaactttgacaaaattagttatccttagttttcaattgtgttttagtccctgttaatgtgagttattgctgtttaggtctgagctttcaggttgttggacttccttgaaca

SEQ ID NO: 56648 - DNA, 414 bp, Populus trichocarpa
  Intron number 1 from transcript POPTR_0004s00950.1 (locus POPTR_0004s00950) derived from phytozome v7.0 (chr-ID scaf fold_4; pos 460868 to 461281 reverse strand)
tgttacagcttcaacagcaccccttgagaactaaggtatatatttgatgtcaaatctctttctttgttatgtgtttttttgtttgttttggatttgtttttgattgaggaaggaagtgattgaagtttgaatcttttctacttttttcaaattttttgggcttcattttttatggggtatttgattgagggaagaatgcgataaaagtttcgatcttttcatttttttgggttttttcttaagatggggaattgaggtcaactaccctcttgatgattgcaattgtgttatgaaaaattgagatccacatttgtaaatgaatgacctttttgaatttttaatatgatcggattttgtaagaaacatttgtgtaatgcaggcaattacagcaggggtgttatcagctgtcagtga

SEQ ID NO: 56649 - DNA, 489 bp, Populus trichocarpa
  Intron number 2 from transcript POPTR_0015s12860.1 (locus POPTR_0015s12860) derived from phytozome v7.0 (chr-ID scaf fold_15; pos 13051200 to 13051688)
ctcaagctttcaagaaagaagctccaggttggatatgcaagacttgcctttcattcatgggaattcggctttttttgacatgttgagacactgatctggtgctagtgagagtgagagtgacatgttcagggtccccagtgttatgttagagtctgcaggaaacttaagtgcatgttaattgccttgattatggaaaatcatattgtggaaatcttgtgtgtacctagtaacgtaactactgctggaatgttaattgccttgattatgggaatgaatatgtcatggactgcagttgctctaaaggttcttgatttcaatgatgctcagccatgcctagagaaggcatgacaccgaactggcaagctacttctgttgttgactacctgcttttctctgttagttaatggaaattgaacattttccatggcgattcttctcacatatgtccagaagtcgtattctcttttgattttcttttgagggaggttt

SEQ ID NO: 56650 - DNA, 963 bp, Populus trichocarpa
  Intron number 4 from transcript POPTR_0009s03300.1 (locus POPTR_0009s03300) derived from phytozome v7.0 (chr-ID scaf fold_9; pos 3969668 to 3970630 reverse strand)
agctgggcaggagcggttccgaacaatcacaactggtatgtttctcttttgtagatactgttttctcagtgatagaaagggaaaggatatttgtgaagtctgctctacttaggtttctcacatttcatattgctcataaagaatatcaaactggtgggttcatgtatgagacataagttatccacttgaagattttccatgcagaacccgccaatttgataagctccattactctctggggaagtgttttctgtgatggggggagagatattcttacagttttcatttttttgggtgggtctgggggtgtggctgaacaaacttttgaatgccctactatgcaaccaaatatgagcgttcactttttgaagcaggggcaatgtgagagaaaatttgtggttggctgtggctggatgaagattaatcctaaatagtttgggattaaggcttgttttgttgattaccaggattgcataaaggctctagtccacctcgaggaatatcctctcaaattagtattgatgtgaatggctgacattggcatcagggaagcctggatttctgatgcatgaattgcagcttggtattgcctaagttttatgcctactagttcatgacacttggaccactgcatcgtgtatgtgaagatctttacatggttagaattgtaccatcagactaaccttttactctgggtatttctaggacaagaccattagatcttagatcataatcgtcaatgcctggcatttggagttttgtagttcatagaactgtgtttctggattgttatctgtgttgtctgtcatgcaattgttataagttgatttgtgcttcatttctaattcatgtccctggaaattcattccatgtcagcttgcaattgttataagttgatttgtgcttcacttctaattcatgtccctggaaattcattccatgtcagcttattatcgtggagct

SEQ ID NO: 56651 - DNA, 708 bp, Populus trichocarpa
  Intron number 2 from transcript POPTR_0015s14500.1 (locus POPTR_0015s14500) derived from phytozome v7.0 (chr-ID scaf fold_15; pos 14065222 to 14065929)
ctgaggcttactcttctccttgtatctatactcaagtaaggtttttgtgctcttcttttggattagactatgatgttttaaggagtgattttggtcataattatggtactgatgcaataattctatgttggattgagtttaaatgctattgaaattaacagtgagttttgttttttgggttacgtgctgttgcaagttgtgtgtgtgcgtgtgtgtgtgtattgtatactggtgtgtaaatatggggtggtggatttgtattgatctttttgtatcatgtatattgtatgctgatattttaaattaatatttctttatctttgatatatagtgtaatgctataagtttgctggtgttttaattcatcactattatgatacttgaagagaagtaatttagttttgagggaatccaatggtggatggtagcaaaggctattgtttggttcagtatgagagggaaatttatttctttctttcttgggctgttgctacttaattttggttgtagatatattgttagaatacaatatgaggccataaatttgcatttaactttgaattaagcatgtaactgccaggcattttcagcattataattttgtttgcttccttatggtggtgtctcaagtagttagttctggcgagctaattagtgcatggtggttctgattattgttgttttgtttgaagattgagactggagagg

SEQ ID NO: 56652 - DNA, 901 bp, Populus trichocarpa
  Intron number 1 from transcript POPTR_0011s14080.1 (locus POPTR_0011s14080) derived from phytozome v7.0 (chr-ID scaf fold_11; pos 16643603 to 16644503)
gtagtgaatttggtggcggtacacttcatcttaaggtattaaagatgttaactttttcggttttcttgttttgggttttgttgaagttgttgctttttattgagttttggaggatttgttatcttggtttttaatttggtggtgggacattcttgttttatggtaataaagacttgataacttttgatgtttttgtttttgttgaaatttgaagttatcgaatttattagatttcagtattgaattgaagcgtaccagggtgtggaaggaagttaatttggggttttagtctggttgttttgtttggttttagttggaattggatgttttttttttagtgttgagtcgaagctcgttttggctggtatcagggtgttaaaggaagtaaatttggggatattgtggtttgctttttgatggatttgtcgaaaataggagtatttgttgcatggtttgcttgatttgaatgtctgctgaatttgagttcttgtagcacggatgtagatttaaagtgattgttttatagtttgttttaggattaaggtgattagtttgctagattttagttgtcttgttgaaattggaggatttatatagggatttgagtttatggaattttagaaccgtgtttgagtttcttcaggctttgaaatgcctggagtattgctcctgagttgtattttaccttttctattatgaagtctgtttcactttgttggaatttttaggatttggtatatggattccttatttttaaggaatgaatttgactttggttagtcaatgtgttggtggtttatttgtgctagtacccgtgagtgattgcaattttttttttgtgcttgtagtgatttgaaatgtgtctttatgctgttcaggttagtaaagctcacagctggac

SEQ ID NO: 56653 - DNA, 1015 bp, Populus trichocarpa
  Intron number 1 from transcript POPTR_0009s02000.1 (locus POPTR_0009s02000) derived from phytozome v7.0 (chr-ID scaf fold_9; pos 2573861 to 2574875 reverse strand)
tccaccagcgatttcccttctgttactgcctttacgtaattgaattccttgccttcctttttttgttatttattgtgttatttgttgtgtttggctcaattgcttgattttgctttcatctttccttaagagaattatatgaaatatttagcttattaatatcagtttggtatttttaaaaccctaaattttttattttattgctgctgctgctgctattttaaaagcagggaagatgaaatgtttcaacgccgtagcaaaattacaagttaggctcgaaaaaagagaacacttccgtttccaataattttatctagggcttgatttgatcaggctgtggctgttcatttggaaaagaacactccttttccgatactgtctttagcattttgattgatttgtgtggatcattggtatggagaagagaattagggaaagcacttgagtgacgctggacttgcattggtatgtcatgaagagcatgcctctctaaagagcttataattaaattttcaccatatagtatatcttcaaacactttagttacaccggacttgcattggtatgtcatgaagagcacgcctctctaaagagcttataattaaattttcaccatatagtatcttcaaacactctttgtttgtttccttgttacttaatatttaaagcatcctcgttttgtattagcttgctgtatctgtatttcaatgtggttaacagcttggaaatataataagtatgtttgacatgttctggttactaataagatttcactgttgatgagtgagttgttttatcccaacaactgaattagttgtgctttggatgtcttctacgcaatcatgctactgaattttgcatatcctactattaacaggatgggatgtctaatttttggtttgcgagtcagtttttatgtgaattatgatatttattgtttgatgacatcagttcttttcttttataatgcacaatatcagctacctagttgtggccgctagcttgcagtgcctgt

SEQ ID NO: 56654 - DNA, 537 bp, Populus trichocarpa
  Intron number 1 from transcript POPTR_0009s01180.1 (locus POPTR_0009s01180) derived from phytozome v7.0 (chr-ID scaf fold_9; pos 1319065 to 1319601 reverse strand)
ccacttcttaattctcctgttattgtcaagaaaaggtctgtgtccccccccaaatcacttatcttgttttgcttttgtacaactactcttgttggaaagtttgatctgggtatcagctagtttagttttctagttttgctgtttttgagcattgatgttggttatgtgattattgtgtattgtcttgaatcttgattgatagtactgctcatgatttcatggactttgtttcttttcttttagaaccagttttttgtgaagcaacccttttttgctttcttattattttaattttgaggtgaaattttttaatttgattgagaacccattaagtaagagatgatattttctgataaaatgtaacaaacttgaggacttgcttggcatttggagcaccgattgagtagaggatatcatcttacccccttttgtgatgaaatttttgttgaatttgcaatgcaagttttgcttttgataaattttttaacttgtttgttttgtttacaatacgaaccagcaagaaagttattggcttgg

SEQ ID NO: 56655 - DNA, 806 bp, Populus trichocarpa
  Intron number 1 from transcript POPTR_0009s07660.1 (locus POPTR_0009s07660) derived from phytozome v7.0 (chr-ID scaf fold_9; pos 7107822 to 7108627 reverse strand)
tatctgcctatcctagctagcttgcaggagatcaagtaagctctctcactccataaatgtttttcatatcagtttttttttttcctatttcctttttgtgagttttgggcttcgaactggttttggttctagttttcatgcttcagattttgtctttaatgttaaattgtttctctggtttcaattcttgaagaagatcattatgtcatgctagtatgactagaaaccacgacatgtcaatattacttccttttcttttaacttctcctgatcttaaaaccttagaagtgaaatgcattcatctttgattcaatcaatataacgagaaacgatgagttgaatgatatcttccttttgtgtttgtggcattgttgttaaactcatatgaacttgactggtaaagtaagtcctggccggttatggattggaaaaaagtctaaagttagtcgttttggagaaatcttacactcaaggttcatctattaatcttaactgatgtaaagtgtgaattaggcattctaattttgtcgagcttgagcttgaatatcggagcttggttcaagaacctgatagttcactgttaatgggttataaatttcctgtcttgtcatcgtttgatgtaattgtctttggatttacacgtcgacacatttaactataagatcaaagaaggtccttgctcatggttctatttggttgttcttgtgaatatacaaaatgagagtttttattatgctcacttgtgcattcatattttgtcggttacaggcatattagaaactaagagcttttggaaagcgagcaac

SEQ ID NO: 56656 - DNA, 638 bp, Populus trichocarpa
  Intron number 1 from transcript POPTR_0011s10140.1 (locus POPTR_0011s10140) derived from phytozome v7.0 (chr-ID scaf fold_11; pos 12645241 to 12645878)
caacaaggttttgcaggcaagccttacaggcttttgttttttttttgaaagaagtgtatattatttaaacgccaaagcctggcgggagtagtacagaaactacacaatatcttactacggcaaaaagccataaataggataaagcgcagaataagaaaaacaaaagcaaagaaaaccttagaatagccatccgaatgagctcgaagctaaacaatcctctacaaaacaaaaaacgaaaataactcaaagacatagtgggagaagacacaagagcaaggccatagaaaaaaaaaaaagtgtagtcaaagccaggcaacaaaatcacttgatctctgcactccttgtttagccatgcaatctgccatgcaattactttcacggaagatatgggagaaggtgattgaaccaaaatatgctttcagcctattaacagaggagaacaaattatgatgcttccagggacggttgtgaggcttattcatccagctaatagcattgactgagtcagattctatgataaggtgttgatggtggaagagacaattagatgctgaaagttcaatggctttgacaatagcccttaactcagcaatattagagtctaaaataccaactggaacagagaacataccgagaag

SEQ ID NO: 56657 - DNA, 693 bp, Populus trichocarpa
  Intron number 2 from transcript POPTR_0011s10140.1 (locus POPTR_0011s10140) derived from phytozome v7.0 (chr-ID scaf fold_11; pos 12645996 to 12646688)
aatcctgaaggagtgggcattggaccaccaaagtaagccatctgccgatctgatcagatctgaaggggagtatgggaaatcagaatggatagcttttgtttggagactggaaagaaagttcagatatgttgaaggaagcaaggaccaaacccattggtttatcagacgctcttctacctcgtgtcatgcccttcctccatcaactggtcaacgattatggtattcaatacgcaaccctttattatctctctcgtagaaaagatgatttttcttcctagtttaatatttctccgatttattaagaaattccttttgttttcatggtatgcgtatttgatctcttggtagtgttggtttcctactggacagaacagtactaattactaatagttgaaaacattggtttccaagtcagtattgaacttgttattagttggctagaggttgtataaatataaataaaagaacttgtatctagagtatagttatttttgtgttttaaaaatattttaaaaataaataaatttttttattttttactttaaattattttttaaaagaaataaaagaaataaagtcagtattgaacttcgtgtcatgcccttcctccatcaagtggatcgcatgtcacctttctaatggattcttaccatgtagtatcattctctcttttgatgcatgttacaggttacc

SEQ ID NO: 56658 - DNA, 874 bp, Populus trichocarpa
  Intron number 1 from transcript POPTR_0011s09740.1 (locus POPTR_0011s09740) derived from phytozome v7.0 (chr-ID scaf fold_11; pos 12145334 to 12146207 reverse strand)
gattgaaagcgaggagcctcgtattgcttatctttgtaagccatttggttctttatactatacgttttgaattatctttccttcttggcgacttggattttgttttatggagtttgagtttgggaatttctgttggttttacttgtttctgctttgttttgttgaatttgattataaagtgctgtttgaaaggtttcgactttggagtgtgaattactagttgatgggatttcgactttgatttgtaactgatcaaactaatggtcatgatcaaatttaccaaatcttaatgaaagacgtttgaattatggtttttaatattgttcagagcaagtttttcattcttagtctccaggttaaaggtatttcaagatggttgtgttagttataaggagcaactgacaggattttctctttctttcttactattgctaagaaccgggaatggctaatgcaatgcagatggagtattatttcttcaatctgcagtcattaggaagctagttaggtaccttggaaatggacagtgaatgaactgaaaaatcttaccacttggattttgtatagttgctcattcttaagtgacaatctgatttagttgattgaaacttcaatctgcagtcattaggaagctaggtaggtaccttggaaatggacagtgaatgaactgaaaaatcttaccacttggattttgtatagttgctcattcttaagtgacaatctgtttttctattgactttggtgttggtggcactctattttttttttccaagtaaaaatgaactctattacaaacttataccccctgttttttcttatttgttaattatgtgggtttcttggacaggtcggtttcgagcttttgaaatagcac

SEQ ID NO: 56659 - DNA, 591 bp, Populus trichocarpa
  Intron number 1 from transcript POPTR_0015s13870.1 (locus POPTR_0015s13870) derived from phytozome v7.0 (chr-ID scaf fold_15; pos 13627112 to 13627702)
ctccaggtattgttgatctttgacaaatatacatcatatccaccacatatattttcattccttttagtgcttaaatataattagttaattaactacaagtagtttcattatcatttgcactcaagccagaataaaatagagaaaagctatcttcacgcaccatatttaataatgcagtttgtcccaaatgagtttactgagaaatcttagctatttaatgatgatttttttaaaaataaaataaaaaacataacactataatctatcccttttttttctctctttattctataataaaacaatatttttgagcaacttagagttggattatatacttgtaaattctctcattctctcgaaataggactaattcccccatcaggctagaaaacttttttcaagagaatatggtgacttcaaggggggcattgtatgagaaatttgacatcaaattcaagcaattaattaattggttttaattatattaaaaggcattcactcttccaaaacaatttcggattttaatatcttatactttccttttggttatttgtagcaactcccagcacatttaagagctgaagcagcaaa

SEQ ID NO: 56660 - DNA, 320 bp, Populus trichocarpa
  Intron number 1 from transcript POPTR_0004s06480.1 (locus POPTR_0004s06480) derived from phytozome v7.0 (chr-ID scaf fold_4; pos 5247077 to 5247396)
ctcctctgggaggtaccccatactcgatcatattactttaccacctcccccttttcttcctcctccatccacattaattatcactactaataacctatttcttttcttcatattgcagtgtataattcttattcaaagacaaatgattaataataataataagaagaagatacggcattgtttcataaaaaagtgacacggattttatttttgattgctcgcctggctgtaggtttgatataatgttgactgactctgactgggttggaaattggaatgtttctctctgctgtagaatttcagctcaaccacatcaagcg

SEQ ID NO: 56661 - DNA, 895 bp, Populus trichocarpa
  Intron number 2 from transcript POPTR_0004s06480.1 (locus POPTR_0004s06480) derived from phytozome v7.0 (chr-ID scaf fold_4; pos 5247727 to 5248621)
gcagtgggacgactgctgttactcttatcaagcaggtgcttgttcttcctacattctcaaactttttttttttttttaatattgagaccaaattcagtttgttccgcatttctgtttattttgagtaagcgcaagtgattatcatttcaagtctgtgtgctcagttcatagcggcatccctctctcaagttttagtggcttggagttactgcatggtctaaattagtatacctatcaccttcctttttttctatagcaaagtttgaggtcgattttaagctgtttgttgatctacattctacggaggaattaaatgttgtaaatgatgcttgttatccttgacatgttatcttgatcaactcaataccttttttgtatattgacataggcagagatgtgcttgggcattagtttagcctctgcttctttcaattgaatttgcttgttctttgagtagggatgtcaatggacttggattgttccaaatttgtgcagcctgagctcgaccatttgtcattgacctagagaattgtcaaccttgtattcttaagctacatctggaagttgatgaaaagatctaagattcagtgttctttcagttggaatgtcctaatcttttaatttgatttgatttttcttgaggatttcatgttcacttctgagtatttgtgtttgatttatcttatagtaaaatcatcttattttaacaacgaaaataataattaccattgatgtatagtttctttgcttacttgccacctattgagaaacattgcttgtgtcttgtttaaatttcccaaaatgaccctttttccacataataacttaaaaccggatctaataagtctatcatgtgaaaatatgtcttttcagggccaagatcttgttattggaa

SEQ ID NO: 56662 - DNA, 989 bp, Populus trichocarpa
  Intron number 1 from transcript POPTR_0015s14130.1 (locus POPTR_0015s14130) derived from phytozome v7.0 (chr-ID scaf fold_15; pos 13857549 to 13858537 reverse strand)
aagtaagggtgagcaaaaaaactgataaaccgattaaacctagaaaaccggaaaaaaaataaccaaaaaaaccgaataaaaaaaaaaccgaattaaccgattaaaaatcacaaaaaaattccggttcggttcggtttcggtttctaaagtctgaaaccgattgaaccgaaccggttcaaccagccaacacttaaaaaaaagtaagtataaatacaacattttctaaccctaaaatcacttttagccatcagtcgccccttccctccctttagcccccccttccccttctctgcatatctctccttccttttagcccccacttctctgcatatccctcccccttccctttactctcctttgctttgatttttctcccctccctttactctttgtaaacctaaagttacaggttttatggggtgcatgaatgatgtgggtaagtgccaagttgtggattttttttcctttcatttccaacttttttttccctgttatcttttgcaggcttgtgtggctgctggtttgaacaatttattcatacaagtttcagcaaacaaacatgacatcttttctttattatgcatagcagaagctttggatttggaggctcttgttttaattgtggatggtcaggacatagagcatcaaaatgtccaaacaagaaagatttttagttgccttcttcaacgtagggattagggatttttttgggactgtgaacaagttggaataatttcagtttgaaccggtttggaagggaaaaaaactgaaccgaaattaattggtttgaaccggttttcggttcggttcggttcaaaaaaaaataaaaaaaattgattttgttgtttattttggttcaaaacttaacggaaccggaaatgctcaaccctagaatgaagatgaggctgctttgatgacactccacaggtttggaaaccagtcttcttcttcgctgtggtatgagctgccttatatggaaagctaagggg

SEQ ID NO: 56663 - DNA, 582 bp, Populus trichocarpa
  Intron number 2 from transcript POPTR_0004s16460.1 (locus POPTR_0004s16460) derived from phytozome v7.0 (chr-ID scaf fold_4; pos 16920187 to 16920768)
tcttagagtaaaactgtgtaagaaaaattcaagatcctttttgccgttttttgtttgcaaatctacaagtctataggtgcgtgtacaatgctaaatcataaatgcagagtaaatttacctgttagctttttctgtgtgaattactatttacagctttgtgctttacattttcatgaatagaataggtacaagctctgagcaaagaaggattaattcttgcaactttgcagcagtgtaaattagatgccatgtctgatttcaagaatggataaaagtctatatgcggataagaattccctgatgtgtaaagacttttcatgttcttgctgtaggatggatacggcattataggaagatttacagtcgaaattctgacaaaaatatgctttgattctggtcttgattttttcaacaaggatcataacaaggggtaaaggaaagataacaaagctgttctattttttttcaactgttgaggccttccatgtagaataatggcatttttatcttttatctcttagtgatcgatgatgactccagaatctagggagtataggaatagggttctcaggttaaataatt

SEQ ID NO: 56664 - DNA, 592 bp, Populus trichocarpa
  Intron number 2 from transcript POPTR_0009s06520.1 (locus POPTR_0009s06520) derived from phytozome v7.0 (chr-ID scaf fold_9; pos 6274727 to 6275318 reverse strand)
tttcaggcccttgtgaatctgatcttgtgttcaaggtgagttcaagcatgcatgcacagtatttctatatgaatatgatgtatataattagcaattaaataacctgaaaagaatcacggaaattctataaatagataatggcacttgcagtaaatagcaatttaaataatggcatttgtgtttgtattgatcctccatggcgtatcctcaagcagagctagagatttaccactggaaagctgctcgacaaaaatcatctaaagacacaaaaagttgcagcttagggactaaaaagtaaatctttttaatcaaaggagaccattatatctaaatggatttggatcatcattcatatttgaatagaaatgttaagacttttgtgcaaatcaatcgaacttttggactacttttttttttatctacatgcatttttttcaatatataagcacaaacatcatgaaatttaatttagtccctgtaatcacggatgttgaaatattgtaattgattaataaaaaaatgatattagccgcttttgctttttcttaacacaccagatttttgggacaatcaaagcgtctgctaaagtaag

SEQ ID NO: 56665 - DNA, 997 bp, Populus trichocarpa
  Intron number 1 from transcript POPTR_0014s15450.1 (locus POPTR_0014s15450) derived from phytozome v7.0 (chr-ID scaf fold_14; pos 11508614 to 11509610 reverse strand)
ccattcaagcccagctcaaggtccctccccccttttttattttccctcgagattatgctcgctttcttgatttccttgtttaatcgatttgattgctctctatttcctgtttctcttgagttttcaaataacatcaataattgatcgggtttttggggattatttgtgttagttaagatttttttttctagaactttgaacctatctaaagcaacatgcactgaatttttatttggccctcaacttttgtggcatgtgaatttcatccgccagctgttaaatgttgcatctaattccaatttgtacggagggaaccatacatgatcaaaagagggaaaatgatgcgttaatgtcttgattttatagcaggactgtggtcaggcaaacttgaatttaactgacatgatggttagatacatcttgaagatgtttcagttatctgtcttccttcttccttttctgcaaatctctccctgtagctttcatggcatcggcaatttgttgaggatttgaatgcgctgggcatgacttatttgttcttgaaaagtttctttcaatcattattgaatgattaaaaagattttcttgagtcgtaatcaaatgtttgaaaaactcattttctttcttattttctagatttatggaaatatgaattctccaacctaattcacctcattgttgcaaagaacattcgacatttcatcatgagttatagaaatagaaagtttttggccgctaagtggtcactggctgccatattttatctcaatatgaaatggattttttttttttttttaatatagttatataatgtttagaatgttaatagatggacatgagtcacaccacatagtgcttacatatgtatatgagcacactaggagattctcgtgtcttgtttttcttttccaaatttatttttatttttattttgttcagattagaatgttaatggtcttttttatgctcaaaagaagttggttttctcttcaggttg

SEQ ID NO: 56666 - DNA, 591 bp, Populus trichocarpa
  Intron number 1 from transcript POPTR_0004s18000.1 (locus POPTR_0004s18000) derived from phytozome v7.0 (chr-ID scaf fold_4; pos 18018199 to 18018789)
gaaaagaaatccaccgctaaacttcaagattctaggtgattttacctttttctcgatttttaagttttaagtttttcaggggtttccttgtttttttatgtttgtgatgaaaggagatttttttttaaggagaaaattgagttttagggtttaattggggttgactagtgattgatttctggtttaatcgtgattagtgaatttgctggatttaaattagcatttcttatttgtatctacttggctttttacgtggtagttaaattgttaactactcaattagttcattcatgaagactgtaaaaaagatttattttggtttgttgttgatgtgtgttagaatttggttaatgaacataagtaattttcgtacttcaaatcttttatattggcgtgtagagcttattgatattatggattttgtcgttgctaattaggtgtttgtttgattttacgctgatctgcaatgtagttgttacgacatctagtgtcttgttctgtgttcaatgagattagttatgtgaatgttatgtaatgtttttgctggttatgtttgcagatcagtgaagaagattgtatctttggacgatc

SEQ ID NO: 56667 - DNA, 894 bp, Populus trichocarpa
  Intron number 4 from transcript POPTR_0012s14320.1 (locus POPTR_0012s14320) derived from phytozome v7.0 (chr-ID scaf fold_12; pos 14255046 to 14255939 reverse strand)
acttgattgggctgttgaggagaaactaaagtcaggtgatttttaacttctattgcatcagaacttgcattgtcttattctgttttgtgtatgtgtttgcaagataatttgattaatgagctgccatggtttacataatgtgattgtgatttagaaacttcaatttggtaatactagcttaagtaggagtgttgtacaaagttatttggagcgttcaaggatgataacgtgggtcattttctgtcatgccactaggcttgattttttatatgattccttttggagcttgatgaaattcaattatgttagtactattttcatctacgaacttattcagtatgaaaaagattgcaagtttttaaccccatattggatgtaaagaaaataagataaacgatcatgggatattgtaggaggtggaggttacctgcttatgcatgctttatgttaagtttcagtctcttaagggtacaattgcatcactaaagttacttcttaatcctacctagagtccagattcaataaacatcttcttttacttattgactggcataaccaattctcctgattatttacggtagaagtgtttattttgtgttttgttcttatatagttttgagctctttcttcttgacttgtaataacgttcttttgttgttcattattccgttgtcctttttcccaaaaaaggttttttttcaaccttaaaagagtcatcatgaatttacttgtgctggcaactgtaaagtgcaaaatttatgatttgatttgaaatttcataaatggatttgatatttgtgtgggtactgtccacgtgtatgtagttaccattatcatcttattttcatgtgaattgcaggagatagtggagaaattaccacaactcatatactt

SEQ ID NO: 56668 - DNA, 958 bp, Populus trichocarpa
  Intron number 3 from transcript POPTR_0014s06760.1 (locus POPTR_0014s06760) derived from phytozome v7.0 (chr-ID scaf fold_14; pos 5113585 to 5114542 reverse strand)
ttgtttttttatcagctggaacttcaacgagcaaggtatggtttggtttggctccactgtaagtttatatttaaaaagaagtaatcttttaattttttgtggattttgatgttttttatagactgactgaacatttaatgaagggagttggtttcttatggttcgaataagggtaggattttgtttgtagcctagtggtgttgaactttggaattctttcttactatatcaaaacctctaggtgctgcttgcaatttgaacctgattttaaaactgctgacaatgtgtatttaggaattttaggtttttatgtatactgaagagtctctatggactacaattgttgtgaagggaatttaatatggatatgtggatactccctttgctagaaatggatgtcttcttgcagtcatttatgatgtcaaaaattcagcttcacgagtatatatatggatgtcaaagtaaaatcactgcgtgtaattgtttgagcagaaagaaaaatgtaagcactgaattatttttttccttagaaaattgccaattctctacagctcatgatcagaataggtaattctgtttcatttagcctagacagctaccctcaaatacttgattaaacttaaatccttacctggaatcaatgcataatagtaactgccgacaaccagaatgggtcctgtttttcagataaagttttccatagaaacagcaaagtacagtttgtaataaagattaatccaggattcgatggaacctacaactagatatctaattttgcaaagtttcttgcgacattgttctccttgtttttgttgttgttttgattctcaacaagcttatcattttctttttgaagtatctgcaaaatttggatgttttggatttccaagtgatgttgattatgttattatccatatgtttttttatttcccaaaatttttgcagaacaccttaactc

SEQ ID NO: 56669 - DNA, 437 bp, Populus trichocarpa
  Intron number 2 from transcript POPTR_0014s13990.2 (locus POPTR_0014s13990) derived from phytozome v7.0 (chr-ID scaf fold_14; pos 10240930 to 10241366)
aatttaaagtggaggtttgattttgatatgtttattttctgccatgtttgccaccaagaagtacgagggaggagaatttttctagtttggttgcgaatcccttagaaaaacagaaaatgaatttcatccgaataattttgcagggtctggtttagttcacctctttattgtctttcacacagaggacatttatccacacactcacaaacacaagcaaatgggggaaatatttagtaaaatttatgcatcacgtattatccccgcaagtgcacatgcacatgcgcagagagcctcaagtttcttttctttttcttccttttttcacacacttagcttaattgatctttaatctccaggttctagtaaatagcttattcattggctgttgatttttatttctaggtggaattgctgagccacctgcattctccttatct

SEQ ID NO: 56670 - DNA, 795 bp, Populus trichocarpa
  Intron number 1 from transcript POPTR_0004s18310.1 (locus POPTR_0004s18310) derived from phytozome v7.0 (chr-ID scaf fold_4; pos 18240138 to 18240932 reverse strand)
actccagatattattggtcaaggtgggtgttctgctttagaagatagagttgtcttagaaggtgcctggccgaggccttgaataaaaaaatattaaaaaaaaatattttttatttttttaaaattatttttaatatatataaattaaaataatctgaaaacatcaaaaaaaaaaaaatattaatttaaaataaaaaaataaaaatttttaaaataatactaaagcgaagattttcatcaattactaaagcaattataaatgtagtggttacacctactcagttagagtatgatttgttcctactttataacactaaaaatatttttattaaccatttaaattcgaaacatataacctttttattggattagaaaaagtaaatataattttgaaatataaactagtttgaagatattcctgatgatcttattggaaaaaaaaagaacagaaaagaaaagaaactcatataaaaagggtggaattcaatttttttttttaaaaataaatcacattaaatccgacgtgcctccttctcggaccaaaccatagttgttataataatgatcgtcgtcgtcaaagccatactgatcttcttggacgatagttgctttttatattccctgtttcatcatttacagtcttgcagtgctactcttcaagccaatcattctaacttgaacaaactttacatccattctcataacaaaaccaagttctttagtactaactagaggaattaattccaatattatggaattagttgaagaagtggtgattgtaggagctggaatagct

SEQ ID NO: 56671 - DNA, 398 bp, Populus trichocarpa
  Intron number 3 from transcript POPTR_0004s07650.1 (locus POPTR_0004s07650) derived from phytozome v7.0 (chr-ID scaf fold_4; pos 6283532 to 6283929 reverse strand)
ggttattacaggcactcctcaaaccagaagtaagtttttaacctggaagtgtttgtttgttgattagttcaacttggttggcagcttttttgctaataattcatgcattgctttggttcaatagcagttttactagctgatttgaactggtgttctgtttagaatttgatactagttttagtgaaatgaaatgttgttgtttcttctgatattgtcaatttgatgtaggtgtctaaccttgacatgattttcctactgtcttttgtcaatgtttaatttgctaaagttttatatacatgtgtgagtgaatgcgttagtgagatggacaaggactaatacaaattgaatttgttgtgtctgcagaactacaagatattcttccagggattatcaaccaa

SEQ ID NO: 56672 - DNA, 526 bp, Populus trichocarpa
  Intron number 2 from transcript POPTR_0009s09420.1 (locus POPTR_0009s09420) derived from phytozome v7.0 (chr-ID scaf fold_9; pos 8349491 to 8350016 reverse strand)
ctggagaagcttccgttgaatccattccttttcaggtaattcaagtttgaaaagtttttgggttagtattagattggggatttattggagagttggacttaaaatcaagttaggttattggagtttgatgtgagatagatttgtggtagttttcattggatcatagttttttggtaaattatttagaagcataaaggaaattaattttagttttgtttattgaaatgatggcaaataagattattaaaatgaaaatatcgaactgtggaaagatttatggctctttggagatggtgttggtgggtaagaaataaaacagaaaatgatgcactgaaaggaaaagaagagtttcaatcttgtaaataaaccaatgttttcgtgagagagggaatggataggctgtaatttttatttttatttttttgcttaattagaaatgctttgaatgatattctaatttgtttgcgcatcttttttatacatggtttcaggtattaagttggaaaccaagagcactttattttcc

SEQ ID NO: 56673 - DNA, 566 bp, Populus trichocarpa
  Intron number 1 from transcript POPTR_0015s02280.1 (locus POPTR_0015s02280) derived from phytozome v7.0 (chr-ID scaf fold_15; pos 1602625 to 1603190 reverse strand)
ggttctggcctcgggggctttgctttctttcttgggtattctttttctttttattcaggtactaaatattaattaatttctttgtttagtggtgtcataaaaattgatattatctgagttctagtacaatatagtataggaattgttatatttataattataagataaaaaaaaaggattaatttactgccaattgaaggtgtaggatcaatctatgatttaatttatcttatgcctctaatctcgattagaagtcccattatatttcctcaaaaacccaattaaagagcgttgcactaggttatttgcatgtcaaaacttattcctttgggccagacattaattacccaacgtgaagatgcctcttttcagtctctttgaattcatcttttcacagagaagcgtttttgtagcttcgttatgaaattaaggtctatattgtccacagcattccactgtctcctcttaaaatcatgtattcttaggagcacagttataagttttaagtccatattgcaaataatttgaatgttgaggcaatccacaattgcaggaatacaagggat

SEQ ID NO: 56674 - DNA, 819 bp, Populus trichocarpa
  Intron number 1 from transcript POPTR_0015s09850.1 (locus POPTR_0015s09850) derived from phytozome v7.0 (chr-ID scaf fold_15; pos 10943359 to 10944177 reverse strand)
ttatagaggaggttgcgtttcatcggcatcttaagccatatcatttaatgtttcatggaatataattaatttataattgaatctgaattgatattataacaactcttcaatcaggataaaataacaatctcatgtcaattgaaaaacaaagtaattaaatttttcccctttttcatttcctccttccttcacttaattcttccctagattagtgttttataagttgaactttgtaattttacgaggttattttttcactttttttatttttttccttagattttttttatgtttttcccttacttttttctatttctctctcgcctttttttttttattctgcttctgcccagtcggcaacatataaaagaaaggaggagctgatttgttttattttttaatggcaaataatcattttactcttaatgagtcattttacttttatttgacggttcttttttttttgttagcactaccaagcttcattcattctaaaattttaaccagattttattcaacatattttaagatccctcataaaatttcagctcgatctgatggtcggattgaaaattacgtccaataacgtaaaactggtcaaattatgatttttcatcaaatttctaaatttctccaaaaattatgaaattttaacccaagctaaagcatcatattaaaaggctccacgcaaattttcatattttttttgataatttaattgaaaattacgaattgtttttacataaaactagtcaaaaaatattgataaaatcttgacctaggctaaagcccaccccagcctttgccatacctccgcct

SEQ ID NO: 56675 - DNA, 928 bp, Populus trichocarpa
  Intron number 1 from transcript POPTR_0001s30820.1 (locus POPTR_0001s30820) derived from phytozome v7.0 (chr-ID scaf fold_1; pos 29268727 to 29269654)
cctctgttaaagctggtaattaattgttttcattttctttgttttttgggtgattgagtttgttgagtgattaaagactaaaaagatttgagttttagatcctggtcctgattgaaaagctggttcggtaaaagcgcattatttttgcagcgatggtgtttttaggggttagagtttcaattttggaaagtaaacttgtgtaagttggatttcttttaagttggagtggaaagtagtactactacctggaaaaagacagtacttttgtacttggcagatccaggcttgtcgtgctttgttttttcttttttcttggcgagatctggtttgcatgtgttttttttagatgcttaagagatttattattgacgcgctattctctcaaaaaaccaattaagacttattatccttgcagagcatgctaaacgtatatatagctgaccaactgagggtgtttattcgacatatctaggaaagattacggtgggggtgggtttagaaagggtttaaggataatgagctaagagaaacatcgagattttgcgttattagagagatttcaaagaaagatttaaccaaaaacacggcataattcaggtaactgatttgtagctagtagaaaacttttaaatattgtcaaggaaagttatttttaatccatgtccttttgactacatagcatcttttcataatggctacttcaagtttatggttcagtggatatattgaatgcgcatcataagattacaattattgagttcttccatgattgctaatgcagcgatcatatgtcatttatttctggtgccaactatgttaattcatatgaacacttattatgttaaaattggatttgatttactactgtccagtggcgcttatttcatatgtttcttgattaatgtaggaaagtgggagaggaacaaat

SEQ ID NO: 56676 - DNA, 660 bp, Populus trichocarpa
  Intron number 1 from transcript POPTR_0012s08310.1 (locus POPTR_0012s08310) derived from phytozome v7.0 (chr-ID scaf fold_12; pos 9390663 to 9391322 reverse strand)
atatatcccatttggctcttgatattggaggtagaagttattcattattcgaatctggaattctctctgtgtttttttttttttttgatggcttaattagatttctgattcttattctttcatggaagttgtattttgtttgaattgttatgaattatctctcattcattcattgtgaattgtctttctgtctggctctttgggagaatggagacgaaataaaagtctggattttggcgtgctccatgtacttgcttgcatgttttttccttttttctgccaattctgtttaagaccatgttttctcaaacacttccgttcattcatttcattaactgcactgaagaaggatttgcttccacacctacattttgatggtttgcttgctggaattagaaatatattttctaaaattcaaacggatatacattatattgctttttagtagtgatagttacaacaattctatcactaactgacaactggttttacctttttctgttttccttcagtgggaaattcttcatttcgtattgttctagattttcatgttgacaagctgaacgttgatagattgatcaccagtggtatgcatgaaagatcagttaatggtgtttgtctgcaggttctctaatcaagttggtgtatttttcaagacac

SEQ ID NO: 56677 - DNA, 475 bp, Populus trichocarpa
  Intron number 1 from transcript POPTR_0009s04640.1 (locus POPTR_0009s04640) derived from phytozome v7.0 (chr-ID scaf fold_9; pos 4934400 to 4934874)
acactatcaacagcctcaatctcattattctcaaggtaagtttcttctatcatctcaatcgttttgattttgttttataatcctgtgatttattttttccaattttcatgaatcctgattaagtatcgtggattgtaattaattgagttcttgattgttattcatgattagggttagttgcttggattttcatcagttatgcattacttgtgataattaagtgattgcttgggatcttaggagatgatctcttaattagtaaaagattgcaatatttgtggatcaaattcgatgcacgctattaaattaaaatcaaatcacaaaaaaaattatatatggcagttaattgaattataagatattaagattccttttagaaatggggaaatttacgatctcagtaattagttattgatagtgtgttctttgtaattgtttatttatgctcgtgtttttcttattgaatttggtgcag

SEQ ID NO: 56678 - DNA, 515 bp, Populus trichocarpa
  Intron number 4 from transcript POPTR_0009s04640.1 (locus POPTR_0009s04640) derived from phytozome v7.0 (chr-ID scaf fold_9; pos 4935469 to 4935983)
cggttcttgagggtcgtgtcattacagtggagaaggtaaaatcttcatttgtttttttcttgatgagtggtcctggtttttgcattttggttgcttagctctatttcaattcctacggaaactctggatgcctataagttcttatgagattgaaagttgttttcttctttccacttgaagcttctgtggcagcaggtcagctgtacgtagcagctcttcatcactctccaataaacaacaaatcaaacacttcaacaagtgtcagactgttagggttgtatgccctgaatctctctcttttcagctgttaaatcatgtgcaatttgaagttattctataatattgattttgcttgttatatgctaaacatctgtttttaatatcccataaataagaaaatgttttttcaacctaattaatatgtgctgtttttgtaaaagaattgcaattcaatgaactcatttatccaatttgttgcaggctaagcggaagagaggacggactcctactcctgg

SEQ ID NO: 56679 - DNA, 748 bp, Populus trichocarpa
  Intron number 1 from transcript POPTR_0004s22110.1 (locus POPTR_0004s22110) derived from phytozome v7.0 (chr-ID scaf fold_4; pos 21053709 to 21054456)
tttggaagctcaccgctctctccacctcctctcctgtaagtttattttttcatctctagggtttgtaaagattggtggatttagctttaaaatcgttgttatttggatctataaaacctaggaatacgcgacttctaaattgaaatggatttcatggttttaactggcttggactgattgagttgagatggatgttgtttttcatcgtgtagatttatgtgattcctttgttaattcagcgtttaattagtgaatgtttgcgtagaaactgtagtgaattgtcatgttttttgtatgcagtgccctgtgtttgcatttgaaccttttatttgtccgtgacatttattagaagaattaattaattaatcaactcttctaaaatgttttaattttaattgcagtagcagttaattcaatccacatctagtgggtacgtggcggcttcttagtaaatgaaagaaatgatgttgaaaatttgtttaggttttatatttactactatatttagctttgaattttgaatgggagggccgccttgctaaaagtgctactaggtttatactctcctaaccatgttaattccgttgctgatgatattaagttctgcgtgcttggtaatatttttctaataagcaaacatgtttagttgttttattgatatttgctattcttatttctagtttacttataccaacttgctattgcatctgtaggtggagtcattattagacaaagataatttcacgtt

SEQ ID NO: 56680 - DNA, 673 bp, Populus trichocarpa
  Intron number 1 from transcript POPTR_0012s09340.1 (locus POPTR_0012s09340) derived from phytozome v7.0 (chr-ID scaf fold_12; pos 10383998 to 10384670)
aattccgctatatctggtcttctctgctgtggaaggtatgtaaagtgtggttctcttgtgtttgttgctttggcttttagtctcattcatgtgcttttgtatatgttaatttagggtgttgataatgaactgttctttgcgtaagttgagtaatgtggttaatatttattgatttcacaatcgaaagttccagatgtcttgtgtctgctgccaaatacaaagactttttgctttgtttggtgtttgggatatgtagtttttacacgttgcacaaccatgcttccccccctgttgcgcatgtgtataaaataaccgggataatatcttgttagcgtctgcttttctgaaagtgaatcttatttttgtgtagtgccttctaggttttgttaactctttaatgtttgcctacttatagccggatgaccaatcataagctgccttgagtattgacagtcagcttgaatagtttgtttttcagaccatgcttttccttgcatgtagctctggaattatttcatcaatctcattgcgccccaatctcattaatatccaggcttaactgttgccaatgcaactctgcatctggttcggttttccatgtgaaaacagaaatttgattttgttttgctgcaagagctttatttttaatgtctaccatcttgtatcaggtata

SEQ ID NO: 56681 - DNA, 598 bp, Populus trichocarpa
  Intron number 1 from transcript POPTR_0012s05870.1 (locus POPTR_0012s05870) derived from phytozome v7.0 (chr-ID scaf fold_12; pos 5721291 to 5721888 reverse strand)
aaagagggggagagagtgaagcaaaacgtaaaaaggtaaaccctagttttcttggatcctcggctattttatttatttctttcatttcttttacttttgtttcttcttggatgggctttgattctaactgatttgatttgtgtttagtgttttagggtttatgaaaatgaaaaaaatattgtgactttttgggttatgttttgatgtatccagaacgaaatattttaatggatcttcttttgctctgcggtcttgatcaggaagagagagactcactgagtttgttgtttgtttcagacaaagacagggtcatatgcttatttagatagatgctatagatgttagtgttctacgtttctctccatctaaaccatcgctaatcttctctccttttaaaaaaaaaataaaatcccttgttgcttttttctaggtatagctttttatgggttatgatttattgattatttgttttaaattcaatttttcaacttaaaaagagagagcaaaatgatgttacagtgagatgtcctcgttacttttatggggttagtttagttttagttattaaccaagcctttgttttacttaggttgctata

SEQ ID NO: 56682 - DNA, 625 bp, Populus trichocarpa
  Intron number 1 from transcript POPTR_0004s11660.1 (locus POPTR_0004s11660) derived from phytozome v7.0 (chr-ID scaf fold_4; pos 10479867 to 10480491)
tagcatacaataccaaaaatcgagttttgcagaaagtatgcaagtacaaatttccaggcatcgattttaattgctgttttttcttccccttcatccacagcaatgagtgccaccagaaaaatgctagcaaatcactacaagttggagaagtggttgatttacctatagaaaaagaggtgaattcgttttcgttttaagtggagttttattgtactagcattccacttctcgtatagcttcttgcatcgtaaattcaatttgatttcctgctaattgatctggtctttagctctatttgtctcttaattatgtgtttctgggctctttttcgcatgagatttgtgagtctcatatcagtgaggagcattatttatcatctagttttaaaaattgataaaagattccaaatctggcttaagggcttcactatagacaatggaagatcacaaattcatttcccagatgaaggttttataggagatagctgcaaaacaagtgtccagatggcccttatgagctatggtataaatgtccattagttttgctggcttgaagtaaaagacgactcttatttgtaagataagagcagaaacaaataaatcgcagaaacaaataaatcacaagt

SEQ ID NO: 56683 - DNA, 885 bp, Populus trichocarpa
  Intron number 1 from transcript POPTR_0004s07400.1 (locus POPTR_0004s07400) derived from phytozome v7.0 (chr-ID scaf fold_4; pos 6099686 to 6100570)
ttaacaaagttggaccttttcacaatcccaggtaatccaattctctgtcttttgcagttttgattagctcaaggatgtcggttttgtgggttgtcttcaagtttgtgactttttgatgatttgggatggtggggactgtgggatttggattagaaatgaaattttggattggtttctttaattgttgtggatctgagcttatggtaaagtggatctgggtttgtttttctaaagaagaagatcaaagattggaacttggacttgaacatgaaaatgttgttgatgtcggttaggtactaattaagttggaaatttaacacagcttaatgtttgtacaaggagctggttaattttgtgttggggagacagtttagtgggattcgggaatgcaagttgttgaatagagaaatctgcaagctaggaaaggttgtttgtaaaagaacagaataatgtctagagatgtaggaggtgatttgtatttctgtttttttcttgtgaggtggaaaattttatttaggggcttatttctttgttaatgctgaaaattagatctcatttttagatcctataagcaatcgaaagaactcttttccttgcccaaaattatgctggaaaatttaactatattttcttagtccactctagattacatgtgtagttgctttgatttagaaggcatggctggtggtgagttgggtggtatgaattagataggaaacttataagtactcatatcatcccaattttttggttttttatactgagattttaaccgttgaactatgaactttttaaagtattttttagtcataattgtctgatattgtttctttcttgttctttctgtcagtgaaacataccggtatttcgatcttcctttctgtt

SEQ ID NO: 56684 - DNA, 961 bp, Populus trichocarpa
  Intron number 1 from transcript POPTR_0009s03840.1 (locus POPTR_0009s03840) derived from phytozome v7.0 (chr-ID scaf fold_9; pos 4422452 to 4423412 reverse strand)
ggcttacttacaacatcacgattgtttagttgaacaaatattaggtaaactattttttgacaaagtttcgttctttatttgactgggtttatttgcttttcttctttttttcttgatttttttataggtcttgattgactggatgacgagtgattacaaagtgaaaataatcaatgacggcatgcaagtcttacgtggaattcaattacttgtttgtttttgtattttaaaaaaaaaattaaaaaaattttaaattttattttattttattttttattttaaattaatatgtttttggtatttaaaaatcattttgatatactgatatcaaaaataattttttaaaaataaaaaaatatcatcttaatgcttttccgagtgaaaaacacttcaaaaaataactgcaactacactcacaaacaggctagagaaaaccttcaatacccttttttgtcctcctttttattgttttttcctcctctttttttttctgctcttttgtttttaatgtttttcttggtgggttcttttatgtttttcatatatttttttttattcttctaaacccatttagatacttcgggtcatggatttggtgttcaagattgttgtcaataagaagttatattttctttttttctttttctttttttatgatttgaaccttttattttattttttttgaagttgaatattaagcagatttcttgactactgatgcacgagaagaaacttgtagttttgcttttactctaaagcagaacgtgattccaatggaattgcattgctgttcttttgtttttctgttccaggtttgctgcttgttgatttacctcaatgaagataaagctcacggttctttataattatgaatataatcagattattatctcttcttttaatttttctccatgggaacatgggaggtctttgtcaaggaggtgtgtggaagatacgagtt

SEQ ID NO: 56685 - DNA, 671 bp, Populus trichocarpa
  Intron number 2 from transcript POPTR_0004s07710.1 (locus POPTR_0004s07710) derived from phytozome v7.0 (chr-ID scaf fold_4; pos 6335312 to 6335982)
agcaacgcgtactttcctcaggcttgttttgtggggtatttatttatttgtctgtggaatgttataaatgcagtgttgtgattgagttgaggttttgagttgagtggagtgttatgacttatgatccgtgtttggtttgtttaggtaggttgaaaaagggtccgaggttaactttgagttaagaaagtactcaagctcggtttgttcactttttttaataagtctaggtttatgctgaggatatagtgacaaaacgactaaggaaattaaacaatttatcatctaaggattagtttgtagtttttgttttattagaaatacagcaaagtggtatgccttaatataacttttcccaaaatcaattcttaaagacatattctgtggtcatggacactttgagctgagtattctattgtttgagtttgtttgtgaatgatattgaatttgaattatgggactaatttgcttttctttgcgtacaaatgagtttgtgtatgatgtttttatgagacaaatcagagctgagctcaagtagcatggtttgtttttacaattgaaactgcatgtgtgtgttcttgtggatggactttgtttgagtttgtctttaattcttatgctggtatttgtgtgctgtagtttataccaatactcatttattgagaaagaagcta

SEQ ID NO: 56686 - DNA, 770 bp, Populus trichocarpa
  Intron number 1 from transcript POPTR_0001s35510.3 (locus POPTR_0001s35510) derived from phytozome v7.0 (chr-ID scaf fold_1; pos 33853794 to 33854563 reverse strand)
tttgtggccaggtaatttattcttcttattcttccattaaagttttgatttttttttcatttggagtaatggatgtcttgttgtttttagataatacgctaaatttgtaatcatttatgactcttaaacttttgaagttggctgctttctttttgatatttgaattgttgattttaagattttgaatttgtttttgttctttataaaaaaaggaattccccttctctccttcaatcctctttcagagatttgtggtttcttatactttggggtgaaaatgcgttggaatgaatatcagagttagtgattttgggttttctttttacttcatttttttttcctgtataattggaagtgaaggtacgttgagcaatggatacgaaaaataatgatgtgggttctaatcaaaaggttttagattttgtaacttttggattcatagagggtaatatttggctgttttgttacttttagtaacagtgacaatttattttttgtttttgtttttttgacattcaatgaactggttctaattctctatgcacctgcaatctgttaaacaacaaccacaggttcaaatgaagttcttgcgcttgaactgccttttttaatctatggttgttgtttttgtgttcttgctgtggataatgttctactatcacaggcatagtgggtagatgttgctatttattctgcaaaatcttgacatcttagttttacctagaaagttttgttttaatttgcagcagtcgtctcgagcagctctgagc

SEQ ID NO: 56687 - DNA, 961 bp, Populus trichocarpa
  Intron number 1 from transcript POPTR_0009s16760.1 (locus POPTR_0009s16760) derived from phytozome v7.0 (chr-ID scaf fold_9; pos 12661904 to 12662864)
agctaaggtaataatgccttcccctctctgtttgaattccaaattttctctaaccccttttctccttagtatattactcttaatctctcatttatttgctttctgtgaagtttttttgtttttggagattaatggtgaaattttaagcaaaatggatcaatttttgtaactacgtgtagactaggttgttattgtaaattttgcatttttatttgatgggtgttgtttctcctggtgataaacagaacccatgtttcaaaattgctgtatttaatattctgggtttctgtttttttggccacttctgcttaatttatcttcaatgttgctcaaagattaaggttttatgtaagatgtataggaattattgagtttattttgttattacctgtgggattctcttgatttggttgttggtattgttgttgctgtaatgttaagttattttgagctcagcttttgctgattatgcttaataaatgccctaaatgtgtaatgtggttgttaagtagttgaaatttcaaggtgataaatgtatatagtttactctagataatgaagaaggatatgtcaatttctttttttcttttgagtttacatgatttgttaggatttacttgtgaatctaatgcaaaaggaaaatgctgccttatggctttgttgatagtaagtatattggatgagtgttcaggaaatggtcattcaatcaagaattaaaaaagaaaaagaacttgtatttgttggatctgctttcttgggttcgatgttcattgacttagtgttaagaaatctgaagcttctatcctttatttaacttgcatgggtgattatactaaacacaatgaattctttcattgtgtttggcttgtatcatttattagttttagtttccaaaggtttctgatcattagacttcttgtatagttaagttctgaatctctcacgtttttctttacttcag

SEQ ID NO: 56688 - DNA, 724 bp, Populus trichocarpa
  Intron number 2 from transcript POPTR_0009s03030.1 (locus POPTR_0009s03030) derived from phytozome v7.0 (chr-ID scaf fold_9; pos 3746187 to 3746910)
gaaaaactgtgagacttcctgtttaactatatcatccaatctcttccatactagttcagatcatgtaaatatggtactcagagtttgaaaccatctattctattgaaagggttttgtactgatatagtagaaaaactaaatacctttgaaatccaggatccaaagcatggcaaaagatccattagtgagtgcatgaatgctaactacacttagtgaatatcttgcaagaatctgactctgctagcgatccagcacatcgtgaaacttgattgtttatatcatagtagctaggcatacttaggggaaatgtatattgtggacaaacaaaaatcaattacaagatggataaatatatactctgtaacttctgctttgtatattgaggacattggctgacgtttaaatttaaattgcaattttcttctgaaacaatttagacaactgttataacacttgctagctgttacaaataagaagaagaggcaaaagcttacatcactcaaacaaaataccgctctatcactcattgaattttcttgactccataatcggtcaagatttatgctacattattatgtttgaggtttgttcttagagaccagccaccaacatatgaactagatagatgaagttcgaagtattgattggtattgacaagaattccttattgattcttacctcaactccagatagttgcagatatttcaagtatatatccaagaga

SEQ ID NO: 56689 - DNA, 949 bp, Populus trichocarpa
  Intron number 1 from transcript POPTR_0011s17150.1 (locus POPTR_0011s17150) derived from phytozome v7.0 (chr-ID scaf fold_11; pos 18750732 to 18751680)
cgtccacccttgctgctgattcttttagctggtttcatagtggtgttattttaattattttgaaggccttaaaatgttttttatcattcttttttccccgcaataatttcttttaaccttgggagagagaaaattctcattccattctgtagatgctacatctaaaactgttcatttaggcatactggaaaaaagaattaaaatatgtattcttccccttaaaaatacttcaatctataaattcaaggtttcctccaatttgtttcttcagatatcaacttgcccttttcatgccaaaattgcctgtgcccttatgctgtgtacctgagatggtattgtcttcatatgaatcattttcatcctttgattttgttcgtggcaatgaatagatgatgccatgtttatcaaaaaccattttatatcagcaacaactgtcatctttgcctagctgtgagcctgtgagatattttctagtttgagccggttgtggatgacaactccatccttaactagctgcaagcagcattggctgcagctgtgggaattgaaataacctcttcaatatcagcaattgcaactaccacatggcttctcctcgaacaatctctcctcatctcatggagggaaatccactcctcacttgttcaactagaacaccagctactattatctcacttaaaacgcgccacaacttccaggaagtaaaataattacatgcgcagtttgttggtcatcatccctcaagtgatagaaggctcctcgagtcttgtgttacaatgttgcagatttattatgctgttcgatcttgagagaataccttctcctgacgtgttttagagggcctaacaatgggcaagtttcctcatgaatctttgttactgtatgatgaattcctactggctaccttttaccagacaactacactacactacacatctttgtccttgaa

SEQ ID NO: 56690 - DNA, 993 bp, Populus trichocarpa
  Intron number 1 from transcript POPTR_0004s09110.1 (locus POPTR_0004s09110) derived from phytozome v7.0 (chr-ID scaf fold_4; pos 7627728 to 7628720)
ttctccgtcaaagaatcatttttttgggctctcaagtatttttcttttcttttcttttttgaattgatgttaaaagttgtgtagaatttgtttctgtacgaagtttgttgctgggtttttgttttgggactcattgatggattttgtaggtggtttttttctccttttgttttgtatggtttgtagaggttttatatatatattggttatcaaagtattggtctttagtatcttgaggtggccctttagttttgtaggctgatataatttttctttttatctgacaagttggggaggctggaatatttgtaggattttgtagcctggtatgtgtagttcttttttgcgggagtagttgttaggttttggatgacatagtagcactgtatttgttttgttagagatattggaagtgaggttttctgatgttgccaagtagtgtttcatcgaacctttgtattatgatgtggtttttggggagtaattgctgaacttgttaggtgagtttcttactattgtttgattgcagcatatttgttttggtaatgatgttggaacacaggttttagatgggtctttctctatgtagtggatgttaattaaatcttcgattgtggttgatgctttcttttttgttagaaatcttctttcagatagaaattgagatttgaggtgggactctctctctctctatatatatatatatatgtttgtgtgtgtgtgtgttttctggtctgctggcttaaccattggcactctgagatgggttttgctgattattgtcatatcagttccttattgtgaaatttatggcctttgggtttcattttttagaattgtggtagttttaaatctggatgctattatgtgtgcaagtgatagagatgctagcaatatatcgaggatttccaactttcctggtttttaaacatgcttaagaatggcaaaaggctggtttaattttacttactctgactggtatttggcaggtgg

SEQ ID NO: 56691 - DNA, 621 bp, Populus trichocarpa
  Intron number 1 from transcript POPTR_0009s10430.1 (locus POPTR_0009s10430) derived from phytozome v7.0 (chr-ID scaf fold_9; pos 8949298 to 8949918)
ataaagaccccgttttggtcgctggagcggaaaaggtttgttggatttgaactttcctttttcaagatttatgggatatgattttttattattgttgttgttcttttttgctacttggtgaattttgtgattatacaatttttttatgaattttgagtgtgatatagttaagaatttactaattatgttcagggggctagtaatggtatatgtatagagcaatgaaggttaggaatttggaccatttcccgatgattccatggaggattggtttttagaggagaacccacaagtaatagagttcttatgtttaagtggtttgtttaagacatggggaatagaagaagatgattcgtgtagttgactttaattagctgttttgaattatggttttgatttagtttagctgagttaattgattatatatgagatggaaaacaagctgaagaaacttgacattgaagtagctcatgtacagtttctttccccttttcagctttattgatttcaacaactcaattgtcgtaggttttaaaaattaagtttgttttttttttgtcattatgtggtacagtggttttgtaacttggatctatgcatttttatttaggagtggaacac

SEQ ID NO: 56692 - DNA, 534 bp, Populus trichocarpa
  Intron number 1 from transcript POPTR_0009s09980.1 (locus POPTR_0009s09980) derived from phytozome v7.0 (chr-ID scaf fold_9; pos 8702785 to 8703318)
gctgggagaaattgttcttacagtacctacaattggtatctacccctataaactctcccctttccatgatgaaactggcttggatctatctttcaatgggtgtttaattcaatatctttcttggctatctctcacagttgtctatcccttcaaatgctgcatatgcctaggccgaccataagacttgtgctcccagccagaaaatccaaatgttgataatctgctcgtaatgctgccggaagcatagtagtatatactagatagacagcacatgttagaaaacagtatcccctttgtttaatactttaatcagcttttcaaaacaacttattctgctgctcatgtttcatttattcctcggacttccaacaaaatatagcagtgttttgaggatcttctgttggcagctgcttctttgtttgacagaatgattcattttctgatctcttgatgtatagtatggttttcacttttgagtttgcttagtttgtttagcatacctatttgccttgatttgctttggcacaggtttta

SEQ ID NO: 56693 - DNA, 1015 bp, Populus trichocarpa
  Intron number 1 from transcript POPTR_0001s26050.1 (locus POPTR_0001s26050) derived from phytozome v7.0 (chr-ID scaf fold_1; pos 25161692 to 25162706 reverse strand)
aacggcgaacccttttggtcccttctcctctccaggtattattttatttctcgcttcccttttttcttgtattgtttgtgggaagcagaaatgggttggttttgtttgaatcgagctcttctcttcagtttgtattgagattctttattgagttttgtttgagggttggaaatgaagttgggctttggtgtttgaattatataggagtttatggtggcttttttggtctgtaacttgggaaattgaggggataataccatagaaatatttctgtgatttgtcatacttcggccattgattattaaaaatttaaaagtctggcttaatctctcatatattctatcggccattgattacagagaaactgcattttcgttgtttcatttgtttggtttccaagggcttagagactcttttctccctttccttttaaacttaatttctttcatgttttacgcatcttccaattttgtttaagaatgcgagttaagagttgagcaagggatgcgatgcctttctttagctgcttgtaacagagtgggtgcttagtatctaagccaaaagattccgttttgatttgcctgcatgttttggctctagtaattgtactcaacgttggtcattgcacaaatatggaccttgatggtcatacagttgaagatagtttctcattccctccccaatttactgacatggattacacagcattaggacactagtatcagacacaatgacctctagagtctacaattctcagttctttcagcactctgtttcagatggctgtgccttctggtttctgcagaaggaaaaacttgtggttagtcagtttattgatttcttgctacgtaatcagccaaattcaaagaaattcttttactgattgctgcacactgaatttcaataaacaaacaaaactctttggaagctgaaaacaatcgattattttagttgtatattatgattacatatatcacaagaagaacttttttgagaccaggagaaatatagttcc

SEQ ID NO: 56694 - DNA, 821 bp, Populus trichocarpa
  Intron number 2 from transcript POPTR_0011s04420.1 (locus POPTR_0011s04420) derived from phytozome v7.0 (chr-ID scaf fold_11; pos 4408747 to 4409567)
ctacttgcaaaattgcagaggtgagatttggtctttatccttcataattttggactttttaagttgtcaattttgtatttggctctcagtgatcagaatttgatctttgttgggttcacttaatttgcttgctatgcttgtaggtctgcttaggtagttttctttttataattttggatgtggggtgattgactgattgagaatttgaattatagctgttaagaaaatgaaaacgtttggttttactaactgttggtattgctttcatcgaatattccaattcttcttggacttttagactagccttgattgcatacatgctcctgtttaggagtcgtttttttggtaatttaatccacccgtcctagacaactttaattgagatttaattcaactgaactttgagttttgagattatggaaaaatctccagtactactagtatacctgaacttgttgatacattttagcatttgctggtcgcatattgtgggaccacaaatacttaaatctaaacgagagatatgtggacaacaataatgatcaaggttttgtgagtttttttagggtatctttgttaatgattaggtgataatgactgaatgagtgattttacccacccaatagtaaaatcctgcaaataaagcaaaacgggctcccatagaaagtacataatgggaatgtgcaaccgcatagtaagtaccatgtagagcaatgtctagcccagaatctgcccggaatattgcaattgttaatcctatctgatgaagcacttttgattctttaggggtatctaactgcagaagctctagctgcagtgaa

SEQ ID NO: 56695 - DNA, 430 bp, Populus trichocarpa
  Intron number 1 from transcript POPTR_0012s04140.2 (locus POPTR_0012s04140) derived from phytozome v7.0 (chr-ID scaf fold_12; pos 3352700 to 3353129)
agaaaggctatcgccttgttgtagggtgagttttattttttcctttttttatttcatatcttatggtttttggtaattccttaattaaatatgtttgcttgatcttttgctaaaacatttggaaactctctacaatctcgagttaaatttgttgaacttgattttttttttatatatatatatatatatatatatatatatagttttgatctgttgccttcatggttttgatgttttagacttttaggatattgattttggcttggatttatcttttttaatcgttgttttgcatttgaattttattttgttgaaaaaagagagattctttcacttttaattggtcaaattatgatctgatcttctttcgttattttgtttttaaaattatgcaggtgcattccatatagatacaagaaatcacaggaac

SEQ ID NO: 56696 - DNA, 953 bp, Populus trichocarpa
  Intron number 1 from transcript POPTR_0009s12540.1 (locus POPTR_0009s12540) derived from phytozome v7.0 (chr-ID scaf fold_9; pos 10220710 to 10221662)
agcttttaaaggtaaaaccacgatttttttcaatgttggtttttggtagttaatttctccggattggctgtttattattaggttctttgagtttgaatgaatagttgattggtcaagggtttagaggttatgcatagttcggaattaggataacgtgggatgcctagtgttctttattttttcttcaatctgggtctctctaaactttgtttagttgcttggaaaagttagggaaagcttttggactaggatttgatttctcaggttgatgaagattttagcttgtcaatgttgttgcctgttcgtggagtttgaattgagggtaagagtcaaattgctgccagccctttagatttgtactatttggttagaactgtttaaacagaaagttgcaattaacaacactcccttgttgctctttggtgtgggtactagctagtttttttttttttcttgtgggggcagaagtagctgacttgtggatgatcatgtttattacatcaagatttgcttccgcagttttgagcgacatgttttactgatctctgtttgcatagcttctactgttgtttagataaatgttggggtggctagagttttcctcaacttgtcatataatatgtgagctgctcctgtagcttgataacctttagcttgtagatgtacccaggtaagtccctgttttttttctgccacacattgttatgcaaaattgagctgacttagattagatactggaaattgtgggtgtagtgcagtcgcagtgatcaatcatgtacttttattagctatttgtggaagttgctaatcattgtttcagctttaggatttggacaagcatccaaatgcaatattttcttttaacaatgattgcagaatttttggtgtgctaattaaatgcttaaattctgcaaacagattaaaatacacaggacttgtccaggggagctaga

SEQ ID NO: 56697 - DNA, 850 bp, Populus trichocarpa
  Intron number 1 from transcript POPTR_0011s16060.1 (locus POPTR_0011s16060) derived from phytozome v7.0 (chr-ID scaf fold_11; pos 18033085 to 18033934)
ttcaaggagcctctagaggaattggccttgaatttgtaagcttttagtttagttgttttatgcaaagttcttgtcttttgattgcatcaattgtttcttgcatctgctaaaaatgggttggtgtttttttgtaaagaaagatctggagaataatatttaagttaaatgattggcatttggttcttgataattgagcttagatttcttgattagcgtaatcaaattaactgcatgcataattaagtctattgattgatatctatcacattggttgctaatgtttctctctgttgttttgtcatagtcttgatgaattgctagagagctgctagtttgtttttttttttttttttcaattttccatctggcattggaaatgcggaccatttccttgataatcaataaaagggctttcctgtttttggtttttgtttatggtagagaaattttgtggattaattcatccttggagtaatataacaatgccaaatcattttccatgtcagttttcattgccttttcagctttagttagtgtcattgttttgttgaaaacccgttggaccaatccgattagcttatcgtgtggttgttatgccagttttcttattagaatcccgttggatatgagtagtagactttatttaagaatataattattctcatttttcttccgaggtagaagttactatgtaacaagttgatttagtactattcttgatgccaactgatttttggggcaattaaatgacaaaaactcatgttgtaattttcatcactatctattaattctgtgcgcaaaacttgaattgtttactgcctgctgcaggttaaacagcttctggaaaaaa

SEQ ID NO: 56698 - DNA, 446 bp, Populus trichocarpa
  Intron number 2 from transcript POPTR_0015s02100.2 (locus POPTR_0015s02100) derived from phytozome v7.0 (chr-ID scaf fold_15; pos 1441300 to 1441745)
gtggaaaaggttggttcttggttctgttatttgttattgtgtctgtttctggtgaatgttctaggaaatacctgttacaaggataatctaggcttgttttgctttagctaatgcaattatgaaaaggattgattggttagctgttaaccattgttaaagaattgacttgcaatagtattatgagactttgattttcagtgcttctgcatttgagtgtgtctattttaagaattttttcttcttcccaagaaatattgaatttccactgtaataatttgctcgaattccttataattggaaggtttcccagagcaatacgtctcttccttgcaagtttgaaattaccatttctggtattagcagtctaatgcgatttgccaaccttaatttggcttcttatgttattggcagtgaagacggggaattgagctgtggatattcaagtt

SEQ ID NO: 56699 - DNA, 593 bp, Populus trichocarpa
  Intron number 1 from transcript POPTR_0011s00310.1 (locus POPTR_0011s00310) derived from phytozome v7.0 (chr-ID scaf fold_11; pos 96800 to 97392)
ctcttgactaacaaagtctatctgggctagctaaggtttgtgcgttcattttttcttaatcaactatatagtagttgaaaaaaataataaataaaaaaagaacaagtctttgtagttgttaccttagtttgtcttaaaattttctatttttgatttgttttgtacgagaaataatgtttttctaagttttgacctgcacaagggtgtctctttattttctcttaatcatatggtgggtagtgattattgatccattggatacgcaatttgtgacactactatatttaaaacactctgctttattttcttttctatctatattttttttcccaagaaagtgacggaaatggcggataatccaaagttggtaagctcttttttttttttttttttttctacacgggttcctctccataataatcccttgtaaatttcaaaatttgcaagtgttattggtttttgagtctgtcttttttaatgtttattttatggttttacttgtttgtcttgttcatacaagttgtctttttcttcaactgaataacttatatttttcctttccaatctttgggttcttgattttggattaggat

SEQ ID NO: 56700 - DNA, 319 bp, Populus trichocarpa
  Intron number 2 from transcript POPTR_0011s00310.1 (locus POPTR_0011s00310) derived from phytozome v7.0 (chr-ID scaf fold_11; pos 97553 to 97871)
taaataaagatagcaatacaaattcaaggatcacagtgagtttcttctactttttctttcacttttcctttattcttctctcttttccctccttttgtctacatgtggataatttttcttgtagttgattcagcaatacgcatgccatcgcaatccattgtcttttttgtcaaatcatcattatctatatgctttattgattccaatggaagattagtaatttgatctattttgtttgaataatttggttacctttttaatgattttgttttgaatgaaaaaagttgcagaggagccattccagaaaagggtcaccgcg

SEQ ID NO: 56701 - DNA, 608 bp, Populus trichocarpa
  Intron number 4 from transcript POPTR_0009s13900.1 (locus POPTR_0009s13900) derived from phytozome v7.0 (chr-ID scaf fold_9; pos 10990275 to 10990882 reverse strand)
aaaagaatacgctggcttggaattttgcaggtgcattgatttttcaatcgatgacactgaactactggagagttttccagtgagaaataatctgttcatggttctttgcttttgggattttttgccttcattagcatatatttcgttttgacacacacatatattgctagtactgattttaatttgactcctcacatggacaagtatagagagtagtatagaggagtgtcaattttatgaggaaatactgggaaacttcactctgccttgagatgttgctaaagaagtgattgcatacaagcagccacatcagtttcctgatcaactgaagtggatgggcagggtaattagccacactgatatgtatctactacattacaaacatactgttctactttttgtcgttgtcattctggtcaggtgcaaggacatacaccttagcagtacccgcatgatactcaaagcactgcacatgactattatggcctttgtttgattcctttaacaagttgcatgtttcattctgtatataatgctcgcaatttcttaacttgtgttagctgtctttcaagccagaaaatatctgttggatacatagttgctgcttt

SEQ ID NO: 56702 - DNA, 1023 bp, Populus trichocarpa
  Intron number 2 from transcript POPTR_0012s07170.1 (locus POPTR_0012s07170) derived from phytozome v7.0 (chr-ID scaf fold_12; pos 7947317 to 7948339 reverse strand)
cagccaagtaaaactgccggtaaattcttggaaaaccaaatcgattgttgcttcttctgccccttatgtaacagccctcgaaagagctcaattgcatataccccggtcatttaggaggaagggcctgaataagctttttgcccgataggactgaatcaatcacaacacaggggagtccttaatcgagtatgagtccctgggtatgcttttccaagtccaagtgttcgaaggaggggagctccctttaagaaaaagaagaaaatatctttcttcttgagtaccgcttttagaattatgggtttagggcacccatttgagtacctcttttagaattatatggtatttgatcaagcatatgaatttagttttgctctttgtttttgcactttgggtggacttgtaatgcttctaaatggtgtgtgcctgtagtgtaagctcagagttaaaacctctttcttaaagaatgtatacgagtagtaataacaaataatcagccttattgtttaaaaatttagaccattaaattactgtaacttacaacaatttattattgtaaagtttcacccattctcaaggctacaaaagtttcaggttttcaactctgtttatttcgtcacttatatcgcgtggaaatcttagattagactattgtacccatgcattccttttcaagtttcatgaaaatatataatgcgcaggacacagttgtgtaacatgacaaatgaatacaagtatggttcgttttgattgcagttcttcctagtgtagtgaacttaacaagtttgaaagaaactacacaaggtttagtgaacatatcatcatttaatgacattctgaatcatattgcttactgcatttctgaatactaattgttgaggcttcaattctttttattttcttatttatcccgtaactaatcaaattatattgttgctttttttgcttgttccacttttcatcattaattcttctttcatccatgtatcaggagggcaagcttgcagattctagtggagttggtat

SEQ ID NO: 56703 - DNA, 640 bp, Populus trichocarpa
  Intron number 2 from transcript POPTR_0009s16150.1 (locus POPTR_0009s16150) derived from phytozome v7.0 (chr-ID scaf fold_9; pos 12345838 to 12346477)
agaagtaagtttctttcggacttttgcttgatttgagtttgttaacttgctacaggtgttgagagtatatatttttgagcgaattttactgttttattcgaacaaagatgcaaagtagaaagtacggttcttgtaagttattgcttgaaatgagttgttgtagaggtctatagagtatagacaacaccttgcttgctaccaaccctcatgaaatggaaagaaaatgatattggtgatttatggattgtatcatgtgctcgaatggaaatgaaaaggttgtgttatgaacgattgatggtggtttaatattacaatcgtagactcctgattggctttcacttaattcttttgaaaataatagattgacctatatctcgatccattattgcctttcatttttttataatcttcaaaatcttgtctgcatttagttttctgtgtcattgtttccctgtggatctgtttagatttgatacctgttactcaactcaagtatgtcttggttccaaactagttggtatttgcaagtgtatggatctgtttttccatttttcacttcttagttcctctcactaaactgatgatagatttcctccattttttccttaaatttatttgttttgatacatttttttcaggg

SEQ ID NO: 56704 - DNA, 610 bp, Populus trichocarpa
  Intron number 1 from transcript POPTR_0009s15210.1 (locus POPTR_0009s15210) derived from phytozome v7.0 (chr-ID scaf fold_9; pos 11812385 to 11812994 reverse strand)
tggttctggtaaacttcaactcttggcttcccttggtgagcactcaaattatgcacttgcttttattgtaaggagtactagttggtattgtgttgctttgttcctttcatttataggtttgggttaatattcaatggtttgcttgttttgtaaaaaaaaattcctgtttctcacgtgcgaaagttatgcgtcctgtatgaatcatcgttgggatgtattcagatcatggaatgagctgtgaattaagacttccttttttgtgtgttaattctttgaagaatgtggctataagtgagaaggaagagaatcctatagtttaatagagtgtttatttgtaaatgtcatcccatgtttttaatcttatctttcatgtaataaaagaaaaaaaaatcatgatttccttttgtgagagtaagcttaaatctcttgcttaattttttgaaggggattgtaaaatttgattttaaatcaaaatgtgttaatttctgttacattttatttaatttcctttgtcaaaattcttaaattgccgcccccttaattttattttgaaattctccatgtaaaggtggttttgcagcagaaacagcaggaggaagcttcacccctc

SEQ ID NO: 56705 - DNA, 530 bp, Populus trichocarpa
  Intron number 3 from transcript POPTR_0011s10910.1 (locus POPTR_0011s10910) derived from phytozome v7.0 (chr-ID scaf fold_11; pos 13480087 to 13480616 reverse strand)
caacgttgttaagatcagtccacctttgtcccaatgtatgtatgtttgatgcgttcctttcttttgttttagtttattgattttaagctgtgtttgaatgctgtgaaaatctgtcaagacaaccaacatattgctgaagttatggttctttatagtttaatattccggggccagaaaatagcagataattcattcaattaagcataattctactttgctgcaaacagacatagaactagatgtatcaatgggcctgctattgttggctttctcaaaaagtaaaatgagattaaagaattcttatttgtgcatttgctcctttaagagcaacttagtctacattctaactctgcgagatcaatatgatgcccgctttccactgagtgagaaaacagtaattctatatgcaataaataaatgaagacttggatttgagctataaagttcgatggatttttctgttttgatttctaattttacttcttatttttgcagatagtagagcaagattggtggccggctcatttcag

SEQ ID NO: 56706 - DNA, 827 bp, Populus trichocarpa
  Intron number 2 from transcript POPTR_0015s07840.1 (locus POPTR_0015s07840) derived from phytozome v7.0 (chr-ID scaf fold_15; pos 9128933 to 9129759)
cctgtgcctcacttttgaaatccatcctttgtgctgtaaggcttttgtttcacttttaatttcggcataggctgtgtgtgtatcaggacatttgttacttgataataacttcacatgctatctcggggcttgattcgtttgtgttttcattttgaatatctatgttttcattttctatccaccttattttcatatataaagtcttgtatgtttatgtattgaatttgtattggacgctgtttgctggattttttttcttatgaattgctgataatccacaggattgctctcttgcctgaacccagataggtttgtgcatagttgttggttagaagagtgttagcagcttcattctttatggtttttcttggcataaactaattgtcagagcactctcttttaatgggcagtgcattaaaatgtccaaaatcaatctatcctacttccgattatgaccactgacgatgtcatactgttaaggattccgatacaagctccttgtcatggttgcaaaagagatgcatagatagtccccactctccatgtattatggactcaaatgccgcttggaggacaaaacaaaaataagcatctcaaaatgaacttctccggaagctctcctagtcaatttgtgatctatttcataacgccctgttatatcttttgcacataacaatgcaatggacttttcattttagagacaacatagatcttgctcattcatggtgaagtgtttcttctaattccaatctagatggtctccacacaattatctaatttgaagaacacttactttgtgattgatttttctatcatggtttacaggg

SEQ ID NO: 56707 - DNA, 518 bp, Populus trichocarpa
  Intron number 1 from transcript POPTR_0011s04300.1 (locus POPTR_0011s04300) derived from phytozome v7.0 (chr-ID scaf fold_11; pos 4315161 to 4315678 reverse strand)
gggcagcctgatagaaaaagacctgctttagctaggtcaaaatcttaacttttttcctccttcttttcaatttttgaaagtgagatttgaaatatagtattttcttagatttttgttttttaatttgagttactaattgttcagttaatggtagtttggcagttatgaatctttgactttaggtcttcaagtcaagtgagttttttgcttgtaggaatctacagagactagaaattatgaattttattatttaagagattgcattttaagaaagtagctgtgttttttttcctagaatgttaggtagaaagccaaaaatagtaggtttttagaatcggattggttcaaatttgtttgaagagaatgaaatgaaggtaatttcttaagtataaattgtggtttttatgggtttgaagttgttaattggttgaaacttgaaaacccacttgaaatttgtctaaaagtttttgaaatttgttgcagtgtgattgttgaagctctaaaagtggatagtttgc

SEQ ID NO: 56708 - DNA, 635 bp, Populus trichocarpa
  Intron number 1 from transcript POPTR_0004s15250.1 (locus POPTR_0004s15250) derived from phytozome v7.0 (chr-ID scaf fold_4; pos 15892948 to 15893582 reverse strand)
acgtttgtaataaatggtttgtttatcataaaaaataagttggtaatggtgattttgttgttggacaaaatttcagaattaaagttgatttgatgaatgctatcaagcaatgacacattgcacattcatttgaatatcgtgctcaatgtttttaccaaacatgtgttcaactacaatgtgttcaactacaatgtgttcattcacctaattgtcaatggtatttacgtaggggataccataaaagatcatatttctttaagataacaaagttaaaaggtaaacacacatgaaagaccataaccagcttgatactaaatttagtgcatcagtggttgcaactcttattcaagataaccttgtctatattatttccagtatacaagaagaaactaaattgcattataagtttaaaatttcttactataaaacatgagctgtaaaataaaagatatttgaggaaccggaatatatgaggactcatttgaaatgttacctggattgtttgtgtctttataagaatcaaattcatgaacagttgttgagtggcaatataatggacaacttgatggtgaaacatttgttttttgttgtgttttctaggcatttggtcctgcaattgagaggttcaactcttc

SEQ ID NO: 56709 - DNA, 899 bp, Populus trichocarpa
  Intron number 1 from transcript POPTR_0004s06370.1 (locus POPTR_0004s06370) derived from phytozome v7.0 (chr-ID scaf fold_4; pos 5077757 to 5078655)
caaatccttcaatagaacaggttaaagagatcaaggttctcttctccaacacccttaaatgctaatcttccatattacattaacttttttatttaaaaaatgaaacttctactgatatccataccaaataattaggtcaatatcggttcttactacaccttcaatttaatgaaaaatgatcaaccaaaatagtttatttatggtatttttcctcctcaattgcacgcaagtcctattcgatataaagtagtttattttaatatagtgaaacacaattttgcatgactacttttcctactcaaaagttcttttgcaactaatttttttttgtattatctcgaacacacacacacacaattattatagtttttagacctggtccaaggctcggtttccgggttttaactagatcaccgagattaattttttttttaaaaaagtcaaaacgacatcgttttagtaaaaaaaacaaaaatcaacgggttgcaaccggatttttgaccgggtcttgccgggtcaacccgccgtgtcagccgggtcacaccgggtttttccttcccctgatttttcttcaacccggcctggttccagccccggctcggccgagtcccgggtcgacccgccgggccggaccgggttttaaaactattgcaatgacagaagccaaaaccataaaccggctgaaactaaaaaaaaaaggcgccgattcgctgaatggaagtacaagaacataatttagaccatgaatatccagcacaataactatgtcaaattcgagctaggctcaaaatccgttctgttctctgttttttatattctatttttaagaggcactgaatttaatttcttggataggctaaaaggttaaatttgttatccacaaaatgttttgcagaagc

SEQ ID NO: 56710 - DNA, 598 bp, Populus trichocarpa
  Intron number 1 from transcript POPTR_0009s02180.1 (locus POPTR_0009s02180) derived from phytozome v7.0 (chr-ID scaf fold_9; pos 2881459 to 2882056)
gtcagcgaagtcgagcgagataacgaagtcgccaggtctctcctctcgatgcccctctctctccctgtatttacttatttatattcatgtatgtatgcatttgaatcataatttgccacttaattagggttttctagtttatgattttgaatgaaaactgaatttctcattcgctttcacatatgtaaacgcctataattaatctacttgtgatttgtatatttctattgcttttcgatcgattgattattttgatatgtaaattatagaagtgagattttgaaatttgtgcatgaatattaattttgagaaactaaaatagtagttttaaacattaaagaaggataggagttcaaagcttgagcgatggaatagttagagatgaccaattcatctgtgtaggattattttactttaatttttcgtttgatgatactctttgagtaatgcgatggtctttgaactattgattatatcatcgcaatcggcctctcgtcatgcttaaaatgtttacctctcatttggcagaatttgttttattctcttctaattttgttctgtctctttggaaaaattttgaactttttaggattctttc

SEQ ID NO: 56711 - DNA, 839 bp, Populus trichocarpa
  Intron number 1 from transcript POPTR_0011s12900.1 (locus POPTR_0011s12900) derived from phytozome v7.0 (chr-ID scaf fold_11; pos 15604051 to 15604889)
tggccacaccctgctccacgacctctttccaccatgttttgttagcggtacacagcaagcaaacaaattcttttccatgagattgtaacacacaacatgcaataaacctgggattgttaggctttgataccaattcaagcaagaggaagctaaagatagcaaacaaacacagaacacagaaatttgattagcaaaaggggttgtagatgtgtaccctaaattcctagctttattctctctaaaaataatactcataaagtttatctcctgagaaggtttacaaaaccttaaataggtcataaaccctttctcaactagaaatcaaaataaaaatacaatgaaaacaaccataaaatccgaaacaatgcatgaaatcctaataaaacaagaaaaataacaaaataggcccaaatcagggcctcaaggtgagattttttatatttgaagatttgacagtccgcatagtgcattaaaggctactcctataaaactttgagcccgatccaataatcaaataaaaaattatgacctttctaagttatcattctagtctagagctttcataattccctttgggcctagaaataatttgttaggtcatctacataatttatttgaagtagatcctcatctagttattgcagatccacaccaaactaattagaatcacttattatctcgagttctgactacatcacttttcattcatcaaaactagaaactagaaagcgtcgtctcttctgctccatcttcccatctgaacatgctctaaaatttcacttctaatttccatttcgagaatagccctcagcactggaaaaaaaaattacaagatttta

SEQ ID NO: 56712 - DNA, 549 bp, Populus trichocarpa
  Intron number 1 from transcript POPTR_0001s28360.1 (locus POPTR_0001s28360) derived from phytozome v7.0 (chr-ID scaf fold_1; pos 27173433 to 27173981)
gagcaggtatttttcttttcttttcttttttatgttaaattttttcactttttttttttaattttatagtttaattcaattaatttagatgacttaggaaaatttattatttgacagattttttcgcgggattaaatgaaatgctgattctatgtggttgttatgggaggttgggtgttgacaatttctgggtcatggttagataaggattgtctgctttattatttgattctaaatggctttgctagtgttgaggagatagtttagaatctggatggttaaacaactgttctctggatagttgttgtcactctagatttccacttgaatgaaagaagacggtgcaaggtatcggtggtagtgagtaggaatttaagaaatgtatgggtgttggaaataggaaaaagtcaaagtaaattatgagggcatttatcagaagatatgatttgtcaacattgaagggaaaatattgaattttccatctacagtcgaatccttggtccctttgtaacttctgtttctggaatgatagatttgatcaagctaatt

SEQ ID NO: 56713 - DNA, 708 bp, Populus trichocarpa
  Intron number 1 from transcript POPTR_0004s11800.1 (locus POPTR_0004s11800) derived from phytozome v7.0 (chr-ID scaf fold_4; pos 10670262 to 10670969)
ctctctctttgggatctacattctctggttttgaggtcagtccttcttccggtgatttgccgcctttcactatgttttcgagcaagacatgaatggttctatgtttcatccatgtgtttgtgtaaaaagcttgaatctttgatattttatattcatatgctggaaagtttatgtggcctcaaggaatttgttttgcgattaatatgttgaatttgtttgccttttatatggtctgatagttgactgtgatcatagtgtaataaaacagtactttaggttgtttttttccttaaaaaaaattgaagtttcagttatcgattcctatcctgtgtttttgatatattaaatgaaagcatgtagcttgcaaaccttgaatcttttgactttttatcccggctactttggtaatttaaagcaagctgaaaagggggtgttatagaaccaatataccttatatgtcagaattttgaatcactagtatctgattctatcaacgcgaattgagcttttctcttgcttgacttgtcaagatcttttcttgtgattgaattttcattgatgtgatatgacgattgtacgaagactaaagtgcaatctgtttaatttgcaggagactaatgtctccgtaaaaatttgctgttgttgttattgaatgttcaaggattcggttatcctgtgcagtggcctaacaggaagcagcaagctgtt

SEQ ID NO: 56714 - DNA, 324 bp, Populus trichocarpa
  Intron number 1 from transcript POPTR_0011s13830.1 (locus POPTR_0011s13830) derived from phytozome v7.0 (chr-ID scaf fold_11; pos 16463441 to 16463764)
gatctacaaccttcagatctgccacacttggtaacagttctctactttccgactataatcttttgcttttctttttgtttcttaagcttttgattaagaaccactatagttaagcattaagcattaccaagattccaaaaacatttctttaattaagcaactatactgcacatggtctaggtagaagcttcttctccttttatgctttcagctgagaaaatgttgataatcgctggaatttcttcttctttttttcttttttttttttggtataagctagacattatttgaaaaaacatttccacgtttcagctgttgcaggtg

SEQ ID NO: 56715 - DNA, 133 bp, Populus trichocarpa
  Intron number 1 from transcript POPTR_0009s16030.1 (locus POPTR_0009s16030) derived from phytozome v7.0 (chr-ID scaf fold_9; pos 12275415 to 12275547)
gtggccgccaagaagacagtaagcttccctctctcatcaacatctttactttccaattcttcttttattgaaaaaaacgattaaactttatgttgttttttgtgttttctttgattattgcagaagaagactc

SEQ ID NO: 56716 - DNA, 373 bp, Populus trichocarpa
  Intron number 2 from transcript POPTR_0009s16030.1 (locus POPTR_0009s16030) derived from phytozome v7.0 (chr-ID scaf fold_9; pos 12275609 to 12275981)
caagactgtgctgaaatctctcagaaactcaaagggcaagctcctattctctgtctcctttacagcttagttttttttgtgatttgagttggtttttttgttgatctgattaatggggtttgcgttttacttaattttctaaaaggggttctgattgaagagttactttaccttgatctgtgaggttgtgaaggttgtttagtggagaaagctgtgcgcttttttttccttctgattgttaatagtgctgtggttgattttttggtttggttcttgtggggtctgtttgttttatgtgccaagagatctcttaaataaacgtgtgtttgtgtttgcagggaagcttatcatcatctccaacaattgtcctcct

SEQ ID NO: 56717 - DNA, 621 bp, Populus trichocarpa
  Intron number 3 from transcript POPTR_0009s16030.1 (locus POPTR_0009s16030) derived from phytozome v7.0 (chr-ID scaf fold_9; pos 12276046 to 12276666)
gaagtgagtttcttgaatttgctctaacatctctctcgtgtcattccttgcattttcatgtcaagttatgaatttagctttagaagcttgctttttgtatccagggtcaatttgtgttttaaaattaggaatttgatttctttttttcattctggaatctattggttttcttttaggcctggctttaccaaaatcatgaaggttgatgtttgcatggctcattgtttcttttcttatttgatataattaatggttaggtaagtctataaagtgtagtatagcactcaaattgatatttgatgatgttacctattttaagatcatagctcatctgaaaagcatgcaatatgtatttgaaatctgaaggttagtccattgaataatgccataaagattagaggaggttttggtgggtgtttctcggcactgtgttatgacatcagctgctgcgcctttgtctttttcatgaaagaatagctgctcatcaataatttgaaccttttcactttctgtaacaaactgcaaatagtctttcttgaattctaagcagttcatgtgctatcaagttttgtcaagttgggttattttcattaaaatttgtgtttaatattgtgtcagata

SEQ ID NO: 56718 - DNA, 924 bp, Populus trichocarpa
  Intron number 2 from transcript POPTR_0004s23230.2 (locus POPTR_0004s23230) derived from phytozome v7.0 (chr-ID scaf fold_4; pos 22010788 to 22011711)
attcccctgtggatcctgcttctctgggattacatgtaagtatgaattgctatttagtgtaatgcataggtttggatgggtgtatactcatttaaactggcaggataggaaactgcttgtgaccccaagttcatgtggaagtacgagtgctggatgtggtagcactgcagtgagggtacaggttacgtgtccagaacatctatgggtcaagcgtgggaccttcaggcactaactgagaaataaaaggaatggtctcatttctaacatgtgtccagttaccactttgcattaatccttctcttagttgcatggataatcactgaagtaatttgtgatgttatatatgcagctgtctgtttcattttgaccttgaacttggaagggcgaggaataatggttggcgtgatgttctaatggtgttattgtttgctaaatgaaacaatgctgcctaggctagaggaaattatcgctattgaaccatgaccacaagaaaaaaaatatgcttttgcagtatcttttgcactaaccgctcatctttgacaactttgggtcaaaaaactctagtttgctacttttgagcacagagaatttgttagtggtttcctttatgtctagtctattatctccgttcttcaactttctataaaaatcccatggagtgcgaaaggtatttcaccttaatcatgattttgttgttgcaaaatggatgtatggtgattcataaaaatgacctgttactttttaggtagtgttcatgctcatgctgtcatgcactacactggatattttatgtaaaaataacactatgctggatattttctcatactcaaatgcctatataccatgcagacttctctctctctaatattggggttggggttgtctgattgtgatcaggattactttgctgtcgtagatacacca

SEQ ID NO: 56719 - DNA, 908 bp, Populus trichocarpa
  Intron number 2 from transcript POPTR_0004s01370.1 (locus POPTR_0004s01370) derived from phytozome v7.0 (chr-ID scaf fold_4; pos 753166 to 754073 reverse strand)
ggatagaagttcattcaagcttgatcatactttgggttagttttgttttgtttctattttgattgaattgttaagacccatgcttttgttttccgagtcacaatctcgtgtttattggagtattcgaggagttgtggaaaatcatgtagcctttgatttgagttattgcatttgaaaagaaaaaagcttgaacttactgttttgatgatttttttttctttttgtgaggggggcttgatcatactgtactttcttcttagctagctatttagtttgatatatgaagataagagaggtttactttttgaatgatattctggccttggtgtgattttagtttgatatgtaaaggagaatataattatttcttgaaatcttgggcttaaatacaatttgatatgcagagattagatgtatttttatttttggtacgagactcaagagtttgccatggactagcgtgatcaggccatctggcaaatttcattgtttggtgtagttgagacttgggacttcccatgaatttcatctattgtttcatctattattttctttgatgacatgaaaggaatgaactttagggtcagatttgaatgtggtgactttgattggacttaatttgttgcatttctttaggaaacaaatgaatattacttttttttttcctttttgattcctgaacattttatagaaagttcttttttgtaaatccaaattaaatatgaggttcaaatggtctctattgatgttgtagttctttaatttggttatggtgtgctatttcatcttaatcatttacttcgaaaacgaagtcagcgtgttgatcttatataaatttgtctcccttctatctaaaatttgatcttatttcagagaggaggcaagcagaagcttctcgcatcagagag

SEQ ID NO: 56720 - DNA, 1002 bp, Populus trichocarpa
  Intron number 1 from transcript POPTR_0011s14940.1 (locus POPTR_0011s14940) derived from phytozome v7.0 (chr-ID scaf fold_11; pos 17165064 to 17166065 reverse strand)
aacaccaactgaaacatcttctctcggcttgaaaggtaaaatatttttttcttcctctctatttgcaacccttttttttcttatttgtgtatatgttattgatgaggaaaccctttctgtgaaattcctttgtgggtttgatttcaattgaaaggagcaattttgactgaaaaggagggatctttttattgtgggttctggatgttcttgtgttttttttttttttatgggtgtttgttttgatttcatgttgtaaattttgataatttaaactgtgggttttgcgatttacactggaaaggcaatggttcttgaagcttgtgaattttaggttttggtaattgctgtgaagggcagtgataatggaagttagacaggagtagccccttagaaagatttaggctttgatgtgtgtgttgacacaatagtactataaaaaattgcaaatctgaatgagtttttcttccaagagtatgggtgttaggtttgaagacggaacaagaggtttatgttttcatgtgggtactaatatgggagtttagtaaattaatcttgtcgattttcagctcgaaacaggtgatatttaatgtgaactctggaaggaaagcaattagaaagctaagataggttaatgagtgagtgagttcttatttgggtaaatcgagctagttttcatgaattgagcaagggactagttcatgaaagagacaaggtcatctggattcatgagattagtttttaagtaatgctttcctctatgtttttcccagcataattatcaaccttcataagcaaatgaattcaatactgttgattttatgaaagcccctttaaatgtttatggatggttcttttagtggcataatctactattttgatacttgtttgattctccacgtatggccatgcagtcttgaagcttgcttcagcagcatgctatgtgcctttttaataagtacgataatttatctctgagatcttgcagaatttgctgataaagaa

SEQ ID NO: 56721 - DNA, 932 bp, Populus trichocarpa
  Intron number 1 from transcript POPTR_0015s13630.3 (locus POPTR_0015s13630) derived from phytozome v7.0 (chr-ID scaf fold_15; pos 13503129 to 13504060 reverse strand)
tctgcgtttcgctttatacagcttgtcgtttcaaggtcagtagctaattagtctttttatttctttattttttctgcaggaaaagaaaatattgcttgaattttttcaaattatttttgttaagtcttaagatttttgtgatcgatctcttgagctaaaaaaaacaaagtgtttttgtgttttttcttttcttttctcttttgatcttttgatttttaattgataattaaaattaattaagaactgggttttaattaagtaagaatttttttgagttctcgattctgaatgtgagtaattaagtggtggttaagcttgaatagttgtcaatacatataattagtgattataggggttttaagtgataaagttagagtctttttgggttttagttgggtagtgtagttgctgtagctaaagctgagagctaaaaaaattagggtttttgggggataatttaggaaatgaggtttttttgagttgtgattaaaggggggttgattaaaagataattaaatttggagttctttggatcttagttagtgttgcaaatgtttctaaatttagctaaaaattagttagtttttttttttttcctgggaggtaagtttgttcttggaattgtgttgattgagagttttagtttttattgtttttcgtttttctagtgctgatgtagagttatattgtttgttttagatctctacaagaaattgttgaaagctgaaacagatcacaaaaatattgggttcaaatctggttggtgaagcgtgaattgttgattatattgtgcagtcttttgtggttttttttttttttttttgatgtgggttttggttttttatgttattatgactcaggaggttaagaatatttagttttggaaaaattggtcaggcctggctctggagagctacttagattctggccgc

SEQ ID NO: 56722 - DNA, 869 bp, Populus trichocarpa
  Intron number 2 from transcript POPTR_0004s21190.1 (locus POPTR_0004s21190) derived from phytozome v7.0 (chr-ID scaf fold_4; pos 20423551 to 20424419 reverse strand)
tttacatcaaggtaataaacaataaatctcgagattttcttctttttacttggatttttttccagaattttttcatgaataaagccattttttagctaaaacgaagaaaatctatcgtcatcctattattattattattattattatttattttattttattttctttctgagttggaatttctttttagaatattttcctgaataaagtcatttttcagcgaaaacgaggaaaactaattaattaatattatcgctgctgctgctatttagtcctaaaaaaggtgtgcaatgtagtagccaaattggacttgttgtaattactaaggtgattagggattaattatgttatgatctcttgaaatagaaatggtttggtggtacagttttatagtaatcggacattatttcaactcattcttgtaggcagcaatcttgcagttgaaagttaaaagggttatttttagctattttctgtcaaaagctgtgcggccttactatttaaccaaatgagagatgggatttgggatggctttggcatgctagtagcctcattcaaaggggaaaaatgaagtcccttcatttgttgtgatctgcccacacatattacttgattgttgaagtttggtattaatatgtgttgcacccaaagagctaaagaaccctgaaaaaataatcgatatatgtctgagtggtggcttggcaaaatttatttaatatttgcgtgcatctacttcattatctagttgctgcacagcatttcaatgaaaggaagctgattgaatacgacttcttatggtttatgatactgcaatgcattgtttgacttttgcagaaagttgagaaagaaaaactggagaaacttgcacg

SEQ ID NO: 56723 - DNA, 278 bp, Populus trichocarpa
  Intron number 1 from transcript POPTR_0004s14770.1 (locus POPTR_0004s14770) derived from phytozome v7.0 (chr-ID scaf fold_4; pos 15415747 to 15416024 reverse strand)
acctcaattcaaaggtacccttttcttttcctttctttgatcaattgagtttcatcttcaaattgtaaatttcataatttgggcagtggggatagatttaaactcttgggttctgttatgctctctggtcttaagagagacaggcgttaagctaagatcttaatcttcaaataaaacacttcttgagcttagctgctaaatatgtagtcttgatcagctctttggtgaagtaatcaaatacatctatttttaggtttggctaatcaattgggttctta

SEQ ID NO: 56724 - DNA, 326 bp, Populus trichocarpa
  Intron number 4 from transcript POPTR_0015s09650.1 (locus POPTR_0015s09650) derived from phytozome v7.0 (chr-ID scaf fold_15; pos 10820199 to 10820524 reverse strand)
tctttcaggtactatggattggataggtttattgggttttcttctttctgtgtttttttttttggctagtataggaatgtttctttaatgcctgtttgagacactttaacgtttgttttgggtaaggaaaaaaaaaagggggaaatccaacgttataacctgttctaggtggtaaacatgagtagctgattcaatatttataaatttctttttccttttgtgtcatgagcctccgttgtttctttgactttcaagtaatgttttgttgagttggtggtttcaaaattcaaatgactgctgctttgccagcttagtgaggaaggacc

SEQ ID NO: 56725 - DNA, 992 bp, Populus trichocarpa
  Intron number 2 from transcript POPTR_0009s01000.1 (locus POPTR_0009s01000) derived from phytozome v7.0 (chr-ID scaf fold_9; pos 1109471 to 1110462)
gagcattcaaggtgaagcacaaatgggggaaggaaaggtagatatttgggacgtgagttggatccaatataacatttgatttcttatgttattcataattcattattcgcatgtcctgtctaaatgaatgtattttggcagtgtaactgcttaagatcttgttgacataatcaaggcacaaatttagaggtattgtcttccatctatgcagaattaccaccatgtagacactttccactaacatgactattgtaaattgaccctagaaatttattagtaactcaggaaacatgcatttcttttatcaaattctcaagacgggttttgtaattattcatgcaccttagaattatgataagagaatatgtgctgttttgttatagaggacaccatagccaccacacttcttcaaccataaaaagcaacttcttctgtgttatttcaagtgttgatttttaaatgtttgtatgccttttaagaaaggcaaacatgtgaacaagtccacaatacagttggtttgattcattatgagaatatatattattaataattataatgtcttaaaaccaaaatttagaggaaaaaacacttcaaaatggaatttagaaagacagtccttacatacctttattggtctccttcaatttgcttgttattccattggaactttcaaatatataccatttgagctcataatactagtattaaggtttaagatttgagatgcatttttttttcatgcagtttatatttaatcctttagttgtatttggtcaatagcgtagctatcaggatacaaatagagtgttctaaacccaatgacagttcagtttacaccaggcatgtgtgcatatgtgtctacatctgtgtggcttcatcctctagttgtattcatctttcccttccatccccttgtattttgcttattgttttcttcactgatcaatagggatgtaggacaagcgaattgtttctcttccagaaatcaggga

SEQ ID NO: 56726 - DNA, 1041 bp, Populus trichocarpa
  Intron number 1 from transcript POPTR_0004s15840.1 (locus POPTR_0004s15840) derived from phytozome v7.0 (chr-ID scaf fold_4; pos 16375766 to 16376806 reverse strand)
gataacctctaaagtcaggtaaagtgggtctctttgtttttcagttttctatcacgggtttgctttgttcttgcaatgtgcctacgattcccaacttttctctgatgggtttgcattattttcgtggaattctgagaagtttgtgtttgcttttcttttgcggattgtgagttcttgttttgtttttctttagtaaggaaagttagtgtctttgattcataattcttcactatgattttgatttcttggatttccattttattcctttaatgagtctggtgtgttctttccagttctgaatttcgtgatttgttttgtagtgttcacggtcaatgttttcttcttttgttaacaatggtggtttgtgtacctggcttttcctttttgagtttgttgacctgatctgtctccttgaaagagccattttctttgagaattatgtgtagcagatccacttagttgatttttcagtactgcaatctttttgttgggaagcatcctattgcccatttgtcctttctttttgtcacaattcgggaatgataaatgtctactactctatgagtgatttttgacttgtgtcattgctaatgaatcgcagcactttaggtttactcataggatctgggatcctctggtgtagggaatctattgttcatatctgactcgcaggttaatgccataacttaggatgaagaaccaaataaaattgtattgatcaatgcagttatccaatactcgtgtatcccgattagtcaagttctgtctatctaaatagatactcatttccgaccctaattttgtctgagagaggatatagccaattagttatttattggtaaattacagcagttttcttttctgctccgtcaataccatgaggtttcatcattcaccccctatccaaaagattaattgcactgtgtttggttactgtattcttttcagttctttccatcttttccttaatatggaatggttaatgtctgtgagtgcacatttgcagatcagaaataggcagacttcctggtttcattctta

SEQ ID NO: 56727 - DNA, 270 bp, Populus trichocarpa
  Intron number 1 from transcript POPTR_0014s08690.1 (locus POPTR_0014s08690) derived from phytozome v7.0 (chr-ID scaf fold_14; pos 6444992 to 6445261)
aaaacctgttcatcgtgttcttggtggtggaaagcgtaggtcacttaaaacctgctttatttattaaaatttcattttctttttttttaattcatttatttaggttgattttgattgtttattattttatttttttactagtggagaatagaatgattcagatttagtcattgttttttttttctggtcttctggggtgtttggttactgagaaaattaaaaggaaaaaaaaatgactgtggttaatgtggtatttttgttcagctgctg

SEQ ID NO: 56728 - DNA, 492 bp, Populus trichocarpa
  Intron number 1 from transcript POPTR_0011s01540.2 (locus POPTR_0011s01540) derived from phytozome v7.0 (chr-ID scaf fold_11; pos 1084177 to 1084668)
ctagtaaagtttgcatttttttgaaatattttttaatggggttttggttttttgactgatcgattgttttttgttagtttgatggtgattggtgcggttaaagttattgaattttggttgtttctttttctttggttggagtgagctagagtcaagaaatgaacttttactacgataatctttttgttttttttttctttggaagatcagtttattttgtgtttgtttcctaggaaaatgtgccggcaatggtgttctaccttttgtgttttgctcatgaaagtatgatagtttttttatggctaaagtaggctaataatgattgaaatgctctctcatttcatttagattgcaatttttgttatttatttgctttcatttcccagtgaaataatcaagggtttatgtcggcggcttttttttaggggttaaattagttggttttgaggattgaaggtattttctgttgttgcagttcaagctctacaatct

SEQ ID NO: 56729 - DNA, 761 bp, Populus trichocarpa
  Intron number 3 from transcript POPTR_0009s04740.1 (locus POPTR_0009s04740) derived from phytozome v7.0 (chr-ID scaf fold_9; pos 5016889 to 5017649 reverse strand)
gtggcattcagtatacgtttgctccgtgtgtggctgtaagttcttataaatgcaattggatactccttttgagttctctggttttgatttgttctgcagcaggatttctagctgaattaattgactgtctaatcattttaatatgaaattttgtacaacttgcaaaatcaccaagaagaaaccaatagaatcacctagttcttcctaagaaaataaaagtttttgcattgaaagcgtgcaagtagtgatagaaagaagtgtaaaaatttatgtagatgcttttattacctttgtttaatcaatgcggtattcatggtcggtgaatatttgcaagattcaaaataactctttgtttgtagaccagatgtaatgcttgataaactggattgggatcctctcatattccttttgtcatatttgttaaatctaaactattaaattcaaaccgaatggacatgatttaatgaataattaaaatgacaagaatttaaccaccataatataatgaaaatagggttctttaaatttaatgacgtaaataattcttttattgagttggcttggtactaatcttagaagatcattgattgtgaagatgtggtgcttttaacacaatagtatggtatctttaaacaaaatccagaattaacatatagtggtattgttggttttcttcagtgttcttttcttcattgtttatattccttcttgctttaaagctatagtatgcagaataatttattcaatgggtgctgacaggt

SEQ ID NO: 56730 - DNA, 555 bp, Populus trichocarpa
  Intron number 2 from transcript POPTR_0015s13020.1 (locus POPTR_0015s13020) derived from phytozome v7.0 (chr-ID scaf fold_15; pos 13144058 to 13144612 reverse strand)
ttatcacccctgcgttctctccagccaacttgaaggtccataacatctctctcttcttactccttttctattgttaaagagtatatactactatatattctacgtgtgtaatcttcagggtttttaatttgtttgcccaagtggttgaaaaatctcagttcattttaatcacaaagttttgatcattttcaaccaagttgcactataactcttgaattaaacttacactagctagtttaccatcagtacaatcaccatcatgaattccataaaatattgggtggtgtaaatatggtagttaattccaattgtgaattttgacgaaagaatgcactcaaaacattgacatttccatcactaattaccataattgtgtatgtgttaatacatcaccttatacccaaaatagaaaaggatatgtttgcttttccaagattctataaatttaattacccaatgaatgaatctctctatatatgctatatcagatttgtttttattccaaatcagatttgtttttattctaaatcagatttgtttcttgtcctataggcc

SEQ ID NO: 56731 - DNA, 625 bp, Populus trichocarpa
  Intron number 1 from transcript POPTR_0015s02230.1 (locus POPTR_0015s02230) derived from phytozome v7.0 (chr-ID scaf fold_15; pos 1571975 to 1572599 reverse strand)
cagactgctcttttagttgagcttaataagcacaggtttggctttagattttgataatgataattttgtgtgggtttgttttgagctttggtttctgtttgttttatgggagattgataaaggaaatgaatttgatgggtttttgttgaaggtatgagctttaatatgtttggtttctgagaaattggtaaaggaattgaactttgtggtgtttgttatattttcgactttgctatgttatttgctcggtgaatgagaaattggttaattcattaattaaaattactggttttttttttctctggggtttcgaattttatctgcatggtttatgagaaatttatagaagaattgaattttatgggctgtttgtttaaagttttaagagtacttttttggttaaatatactgtcttctttttggatgcttagaaattgattgaggaacatgttttggccctttcttgttaaattttaagccttctgtttttactttagtgtttgtgtgattgttgaaaaataggtatgaaaagtgaatttgattgtctgtctttcatttgctgattttttttaattaatttttttttgcagtcctgagtctgtgattaagaggtttgaacaaagag

SEQ ID NO: 56732 - DNA, 936 bp, Populus trichocarpa
  Intron number 4 from transcript POPTR_0009s10210.1 (locus POPTR_0009s10210) derived from phytozome v7.0 (chr-ID scaf fold_9; pos 8824988 to 8825923 reverse strand)
acctgttagtgctcggttctatttcaggtagtggagagactctgcttctattttccatttggacgtaaaatccttgttttcatgtttttctataatctttgtgtttgatcttcttttcctttttccttagaagagaatacttaagttgattagagaacgattgtgaattagatcgttatggtttttaaaaacaaagttgatctacttgtttgaatttttgtcctccccttcatctggaagcaagaatctgtttgttttcttctttttttcgccattcaatcgcaagaaaagctcttctagcgcacttgattttcaactacgtaaagtttgatttgaggagtttcattaaagtagtattgaggaacttggctacaagtaatttctcgaaccacgaggaatcgttggccacaacaatttaaacaagcatatggcacaatagttgctaacttcattttgtttgccagatcttcttgcttatctggggaaataatactaactccttttggcatcaattgaataacacaaagctagcattagtttgcaagagtccagactttgtaaaaaatggacaagtaagaataatcagtaatgtatgattcaggaaggaatcatgtccttctggtctccaacagaagaaatgaattgcttcatccctttgattttggcaacattatgataattcttgatcttgtttgtcaagcaattctttccaatctcaactgactatagcaggaaggatgttgtatcaattcagttttcaattatattttggtttgttgaatattggtatcttaaagctttgtcattcattattgctcttcattgacaaactggctctataattttgtgaagttggttttctattatggttattcctgcaatgtggtgaaactgctcctaatttctttcctctgtatctatcaggcagctgtcaga

SEQ ID NO: 56733 - DNA, 832 bp, Populus trichocarpa
  Intron number 1 from transcript POPTR_0009s11880.1 (locus POPTR_0009s11880) derived from phytozome v7.0 (chr-ID scaf fold_9; pos 9782013 to 9782844)
gcaagtctctttctgctcttcgcgctcgtcagcttgtaagaatcttgttgccctagctacctctttctgtttggttgcctagaaaatgaaggaaatagtggaatcagaattgcatatttgatccttaaacttctcaatacccgtgacttgaatctaatctttatctctctttaattttaattttctaaaaaatggataatatgggttgaaacgcgatgatttaggttatttaacgaactgatttgggattataaatgaattatataaatttaattcctctcccatctataaatagaggttaaatgaattgatttaggttaattaaattttcctggttgttccaatcctcactgaaaatttgtagaagcagatatggtattttatagtggaattgctattaagatggatggcaagatgacacattgttgcagcggtagaaatcaacttattttgttcaatttttaatttgtgtttttactgtaatatgctgaaatttcagtttgtgaatttttgttttcttgaacttgtgtatgaattgaaatgaaagagagaacagaagctttttaaggtattcgtgagggcatggaatagcgactcgtgatggaaagtttaggatgtttttcactatactttgaattgctgactgatgggtgatgaaatattggttgtattttggaatagttgtttgtatttggctaatgctgctggtgttagccttgacagtttatgttttccacggttgatttatgaatctaaagatgttagttggcttatagtaatattactttgttcttctttctgggtctgtaggttgtaccaagacaagcattgc

SEQ ID NO: 56734 - DNA, 403 bp, Populus trichocarpa
  Intron number 2 from transcript POPTR_0009s11880.1 (locus POPTR_0009s11880) derived from phytozome v7.0 (chr-ID scaf fold_9; pos 9782867 to 9783269)
gagatccagtgcccacttatattccaccaaaataggtttgctctgttctctctgtttgattcgctttcagatatactatttgtgtgagtgggtgaactagcaaaaaaatgttattgagttttattagtgatactcacaaatctaagactgtaaatcgtttgtgttaaaatttattacatgacatactgaatttatttgagaggagagtgttttggattaatgttttagaatttcctctggaggatgacaagcaattatttcttcttcagagaacatgttgagattctagtccaaaagtaactgcctacatctttaatgggacctttcttactcttacagtgtgtttatactttgtttaagttatcgcactttatgtaatttttcttatctgttaccgtagaag

SEQ ID NO: 56735 - DNA, 871 bp, Populus trichocarpa
  Intron number 1 from transcript POPTR_0004s13430.1 (locus POPTR_0004s13430) derived from phytozome v7.0 (chr-ID scaf fold_4; pos 13471982 to 13472852 reverse strand)
gatttagggtttcaaggtattttacccctttacctctcccctttaatgttatgataatatggtttattttaatgtaaaataccattttacccttctatttatgcctttctaaccccataaataaaattttgattttattttaattgaatcccaaattaaattaattttcctaatataattatgatttaattaaaattatttttaattaaataaaatttggattttataccttaaattattttaattaaataatttattttcctaataggattaggaatgaattaaagtatttaattcaattttttaagtcctatgatatgctaatgggatgaggatttatttaattaaattgtttaattaaatgatatttagaaaaatagtttttctaaaataatgttttttttattattttggaaaattttatttaattaatcctaaaatagtttaggatattaatagaaattttaatgtgattaattttcttattaaattttgaaaactaattttcatggaatttatgttaaataaattttttttattgagaaattattaaattagatttgattgaatattattttatagtagcccataaagctaataattagaattgaaacatgcaatgtatttatcatgatggatggttatggacattaaaaaccaatgtgattgtgtgattgtgcttttatttgatggttgaatggttgtaattttattaaataaggcctatgagttttgtcttatctctattttttattcttgattgtaattcttttctcatttaatttcccttcgaatataactcgagatttcttaattaattatgtaaattttatgtaatttaaaaatataaaaatttatataggaaattatt

SEQ ID NO: 56736 - DNA, 825 bp, Populus trichocarpa
  Intron number 2 from transcript POPTR_0012s04230.2 (locus POPTR_0012s04230) derived from phytozome v7.0 (chr-ID scaf fold_12; pos 3466814 to 3467638)
ggtgctcgagttcctccagagacaaaaccggtgaggcatggttccttcacttctagtttataaatttttagttttttttagcatgcttttgcttctgggttatgtaataatgcagaaatcttccggccccataggatttcgacttatattgttgtcacaggaaatgagctgtaacttcatctcttgtagtggcatattgttgaagtattttaaaggatggttttctatactaatttactgggaagatgaggagtcttttccattttcttatgatcatttcttgaaatggaaacaaatgaggaaaaaaagagaaaagttacaatttttgaacagaatatatatacaaactaatcaatgtactacagaaatttctcctaactgatgaaatattgagctgtaaatgataatatatggagttattaaaatagaggaaaaagtgaaggattctgtagttgaaacatttcattaatctcttcctttccttgcgatttttactctggaatatcacgctgtcttttatttcataaagaatgtcttcttctttagtatttttttctatactgtttgattctctggcagaaatagtgcttctgggttttggactctagccttgtggattatgagttcacgtgtccataacttacttggcacaagagagagatcagtagcactcattcttttttattatgactatcgagcttcttctttttttttaagaattttttttttatagcttgaagggtaatttgccttttacttgttcatatggaaatagttatgtgctgatagaagcatgctcttatgcaggagaaaggtgatattaac

SEQ ID NO: 56737 - DNA, 798 bp, Populus trichocarpa
  Intron number 2 from transcript POPTR_0001s04970.1 (locus POPTR_0001s04970) derived from phytozome v7.0 (chr-ID scaf fold_1; pos 3827081 to 3827878 reverse strand)
aatttaaaactgcacttcttcaacgtctcgaaagggtaagagtcatcatttgttctttgctagaacaaagttttaagatgtggcatttgtgtcctggtatttctagatttacaatgtcgagcagttagctgtcgagggtaatcatttataatgatgaaccgtggtctgcatggagttaagaaatgaatgactctgacaacggcttattatttgtttcaaagtttaagcctatttgttaggtcagtgtgatcaattacagtggagaaaatatctgaggatctcttggagtgggcagagagaggcggagagactctggaatgggcacctcaagtgatacattgaatgcttaaattgatcttctgggaatcagtgttcaatcatgacagttataaatcatgagtgacatcatttccattagagttacaccagaacattcttcagttccctaggtagggagaggagagtgtattctgtagttttctctgatgtattctaggttaaacatgcttaatttatgagtttggcgtgtgtgttgaaggcactgattgctgatgtaaaaaagttagaaagagtggcatgcaagtaccagaagaataaccaatgttaatttgtaatattgtataaaaaacaacatcgtttttcctttaggaaactttgtggcagttttagtgttcaattctttcttctatgtaattcagttatgcatttggtttttttttgttcatgctattgttgttggtcttggcttttatgcaaaaaagctctgctcacatttttcaggagaacgatccaaccttg

SEQ ID NO: 56738 - DNA, 413 bp, Populus trichocarpa
  Intron number 1 from transcript POPTR_0001s04970.1 (locus POPTR_0001s04970) derived from phytozome v7.0 (chr-ID scaf fold_1; pos 3827936 to 3828348 reverse strand)
agttgaatctagcaatcctagagttgcttatctttgtaagtgtttttttaaaaataaagtttttttgttttgttttttggaatttaaggcatgtgtttttagtttttttatgcaatgtaggcttgatttatagcgtttctaagcataaagattatttttttatctttgcttttcgaagtaaaaataaagttttgttttttcgtgatgtttttgttttttttttttttggaatttaaagtttctgtttttagtacttatgcaatgcaggcttgatttatagtgttttcaagtataaagacttgctgtttttgttttttgaaattttttcttatctttgatttcagtaagtaaaagatatggtcttttttatatgcatatctgattgtaatgttctgttaatgtaggtcgatttt

SEQ ID NO: 56739 - DNA, 785 bp, Populus trichocarpa
  Intron number 1 from transcript POPTR_0011s12170.1 (locus POPTR_0011s12170) derived from phytozome v7.0 (chr-ID scaf fold_11; pos 14932857 to 14933641)
tctagctttggattcaacaaaggaaaccctttaaggcaagtatcttttttagcttttgtttataaacatactcacttcgaaaacccaaatggggtatctttattttctttggtaatttttgcttatttgtgatttttatgttaagatttgctgtctcttaaatgggatcgcttttttaacatttgttagtattaatttattaaatttgttatttttagctgtattttgaaaaaaaaagcagctatgcatttgctcatgttatctgagtagtctttactttcatgtgaaatttagaactttcatatgttacgtaagtctctctgttttttttttttttagcttttttattgtttatctgtttggttgcaaagaaaattaatgaagcaaaaattgaaaatgggaatttggaatgccatcccaagttttaatgaaaatctctcttcaattttggtcaagtggttttgtatttgacaggtcaatagagattttcaacttttctagtgccaaatttgagctctagactgtgagataataaatttcccattgaaggtgttggcaacttataatacatgttttttggatagcaaacgatacattgcttcacattgactggttgctacttcaaatctgtgcaattactgtatgtagattttggctacattaagcatctttgcttgtgtgtattttccagttttgctttgatatgtttttttttttccatctacattttgctctttgttgttcattattatgattgcttttgctatggcttatcaggcttactt

SEQ ID NO: 56740 - DNA, 885 bp, Populus trichocarpa
  Intron number 1 from transcript POPTR_0009s11180.3 (locus POPTR_0009s11180) derived from phytozome v7.0 (chr-ID scaf fold_9; pos 9381006 to 9381890)
ctggattgacagtccccaaagcaacaccattggaggttgtcctcaggccaaggttaccttccatcgcttacgaattctaagcagcaagcacaaggagatcattgtgtaatcctttataaaaatatataaaacaagggtagaataaaggcaggaagtattttttattgccaatgtattgcaataactgttgaactgatcttatagtcaagtttttatttcgtggtttttaatttactattgtctatttttatcaactatatcatttggtgcgttttttttcaaactaaaaaatttcagtggaaacaaatttggacagaaggactagcagaaagctgaaattggcaaaagcagacaagaaaattgtttgcatctggtcaccatcagttagacttagctcccttgtcccttgtggccataattgaatcaaagggagtagcagagcaataaatgttgacgatagtgaatcttcatgaacagaaagatagtaataataataatatgctcattataaaatctctttgttatcattttatagaattaaaaattaacaatgttttcatagcttattatgatgggattataggcatacccatcacgaactctattttctagaccatcttatcaccaatcttcaacatcataagtaactttgcaccttacgaaacctgtcttatgataacaatgatttttcttcaatttgaatgtaagctttcaattttgataaccacataatatatctttttttttcaaaaaactctcattaaagaaaggaacttcatcagaataagttcgtgagttctttgtgtatacatccatgatggtgcttaatttatgaatctataatgtgcagatcaggaagaatcggaaatcatcactagttttaaa

SEQ ID NO: 56741 - DNA, 610 bp, Populus trichocarpa
  Intron number 2 from transcript POPTR_0009s01230.1 (locus POPTR_0009s01230) derived from phytozome v7.0 (chr-ID scaf fold_9; pos 1443236 to 1443845)
ttgaagttttgggccatcaactgcagttctctcaagtatgtttttttattgttcttttcccatattgcaaacgttgttattgtttcttgtagtttgtatcggttgctataaatttggaaatttagtgtgagttgtacactttttggacaatgtttaaccactcacgactggaaaaggtgacctgtctgcatgttgtgttggttatgtaatagctactgtgatgttggggaaggacatcaaattctggatcaaagtgaaatagtctgttttttttttcttaaaataaaaaatggacatttcgtgatattttgaataaaaatatagtcttttcaatggaaagtgatgtgcagcaacaaagtttaggtggcctgtataaatatgaaataatcatgaaagaaaattttgttgcgtctgcgattaattgcctgtttgtaattcctccatcctacaagtttggttgccgttaattttcggtttcacagcatcatttcctgttgcaaatttttcacatgttatgttgcatttagtatctcgtgatgtttacctaacaaatgaatttctggtcatggtgataggatccaaattccaagcatttaggaaccactgtttg

SEQ ID NO: 56742 - DNA, 896 bp, Populus trichocarpa
  Intron number 3 from transcript POPTR_0009s01230.1 (locus POPTR_0009s01230) derived from phytozome v7.0 (chr-ID scaf fold_9; pos 1443859 to 1444754)
gtgttggttaaatttctggtaagtttaaatttgtatttcttcatgtacttgaaactgtagagcacgctctccctggtggtattgtttgattcttggatgttggactcaggattcagggtctgtttcaccatgacgtgctcaatagtcaaacagcttttagcgaactttaaagagtaggttgtttctgtaaagagtttgcttctaagaaaattcatcatttcaatgcagtaaagcagctaaaaagcttatcatgcaggaagcattttcctcccctgcttttctcataatcattttaatttcagtgctatggttcttagtgcagcatagcttactaacccttataaatttaagttgatcttatttaggcatttcttgttactgggataaatctttttcaatttcagttgtattttgcctggattctttctgaagatccctgatgggttgtttgagggatttgatcatcttgattttttatctcattttgttctgcataaagagaagaaaacgagagatgatggttagtaccagcaaaaccgtggaacaaatcttcccattatcttccaatttatttctataaatttaaagatggatctaatgtcattggaaaactgcaagataagaacaagatgtgtgtgtgtgagagagagagagagagagagagtgagagagagagttcactaaagatagtggctggctctttaacttgtgaatatgttaatgaacacttgattgaaagctcacctcactagaacattatgcttatcagatttgaaaggccactcatacattacctgtgacatagattaataaatattttagatctaaagacatgaatccgctcttcattggttgtttcaggaaaggaattgcagaaggggaaggttttgtccatc

SEQ ID NO: 56743 - DNA, 501 bp, Populus trichocarpa
  Intron number 1 from transcript POPTR_0004s01915.1 (locus POPTR_0004s01915) derived from phytozome v7.0 (chr-ID scaf fold_4; pos 1185819 to 1186319 reverse strand)
ctggtgagggtggtccaaattgatcactgttcacataaaaatcattgcttttgaatatcaaattggtagtcaaaatcacagaaaaaaggtcccatgatactttgttattcattctctgaagaattatcttttctcctgtccacacaattttcttctactttatgggcttagccttagcagaaatacagatcttcattacatcagctgaatctacaagaacactacaacctttttaactttgtcttgacaaagcctgccagaggtagtgaacttacctgccattggaattctttgaatattcttttaaactttatttgtattagagctgatcttgatacctcccttgatatcttctcatctagaaacccctatagagggcttagatccctctctatttccttccaacttcctctttaggcctgcttcctctgcttatcagatttggtttcttctgctactctcctctttctgctacagttttgtttctcagattccataggc

SEQ ID NO: 56744 - DNA, 478 bp, Populus trichocarpa
  Intron number 1 from transcript POPTR_0012s12000.1 (locus POPTR_0012s12000) derived from phytozome v7.0 (chr-ID scaf fold_12; pos 12340693 to 12341170 reverse strand)
ggtttagtaagtgtttttggcttcttgtttttgcttagttttttaggtttttaatgaattttgtgatgtgggttttctgttttgttaactgggctatcgttgttttttgctaagaaagagttagcaaatggatttgtttagttttctgtagattttggtaagggaggtgttgtcgatgagacatgaattggatctgtttaattctgttgaaattgtttttggattacctgagagagtttgtttgttcgggtttcaaaaactgttacgttaatggaaaacctaataattgtaatgctcttaaataacctatgaaagtagtttaaggattctgagtgactttgagttttaagtgaggtgcattgcttaactgggtttctgttatattgatgtttttgtgtttgtggtttagtgctggatgctttgatgttgaatattgacttgagtgtttttgatgttgcagcatattgtgttgttgcgg

SEQ ID NO: 56745 - DNA, 747 bp, Populus trichocarpa
  Intron number 1 from transcript POPTR_0012s08910.1 (locus POPTR_0012s08910) derived from phytozome v7.0 (chr-ID scaf fold_12; pos 9966350 to 9967096 reverse strand)
ctaagttacttgaagcttatattgattgccagaaggtatacacactaatcttttttgcaactaatagtttggattgagctatttaatagtctcaaaagatgtcaagaaacgattaagcacacgcagaaaaaagaaaaaagaaaaagaaaaagaaaaagaaaaagaaaaagaaaagaactcaagcaaatctagaatggaaagtttggccaagtgatgatacaactggaaggatgaggaacacttttctaaatggagtgtgaagttctttgaaaaaaaaaaaaaaaacttcaaggatacgggattcttgatttccaacgtttcagtggtccgaggacagtcatggtttgagggatgtcttaaaatctcaatttgatccatgaaatgcgttgttgcaacaatttttgagtgtattttattgctatgttgttgcaattgcatgtgttttctcttgcaaacttttccttttatgtcgatcaatttctttcacatttttgttaaaatgaaaagcaatactcttgtgcaataccaacttttctcattagctaggctcatactatagggaaactgtgtagactgtagaccatatatgctgttagacttttgaaagtcttggaaattggaaagttccagtatttattggttagtactccataaagtgtattgataagtctactgttgttttattttcttatttttactaattttgtttttgatttctgtgttttgcaggtgggagcaccgccggag

SEQ ID NO: 56746 - DNA, 746 bp, Populus trichocarpa
  Intron number 1 from transcript POPTR_0004s19610.1 (locus POPTR_0004s19610) derived from phytozome v7.0 (chr-ID scaf fold_4; pos 19398844 to 19399589 reverse strand)
aaagggaggttaaggctaattttagcgagtttcaggtgagtggtggatgtgtttatttttctacttggttctgtgtggtttttgttcatttagtaatggattgtgcattagttttaattttcactctacgcgtattttgttgctattgttgtggtctatgctaaatttgaagttttataaagatccaggactttgaataaaaaaagagagagggagagagcgattgggtgaattggtgttatcactgtgagtgagttggtgttttttcatcaagtgattgggacattatcaatgttttatacggtacattctctgtgtatacctgtgattgacgatagttgttcagcattttcttcacatgtgcatttagttattccttattatgttggcatagtaactgagccattgttttgaaatgctattgccctttaacacgctttgccttactaactggcagcgttcttcaagtacattcaatggatggaaggatcaaattcagtttaaatattgtgatttttgtataattagataggcgatctcttctagctcaacttggttaaaaaacgtgcaaatgctattgtgttttcatagaaaatctcaatttcatgatgatttgggagtgatacagaatttaagtagcagttctttttaagaaaaaaattgctgctcttatcattcaaatctctttattcatattctctctcctaacattctgtatattatacaatagaattggctagaaaaac

SEQ ID NO: 56747 - DNA, 511 bp, Populus trichocarpa
  Intron number 1 from transcript POPTR_0009s10230.1 (locus POPTR_0009s10230) derived from phytozome v7.0 (chr-ID scaf fold_9; pos 8842696 to 8843206 reverse strand)
ctcgccagtgcgaggtttctctctcttgctatattgtttcgtgtgtttgatttgttaattaggggttttgtgagatattaattgaaatgttgaaagattgattggaagaggtttaattaggatttggatattgtttactaaattcattttggtgaaattagggtttaattagtatcttcataaagaaaaaacccaagtgtttgtttccttttggctttaatttatgaagtgtttcaattaggttgttgattgcggattatcatgaggtttgtaccggatatgcttttaggctcacaggaattttaattttaagaatactggtgaattgcatgaattttttgggcagtgggttaaacgcaggttaaacgcatgatttaaagcgctatctctagtcttttttgtcaaatagggaatgaaatgcatttcctttctaatgattttctttttactaatcgctttcttcatgtgttttgtaggtttgcaaacatcctttttctttctctcctgttta

SEQ ID NO: 56748 - DNA, 455 bp, Populus trichocarpa
  Intron number 1 from transcript POPTR_0015s08010.2 (locus POPTR_0015s08010) derived from phytozome v7.0 (chr-ID scaf fold_15; pos 9291652 to 9292106)
cagttagtaattgttggttcagatctaatcaatccttttatttattcatccatgtttcattcgtttttctttattgattatcgagaattattaagctcaactgattccgtttcattggtggatttatcatgttttttcgtgaaatctatttctaagattagggtttttgagatgtgattttggtaattttgaaactttcgatcagatttttgtgtttattattaatttgatctaaatctgttttgcttagttgtattagtgaattagcagtatctgaattttttcttcttcgattaggtatacatatatccttcccatgtggatggtgattttattcattcttttccttttatgaaattatttggattgcattttttgggcaacgaacaacaaaattttgcttgactcttttttgggttttcttggtaggagaaaagaacagttttgattacaaa

SEQ ID NO: 56749 - DNA, 503 bp, Populus trichocarpa
  Intron number 1 from transcript POPTR_0015s07100.1 (locus POPTR_0015s07100) derived from phytozome v7.0 (chr-ID scaf fold_15; pos 8227648 to 8228150)
tttcttgatttcgtgctcaactctcacttctacaggtcagttttcttcttttgcttcactttcttgtttctttaattggaaatgctcgcttttcgttcttttttacttaattatttgggttttgcttatcttgctaggaattattggtaaaatttgaaagactgcaatcttatgtctaagaagcacaaatctgtggttctattcatacattcaacttaaagatcttggagtttccttatgtataccgtctttaacacataagatatggttgctagtgacgtagttcattaaatattagtcttttgcaattctaatttctaaaagatgcacaagaaactaaaataatctttgtcttggacctggatgtcttttagattgctctcttgccatcatttttctctcttccactgcaattcagactttgatctactttttatacagtatctaatgagaatcttaagggctaaagttctcatctttgcttgatgtacttgcagaagcgt

SEQ ID NO: 56750 - DNA, 560 bp, Populus trichocarpa
  Intron number 1 from transcript POPTR_0004s14760.1 (locus POPTR_0004s14760) derived from phytozome v7.0 (chr-ID scaf fold_4; pos 15406844 to 15407403)
gcaggtcagtaccatttaattagcatttcttttctgtttcagaaagatgtaaacttttgatatttgtgtttttgtttggattgagaaaggaagttacttgcattttattgattgttttattctttactgcgagtgattattttgtgaaaagggaggacttttggaagagggttttggtttctagcttgaattctttgaggtgttattgtttttcttagtgaataattgttttgtttagacattattgaacatttccaatgtgtttgattcctgagactcgtgggattgcatgagcagttttgtttttatggttatgtgtaactgggttagtgccaataatcatattatagctatactgtcacaatgctggaaaatttagagattgtctacattgaagatattgttgtgttatttcgaactcccaagtaaacaatcaaaagtctatttttttggtgatgctttcttctcttttttttgttgaaaaatggttattttgattcacaacaacacctgctacttctgcagattgccccttagatctgagtggatcaaattttacc

SEQ ID NO: 56751 - DNA, 702 bp, Populus trichocarpa
  Intron number 1 from transcript POPTR_0009s08460.1 (locus POPTR_0009s08460) derived from phytozome v7.0 (chr-ID scaf fold_9; pos 7733854 to 7734555)
gttcactccaaaaaggtatttttttgtgggttttgaacgttgaggcctgaacaggcatttttagtttcggtttttggttctgggttctgggttttcttggctatttagaataagattaaaaaaacctcttctttttaggtacaaatatatacatccatattttggatgcatgaatgaatgatggaatattttgggctttaaagactgattttgaggtttttgtgatagtattgcttttttggatattcaattggattagggttttctggttgttaaggtgatgtctattgaggtttttcatacatcacgaggaaaatattggcaaattatgcaatttaataccatcatttctttcttctttttttttccgggaaagtcttgctaaaaatccaaggcagctattgatttccccccttttgtcttagctattaatatgttaatgtcccatggctatttcttttctgtcccgtcctcccccctgacaggttactggtttgagggcattgctatttgattgtggtttttaacctaattctgtgtgatcgtcccaagattgggggaaacttgatccaggatatattgcaaattttgttaaccatatctgaagttttgtgctttctagttgctacaatagacctagtaaactctgcaacctttgtgcttgcaggctgctagttatcttttgtgtgatcaacttgatca

SEQ ID NO: 56752 - DNA, 227 bp, Populus trichocarpa
  Intron number 2 from transcript POPTR_0004s00420.1 (locus POPTR_0004s00420) derived from phytozome v7.0 (chr-ID scaf fold_4; pos 136483 to 136709)
tctttctcactgtaagatttcctgaatttgtttccatattacaagggcttctagtttgttcttggcataattgatttaattgttcccatttttatttctagtattttttttaattattattattataggagaaaacacttggggctgtagagtatcaagtatgtatttgactgttgttttcgtttcttgatttcttttatgtcaggactcggtggtaacgattcttg

SEQ ID NO: 56753 - DNA, 752 bp, Populus trichocarpa
  Intron number 2 from transcript POPTR_0015s15300.1 (locus POPTR_0015s15300) derived from phytozome v7.0 (chr-ID scaf fold_15; pos 14628674 to 14629425 reverse strand)
aatcatctgtaagtaaattaattatgattttttatatctctattatattctttagttaaaacctttatttttttttcctttttaattgtgttttctatatgaaatttccgggtttgcagtttgatcttttagctgtaacataaatttagagacttgggtatgtggcattttatttgaagtggctgatgatggtttaggaagagtaacaagtagtaacataagtttagttcttgccaataaggcgttgatgtggcagtaaatgggtatatattttgacttttagtagtaatataagtttattgacatgggttggttgcaatttgttaaaattcggtgtaaatttgaaaaattttgatgattttttggtcaaaagaaacatgggttcttgacaatgtggtcttggtctactggttaacgactcaaagattgagactttggatgctggagtgtgtagatttgaatcctctgtaatcccttggtctactagttaaagattgagactttggattctggagtgtgtagatttgaatcctctttaatccctcatcataaggaaaggtgaccttggctgttttaaatcatgctgttttgcaattaattgattgtggcgtagatggtttgattttggagccacctgattggtctattatgctaatcgttaagatggttcataacttgagttggttattgatggtattcaattgtttgttatttcaggttcagaaaatacagaatctgacacctaatattgg

SEQ ID NO: 56754 - DNA, 299 bp, Populus trichocarpa
  Intron number 3 from transcript POPTR_0004s04170.1 (locus POPTR_0004s04170) derived from phytozome v7.0 (chr-ID scaf fold_4; pos 2997782 to 2998080 reverse strand)
ggtaagtcttatatttgcatttgaagcatcttcatagtattatattgcctattttcaagttattaattttttttctccattcttttcttgataggtaaagtgtaaaataaaaaaaattaatattttgttgttagtttctcgtgcgtttgccaatttgttactgtttgttatctatttgatttatggcattgtgttgcttggatacattgaacattgttttttgtatcattttcttgtgttgctcttcgtaataataattgaatcttggatactgcagtggagttttgccaagggaaaca

SEQ ID NO: 56755 - DNA, 1007 bp, Populus trichocarpa
  Intron number 3 from transcript POPTR_0004s16240.1 (locus POPTR_0004s16240) derived from phytozome v7.0 (chr-ID scaf fold_4; pos 16640194 to 16641200)
ggaaatcaaatatctaggaaggtaacagaattttgattttctcttttctgctgtgtttgtgtgaaatcggtcttaattgttagtcatctggtcccgtgattagtcggcgatgatgtttttttttgtataaataagtattctatttttatctactcgatgattattagagtatgcttgtattggggagaacgatttcctggtttgtttgaaagaaggaaaagagtatgtttgcattggagagaacaatttcctggttttgttggaaagaaggaaaacaagtaaaggaaaatatttttctgtttaaagtaaaaattaagcttagacgtataaatacctaagaatactcaaatagtcctcttcattcttatggaaatccatgtctagtgactacacccaatataaaaaatctcgtgaactgggttttatggtctcaaaagaagaaacttgctttccaccttttggctgttctgtcttgccaattgataaaatatgctgccttttgcaaaattgtgagtaaccacttaagatctatggtgaagtgggtcacagtgctgggttttgcatttaagatctgggctgacagaggttttcatggatgccttttataatttcccatctatccatggtgggaattgtgtatagttggtgatgtaagttttcaaaagttgtagaggtgattatttgcagtggagatgagcctttgagattccttataacctgaaaatggtggtttattggtggtggaggtggctttgagaatgttaaatgcctacaaactggttgtgataatggtttttttacaaggtggttgaggtgggtcataaggattagcttggttgaggtgggtcataagtgtcaccaagcattagaaaatgttttacaggaacatattttctgcaaaacaaacaaacctaaatattgtaactcaggagatttttactttatcgtaagttgcatattgttctttaataatagttattccttttgttcttcgttataggttcaac

SEQ ID NO: 56756 - DNA, 715 bp, Populus trichocarpa
  Intron number 1 from transcript POPTR_0009s13620.1 (locus POPTR_0009s13620) derived from phytozome v7.0 (chr-ID scaf fold_9; pos 10811282 to 10811996)
gaaaagaaatccactgctaaacttcaagattctaggtaattttactcttttatttatttttaaattatgggttcttcttgattttgtttgtattttacgttcgtggtgaaaaggcgagattttttattttttggggggggaaattgaggtttagggtttaattagggcttggttagtaattgatttctggtttaatcgtgattgttgaatgtgactggattttaattggcgttgcttacttgtatctactgtgatttggcatttttgtggtgtttgaactgataatgacctgattagttcatatatgtattgaatgaggattgtcaaaagaagttattttgcttcgccgttgatgaatttgaatttggtattataaagtttttgaaataactgtcgatttttagttaattaacatgagtaagtcttttcacttcaaatcttttattttctgtagcagcgctgtggaatttggtctgattttgaatagtcctgtcgtattttggtttatattggtgtgtagagcttatttatgatgtgaagattgttgttcttgctgttgttaattaggggtctgtgtgattttggactgatttgtaatgtctttgtaatgatatctagtgtcttgttttgtgttcaatctgattatttgtgtaaatgttatgtaatgtttttgctggttatgtttgcagatcagtgaagaagattgtatctttgg

SEQ ID NO: 56757 - DNA, 827 bp, Populus trichocarpa
  Intron number 2 from transcript POPTR_0011s10190.1 (locus POPTR_0011s10190) derived from phytozome v7.0 (chr-ID scaf fold_11; pos 12678328 to 12679154 reverse strand)
atcttctgaatcttaagaaaaatcttcggtctgtgagtgctctttttaaatatttgttgttgagtagttaatacatgttagatatcgtgtagttagacatatgctaggacgtagttattgcatactgttgagttcttccatgccaataatgatagatgctgaattttcatatcgtgctttatgtaagttgatggtgttttatgattcgttgattcttggaatacgaatgtggttttgcttcaaaatgccatcttgaattgttgtgttagtctgtggttgtggtagttatccttgtatgtaatttattttgctgggaatcagctcttcttcctcagtctcttccttgagaatttggttcctggctcaagtgcatgctcattcatcttcattccattgaaagatgcattatgatttatctgaatgttaggatgaatagttaatgtttgcttgtagtagaatatgtcctagtagatcaatgaagaatgaacttttaccaatatattaactagtggttagctgatagaccactacaaatgttctgagttgatatcagttggcatagtggtagtgcgtaaaaatttaaattgagcactgattctgtactttagtacaagtaaacaaggttattttggcacaagatgagttcacaaaagagggccactgcataaaaacttttacctgcttccatgttctacttgtttgttttctattatttgttaccctctatattgatgaatcatgtacctttttgcactggatcagaatagtttgtcttgttctttatatccagctttttatatttctgatgaagatgccctggtagattg

SEQ ID NO: 56758 - DNA, 886 bp, Populus trichocarpa
  Intron number 1 from transcript POPTR_0011s14620.1 (locus POPTR_0011s14620) derived from phytozome v7.0 (chr-ID scaf fold_11; pos 16964565 to 16965450 reverse strand)
gttcaagccaacgtctttagtttctttggaaaaaggtggcttctttctctccacttcgtgaagttgtggacaaagtttatgctaaaaagttctgattttgaagttagttttagtctggattgttgctttttattgataaatggaaataaggatggtcattttgatagaaaaacagagaagattgttattttttttgggtcaggatatgcattaaagggctatttcatagctgatgttcaaagggcagtttatttatgggaagttaatttttgatttcactacgaaagatgagttttttaggttttagagctaggagtaggaactgggtcttgataattgggaactcaagaggtggtttttgcaagagaaaatgtgattttaggaagtgggtatgagctgaaattgttgatacaaaacttagaggatgttgtttgaatgatgtgggctttgaaaagcttactgttctgtaaaagcatattttatcgtcattactatttcattttctgtagtttatttttgttatattgtttcatttaggaagataaatgaatcatttgacaaattagtgttattttctgctgaaaaaactggaaatacaagtatgaatggcatgccacagttgattcatgtggaaaaaccaaagtgcccttcataagacctgtagatgtctgcattcttgttattatctgcaaaattccctgtaacatgtcttttcatttgagattagatgaccattttaaatgaataagtttctaagttcaaggaaactgaaacaagttttgattatttacatgatggctaacagtttttggattgtgactgatgctgtagttcacttctgctgttcatagggtgctttggttctgtttaagcgcaggcaaccatc

SEQ ID NO: 56759 - DNA, 654 bp, Populus trichocarpa
  Intron number 1 from transcript POPTR_0001s37480.1 (locus POPTR_0001s37480) derived from phytozome v7.0 (chr-ID scaf fold_1; pos 36453549 to 36454202 reverse strand)
tagagcttcaaggtatgtaaaatccctacaatatctgcttctttaatgttttttatattcatctactccgtgttttgttgagcaaaatattttagtctaagttcttgacatgttcgtgtgaagactgtccactgaaatcaattcctttgtgttttttattttttgaaattgctatcatgcatagctggtaaataaagaatgaaattaaaaaaaaaaaaatagaattagggttttgtactttaggcgttgatttgcattttgaaagattaaagtgcacagagtttgtgcttatgatgatgtaaagccatggttgatgtattttggttttctttgcaatgatggtggtggaaagtgatgagttttcttctaccttcctctgttggtggaactttgatcaaacactttgtattaaaaaagtacttaatgtcggttgacgcgccactaatctagaatactttttattgctgaaaggaaaatagaaacgaaaacaatgatcaaatgaccatatatcccccaacatgtccaaaatctggtgatgcgaactttgtctcttggctacgttctcaagagaatggagagtgatgcattcgtttctttctccttctttttgttattgcagggggtgttctgcagggaaaaagaagccacaccagc

SEQ ID NO: 56760 - DNA, 962 bp, Populus trichocarpa
  Intron number 5 from transcript POPTR_0015s11340.1 (locus POPTR_0015s11340) derived from phytozome v7.0 (chr-ID scaf fold_15; pos 11924988 to 11925949)
tcgtaactgtttggaagccagcaactgtacctgtgagttatctgtgacttggttttcctcttttcatgggtgatattgacgtcattctatctgatactttgaagagaaaaaaaaagttgttattctatcaatgtacttattaatatttcctgattttgttgggtcctcgggtatataatatttattcttattgtttattgttcttaaagaattttatcaggtcttagaattttacttttaattgccgagattagtttagtatgctgctttctccttctttctatcataataacattagataatttttaataggcctatttttctcctaaaatgtcagatttttttagagaactagatggtctatggcatatttccgcatattttcatgtgaaattagtccataaaactaaccataccaaggatctaatataactgtttgatgatatttccgccattttttttcttgttccttataattgctatactatttctggtgtgggaggcataaaggagaaattgttccttgccatgtttaacgatcaattatgttacaattgtctttaaaatgtgacagaagaactggagacaaccatgcatacttatatttgtctttcaatcatgttttggcatccatttctaagctttctgttggtggaaccagtcaccctttggcaagttatgtttgatttttaataagtgtgtaacagaactaatattaatttgtgatactggcttgagtattgtcaataaaatgattatatctcatttgattttcatgttagcctgtgccagctaaaaaaaattgttcatctgtgtgctgtttgtgatgtgagagagagttgaaattctctgcattaccatcttctgatatagattagtctctttttctgtggtgctaatcatagattaatttctattgttatataggtgcatccttgtggtcagtatcgcaagaatactgt

SEQ ID NO: 56761 - DNA, 935 bp, Populus trichocarpa
  Intron number 1 from transcript POPTR_0001s36780.1 (locus POPTR_0001s36780) derived from phytozome v7.0 (chr-ID scaf fold_1; pos 35490782 to 35491716)
cctgatcctgaaggaaaggtctactggaatttcaagtaagccagggcaagaattttcaatctcattaatatttgtttcttgttgaagttaataacgtaaatggatctgattgcaatattattaagtgatatatctccctttttattgtcataccagaatactaggggtctctggtccacattaatttctaactgttgaataaagttgctggaagatgttccttatagttttgcaatctgaactttgctttcttttgggggcacttgcaactgaatttgaacagatgattttttttgtacgttgtttggatagagatatgcatgttccttgtacagttcaaggaatatagaatagaaaaccaaatttggagctttataaccatggagaagaagctggtacaatcgattcttctactttacactgggttttttttccatgttcaagtaactaaacacaaagtgtattccatcactagaaaaagagtaatgaacaacatctaaaggtccagaagttgccaattatcatatcatttttttgtctagtttgtatcatcttagttgccatagataatggatttgaaagttcctggaattaactttgagcttgatagactttgcttttctgccacacccacaccctccaagttaaacccaccactctctttttaattaccatcattggaaccactggacattatacaatcatgtatagctttgaagcatttcgtagttttcatgtttctgttagataatactttgtctagatctcagttccttgccgagaacacttctatttcctacaaagtgttcctttaaagcatgtaattgcattttcttgaaatagggggtgagatgaaatctttgttatactttttctatcttttttctttacttctttcagtgcattggttggcctatttttccctgctgtaacgg

SEQ ID NO: 56762 - DNA, 710 bp, Populus trichocarpa
  Intron number 2 from transcript POPTR_0009s13570.1 (locus POPTR_0009s13570) derived from phytozome v7.0 (chr-ID scaf fold_9; pos 10769094 to 10769803)
aattgccggaagagcaagatcttcttcattgcgtccgtccccttcttttgtagactctttctttatgaattatcatcacaataggatcgccataagccacttttttgccccttttcaatcacacacacaaacaattactgagtatttcaagagtcttgcttcctcctcgcacacaaataggtaacaatacataggtccccattttatgtcagaaaagaatacaaccatgagcatatatataccaattattaagaaaaaagaacaaggcttggatctgaattgttgccttaccatgttaagaaatgattaacaatgggtaacgtggatcgttattctcaaatttgaatgtagaaaaatgtggcaagtccatgttggcaataatacgagctagggagggacaattattttgattttgattaatcagtagggaacttacagagttttagaagcaagtgggttgatgattaacgccgtctcctccacatgtttttcgacaattaaaattaggtatgttgtcaatggtgactcgagtctcacatgtagacaaaagggttgggttttttggaagcatagtatatgtaatgatgtgaaatatcccactatttatactttttctcaattcacataacaattattgggttgctaattaacgaatctagttaatttggattaatttcagggctccaccagcatcaagaatcagagcaaaa

SEQ ID NO: 56763 - DNA, 847 bp, Populus trichocarpa
  Intron number 1 from transcript POPTR_0015s11000.1 (locus POPTR_0015s11000) derived from phytozome v7.0 (chr-ID scaf fold_15; pos 11712707 to 11713553 reverse strand)
ggttctaggagatctctcacctcttcccgctctatgtatgttcgctctgagtttttgtttttatttatttatatgtttgattctgaaaaccacttttatttctatttcttaatttaataattagagcaatgaaggaaaaaatcaatgagtttggagtattttaaatatcggtttttacatgtaatttttgtagagattacttggccgtaataaattgtgggatacgaagagaagagctttgaattgtattgtggctgttgcttgcaattgtgagctattgaaatgattcaatgaatattagtttggttaacgaggaaaacaatctgtgtttgagggtggagaggagagtcctagtaggatgaatttggattttaggttcgttcttgttgccgtgtttggtaatggatctattcctttctcagcaaataaaaaggaagaagaaaatttgtgaatcaatgacagtgaatagattgattgagttgcagaatgtgatcatgaggaattcttttatatcctatcattattattcatgcttctcccacttctcccgaatacagtaatgagatgcttgagcttagtaaatcacgaaactctgggcgtggctttggcctcatgtttaggtaatcagtctctcgggctacttcatcactggatgcattttaggagacataatagtgatatcagattatgtagatagatagattggcatgctgctcacatgacaaatatctatattcaccggagggtccggcaacaatgattgttacatcaccattaatgtaaccttccatttataactgcatctgaaacaggggactaactggagagcgcacagtaaaacgtttgc

SEQ ID NO: 56764 - DNA, 665 bp, Populus trichocarpa
  Intron number 1 from transcript POPTR_0015s09030.1 (locus POPTR_0015s09030) derived from phytozome v7.0 (chr-ID scaf fold_15; pos 10357478 to 10358142)
ctaagttactcgaagcttatattgattgccagaaggtatatatacactaatctttttggtaaccaaatgatttggattttgaactacatgtaatgttctttaaaatcaagcaaactagaacagttaggccaagtgacagacggaactcgaagtattcgagactcttttctaaacgagccaaactcagtgtgaagttcttgaaaaaaactaagaagttttgggactcttgatttccatcatttgagtggtcttgatttgaaggatgtataagagcctcaatttgatccatgaaatgtattgtgcgacgatttctgaatgtattttattgctatatcgttgcaattacatgtgtgttctcctgtaaatttcttctttgatgcccagtatattaaattgatcaatttctttgacatttttgttattatgtaaagcaccactcttatgcaatacaaacttctgttatcagctagcctaaaaaaatagggaagctgtgtagaccatatatgctgttagtcttttgaaaatcttggaaattggaaagttccaatatttattggttagtgctccataaagggtatcgataagtctactggtactgttgttttatttgttatcttactaatttcttttgatttctgtgttttcaggtgggagcaccgccggag

SEQ ID NO: 56765 - DNA, 856 bp, Populus trichocarpa
  Intron number 1 from transcript POPTR_0009s07010.1 (locus POPTR_0009s07010) derived from phytozome v7.0 (chr-ID scaf fold_9; pos 6666697 to 6667552 reverse strand)
tgtggtgaaaatcagcgcacatttgcaaagaaagggttttgagggtgaagagtggggaagattagagagaaaaacacaacaaacccattggtgtttttgtggtctggaataaaaacaaaaaactgtaaaagaaagtacaatactgtcaatacacacacaaaaaggctgaaataagtggggggggggtctcgctttttctttgtggcttggttcatcgatgctctcaccccagcagcataaccgtcgtgtgcgatctggagtcctgttagcatggtagttgaagaagaagaagacgtagagagctgtggaagcaaaaaagtgaagttgtactctacaaaagcgaatccatcattgaaaattcaaaatagagaaaggaatgctggatttttcttcctttatctctctagctttttgtagttaagcttataatttatttttctatttgcgtgttgtgtaaatcataaataaaacaaggattttaaattctaatatcttttcttgttttttttttattattattttgagttgacccgggttgatccgggttaacccatctgatccgtgacctgatcattataccgggttgaccaccggatcagtttaaaaactatatgacatgtttcctcgtttgaaacttttgaatgctgtcaagtttcttagtttggtgttgcgattggtattagagtgagtttaaatgtgcacttttttgagatgctactgggtttctaccttctcagaaattttaaaaatgaagaaaatgattcactatttgcctttaggatattgcttgttctctctgtttcgcctttgtgccatgccaggtgaactctcttgttttgttacaggccgtctctca

SEQ ID NO: 56766 - DNA, 758 bp, Populus trichocarpa
  Intron number 1 from transcript POPTR_0012s15080.1 (locus POPTR_0012s15080) derived from phytozome v7.0 (chr-ID scaf fold_12; pos 14727379 to 14728136 reverse strand)
ttttggagcagttaacgaggatcgttgatcaacaggtaattacttttatacaatttgcaatataaaacctcagtttttcttcacatgaataagaaatataaaaatgaagtctctttttcttcctttattagaaaaataaaataaaatatcaaatcctcagatctagatttggattttattaaagaaatttctttttattgttttattgtttttcatatttccggaaataatctaaaacaaatatctttagaaggaaaaagaaggagttgtcgatcctctcactaaactgtaaaataatcaatcaattgttaaaataattagtgactgttatgaaggaagaatattttttactttaaaattatagactttacaaataccaacaaatacagatccttttattctctatatttctttgatccagcaagcttatgttatatataggtttcttccttcttgtatagtagcagagtgcaggcagatatcataatgatgatgataaaaagaaatattattatctttaatatataggattttaatatatatttaatatataaattattaatatagccaatccatttcacagtacgtgtcagctactgcgaaaaaaagattaataaaaattatttaatctattaattacaaaaaattaaaattaaaaatttgcagtgaaatcattgaaatgttttctctgcttgaacttccttatcttttgtacactaataggtacaagaagaggtgaacctagtagtgggtgtgaa

SEQ ID NO: 56767 - DNA, 824 bp, Populus trichocarpa
  Intron number 2 from transcript POPTR_0012s00920.1 (locus POPTR_0012s00920) derived from phytozome v7.0 (chr-ID scaf fold_12; pos 592850 to 593673 reverse strand)
atgtaaaattgattttgtttttttcttaattttggaaatgaaattacattagttcagtgatacggtgatttatcatttggaagtttgataatttggttggctgtgttcaaatttgtttaactcaaactattttattgttagttttattaatggtttctggataaattaaatgtggtaaatatactgattcgtggttggattttggatctacgtgtatttgaatactggcttggattttaggtttgtttttgttttttctttgttcttctggaagtgattttgagataatgtcgacaaatttcaggtacgtgtgaaggctgctctgaacaggcaatctaaaactcggttgattgggccaaactgcgcaaatacagcgcagttctggtctgatccagctttccaagaatcactcgtagcaaatggtagccggcgttggaactttatagcgcccagaactccccatctggcagcgcaacgcaaggcctgatttgatgtgatgatgatatgttgataagatgttagtttggtttgctctttcgattgattgtttgaagagcaagacattgttttcctataaaaaaaagtttgtgttttccctaagtacaccttcaaatacacaaattgcttccttgaatataaaatgagagttttatatgtccatctgctttgatttttaattgatatcatcgaggctttgtgacttcagtagtttctttttgtcctaagctacttgttattttatttgtttacgaccttatgggtgcaattttttattttttatctttttaggttttccaaacaactgctgttggccttggacaatc

SEQ ID NO: 56768 - DNA, 831 bp, Populus trichocarpa
  Intron number 1 from transcript POPTR_0011s15890.1 (locus POPTR_0011s15890) derived from phytozome v7.0 (chr-ID scaf fold_11; pos 17911669 to 17912499 reverse strand)
gttcctagaaatccaaatcaatttcacaatcgaaggtactaactttattgcttcattttgtgtttcttttaatcttagtgactgtcttgtcttggttagttaaattggtgacattttatggtttgtaatatgtgaaattgttgtgcttttatgtgttttcttgtctaatgacgaaaattttggtaattttgtgtgtttttgttgcatgtactaggttttttttttttttagtttaatttcatgttggtcattttgtctccaataaagaagtagctagatgctgatgaaatgtaagtttcttgtttgccgctaactgtttgagtttttattgctgccgtcttgtctgctctaactgggtcctcttgttccttatgtggggtttctctggactttgtgtaaggttgtgcttttcatacatcactggataaggatttacttccttaacaaacatgacttatttattttctcctttctatcccttccagctttactattgattgtttgtttcttgaactcttctgtaataactagttgaggaattgaccgttgcctccatattttggcgggattaattaggatcacagagtgtgaattgacgagtgcttagccagattttactttttttgtttaattatttgtctataattcacctaacatagccaatgattgtgcttgaaatccatgcttcccccttacagtttgtcccttcaattgtattccttttggggaggatgaactagttgacagaaacttgattaattaattatgtttttgaatgattttgctgtattttcagggataattcgagatccaactggagttctagttcat

SEQ ID NO: 56769 - DNA, 831 bp, Populus trichocarpa
  Intron number 1 from transcript POPTR_0014s17630.1 (locus POPTR_0014s17630) derived from phytozome v7.0 (chr-ID scaf fold_14; pos 13901629 to 13902459 reverse strand)
tacgacgttggccattgaagatcacaaagctgatcgtccgagcgcagcttctctgacaaatctgactctcctctttctccaaaactgattaggctatccatcttgaccatttcaatttcttgacaagaaaaaaaacaaatcgctttatcgaatgctccttatcggagagtgtagcccttgcttgagtgggagaactgtgcattgaaacctgtgggaacctgattaatccaaagataaaccagaggattaagttctcactgcccttcacttgtgacaataaactttacagtggacgaacgaaacaaagagttaaaactccttccaagatgaaatgcatttgcccatgaaactgatcattgtcagagaggaagagagagagattccacttcccaatccaggctaatctttcctccggtagctctcttcaccttagcagaaacttccccacttctctctctctctctctcatctcttctgttcccaagcccgtacagcaccctatttaataatgttacacagactcctcacatattccaactcttgataacttagcttctgaactctcttcttttatcagatcaaagtatatatcaaacaccaagtcagcacatttgggtatttcgtccttctgccattcttttcaagcgttttatctgctattcttcttcaaggtcttaccttgtgtcctctcaacgttcatgatcaataaaataaatttaacaaaaagaaaggtttctctttcgttttagtctcactacagtccattttgtgacttttatttcatgatgaaagttaaccttcgatgatttcttttttctcctggtagcagac

SEQ ID NO: 56770 - DNA, 688 bp, Populus trichocarpa
  Intron number 1 from transcript POPTR_0015s03460.1 (locus POPTR_0015s03460) derived from phytozome v7.0 (chr-ID scaf fold_15; pos 3014866 to 3015553 reverse strand)
tttctcttattactattatcagagttatttctcaggtaaatctccatgtcatgattttgatgattattttcattcgaagttgcctcatttacatttcaatttcatggggtttgggtctcgattgataatcttctaattcatagattactatgtctcccccccattattaatcttaactctgttttgttactggttccctctatatcataaaatgaagaaaacccatgttagttctagcaatactcttgcaatttttcttataccagcacaagcaatggagcaggagtccttctatatcatttctttttcatcgttgttattattattatttgcaaaaatgagcatttcccctttttagctatcaaccagtgttatcagaatcatgcaaaacaatgttgatttgtagaaacgaaaaaagggttcgtgcttatgcttaagaagatgatgaatataacaagtttccatctttttgcaccttttcatttgattttgccttcttttttttgtagaatgtttgtccgcctttcgataaatgtgtagactttagattttcctttaattgacatgaccatatacatgcattctatgcttcaagtgttttcttagatttctgatttgcttgctgatagtttaggcatctatctctgttttattcatttgtgcttgcaatccaggctttcttgtttaa

SEQ ID NO: 56771 - DNA, 552 bp, Populus trichocarpa
  Intron number 1 from transcript POPTR_0009s08730.1 (locus POPTR_0009s08730) derived from phytozome v7.0 (chr-ID scaf fold_9; pos 7889503 to 7890054 reverse strand)
ttgaggaatccaggggatcgtaatttggtttctatgtgagttttctaatttatcactgttttctctccttttgttatcgatttgttccggtgtttggttgatgagaaagtaattaaagaaaaaaagggagggggtgtatttcttttttccttttgttgcagggagggaacttaattattgaatcactcgtgttgcttttgcccccctaaagtagaagacttggcataaaccgagtgaaaggatttagtgtgtggtcaagtatgcaaatatggtcgtagaaaaccaaaaatcttctatatcttttcgaatcccaaaaactttgtgttgacattaactatgttagcgaaagctgtttcgttctgtttgttttgatgcggataacaaactgtaattgtttatctcaagagaaatttctatccctttgacccacccaccaaaaagattttaaatttctagaatctggacattgagtttgtttatcttgttaattatcattctccttgtttagaagtcgttactgatcttgctacattgttattatgcaggccatcg

SEQ ID NO: 56772 - DNA, 960 bp, Populus trichocarpa
  Intron number 3 from transcript POPTR_0009s02630.1 (locus POPTR_0009s02630) derived from phytozome v7.0 (chr-ID scaf fold_9; pos 3401869 to 3402828)
gaagaacacgcaagcaggtaccttgttaatttgttaacattgctcaagagttctgcttttgctgtattattatttttgtcaaatattttgttgttcacaaaatcgaaggaactttgtatgcaaatcttttacttcaatggtttttataacacatcgacttcactaattgggttaatttctgggttgatattctaagcctcatttatggtcagatttcagttaagcaattggataacaccagtgggcctttgatctttgtatattcttttttattcaatgtatttgcattcttttctccagcctaccagctgaactcctagattcatcctcacccgctgttctttcaattgaaattaaatgcccttaagctgaattccaatgtgttgaaagttgaaaattgcccatgcagtacccgctgttctttcaattgaaattaaatgcccttaagctgaattccaatgtgttgaaagttgaaaattgcccatgcagtactttcttttgtgccgtatcaacttacaaagagacctataaaatatttgtctttgtactcactatctttatctttctattatgcacgttttctttttctttttgctgttaccaagagttctctgcttcgttgtgttcctgttttcaatttatcgagttgattgcttaagaaaaaggttttgttcctacattttgacctcatctaagctgctccatctttctctctcgcatctcatcctgcctgtattagcattgggatgcaatccacttgaatagtaccactatgttatcaggtctgttagatggaataaaaacacggagtttggtccaatgaactaatgagtttttcctagatatgtttgtactgaagtgatagattaaatcttattgagagaccttttaaaaatcattttattcaagcatataactaccgcttctatgtgtttctataggttcctttaaagaaggaaa

SEQ ID NO: 56773 - DNA, 905 bp, Populus trichocarpa
  Intron number 1 from transcript POPTR_0012s03020.1 (locus POPTR_0012s03020) derived from phytozome v7.0 (chr-ID scaf fold_12; pos 2427536 to 2428440)
ttgagcatcaccactgagcagattcaaaaggtacacacacttcattttttttttccaaaaagttaaaatgtgggcatgctagatatggtttttttttttttttggtaatggatttggcctcttgcatgcatttgtttgtggtaagagtagtaggacttgtttgtctaacttgtgtctataaatcctggacaatggtgttagttgatcaaggtgttccctctgagctttaaaacttggttttattgattttttttgcttgttgtgtttctgggttggcagttttcttgttgttgatggggtttgtttaaagtttagttctttgtttgaccatgttttacatgtatatattgctggcctgttgggaattgttcatattctctgatttttggtgttcttttgaaaataaaatgagggattgtgtgttagagtagagaattttgattacttccaaacaaaaaaggatagcagtttggctgtcattctgtgatcaaataattgatgaggcacggatggttacaattgttgaggtaattgagaggatggtactgtggtggtggttcttctgttaaaaatgaaagacaaggcaggtttcgccaattagttaatgttaataaggattcaacatgagtgttcttttgatctgcctctggttctattctttgtaatggggttcaacgtaattatgcttttgtgacctacattgaagcatttgtgtcaagtagatttttcttatgcaaaacatagaccctgacaacttactaattagtaattgatttgattgtttatgatggaacagacaatgcctaaaaattggttagaaaatgaaattcattgttcgattataagtttaagacggtgattatttgtgattcatgcagtacttagaagagaacaagcagctgatt

SEQ ID NO: 56774 - DNA, 942 bp, Populus trichocarpa
  Intron number 2 from transcript POPTR_0012s03020.1 (locus POPTR_0012s03020) derived from phytozome v7.0 (chr-ID scaf fold_12; pos 2428485 to 2429426)
tgcttcgtgagttacaaactaactgcaatgtcatttatcttgtttgtttcctttctggcacaaaaatggtgtgatctgcctaattttgaactcaaatatttttgctgagagcttgatgtttctgactatttccaatatcccccccccccccgccccccacatttcttacccgctcatgtgaatccttttaatcttctcctttgttgatgagattgcaaggctgttcatgatataacagatcactgattagcttcagtggtctttcacctatcactgattaccttcagtggacatttgtttttaacatggcattggaaacgaagactgcatacataactgaatgtattataccaactgaaagctaatttggacatcaacattaaaaatctcacctctggcactgcttattggtgaatagcaagtgttgatttgttaaaaatgttggtttattaaaagatttataattgacatcaatccttagctcagacaaagtgtccattgagagtgaacgggtagcaacaactatgatctagctaatgtttctgaatcatctgtgatataagataaacctaagtttttgcatcatgcttaatcttgcagaatttttggctcaaagtgaactgggagctatgaactattatgagcttctctttcagtcttcggttcatcagcttcatagaactcttatgagcatcaccgatgaatctttttcttcccttactagtatatgtcacatttgtgtcttttctgaataaaaatttgaaaggccatcttgcctctaactctctctctctttcgatgttaagaaagagaacggaaaattatgttagctcttatctgcaactttgtgattcatctagacaggtacatatatattcacacacttgttcttgtaaaatttgccaatgattcaggtatcaagcccagttacagcagaacctg

SEQ ID NO: 56775 - DNA, 534 bp, Populus trichocarpa
  Intron number 1 from transcript POPTR_0011s10510.1 (locus POPTR_0011s10510) derived from phytozome v7.0 (chr-ID scaf fold_11; pos 13001939 to 13002472)
cccctgtactgtctcgtctccggcgaaattctcaggtgagtatccttaaaaccctttgaaatcaaatgggtatgcaataaattcatgcagcacgtactgtttaaacctttaatagattggggtttattggttgttgcctatggatagacagatagatgggttgatatttatctagataaattggaagattttgaatatagttttagcacacaaggaggttgacttatttatttatttatttcgactcagttttaatccaagcaaatcataagatttcttcttccaaatgcaatttgacttaggtcattgattcaaaacaatagattttaatcaggtaatattttttttaatttcaaattggtatgcagtaaaatcaatcaattagtcttcgttggttattggttttggaaattaattggcataatcggaacaacaaagcatggattttaacaattattttcttcgtagtctcatttaatggatcctaattagtaattctaatgttttttcatttatcagggttggtgagataga

SEQ ID NO: 56776 - DNA, 586 bp, Populus trichocarpa
  Intron number 1 from transcript POPTR_0012s12120.1 (locus POPTR_0012s12120) derived from phytozome v7.0 (chr-ID scaf fold_12; pos 12392540 to 12393125 reverse strand)
aagtagttgaaacagccgctaaaactggtgccgaggtttggtttctctctctagctctctctttcaaggattctttaactgagtgagactttgattctggttcctgttcaattcaaagtggcttttttttaattaaaagctcatgacaatgtgaaatttatgagcttttgttgtgtttttgttcaattttcttagaaatgatatgcgtttcttctgaaatttgtttaatttttcaattaatctggaatgcctgagttatgttctactctatataggatatgaagttccattaatagtcaatttaattatggatacatgacccagttcttttccaaagcaattctatgttctaaagaaaaaaagaagaagacaacattgaacatatttataaatgtttccattgctaaatatctctcaagtgaatgtcctgaattttttttttttaaataaagtttttttgtatatttttttgttgttaattgaccatgtatgatttagggattggctggtgtacattaataacatcaagtaaatgcaaattgaacctgtagttacctaagcattctgtttctcaatccaggtggtg

SEQ ID NO: 56777 - DNA, 955 bp, Populus trichocarpa
  Intron number 1 from transcript POPTR_0015s05640.1 (locus POPTR_0015s05640) derived from phytozome v7.0 (chr-ID scaf fold_15; pos 5981348 to 5982302 reverse strand)
cgtcaaagcactcctcctggttagtacgctgacatttctaagcacaaatccttgcatgtcttttttgccccccggatatgaacacacacatgaagtttctcaaatcaatatctagtactgcaaaattcgaattttgttttttactagaagagccaacacataatgtctaagctaagaggataaatttaggcactatccaagaagaaaaaaataacaatgaaaatatttaaatataatcaaatcatgaaccgactacattcatcctatggtcatgtctgcgtgcagctatttatttgttcataaagaaaaactcatatttatgtataaagtaaatttcttattatatttaaaaacaaaagctgagatataaaagttttgtaattagtgtagacagtaaatctttaattatatttaagtatttttttcattttgaataacactaggacaaaccatgttaattttacttcccaagttggttatattattatgttaaacattaaattgaaaaaaaaaatctaaatagagactaaatcttgattttttttttaatttgactactaaaaatagttttatattaatttacgcattaatcaagattaacttgttaattttttatattttttcttttttaatttgaagggccactcaataggagataagataattatgaatatttaaaatggatttaaaagttatatatatactatacttaaattggtaagttaaaacatcaagactttttcatagccatctatcactaaatttgagatacgtttttgaacataaaacggcatgcatcccttcccgagagaaataattttccgtgtatgcattcaaggtctcaatatcttactaacacatttacgtgtctcaaactaatatgaaaatcaaacaaaataattgttcttgtcttgggaataagcattgcatgttattgtgcgtgtgttttcaggat

SEQ ID NO: 56778 - DNA, 581 bp, Populus trichocarpa
  Intron number 1 from transcript POPTR_0011s15310.1 (locus POPTR_0011s15310) derived from phytozome v7.0 (chr-ID scaf fold_11; pos 17421706 to 17422286)
ggttctttcaggtactgaaactacgttcattatttgttgctattccattctcacttgactctttctttcactttgctcagactttgtcataggtatgttgtagttattgtgtgatttgaccactcttactattaattaattaatcatcataaaaaaaaattataattttaaatttattgatgaagtaggttcaaatttagtcatgaagttgttttatacgtataattttataaagagttggcttattatgaccgttgtggttaaatatttttttttaattagatttaaaagatgttgttttaagattttttttattattattgttttgagtgttacttttagattttagctaattttgcttttgtttttcatttctatatagactagtcaattttgctattatataaacagtttgtaagtatattttaagaagttattatgagttattaaatttcataatatattaaacatatttcttctacagtttataaatcccgttgattttttatccttcattacgtacatgctgcatcatgttgttctaacagaatatatgcaccgttcgtatcaggtgaagaatc

SEQ ID NO: 56779 - DNA, 630 bp, Populus trichocarpa
  Intron number 2 from transcript POPTR_0004s22090.1 (locus POPTR_0004s22090) derived from phytozome v7.0 (chr-ID scaf fold_4; pos 21026793 to 21027422)
cggcaacaactgcaaactgtaagtctctgatcatggtcttttatttgtaaattgttgtttccattcattcattacgatgatccatattgcaaattgggtagtgctggggatgatattggaatatacgtttggcatgatgacccaaagtaactttaactaacacttctgggtggttccaactttgatggttttaccatgtgtcacagattttgcggtgtagaaggtgcattttatctgtgttaatgatgttgttctaatctatgtatgatttttgttgcagcctgaggccctagcattaactctagtctaaacaaagccaacttccaggggaaggaaaaattatagtaactacatatcattattagcattatgtacttttcttcataccagctagtaattttaaacttattatgtgcctctattttcttgtcacattttcttcccatgtttggtcatgctccgcttggtgcttaattagttgtagcaccaatagtatgtttttgctgttttgtaaatgtagttctaactgagctccatgaattaagcatttgatgtaatcttatttgctttccttcattcttggacatgatttatttaagttgatattggtacaggcaccaacagcaactg

SEQ ID NO: 56780 - DNA, 386 bp, Populus trichocarpa
  Intron number 3 from transcript POPTR_0004s21360.1 (locus POPTR_0004s21360) derived from phytozome v7.0 (chr-ID scaf fold_4; pos 20515078 to 20515463)
aagctaaagcacgtatgctaccacccttttcctatatctttctttgctatcttttctccttttgggacgcttgataagcataaccagctctaaaacaagcagagagagaggtttgaatttgtctagttaccatttccgatacagtaatcattctgaggaggaaagagaaatcaatggtgtaagaggctacaaacatagtaacctgaccgccttggaatgattcacttgactttaactgcacaaaagagggggattaggtggcaaagaaaatagtactgaaatcttattgtctttattttgaggtgatctgatcttctgagatcctgcttttgttgattcttgcagctttatttacagtagcaggcagacgtgcagcaacactggaa

SEQ ID NO: 56781 - DNA, 944 bp, Populus trichocarpa
  Intron number 2 from transcript POPTR_0011s14800.1 (locus POPTR_0011s14800) derived from phytozome v7.0 (chr-ID scaf fold_11; pos 17067799 to 17068742)
taagatcaaccatcacaaaccaattcaagcttctggtacttccctatttctctttttgctcaataattacgagggtcatgagtttgctagggcaacatttatttcgcacacgcttgattgattcatcttgactggtttgttttgcattttgtctttacacgatgaacacaactacacaagacagacttttggtttaggtcttgcatgatgataccatgaagatggggagggtgagtgttacaaatcaaaagaggaaaagtaatagatataggccatacattttcttcatcaagtgagaattggaatggatattgatgggaatgttctatatcaaccaaggatttctttccggacaatttccaggaaggtcatcagccacaaccaccaggaattcactctgcaccacgcaaattggacgaatattagggtagctagtgtactgttgtttttgaaatggagggcctgccttggccacggcccatttaataatagactgagacctgccttaataaaaaggggccctccttaagatggaggagtaccgactgaatttcagtgactgttgataccgagttgcagagtagtggaactcttgttgtggctcaggaaactggtagattcagacttataaagaagctgggaattccgagtggaaagctgcagaattggatattgcatcataaattgaatcttctgttcgtaatatcattttcaacttgaatcattgttatgcttatagggtgcacctcgtaaataaatgtagtctaaggaagtgtgtaagcttttatggttacagtttgaaaatgaaaatcacgatctcaagaaagaatttggagtaaaactgagctgacgtaaacgatttcctatctcacaaccattacacaaattaagtaacttttcttctttctcttcttaatagaacaattccctgccgttcaacaaat

SEQ ID NO: 56782 - DNA, 446 bp, Populus trichocarpa
  Intron number 1 from transcript POPTR_0004s24410.1 (locus POPTR_0004s24410) derived from phytozome v7.0 (chr-ID scaf fold_4; pos 23090475 to 23090920 reverse strand)
gaatttagagatcacaaacatgtttattgacttaaaatatatgtaacctagttggacttggacttgtaaataggaaggctcgagtattactaaataataagtgaaatcttaaacaaaatccatttgtttgaggaaaatcaggcactggtatataaaataggatcctagaccttgctattgacaatttctagcaaagatagaaataacctcaaacctactgacatatttggcctgggttttgcaatttcttcttgcagggtgaggctgggggtgaactcaaaaccccaattgtattttctcttaatcatgaaatttgtaagtccctatttgtgtgtgtttctcagatacattctgattttatgttagttcatttattgaaaaaaaaaagagttaattagtgtttatttgcagacttgcttgagcaaaggaagtggtttccatttccc

SEQ ID NO: 56783 - DNA, 578 bp, Populus trichocarpa
  Intron number 1 from transcript POPTR_0004s19310.1 (locus POPTR_0004s19310) derived from phytozome v7.0 (chr-ID scaf fold_4; pos 19181810 to 19182387)
aatccttcaaattccaagttcacaatctcttcattcttaacattttcatcatgtatattttcagagcctgtctttttaaaatatcattacactttatctctccacaaagttattgacttaaacatctgagagtcttcacatccattaaagtaaatcttttacaggtatcaattattaaccacctgagctttccatgtcaagccaccaaacaaattagctagggagaatggatcaaattgcttgaattaaaatattaatcaattatccagcacattaattttatttctaagcatcttgaattttaggattttcttttatgatggtcattaatttctttctcaatctagtaaatttattaattagtattcacatagatcaaaattgtttgattaattgatggatgaagtggagtctggtgttattattagtcatataatgatttaacatgcacatcaacctgtcgatatcactcaattaagtgcttgatttaactataactttaattgattaaattaaatctttgcattgagtttatttttaaaaacttatatgtgatacaggaactataattacgggct

SEQ ID NO: 56784 - DNA, 752 bp, Populus trichocarpa
  Intron number 1 from transcript POPTR_0123s00220.2 (locus POPTR_0123s00220) derived from phytozome v7.0 (chr-ID scaf fold_123; pos 11137 to 11888 reverse strand)
tgcaaagtcaaattaggggtttaaatactcaacaagtcggatatgattcattttggaactatgttgaagaaagggctgatgatggtagaatgaagtgtaagttttgtccacatacatatgccattaaaacttccatttcaaggatcaaatggcatttatcaggagcagaagggcatggtgttgccatttgtcgtggggtgtctaaagaagttcaagaagcagcctttctagctatgtgtggtggcaacaaaagacttaaaagcacagaaagttcaatcaatgttaatgattctggaatttcaacttgtccacaagaacaagacattaagattgaaaatatgggaggaggtattggaagggtacaaagagaagttcaggttgtagaacctggagtagaggaagagaggatttcttcaaaagcaatagcaagaaacgacaaagtaagctccaactccgaggatgacctccaagtcacaggattccaaattcaaactgctaggccaaatgcctcaaatcctggccttgacacttccctgcaaagtcaacttaggggtttaaatactcaacaagtaagaagtttacaagtaagaagtctaactaaattactatgattgtgcaataaactaactatcaattttaatagcaaaataagggtaacagcgctgaagtagtttctcatccatccagatatggtgtaacctccatcaatttttattctttatttgaccctctttttttttctataggttgaa

SEQ ID NO: 56785 - DNA, 1039 bp, Populus trichocarpa
  Intron number 2 from transcript POPTR_0011s11710.1 (locus POPTR_0011s11710) derived from phytozome v7.0 (chr-ID scaf fold_11; pos 14479983 to 14481021 reverse strand)
tttataaagcgtaagtgttcatttcttgtttagtgtcacgtggtttaaaaaaattgtatctagtgtcggttacctctgtattgggggaatacttgcaagtaagattatcctttgttctgtacttctggaaatagcgtgtttcaatatgacaaaaggttttcgataattacatagtggctttagaaagtggatcattttttatgcttgcagcaactagatagcaattatcttgcttataatagtttgaaactcaatgcatttcgaaggacatgactcgttagaaatttgtacaatgcaactgtagattgtgtgggaacacaagttgtcaattctgcagttgtgtaaccacattggagcattaaggtggtgggaacctattacaccagggaaattctagctcatactctggcattgtcaaaatcacctatgaaaatgaaacaaaaaaagtgtatcaaacacaaaactctctaaaggattacgttattttcataaatggtttctcacaacaagacatacgaagttatcattaggtataatggaaactacagaaattacgatgataaattaaattctcaagtctttgctgacaacaggaacaatggattcttacatcaaggtgttatggaacatgatctgtagaagaaataaaattcctttcgtttgatcctgttattcagatttagctgaattattgaagaatttggcaataaatctgttctctgtttgggtcattttgaatagattacatcttcttaagtatgcttagttatggcatagaaattcctttacatgatcaaagtattgcgctatcataaactaaaacacattgttgttcttgaaatacatccatacttgtgttatgtcagagttgtatgaatctttatcctttagtggccattattgcatgctatttttatatccaaaatgaagctttgccaattgaataaccatctaaagattgtacatgatgtaatcatggctgctgatgcctttctaatttgcaggtttgataaggagcttaacaaagaagttgccatca

SEQ ID NO: 56786 - DNA, 422 bp, Populus trichocarpa
  Intron number 2 from transcript POPTR_0012s11480.1 (locus POPTR_0012s11480) derived from phytozome v7.0 (chr-ID scaf fold_12; pos 11894708 to 11895129)
ggagctgttcaaggtatgtgttgattttatttttatttttgaagtgatttgattgaattgtagttgagataattaagttgatgaagatttatggtatattttgggtagctgaaccaaaattaatttatttggatttttgtttctttttgttgatattttggatctgctttttgcaatgtgtttgtgattttttagttgggtgttggggattgctttgttagcttgattaggagactcgttaatgtggcttgatggtgttttatgtggataattatgtttactttaatttgtaatttaggggaaaataatattttgtattctgtttcaaatgttagttttattgttacaaaactcacatgctcttttgttccttggatatgtgtgaagattctcctggtgcttctgctactcaagctgaaaag

SEQ ID NO: 56787 - DNA, 375 bp, Populus trichocarpa
  Intron number 4 from transcript POPTR_0014s15300.1 (locus POPTR_0014s15300) derived from phytozome v7.0 (chr-ID scaf fold_14; pos 11372104 to 11372478 reverse strand)
attcctatatttcgtaaaggagaggtaacccacatacttgcaaacgtttcttgcgattcttatgaattcctttgagatttttgttctttcaatgaatagaaaacctgttggtgctatcgtcagctggctttgcatgctggtttagaatatcaaaaaacccgtatccctgctataaaattcttacatattgggaaatgtttctctttgcctgttggcattttaactgtgccttgtctgtccatatggaagatgcgctctcttttatttttatttgtttctgttgttgtaatatggttctgtggctggttgctggcttaagctgataattattccagaaatgaagttgaaatatatctcgctgacaggagttcaact

SEQ ID NO: 56788 - DNA, 971 bp, Populus trichocarpa
  Intron number 3 from transcript POPTR_0004s21460.1 (locus POPTR_0004s21460) derived from phytozome v7.0 (chr-ID scaf fold_4; pos 20583993 to 20584963 reverse strand)
gtattgctttggaagataccttgttgcttgcttaggtatgtttcttacaaagagtattttgtgtgcaatgaagggttcttacctgaaattcggttaattcgtcctgtataattttgtaattttctagattctgtggttgtagttttttgaagttgtttactgatcgtcagatattttcctctccatgaaatggacatatctatacttccgtctatatatcctgttatgcaaaccagaatcttgagaattttttagcacttatatgcagttttcttctgcagtttgttgttaaacttgttgttcctaaaaccccagatggtcatgatggagttttcttgaatactagttaccctctgaaacaaaaagaacttgctgaacatggcccatgtcatcgttttggttttgacaaatgcaagggtgttctagcttccttcgaaatgtgcaaaaattaaagcatgtacatagatactcagataatatatggtaaagtaacataatattggccttttggctggaagaaattcaatggcttttgtgaagtgttcaattcatatgttcatgtttcctgcataaatattcagagaaagaagtaaccatagtcaaattcagtctacaatgcacgtgtactaatgcacatgtccagttgtttgccaactagttttgaatgtacatcaaattgcaaactgtttttgtgtttatgagtgaaagttgtgttttatatagaagactttgattgtgttgccgcatgataatttcaattattgtttatcaacatggcgtgcagatcttctttgtttatttttttatttgtaatcataaatagggatgggatatttttctattgttttctctaattactttccagatttaattttgtttatcttctggtgttgacattgttattgatggtttctctcttttatgtactttttaaaggtggggaagaaagaacaattgagtttttgaaaaga

SEQ ID NO: 56789 - DNA, 804 bp, Populus trichocarpa
  Intron number 2 from transcript POPTR_0014s01990.1 (locus POPTR_0014s01990) derived from phytozome v7.0 (chr-ID scaf fold_14; pos 1767145 to 1767948 reverse strand)
aatagtgagattcaaaagcaaagcagagctgttatgtgagttgaggtctaaaatgctgagtgataggaccacttgctctatgaactaggtgcatggaagagaaaatgatgtttaatttacgcgttacttgaggtccatgaactgctcgggaagatgaaggtaattgaaaatttgaaatttctcatttgtatgggttttgtggggtgaagaagtgtagagagtatgtctcatcctctcctcaaggctggcgaggaccacttggtttatgatgtgggaaccacttagagagcatagaagagaaaacaaagcaaaatctatggattgttttatgctcattaacggctgagaatagagaattcttttgatatttaatgggttagattgacaattgctattattttgggttttgtggggtggagaaatgtagatgctgcctcctccactgggctccgaataataaaatttgtctctcatcctgacatcttacagcatggtggtcataggatcagtttcgtcctcgtataagatatgtggaatgcctttatgcctttcagaaggatgtacatgaataacatcttgtaactattgatcttccattctcaagctcataaacagatgcagcaaagtacaatctctgtcagagctgctagtgaaacgaagcaagaataatgtccattgaggttaagaaaaagagagagtggtacttcacagtgaccgagctcagagtcactgcttggagacctagatgctgccattaatgacctccctgcctgtctctcctgcaaattctcacagcaagagccc

SEQ ID NO: 56790 - DNA, 1002 bp, Populus trichocarpa
  Intron number 1 from transcript POPTR_0009s07280.1 (locus POPTR_0009s07280) derived from phytozome v7.0 (chr-ID scaf fold_9; pos 6834479 to 6835480)
caccaaacaagttaacgaaggaagagaactagaaggttagtaaacaactccttcacgtggttgtgtttaacttcttctctgctatctaaccttcctgcattcctgggaaaaaaaacttattacaatcccttctaatccccaaattttagggtttccctgtcttctcagaaaccctaggcttttttcctttccaatttctctctgtaattcaggtctgctttccttctttctctgttttattgtttggttccgcataccttctgtttggtttccaagaaactcgaggaaaggaattgtaaacaaaagaaaaaaattgaagctttgataggaattcaattctgtcttgtttggtcaatttgactccattttggtttattttcctcaccgaaggaactaaaacagaagcaaacgtgaatttttaatggtatctgttttttttttaaagaaaataaacactgttcgtggtttcttgctaagaaattttggatttttacggaagagttgatgttcaatttgttttcaagcttttgattgattgaattcttttggtttatcaagcatagtttgcttttaattaagatgatgttttcttgaagttttgaatgctttgcttaatcttttgaaccagtgttatttgtattgcttgtcaagaatttgaagtttttctggtgcattttactgaggcagttgtgaattattcacatcgacatagaagaacaatttaactaactgtttggaattttctattgcattaacaatatacaacttttttatggtttttgatgaacttatctgaagataattttataactgtatgttggtgaatccagcactaaaacattgtgttagctgtgttggatttcaatggtgatgtcctgtctgttcttcctgcctttgattattccaaaatttaactatccagttaataaggttttattgaagagtactgagctgttctgtgcctgaattgcagctcctcctccatttgcatctatttcagca

SEQ ID NO: 56791 - DNA, 632 bp, Populus trichocarpa
  Intron number 3 from transcript POPTR_0009s05270.1 (locus POPTR_0009s05270) derived from phytozome v7.0 (chr-ID scaf fold_9; pos 5408384 to 5409015 reverse strand)
tttttctccactgccaccataaacatcattgtgttgtaagctcccttctcttcctttctctgtgcttttctaaaccctgttttattctttatatggaaaattatttatgcttctgtttggatttttgttttcctgttcagcttccttttttcattctattgctttgaatttctcttggaaatttatatgcgcaaatctgatgtggaataagaaaaagaaatgaagctcgtcaatgggtgtttgggagtgtagtagcggttgctttccaaagtgtttttcacttgaaagtacatcaaaataataatttttattattttttaagaattatttttgacatcaatatatcaaaatgatctaaaaacactaaaaaatattaatttaaagcaataaataaataaataatttttttcaaaaacgcttttgaaacgtaaaaacaaacaaaataattgtcgctttctagtttgatttgcatgcatgccttttgttggtttgtttcaaccaggagccatcttttgtcctttttcttgtggcatcgaacttaagattttattcctgtaagctggaattaattactgacgtgctaaggtttctggaacttttaacccattgtagggacctcaaccccttgcaca

SEQ ID NO: 56792 - DNA, 1016 bp, Populus trichocarpa
  Intron number 1 from transcript POPTR_0009s05270.1 (locus POPTR_0009s05270) derived from phytozome v7.0 (chr-ID scaf fold_9; pos 5409673 to 5410688 reverse strand)
aacgacacgcccttttggtcccttctcctctccaggtattacttcactttcttgcttgctgtgtttatggattccattgcctggaagcagaaatgggttgccttttgaattgagcccttctcctcgggtttttatttttaaatcctcagttttgggtttcagagggttgaaaatgaagctgggttttggcttttgaattatataagagcttttcgcaacttttttggtctgtaacttgggaattgaggtgactgatccatagaaatgtttctgtgatttgtcatagtttgggccatttgatccttcaaagtctatgttaatccttttttatatgtataatcttcgtatcgttcttacgccagatgtgcgttttcgtcgtttcgtttgttcggtttccaagggcttagacactcttcttcttttttttcttttttttttcttttaaacttaattcctcttttattttatgcatcgtcgaattttgtttcaaaaacgtgagttaaacttgagcaagggatggagcgtctttcttcagcaacttatagcagagtgaatgcttaatatctaagccaaaagattccgttttgatttgcttgcatattttggctattgtactcgatgttggtcgttgtgcaaatatggactttgatggttataaagttgaaaatagtttctcattcgctctccaatttgctatcaaggtttatacagcatcaggacaccagtacagactcgattaccctagagtcaagaaccctttgttatttcagtgctatgtttcagatgactgtgccttcttgcttctgcagaaggaaaaacaacatgtggttcttctgttattgattgctcattgcaaactgaatttcaacaaaataaaataaaataaattctttgtgcttctatgaaacgaactctttggcagctgaaaaacaatcaattattttaaatgttatttcatgattacatacatgtatcacaagaacaactttttttgagtctaggaaaaatatagttcc

SEQ ID NO: 56793 - DNA, 426 bp, Populus trichocarpa
  Intron number 3 from transcript POPTR_0001s30210.1 (locus POPTR_0001s30210) derived from phytozome v7.0 (chr-ID scaf fold_1; pos 28740114 to 28740539)
gtggtccaagatcgactttgtgcatatcatctcaggtacgaatgttgtatccgtgttatatatatatatatgtagccttgcaaagctgtagcattatatgtgtgacttgagccgatttcaaaactttattgaccagacaagttttgaatagccttgcacaacattgctttctttttttacgggaaagcagaaaatttgagtcattgttcatttttaattcagtgcattgattgcaacttaagatgaagcttggcttgtgtttgaaaaatgatatttttggccatctcttgtcccttattttaatctgcaggaagttttccttcacctttgatttcttgtgtctccttgcttttgttggtttatgcatataggtgctgctcatgcacaatgtttgttttaacctcttctctttctattgcaggttgg

SEQ ID NO: 56794 - DNA, 694 bp, Populus trichocarpa
  Intron number 1 from transcript POPTR_0009s05550.1 (locus POPTR_0009s05550) derived from phytozome v7.0 (chr-ID scaf fold_9; pos 5628013 to 5628706)
gtgggcctggcccccagcgatgtgagtgaaacttaaaccctagatacttttagcttgttgtttgaattctaggggtttagagttaattgaaagttaaaataaaacaatattagggttttgattggttttgtgatttatgaggttcttaactgtgaattgatgtggttaattattttcttttcacttttattattgaaaaattaagatggaatgtgctgtttttttctgtgtatgtgatgcaattaaacaaataaaataaaatagtgaaacttttgtttgaaattaggggaatatggcatcgagtcttatataatactagagactgctcatgtaaactagctccacattaggtggaaaaaatcccacattgtgctagaatggtttacttgcgcggggatcctccaaaactaaactatcttgttggtttgttttggaataattttattggttagagtacaaatctattggatcagttgccattgttatttaaaaaacagtaccccgttattcttagtcatttcatgaagcaatttgtgaatgatcctggtgctttaaaggttcttatagcttgaacaaataatgttttgttcttgctagctgatctctgttatcatttgtttaaaaagcagttatctttttgttccaaaacttgtggtggatgttaattgttccatctatttgcagctgttgaagg

SEQ ID NO: 56795 - DNA, 558 bp, Populus trichocarpa
  Intron number 1 from transcript POPTR_0004s02565.1 (locus POPTR_0004s02565) derived from phytozome v7.0 (chr-ID scaf fold_4; pos 1705777 to 1706334)
agttgactgtgttgaaagaaaagtaagtaatggatgcaccaagtaaaaatgtgatgttttaagtaagcactttcatcttatggttgaaacacagtttgataaatagttgaaatgcttacagttatctcaaacagaatgaattcaatataggatagcatgtcctgccgtcctggtacccatgaacagaatggagttgcagagagaaagatcagacagatggttgacacaggtttggctcttctagcagatggaaagttccatttcagtattggaacgctcgtcttctcaaccgcagcttatttgattaataggatgctcctaattcagcagtatttagtccttctaaaaaactatcccatcaagcacctctcaaaatcttcggatgcactgtgtaccttcttcttcggccctacatttcccattaatttgctcctagatgtgttcactgtgtttttcttgtttacttcaacctccatcaaggtcatttctgttttgatcctgatactcaccgaatttacacttgcagacaagttcagtttggtaaaaggagatttctct

SEQ ID NO: 56796 - DNA, 696 bp, Populus trichocarpa
  Intron number 3 from transcript POPTR_0004s23700.1 (locus POPTR_0004s23700) derived from phytozome v7.0 (chr-ID scaf fold_4; pos 22339429 to 22340124 reverse strand)
tttcaagcttggaagagtcacgctcggcagttaaggttaagaatcattgcttcactctaagcttctccaagttctgtcattaaatcagcataggtctcacttggacatcacttgagagtaatataattggctgtctttcagttagccctgaaaaatgagtctgttttgcttcttcatttccaatttaacataaattgttggtcgtggatatattgctttgactgatttccattttatgtggtgtaaatcctttttcaattacaaaatattcccaaacaacagatctcttgtgagctatgttatagcagttgaaattcctgcttgaaataccgaaaatttcatttcaagctgtaaactcaccttggattcgtgaaggacagcactgatcaaagggccaccaaaattgtccttcctcaccacattggatttgcttattagaaagagttgccatcttacctttttcttgagtcagggactgctggtctcatcttggatgtgagttcaatttatgtctggtcttccttagtgttggaccggatgataatgaaactgaaatactttaacatcttggttaagaaatttatctccttttggaaattgtgtgacatgggtagtaaactactagaataataaaattaagcttgaatgttctgctgctgtgttaattttctttttgaatcaactccaggagactgg

SEQ ID NO: 56797 - DNA, 460 bp, Populus trichocarpa
  Intron number 1 from transcript POPTR_0004s12850.1 (locus POPTR_0004s12850) derived from phytozome v7.0 (chr-ID scaf fold_4; pos 12211082 to 12211541 reverse strand)
atccctgggatcttccaagtaaggaactcaacactttacaattttctccattttctttcttttggcaactggtttgatttagggctgagtaattagtttttgcatgcatgtaaaacaaacttgttttcctctcccttttcgtcagtgtaagaaatttccttgcatctttcttctgaaagcatatcgagtccgtaagttaaggtgcattcatttgaatgatcttcatgtttggaagattcttttgtcaagctttcattaggaagcaaacaaaatttcagcatcatgattttaacttgtaaacttttaagtaaatattactatgacattattgtatactttatgccaagcttggcatatggagtagttcattctaaatatttcaacttatttattgagtagtttcttgatctccttttttctacaagaagagctggcaactacaggggagaaagagttgtac

SEQ ID NO: 56798 - DNA, 576 bp, Populus trichocarpa
  Intron number 1 from transcript POPTR_0012s12040.1 (locus POPTR_0012s12040) derived from phytozome v7.0 (chr-ID scaf fold_12; pos 12353012 to 12353587)
agatcgactctttgtatcaatctcacactgaaaaggtttgttttcttcttccaaatgttttttttttcttatttaagctaaaatggttcaagttttggtctgtaaattttgaatataattgtttctctttggtgagtatttgagaaaaagatttgatttttgaatgtggggtttccttattatgagctcaatttgtgtcaagggctgattttgtcatctgggtttccttcatactgtgcaaaagtgtgtttattggtgttctatgctggtctaagttgtactaagttgttttaattcaaaatccttaatccattgaaatacagttttagtaattgtaatgtttagatgtattagtaatatcttaccctttattgggctcacaataaatctagattatgataggttggagcttcttgtgttgatcttgggcattcaaaatggttttcttttatgtcatccttttgcgttgattataagaatgttactgtgttaagatagttccatgattttttcagtaacttaaataaatttgtgactgcagggaatcagaaaagtttgttgtgaactcattgattt

SEQ ID NO: 56799 - DNA, 810 bp, Populus trichocarpa
  Intron number 1 from transcript POPTR_0004s14500.1 (locus POPTR_0004s14500) derived from phytozome v7.0 (chr-ID scaf fold_4; pos 15060736 to 15061545)
aagcctgggccaaacttggtattttcctcatatttatttctacagtcttagtgttgtttcatatgttatcctctgtttgtttccctataaaatgtttgtagaaactgtttttagtgaattttagtgttgaagctgacatttttttggaagttaaattgaattgagagaaaaccaggaaatttaacaaaggaagaaactttcttgggtttgggttcttaattcatcgttgcattctaatttttttttggaagttcaatttaatgcttctgttaatgtatttgtgcttgcatgtttgtggagggattgttactgttcttaagtatttttcttgaatgcgagtgaatatgatcgtagtgcgagtacattggaattagaaagtagggagtcttttttaacataaatcatgaatgataaaaagaaacccttttggttaattcaacactttttgttatgaacattagccttttcgtgattaacatagtatgaaatactatagagttcccattttgaattggggttctttagaagtttgaactgccaatactggagccttagatttgttcaattatataaatgatagcattttcatcgcatctccaatttgtagacaattctgtttgataatgtggatgctgagaatcatatgcgttcttttcttattgaaaaggctacattcaatcatttgcaacacaaacttttaaagcaaagagaataaactacagggtttgacagcaaacttttctgatttgggattttgaaaattaattgatttattctttgttgcagtaccatctgactcgagatattctg

SEQ ID NO: 56800 - DNA, 528 bp, Populus trichocarpa
  Intron number 1 from transcript POPTR_0011s14970.1 (locus POPTR_0011s14970) derived from phytozome v7.0 (chr-ID scaf fold_11; pos 17190439 to 17190966 reverse strand)
gctccaatttcgctaccccgtaagtcttctacaccatttttagctccgtatttgttactttcgttgttggctttttatctttgtttgtttactgttgcgatgctatgaaactcggattgaaagtagcgttggacttaattacagggtctaagtttttgatcttgtatatcttgattttattcaaaagctttaacatggtaaaatgtaaaggacttgataaaccttctctcaggtgcattgtctttcactggttttgcctgcccaattcttgttgccttagcttttgattttatgaccggttgatactggtgcattatattgttggccttgttataagagtactacgtgttgcttttgattgtctctatgttgctttgcttgtaaaagacgactagatagctttagaacttccaggaagtaatttttatgttttcttttgttagaatttatcgaacctctaactcttagtgttatttattgttttttctcacagtacaccagcaaccctctccacagctattccggcag

SEQ ID NO: 56801 - DNA, 918 bp, Populus trichocarpa
  Intron number 2 from transcript POPTR_0009s02570.1 (locus POPTR_0009s02570) derived from phytozome v7.0 (chr-ID scaf fold_9; pos 3352944 to 3353861)
ggttcaaagaattgaaaatatactgaaatatattggtgggttttgagtttttattttattttttatgctactttatgttttgtgtatttgctttttgattaatattctttgatgggttctttaccactttataaatttgctaattgtggttgtttcccttttctgatggttaaaaagtttattaatggagtaggatttaagtcaaggcttggcttaattgaatcaaaatctgcagggcaccatgttttttgttcatttatgttcaagcgatgtttcttgaatatttccatatatttgctacatcaaatctccttctgggttaaatttgggtggtttagagtataaatatctggtgagcaccggtcgagatttgttgctttagattctgatatagcatgacatttaatgcagcatgggaccaattagtgcaaacaggtttgccttggtctaaaatttcatccatattctgctactacttcctgaattgttcctgaagttccgcaatgactgtcaccgtctttgaagtaataaccaagctactttggaaccacttgatattgcatgcaggttcttcgacaaaattgtaattaattctagtttttttaaaacaagaagggttatattttggcctttgttattgtactgtgctttttactgtcaaatagattctttgtttgttattaaacttctcgggtttctcaaattatggatatgcatatctatatatttatgcttctttgtttttcctcattcatcaatgacagtaatatgtgtaggctatatatatggatttgctgattgacttcatggctaggcctgtcaattttaattttagatctttttgcaatatagttttgctaagctttcttgtaaattgtctcagatactgccttgcagttggaagctctggttggagat

SEQ ID NO: 56802 - DNA, 760 bp, Populus trichocarpa
  Intron number 1 from transcript POPTR_0012s09390.1 (locus POPTR_0012s09390) derived from phytozome v7.0 (chr-ID scaf fold_12; pos 10427093 to 10427852)
gtggagagaataatcctcttggtgagttcatttctttttcttaatagaacattcaatattggagctattagtaaaaagactcccctgtttttgggatttttatttccttgctttgaatgcattgttagttttgtgtttattttttacatgcctgtgtgaatttttgtagaatctagttagacggaagaatattgtaggtatgtagcaaggattagctgttatgcttatttatatccgacaatatgttttgacaattgtgagaactgggaatgtttgagcaattgaagcaagttattaagatagacaatggaactatactctttgcaataatggcagtggttgattggtctgggttgattttaatttgttcatccaacctgcttcaagagctctggggtttgatggtgcagtaagatagaaaatggagcacaatttttcttccttatgagaatggttgcttttgtgacttcccagcactactttcatacatcacttagaagatgttggattcgtgtttgatgaaaaggcactttatttgggatacagattaattgatgagactatttctgttaacatctttgattatcctgctgtttttttttttttcaaaaaaaagaaactgttgcaatgttttaatgactgctgctgtgaggattcattagtactgagtgtctttatttttgaggattcattagtactgagcttcattttcaccctcctatcagttacatttgctgttctcggtgagaagacgacagta

SEQ ID NO: 56803 - DNA, 1048 bp, Populus trichocarpa
  Intron number 2 from transcript POPTR_0014s05890.1 (locus POPTR_0014s05890) derived from phytozome v7.0 (chr-ID scaf fold_14; pos 4396506 to 4397553 reverse strand)
tgcgtgaggagaccttggcgatccctaaagctaaagtactccgcctttgctctgaattccctgtctttcttttttcagtcagagatttgttttgttgattgtaaaattgaataaccgaaatcgagtttcatctaattagggttaatcatttaggttaagttgaattatgaaaaagaaaaagaaataatatgttttttgattttttgaaattgattttgctggaagtcatatacggattaaagaatgaataaaaaataataattaattaggctcaatacaatcattgtggtttatttaagtggaacacaacattatctcgaagaaaaaaacttgaacaaaacagaattttattgtctctagggttataaaatagagggggagctgttttagttatgttaattaagcatgcgcatttatattttgtggttgtaattgtttttgttttgttttgttttgttttatggattcagaaactaattgaagcatcactaaggcagcagaaaaaattgcaaagtatgtctgtacatgtgccagaaagaacaaccttctcgaattcggaaattaataatagaaggtactggtgtttttatgcgtatattacaagtctgcgagtctaagattttgagctgcaaatgtgcttattttattatgtattgtcagcattctgccagaagcatctaatcaacttcctggttttggtccgttgaaacctgaggagcctgtagcaacacacaaggtatgtgattgtaatggaaaatttacgttttaatttcaatccgtaaatctatggggatacggattgttgacgttttgtatggctcagaccaataaattcactttcattctcattttgaatttaatgaacctggaaaaactagatggataatgaataactgaaataaggggaaaatagtttgcaaatgttcagttgctataattttcataaatgtttgctgtagcttgagtgcgagggaactatttaaatcactgatcaagattttgttaaatttcaggagaaaaagggtcgtagctctccaccattgtggta

SEQ ID NO: 56804 - DNA, 629 bp, Populus trichocarpa
  Intron number 1 from transcript POPTR_0015s03900.1 (locus POPTR_0015s03900) derived from phytozome v7.0 (chr-ID scaf fold_15; pos 3823326 to 3823954)
cttcgctggatctcctatctcggcttgagatttatgtaagtgtttgtttcatttactttttgtcctattattttgcctgttttgctgttttttctcgattatctgtagattcctaaggtttattaaaggtaaatattagaacttagagcttaaattagttaccatttggagggttttgattaactgtccttgtatgatttagtttacattgattatgaaaactctttttaaaaatagcaagttaccttctttttttgtgattgatctgtgttcatttacaggataatgcataaatttggaaaggatgttattagttttatttaggaaaatttaaaatttgacagcgcaatcaaagcatttcatttcatttgatcaatccatttggatctttttttctttgatgaacaatcaatttttttctaacagaaagtgaacagataatggaaaaaagttgacacctttttgtttcctttttcattttctgctgtttcatttttagagaaaattgattttctgaaaaaaattgaccaggagaagaagaaatgggtctttttcatgcaacctctgatcttgttttcatattggattttgcagctacttatttgtataaacaacttttgcatccaaga

SEQ ID NO: 56805 - DNA, 795 bp, Populus trichocarpa
  Intron number 1 from transcript POPTR_0015s03790.1 (locus POPTR_0015s03790) derived from phytozome v7.0 (chr-ID scaf fold_15; pos 3678484 to 3679278 reverse strand)
tcactgtttctgtgtgcgccgttgttattcttgcggtatgtagtaatctctctgtttttacggtagcgtagcttcattacaatgttttgatcaatgagagtgaaacccatttgatcgaacaagtaaacttaaaagaccttctttttctcctttgttatgtaaagaagttgggaccttgttttgatctgtgaagtatttttattcttctgaaagaagggatcaatgcccctattatcaaagatatttttttcggggaggaatgacgatgttgttctctgactttgaaaaaaactgttttgttcttgtcatgagtaatggtattttttttttaattcaataacatgcaaatgggtatttattactgcactctgtttccgtcagtgccattgattccttcacatgttggattccttttatgcttaccttgaaagggcttcactgttgacagttcagattattaatgtagctattgaaaattccacccttgttgtgttaattaactcaaattatcaaaaaaatgttcaattataaagtttttagtttcagaatgaaaatatagcaactcacattttaaaatttgaattttcggtagaggtggaattgttttcgtaaggatattgaaagtctggaattcttaaacagaacaccaaatcataagtatctttgatgccaatttccattgacaatttatgatttttccccatgaaaaaacaatattagaaattctggcacgtctttgatggtgctggttttattacttgtttatctgtgatttctgctttcttcattctagtt

SEQ ID NO: 56806 - DNA, 997 bp, Populus trichocarpa
  Intron number 1 from transcript POPTR_0004s12040.1 (locus POPTR_0004s12040) derived from phytozome v7.0 (chr-ID scaf fold_4; pos 10948807 to 10949803 reverse strand)
tcccttttggaagctccattttttcatcctccaaggttggatccttttcccattctttttattttttctctctaactttcttaaatttacagtttcatgcgaaatggtgaatgcttatgtttgattttgtgcataccatctttagtacttgttagtagaaacagcctagtagtgtaccaataaggtctaagaagacacctcaaggagccttctagggttttgcttggcttcagttaatacattcaccatttcaaaattgggtttttgattttatactcatatggctatttaaattctttattttcttactatcattttgtgtagtctttgtttggattttggaatgtgttgcaagaaaacagaataagctcccaaattgtctccctttcttgcattcattcctacaactaattgcaggcaccgtgtgactatttccctttcccatctctctgctgccttattgtagactaattgggactttttattttactgaattagttgtgctaattattcctataatgaaatttatgattgcaattatccattcatactgcaatgctctctccactgttgtgagtaccaccactactgctggtgctaccatcagcataggaattgtgtccttttctactagttagttggcattactttgcatgggaatataggaaccatgttttatatttgcaatgcagcaagtagcattaagctctatctagcacacctattaatgtcacttctataaagcatatggccaaatggtgctctgttgtggcatatactttgctttcataacatgaatcttggacctttactgttgttgtatttgcctttatcgatcagtttaatctggactaatgtcatgcccttgagatgcttctggtgaggagtgtagaaataaacaaaatgaacggcagatggataatctatgaatgtttattttaatacctgattgcttcttgcaggtaggatttaagggtcacacttgtgtaggatctac

SEQ ID NO: 56807 - DNA, 240 bp, Populus trichocarpa
  Intron number 1 from transcript POPTR_0012s05790.1 (locus POPTR_0012s05790) derived from phytozome v7.0 (chr-ID scaf fold_12; pos 5609662 to 5609901 reverse strand)
agagcttaataacagaggcctggatccttccattggtattgctttttattcttttccttccatatgtttttccttgtatatgattctcatggatcttagtcctcaaatcttacatcttcgcattaattctagatttccttgaagtcgttttctttcccatcatattatgaaccactcctccaatcaacaggatcttgaatgacaaagaattatcctttgatttgttactgttgctgtagg

SEQ ID NO: 56808 - DNA, 426 bp, Populus trichocarpa
  Intron number 3 from transcript POPTR_0004s01320.1 (locus POPTR_0004s01320) derived from phytozome v7.0 (chr-ID scaf fold_4; pos 715611 to 716036 reverse strand)
tgaagagtctaattttgttgttgaattaacttacagtatttccctctcaaagcctgatcctactttagtctcttttttttttcttttttttttgaattcattagttatttatggatggttagttggtgaatggtaaattagatgggaaaatggtggatttatggtaggtattatgaataatagaagagataagctgcagaatctctttatattgttgagtgggagtggattccttggtttttttactggttgcatggattctgtttgttcccttttttttaatttatttgtgatgttcgagccttgctttagtagcaaaggggttaggaatcagtaggactggcattaaaaatcatatatagtcttttgattctttcaactccgtgattctaggagtttatttagcttgttgttgatttacagatt

SEQ ID NO: 56809 - DNA, 936 bp, Populus trichocarpa; identical to SEQ ID NO: 56250
  Intron number 1 from transcript POPTR_0011s05190.2 (locus POPTR_0011s05190) derived from phytozome v7.0 (chr-ID scaf fold_11; pos 5077595 to 5078530)

SEQ ID NO: 56810 - DNA, 589 bp, Populus trichocarpa
  Intron number 1 from transcript POPTR_0012s12890.1 (locus POPTR_0012s12890) derived from phytozome v7.0 (chr-ID scaf fold_12; pos 13264416 to 13265004)
caggtaacatttcgtaagacattgatttatgcatgtaatcaagtagatgccttctattaattttggctactaattaagaatatgttaatctaatttggtagataccttcagaatgcaggaggcaagcagaacatgaacttaggcaaaaagggttgagttggactctttcgttttgttttaaattgttgtgtggtggtttttatttttttatttaaaaatgtattaaaataatatatttttatttttaaaattttatttttaatatcatcttaaaataatttaaaatcataaaataaattaatttaaaactaaaaaataattttcaaaaatacaatttgacaaaaaaaaaaaaaacactattaaatttgatttaagaagaaataattttaagatacgattccatagttaatgttccaactactttgtgtacatttatctatgaatttgttttcacataacccgattagaaccctatcctctctctctctctctctctctatatatatatatattcgtatgtagtgtgagctaaatatttaatttctggaggatgctgctaaatattgcttgcagctaaccaagctggaag

SEQ ID NO: 56811 - DNA, 985 bp, Populus trichocarpa
  Intron number 1 from transcript POPTR_0004s12090.1 (locus POPTR_0004s12090) derived from phytozome v7.0 (chr-ID scaf fold_4; pos 11018525 to 11019509 reverse strand)
ctttcgaaaattgtggacttaaaattccattcaaggttagtaaaaaaaaacttatctttttgagttaaatttactgttttgttgggtttggaagtacccttttgttgatctttaaccgatttgatgtttgcgtaggatttgattgagtttcttggttttggggtctggctttcgttgagaggttttagggactgacttttatgtataaattgtgggttttattatagttttaggatattattggtgttaggcctcaatgtaaagcttaaggatatttgggtttttctgatgaacattattactctgtgagtattagtttttttaaataaaaaaacagagaagaaaagattgtgtttcatgtcaatcaagagcctttaaaagtgagatggttgttcttgtttataagccttatataataagattcaagaaatactttgaacatccttttatcttactattcatggtgagatgcgtgtgacatcggaattgagatttggttatgaaatgttatttttctgctgaaaacaaatcacgtcaggacttaattatcttgtttattagttattggatgctgttatttatctgtccagatgcgtacacatctggaaaaattagtatgataagttctagtaattgtacagtaggactcaagtagtggcaagttttctcaaaatgtcttggacccaaatacaactaacctctgatgatgggaatatgtgaacaacctaactcataggttgaatctgaacattgcaagacaaacttgccatttatctgggttgagtcttttcttgatgctcgtaggattcaacatgctctaaaagcatacctggtgtatataaatataaactcttccagttgagtgtcatttgctatgtggttatgtggagtttttgtttagctagatatgtactttccttttgttttatttttttatttcctgaaaagatttatggcatttcctttgacagaacttcaatttttg

SEQ ID NO: 56812 - DNA, 641 bp, Populus trichocarpa
  Intron number 1 from transcript POPTR_0015s09410.1 (locus POPTR_0015s09410) derived from phytozome v7.0 (chr-ID scaf fold_15; pos 10626090 to 10626730 reverse strand)
gcgctagtaaaaacctttaaattaattacaaatgatcaaaagttcatatatgaaatcaagaaatttgttttaagaatatatttatacttatcaaagatatgatccaacaaatcattctctaaactccctttctaactcaaatatatcattttatagtaaataatccaagattcaaaaccaaaatatttgatcaagaaataatttttagattcatcttatcaccaagatccattgagacaaacacttttgaaagcaaggcaatctacaaatcaaattttgtaatgcaaaaaaagaaacatttgcactttctaaatcaagaagtatattataaaaaaatatgagaagatattaaactccctcaaaatgaagagaaatcaaacaattttaataattagttaaaaagaaagtttgttccaacttacctaatgctttttggaatagagaataacatatgatttatttagcttttgaaaaaggttctgatgaaaatataaccctacaaaggcaataaaaatttaaatgaatcaagaactattcaaatattgtaaaacaaaaatcaatgaattactcaaaaaaggtcttataagacctaataaatcacattagttatttattgccttttacatccaaaaccaagctga

SEQ ID NO: 56813 - DNA, 710 bp, Populus trichocarpa
  Intron number 1 from transcript POPTR_0012s04360.1 (locus POPTR_0012s04360) derived from phytozome v7.0 (chr-ID scaf fold_12; pos 3596187 to 3596896 reverse strand)
ggtggtagatgaatttttaagaccaagcttcatgccgacgacggatccattcagcattcacaaagctcgtctaatgcaaggattttctcaaaagcatggcactgattttgacaaaaatagtttgttaaagcaatctaaattaacacaaaaaaatataaacataaaagaaaagaaaattagggtttatcttgattcagaattttttattttaacctaaatataaatacaaaaaattatatataagttaaactaaaaatactattttacatttaacaaataaaataaaataaaataaatatatttcttaacacagctaacgaaacagctaactttcgttgacttgatcctatgtggataactattttggatcagcaaagattgtctaaccggtcaccgagcttctgccactttttcgggtaaagtattcttggaagtttttgcacctccatattgcagcccatgttaatggttagtgccatactccggaaaggacatggtctttgattctcaaatctctttctatacgagctgtaagcctataatgcctataaatactagagcacaagcatcatcaatcttcattccaaacaatggctattccccctagctctgtagtagctgtagtatcagtactatccatttttgtcttctcttttcctgctactgttctctcagaaaccttcagacaaattttcttgcccccacctgcc

SEQ ID NO: 56814 - DNA, 774 bp, Populus trichocarpa
  Intron number 2 from transcript POPTR_0015s11250.1 (locus POPTR_0015s11250) derived from phytozome v7.0 (chr-ID scaf fold_15; pos 11865348 to 11866121 reverse strand)
gaagttgtgattccggccaatacgagtatagtaaggtaattgaaattcgggtttgattgcagtggcatttgattttatgttggtttattgcgttcggttatcttttggagtcttagttgtgaattcattatcacattgtatgctaaaattttgtttgtgcacttttttgccatggaatatttcggttcatcattcgattgtaggttcatttgtgttgttcaatttgttaagatatagtggttggtttggtgcgttgactgtttttcatattgtaatgtgactgtaattttgagaatatatgctaggttaggacttcagaccatcgactcagtagattttacctttctgaattgtccggtgttctgtgtctaggctggttaaagaaaagagtggctaaacaactgtgtttaggtatgctaggagataatcttggtcacctagaaagcagctttatttaccctgacggagtggtgcatgtttggacttaacacagcctgttctcttttccctgccattaagttaggtgatatgaactttgcggcattgtggatttgttagatgcgttgtgagactgcagataattctcttcttaaatatctggaatcattcacttcaattaggcatttaccaaccagtgcttctgtgcaaccctatccatttttgctatttttatatttgggaatgatctctctctatttccttctgtgggagtgctgattttattttcttgttctaacggttgaatttgcagggtgattacttaatctgtcaaaa

SEQ ID NO: 56815 - DNA, 982 bp, Populus trichocarpa
  Intron number 1 from transcript POPTR_0011s14410.1 (locus POPTR_0011s14410) derived from phytozome v7.0 (chr-ID scaf fold_11; pos 16828371 to 16829352 reverse strand)
agtctaggttctgggctgattttgttgacaagaaggtgtgtttctttgcacttaaagagttccatcttttttgttcttgaatttgttagatttgagctatgatctgattaaacctattttgaaatttgatcagcttgaaagaagtagaatagcataaaacaaaaattaaaattgtacagcactaagattaatatcaaaggaagaaattaggcatcatgatatggattggtcgaaattctgtttatgttcatctcaattgttgttggcggtgatttttcttttgttgataaaaaaaaaatggtctttaaggtttctaattgatgaactatatttttattatggcgaattcatgagaattaaattagaggttggcaggatgtttttgtaaaaaaaggattaccaagttgggtgtatccaactgctttaaagattcaacaggaaaacataaaaaaatgtcatagaaggttgcaacgaagataagaatttggactcaggtgatgatatttctgtctgtatgagtgagttattggctacaggtgggttgtcagtactcagtagccacccactcaccctcaagtatcaaaaaatatatcattgacagtgacacttgaggttaatttcctgttgatcaagctttcctttattgtggtgggaaaaaagtccagagccttctaatttggttggttggtttttgctctcaaagatttgattttttacttccagtcactttcaacctagtaaaagagaagattctgggcaccatcactgttcctcaatttagttgtgttagatttgtgcactttgtgacagtgaattattttgctttaccctgtatacaggtattaattactgtagctaacaaggaaatctcaacgaggactttgggtttggggctacttttggcttttgtgattccaaagagtctttgatttttttatttttttatttttacctttgtgtgatggtatgaatctgcagatat

SEQ ID NO: 56816 - DNA, 546 bp, Populus trichocarpa
  Intron number 2 from transcript POPTR_0004s10060.1 (locus POPTR_0004s10060) derived from phytozome v7.0 (chr-ID scaf fold_4; pos 8605913 to 8606458 reverse strand)
taagtgctttgagagacaatatttcatttgaaaaggtatagttaatattttgacatgacacttggttcttgttctatctgtgttagtgtttgctcccttgtatttaaatgtcttgtttgcttcccataactaatctggaatcagtttaatgcttgaagtgcataacgtgaaaaaatttaggatcctttttgaacagttctttttcttctctcttcctccctctcttccttccttcatcgtttgatcaaactatcataatataactctccatctcataaaaagtttctgttggttgctcttgatggtttccatgttgtgtcccctctcaatttcaaggctgaggttttctgtacatgtctgctataaaagtagtttcatacaagcgcgcactgttttgaatttttctttgtatagatattcttttgaatttgaattctcgaatagaagctatgcttctgatcttgcatgcttttcatttataattgctccctaaccaattctcttcctacagggaagcaatctgaaaactgagcttgattctttgaa

SEQ ID NO: 56817 - DNA, 793 bp, Populus trichocarpa
  Intron number 1 from transcript POPTR_0004s10060.1 (locus POPTR_0004s10060) derived from phytozome v7.0 (chr-ID scaf fold_4; pos 8606515 to 8607307 reverse strand)
caattgttgctgcagtatctcattcttctcaacttgtaaggatttcattatgtcttactctttaaatcttattataattcttcaaatagtttttctgtaaattttttgtaaagttatttcaaacatcctcttgttttatctagttgtcaaacagatggtaaagtccccacttaaatgttgtgactgttgtttgactagaattactacccttacctttcttatggccttatcatgatctgaattatggttaatttaaattgaagatactgaatgttaggattgtgtcatcatagtgcaggacaaagctgtttcgcgaaggaaaagtggtggaaattatggtggttatgaatgagagaccagttataaatttttattaaaagaacattgacttcaatgagacaaggaaaagagcaaaataaagaataaaagcaagaagaagagatgaactagatgcatgtggcatctaaacaactatcaaaatatgagcttgatataagcttatctataaactcaatgtctccccttttttttcgctctggtgtaaatataaaaccagtaaaaatgctagtattttacttctggggggacctgggtaggaaagttcatttttctattatgtttccctatattcacctgctgccatttttttctacacttaatgatgatagtgttttttatttcagtgctctaactcttctggtttttgcatttatatggtttccatggtagttgaatattaattgcaaacttgtggctaggtacgcattgaggctgccttggcattgcgtgtttt

SEQ ID NO: 56818 - DNA, 442 bp, Populus trichocarpa
  Intron number 3 from transcript POPTR_0009s15590.1 (locus POPTR_0009s15590) derived from phytozome v7.0 (chr-ID scaf fold_9; pos 12022994 to 12023435)
ttgggcttggagtgaccaggcaagttttttttttctctttaattttgaacaaacaaggttatcttaccattttttatccgattagttaagattataaattcttgtcttgtactcaactgcttgtcaagtttgtctttgtttaattttagagaactcgtgttagctgtcaaggtcatcttaaagattaatctatgtaatgtatgctgttgcttaccgcttttttaaaacactgttactgattgatgatagggactgaggattttctgatttgtagttagcactcaacaaatacgcagattaattgttagattaaagtgtgaaaaaatctagtgtttgaattgcagtactatagagtgattaaatgatatcagctttattagaattctgacattctttgcttccaccagggatcctcagctagtcaaaaagattggtgaagcaa

SEQ ID NO: 56819 - DNA, 523 bp, Populus trichocarpa
  Intron number 1 from transcript POPTR_0012s04090.1 (locus POPTR_0012s04090) derived from phytozome v7.0 (chr-ID scaf fold_12; pos 3308940 to 3309462)
gatactactgataagatcattgcagaatacatgtatcaatcagttccactttctctctttttacagtctctcttctgtcttttatccatttcctttgactgcatatgatatcttttctcagtcttctgttgtcccctctttgtgtgtttgcttttttgctcctttgttggggattgctgaaatcctttagttgattatggaactcttgtttttgcgtctcttaattaatccaaagagttttgatctctcttgttgtacttcaatgttttgcaaacagtgttatttccaagtcctctgtttttctccttctctttatgactgcatctaaaagttttcattttgctctttcttttggattctttcatttctatcattaatgggcacttttttgttttgcttaatctaagaacttgatccctcaagtgtttatatcaccctctttaatgggtgctctgtgttttgatgttttttcaaagttttgattttgatatgtcacttatgttgcaggatcggtggatctggt

SEQ ID NO: 56820 - DNA, 902 bp, Populus trichocarpa
  Intron number 1 from transcript POPTR_0004s14780.1 (locus POPTR_0004s14780) derived from phytozome v7.0 (chr-ID scaf fold_4; pos 15417847 to 15418748 reverse strand)
ccctctcaaggttctctgtgctcgcggaaaacgaggtaaaacaaaattaataaataactcccttaaactctgtactcttttaattttgattcttgtttgagttgtttcatctttattatttttgttaatactgagtttttttttgctgattttgacggtgacttgattggagtttaggagaagagataatccatcttgttttttcttttaatgaataataaaaaattaggatttgctgtgtgctaaaaaaaatcaaagattagctcatctactcaatgcaatcgatatatcagatagtagaaggttgctctttatagcaaatataggttcaatcagaaaagaagctgagattttgttttcgggttggagacacagtgtaaatgaatgaaatccctggaagaaattgaaaacagaaaaaaaggggccaaataaagacacagggtaggagaaatgtggaagaaagttagagaggttcctacggaaggggggagcgaatcagaacatgttatttcaaatgccagtcccattttcagaattagcatattcttcttcttgttagaactcccaagctggactgaactggggaatggtttaataagttctttgttttgatgagacgagactcaaaatatagcaaactggtgatgtatgcaaagaatgttgcttttttgggtgcccaaattactttcctgtggcagtgaaattatcgttttgttttgcttaccaactgggccatcaaattttggagtattgattggagtgtgaaagtattttattgttattatttatcatgcatgttgagaatgaatttattcattaactctatgaagggagactgattccctttcatcctcatctcatgtctaggtacaacggcaaaaaaacctgccacttctgatcca

SEQ ID NO: 56821 - DNA, 746 bp, Populus trichocarpa
  Intron number 1 from transcript POPTR_0011s05390.1 (locus POPTR_0011s05390) derived from phytozome v7.0 (chr-ID scaf fold_11; pos 5310692 to 5311437 reverse strand)
aaggagctgacagcaaactcaaccaaggtgacttttttaggacatagcatagcctagtaatgttaatgcccaatgacctgcaaagagatctgatcaagaaaattttattttgacaaatataatccacatcttgcacttttatgcccttactgatcaaatcattttaactcctatgcattcatattgatatgcggcccccaatttattcctgtttgtccaatttctggggcacctcatatcaactcttttggcatatttgaccactgattctgaaagaatagtctgttttatgattttcatatggtactttttttgtagatgtctcaagagacaaatcaaatatatctcggcatgtctttgtttcttattttctgcatgcgcgtgtgcctgtgtgcaaatatgagtagtacatcatactactttctttttcatggtttgtttataataatgattgctgctttgggatgatttgcctatcatttaagaggacttcagaattttattagaagaattttagtaataattcacttgtacgatcactgcctcatcgccattttattaaatcttggctgactaatttaaagttttagtgactgatcaacctttcttttaatatcttatatggcatggccttgtcgccattttaaagagtggtgctcacattagtcactggatccctatatcgactgcatgttttctgcttgtctaaatctaaagctcataagtacactttcacttgatgcagg

SEQ ID NO: 56822 - DNA, 391 bp, Populus trichocarpa
  Intron number 1 from transcript POPTR_0009s15880.1 (locus POPTR_0009s15880) derived from phytozome v7.0 (chr-ID scaf fold_9; pos 12192150 to 12192540)
tgctttttatttctacatcaccaagaagcctaaaggtattttttttttgcattttagtatctgggtttttgttatttttgcagattgtttataaagtttgaagcttttttgtttttttcagtgggtctaattattatgtgttaggaatgctcaagttttcaaatttatcagctgtttgattaattttggtgcaaaaagagaagaatccatttgttgggattggagattgtctagaattactagcaaacttagcttcttatgattggtaaatgcagaattgcttataaagcttaaagctttgtggatataaatcaggatttgtgcaaattgattaatgccttgtcatgtcttgataggttgcttggaccctgaaaatttcaaggaatataaa

SEQ ID NO: 56823 - DNA, 593 bp, Populus trichocarpa
  Intron number 2 from transcript POPTR_0004s16650.1 (locus POPTR_0004s16650) derived from phytozome v7.0 (chr-ID scaf fold_4; pos 17053696 to 17054288)
ggtaaaacaaaggagcatcttgtttttaggttataagcagttctccgtcatagtttctgaagtttaaaacctgccgagaaattgttaatcgcatcatgagcagagtgcagatacctaaaatgaggagtcatactggtacagattcagctttctttgacttggtagagtacacactacagaatgatgaagatctcagaacaagaaaggctgccatacaaaatctccgtgagatgacctgcaaagtcctccatttctataaaggagatttccatgatgagctacccgggcttgttgatttcactgttgtgctaaatctcagtgcaagacagaaaaatgaagttctggggttaaagaagttgagtaaattcaagcaaacttctgtaggaagtgctctgtatatgcacccaaagctaaaatgctttttagagaaatatccagcaagtggagaaagaggtttagctggtgatgatgtaaagatagataattagatacagttctggatgagttgggcttggagcaaaaccgaagttttttctcaatttactgggcctctgcgagtcaactggtgagaagctactggttttcagtcagta

SEQ ID NO: 56824 - DNA, 429 bp, Populus trichocarpa
  Intron number 3 from transcript POPTR_0011s07170.1 (locus POPTR_0011s07170) derived from phytozome v7.0 (chr-ID scaf fold_11; pos 7929086 to 7929514 reverse strand)
atcatttggttagtctaatttaattttctagtcttcttttacagttctcaattttttaccttacaagttgaaagtccattgtgagaactgagaagatcaagaggcccttgcaattggctttcttatccaaaaggctaaaggctgtggactatgcaaattttccaaatctaagtctatcaaatcagtgatataaattcaaatgttactcctgtagaagtgcgaataagtgcaatatttttttttgttcctgtagtagtttggagggaaggaattctaacatgatcgatcactccaagtctatgtgtaaccaaaagaagtgttggattgagatgctccaattactccttgtttaatgatttatcatcattgtaattatagcaaaaactaatggacataaattctgtatttgtctagagatttcttagcaca

SEQ ID NO: 56825 - DNA, 753 bp, Populus trichocarpa
  Intron number 1 from transcript POPTR_0011s17210.1 (locus POPTR_0011s17210) derived from phytozome v7.0 (chr-ID scaf fold_11; pos 18794459 to 18795211 reverse strand)
gataatcctaccccacttcctaatttctccataaggtaaaacaattcattctttgtttccttttatatgatcctttctttcagggatattatgaatagtactgtttcgattttctttttccttttgtcatggctgtcttgctatgctaagctaactacttctctctttttcttagtggtgatctgatctaagtcagctaatcaatctttaagatcttttgttgggtcagatccagagtaacatgctcccttatggctcagttcaacatggcacaccccccttcttgtctttattctggtttttgaggaatttctcttgctttgcttttagtgatcatatccaaggcttctccttggggctcttatgtttgtgttttttaatgattcccgagtcatactcactgcctctaatctttcttgattgttgttgcttgtgatttcatgtcactttgtacaaataatctgtccttgttctaaccatatcgtgctgctagctgcagactttttctcagacactagattttcgaatcttgtgttcacttgggttttgcttggctgttttcctactgtttcgtgtttcactttcagttccatgaaccagattttccctaccagacttgttttttctaacatatgatatgattaagggttccagttcttgtgtacatatggttggtatagctttagcttattatagataggttgatcttagttgatgctaacagaaactttggttgtttgcactgcagagatt

SEQ ID NO: 56826 - DNA, 441 bp, Populus trichocarpa
  Intron number 2 from transcript POPTR_0011s11360.1 (locus POPTR_0011s11360) derived from phytozome v7.0 (chr-ID scaf fold_11; pos 14078715 to 14079155 reverse strand)
agcaaagaacaattgaagccttgacaaacccccaggtgaagtcatgtaaggattagttagttttctcacagtttgtcttctgtacatgggaattcttggaacagtatgggttcctactgcatggtttagctataatactacacagttgttttctcaaattttggatcttcattgatgagtatggtcactcggagatgttgcagctcgtagaatagtaataaaacttactgttactactaaaaactcttttttttttctcttgacaaaagctttgaatttgtttcctgcttgatttattctttatttctcagtcagagacagtgatgaataatcctccctctctctcctcttagataattaattgtcttacattgtatattactcttctttttcgtctaaaacttcatctccttccattgcaactttcaggttaggaagaag

SEQ ID NO: 56827 - DNA, 349 bp, Populus trichocarpa
  Intron number 2 from transcript POPTR_0004s22850.1 (locus POPTR_0004s22850) derived from phytozome v7.0 (chr-ID scaf fold_4; pos 21700780 to 21701128)
acggaacaagagtccgaaaagtttagaggtagtgttagcttttagtcaccgtctctagacagaagagacaatgggacaatggagaccttttttctttctattttgaaagtatacaatttcactccaaaactagctatagaagagctgtctccgtccccatcaatcaaacacattaaaatcacttttgtatctgccccttctgtcaaacgcaaccacatatgatgatggtttcttgcattctgaatttccatctgtttttgtgcattgttattgttgttgtcctgaatgcttgctgactgactttctctaaacagacgttccgagggttgtttttgtattaccagattct

SEQ ID NO: 56828 - DNA, 427 bp, Populus trichocarpa
  Intron number 4 from transcript POPTR_0015s04270.1 (locus POPTR_0015s04270) derived from phytozome v7.0 (chr-ID scaf fold_15; pos 4328776 to 4329202)
ctgctactgaattttttcaggtatgagaaattttagccaaatgagtaaatttcatcttccatgttgtttgtcctaattgaaagatgggtcaatgagtaaaatgtcatatagccatatacaccacagtttcttagcagttgtgactgtttctaattgtccaattccatctcttgtttgattttaatctggaaaatttgaaagtctttggtatctcaagcaatgaaatattagttgttactaaactttagccttcacagaatcttgtgtgattcttttacccttatgttatagcttgtgtttaattattctttacattttgctagggtttatataatcgctatctatgtttggtttctttatcaatgtatgtaaattactaatctacattgccctttccatacagagagcaattagcattaccccattg

SEQ ID NO: 56829 - DNA, 979 bp, Populus trichocarpa
  Intron number 2 from transcript POPTR_0012s05570.1 (locus POPTR_0012s05570) derived from phytozome v7.0 (chr-ID scaf fold_12; pos 5219410 to 5220388)
atcggagttttctatacaagtaagctcagttttaaactcccattttgtttttgttttgaaaacttatgtttacggtccttgtgatcaaagaaatgatttctgtaacgatcatagcgatgctcatgagtaaaattcaatgctgagcttattgagaagatacaggaattggtcaactggttgatgaatgatgggtctctaggtaatttcttgcaaatccaagggtacctagctagcacaaggtggtttccttgttggtttcaattcaatgctttttaaggattcaaaatcgaaactcgagcacttcttttagtattttagcaatcgtcaagcgtgtgagctttgaggttgacggtggccaaagattagaatgcttgagtcagaggaaataaagcacgactgctggggcatgtgacatgtccatggtggtgaaaaaagccaaaagtttctgggatccacctcgggggcagatgtcggtttgcctgtggctgctgactctggagtctctgtttggattgctcctaataaacttttcacgagaaggttccttgtcaacatttgaaaacctcataatcatggagctcaaaatgaatgaatcatcgtaacatttctaatcccgatactagatttctgggaaggggccttatcagcgatttgccaaggcctcatgaaagtttgtgcatgaaatgattatgctgggttcgaaattaaggttctcatcaactgatgtaaactaggatgacttgaatccaaagacacatttctgatcttttgacccaagtactggttcaaaaattctattagttttgaaaatgaatgcaagccaattctgcgaattgatgatgagcatgtgtgttctctgcaataaatgaaccgacaggtccattacaagctcctttacagtaaatatcctataaatatacaatcttgaaggcacacaggactcatggcaatgttttctgcccttattgctaggttggca

SEQ ID NO: 56830 - DNA, 546 bp, Populus trichocarpa
  Intron number 4 from transcript POPTR_0001s15190.1 (locus POPTR_0001s15190) derived from phytozome v7.0 (chr-ID scaf fold_1; pos 12038225 to 12038770 reverse strand)
tttcaatcttgccctggttagtgacattttttttggtacatctacatgattatccaagtgccaaactgtttcacatcttcactgttctaaaagagttagggaagcttatcttggtctttattgtgttttggcaggatctgcatcaaaagcttggaacaattagtaagctttattcttatttgagatttttatatttaaacatgacattagcatggaatagtttagaggatgaattagtcagtcttctgctgaagattttattgttagctgataataagtcagtaaagttgcaaaatgaaatgccaactttacacgtggactttttttgccactaaaaaacttgaaaatttgcttttcccttgactttttatcttttgatctttttttgataaaccttctagtttcaggcgtttagacttgggagaaacttagctattacctgctcaattgcagattctttgaccataggtttgatgaagtttatcatcaaatgtttgaaaacctaaattgatggagcttcttttgcagacaaatcaaaggcagcta

SEQ ID NO: 56831 - DNA, 437 bp, Populus trichocarpa
  Intron number 5 from transcript POPTR_0015s03650.1 (locus POPTR_0015s03650) derived from phytozome v7.0 (chr-ID scaf fold_15; pos 3442197 to 3442633 reverse strand)
tcaagactggtgtccatcaacaggggaatcagcctgtaggttttgtcttttttttctccagatgtgtttttttgtgcccttgtaggaaattgaatattcccttctattgtcaagaatgggttctctcttgtttagaatcaaagtcataactctttgtttacatgccttgacagagtttaactcaacttgataaatgttgttatacatgggtgaaaactttgtgcagtttgctctgtagtgaaaataattgatgatgcttacaggtgcttttttctatttttatgttatgttcatgaaatcctgacagttgttctatagtgtgtcttctaaaactatattttacccgtctacttactggaaaattgtgttgtttctccttattttttgttcacatgttgtgtgttaaaccaattattttacccagaaaaatgcagata

SEQ ID NO: 56832 - DNA, 481 bp, Populus trichocarpa
  Intron number 2 from transcript POPTR_0012s05200.1 (locus POPTR_0012s05200) derived from phytozome v7.0 (chr-ID scaf fold_12; pos 4737557 to 4738037 reverse strand)
ttgattcttgacctccattccaagtggggcaataggtgcgtgttgtttgattgtccaaccttggagttatatgtcttctgccatacttctgttcatgtcggggctatcaacttgccattagagtaatcctatttttttttggatatagatagacattacaaagtaggaccaattagtcataactagactgatcactaccatatgctatctttcaatatttaattgagcagaaaagtatatgtgctgaacaagcatccactgacatcacgggattctaatccttgcttctggcattatttctttcccgccgtttgcaatgctctgaaagtttgtgcttttcagttagcctcgacttctaattaattgttgagctcataaataatggcatgtttgggttgtgttcgatttggacactcattctgttagtttcttgaaagctaatgtcatgttgtaacttgtctatccttttcttggcataaag

SEQ ID NO: 56833 - DNA, 982 bp, Populus trichocarpa
  Intron number 1 from transcript POPTR_0660s00210.1 (locus POPTR_0660s00210) derived from phytozome v7.0 (chr-ID scaf fold_660; pos 6752 to 7733)
gggtttgtaccttttcatactgttctttaaattctcatgttcaatttccactcttttattaccctttttcttctagttttatgtttttcttctttgtattgatttttgttgctttggcttaatgtttgtggttctatgtttattgtttattgaatcttttttgccaatggattgacagtattgtttctattgttgaatttttggtatggatttgagaacatagttattgaaattagtaagatgctaccgaaaagttggatgctttggggcagctaataatctgagttttctaagcttctaggttaatttatttgttgtatgttccttttgggttttgatttggtcgtgaatttatgtggtcaacacaaatggtgggctcctttaactgttttatcctctttgtgggttgttaaggttaaaagtgtgttttcgccattttacctggaatggtgtttgacggtgatggatgcttatcttgctgctgctgtatagttgagctgctttgatgcaatgctatacacgttgccctttgcatgttgaacagtggttccaagtgcttcataatcatttttgtttccttcttattgtaaaatcttttatctttgccactgttttattgctgtatcaatgaatttctttggtttcattgttttaagacttattcaaagatgatcattagactttgatttcattagacaatagacattggctataactgttggaatacgcttatatgttgaagaaaaaagaacaactgagacatgacagcacaactaagcatttttttttcttttgtatcttttgcagcatgaatgcttatagtattaagtgcaaaatacttctccttttgttctgtaattgtgtttgtaaagaaatatagagatatagatgtaaagttaagtttagtttttgtattttgaatgcttcatttttattatttttattttcatggaacatttctgatgaggcgagtcgcaggtgg

SEQ ID NO: 56834 - DNA, 670 bp, Populus trichocarpa
  Intron number 2 from transcript POPTR_0004s12800.1 (locus POPTR_0004s12800) derived from phytozome v7.0 (chr-ID scaf fold_4; pos 12071708 to 12072377 reverse strand)
ctcatacaattggtgagctctcaccgacatgatttttgtattgtcattgaatcaaataatgttctgtgctagaatccagtttgtcgtcgtgagtttgtcttcagttaaaaaattgttgccctggttatattttataaagcccgtttctggtaatggacaagtcccatctggggctggatagtttttggatcatgttgccatctcatcatatttcttgagacatatgtaagcgagagcttgtttaatcttaccatgctcatagtgaatttagatgattgtctccttgaaagtaaatcaaggatttttttctggtaatggacaagtcccttctttatggggtcactcttgtattcagccatgaacaaactgggtttttgcattgtattgtcagtgtcgttgtgattaatttctttcattggtttgacttttaggtttaaagtgaacatgcttaagggtttttctttgtgtgaactctctctcatttggaagcattttattgcttttgatcatgcttgatcatgcttgatcatgttgaggtgaatttagtgatgatagtaataatgaagttatgattaactgaagttttgtttttccttctccttttcaccatcttatttcttcatgttatctgacaggagagttgaagaaactcaagacccttgttataaat

SEQ ID NO: 56835 - DNA, 936 bp, Populus trichocarpa
  Intron number 2 from transcript POPTR_0011s11600.1 (locus POPTR_0011s11600) derived from phytozome v7.0 (chr-ID scaf fold_11; pos 14385364 to 14386299)
aatttgcttaccattacctctctaggtgctctaaggtataaacgagcacttgtgttttgtgttaccttattttctcttcaagccatgtaagataagcctgttttctagggtttaatacatgtttctggcagttattatacgagtactactagctagtgacctcagtcttaggtgccatatttcatgattagggttgcggtagtgcatcgaagaaagagtttaggttttgtagttgctttagcgacaagtttgattatatcattgaatatcatggaggacgtactgcttctacttgctccaagattcttttggaaaagcaaattattcaagcattactctagcaaataatttcatggtagttatggtctccacaataaatgaatgatctgtagctattttcatttaaggggctgaaaaggaatgccattattttgcctagggtatcatctagcagaaagtactcaatattcatctttattgggatttagacagatcacagcatttcggcatcattattcttgtcattattccagaggctactgattactattcagtcatttagttgcatagtttgtatacgacttgcatgcttgcttaggtttacatttcccacacgcttgactaggtgatcttgttttgaacttcaaatttgaacaatcatcatatattcttgtttacctcaaggaaaatcataggcatctgatattatgtggagaaaagtgttggcatattcccttgtagtcatgataattgtctttgggctaacaaataacgtgatccaagtgctttcattttgagacctcttgcaaagtgatcatatctatatttgtatgatgttttgcactatttcaactacatgcaatgatggcattttacattttcaaactttaatccttgtcaggacgagtgggtaatctctcgagtctttcagaagag

SEQ ID NO: 56836 - DNA, 377 bp, Populus trichocarpa
  Intron number 1 from transcript POPTR_0009s11140.1 (locus POPTR_0009s11140) derived from phytozome v7.0 (chr-ID scaf fold_9; pos 9350819 to 9351195 reverse strand)
acccctgattcaaaaatccgagaacgaacttgctggtaaatgttttaaacttgatctcttacaatttttttgatttatgattctctaaagaccatgacatgatgattttgtgtttcttttatatttaagtttcgatcttccgattttttttatgtgatgcaatgattttcttcaagtgtcgttcgtttcttgattggaatcttgtatgttttatatcacatgggctgttttcttgattttaatgaggttctgttacttatgttgaaatatttgaatttgttagtttgaagcttttttattgattttggctattagtgatgccaacagtgtaaatatggtgtttttgtatgcagattattgttcaacccttgaagggg

SEQ ID NO: 56837 - DNA, 692 bp, Populus trichocarpa
  Intron number 1 from transcript POPTR_0011s14530.1 (locus POPTR_0011s14530) derived from phytozome v7.0 (chr-ID scaf fold_11; pos 16893556 to 16894247 reverse strand)
ctgtgtctttcttgagcttttcttttgttcaggtgagttttctttttgttctttcatgattttttcagtttcttgatttaatttcttgtttgttttgatttttctgttccttttggttatctgtttcttgtgtttatctgatatgcttcagttcgctgatattgctttcttgttgtatgaatttttagtcattttttcgtgatctaactcaacatttccaactaaccccagttacttacgagagggggaaaggttgaaataattataagagaaaagaagaaagggtagggaggaaatcagtttttgtggagattattaaatgaatgacacacaaaacattagctgtaataaaactcgcaggccccatcttcacttaatttatatggtacccatttttcttctttgatctttaatagtctctgtctaagtatgatcttaataaaactcgctgctatgtttctagtattgatagtttttttgtagtcatttctgttcttctcttatgaacttctctaagtgttgggggcttttaaaactgtccaaagatttatgtacacatataatcgttgcaaaagcttactcagtctctggatcctgtttaatcgctgtggtatctggcttaagtacctgaggttaattgtttttctgataattcaggtttattggtcttggaagttgtttatatcaagcac

SEQ ID NO: 56838 - DNA, 885 bp, Populus trichocarpa; identical to SEQ ID NO: 56189
  Intron number 1 from transcript POPTR_0009s01890.1 (locus POPTR_0009s01890) derived from phytozome v7.0 (chr-ID scaf fold_9; pos 2364645 to 2365529)

SEQ ID NO: 56839 - DNA, 546 bp, Populus trichocarpa
  Intron number 1 from transcript POPTR_0004s23530.1 (locus POPTR_0004s23530) derived from phytozome v7.0 (chr-ID scaf fold_4; pos 22220270 to 22220815)
tgtttctccgttttgtcttgaatcacaacaggtactctctgttttcctttctcttgtgtgtgtgtgtttttctaacttgtttttgtcagattcgtccgaaaacaaaagtgtaaatcaatccttaaaatcagtcaaatgaatctgtttgatatataacactccaaggccgaattgggtctccattattttcttctaaatttgcaattctgttgcttcaaggtataattacgcggtttttagtctgtgggcttattcagtttattcgaaaaatggttttttttatatgtattaatgggctctgactactttccaagttcatgacggagcaatgaaaaaattggctttctttctcatttttttttgatttgttggtgctgtaatttaagttctaaaaggggatatgtgcagtttttaagattttggattttggattttgatttgagtttatatcgattcaatggtcattcattcacgcggtttgatttcgggtgcctgactgaggtgttgtgtgttttttctgtatgcagttcttgtcgattttgtgta

SEQ ID NO: 56840 - DNA, 718 bp, Populus trichocarpa
  Intron number 1 from transcript POPTR_0015s07130.1 (locus POPTR_0015s07130) derived from phytozome v7.0 (chr-ID scaf fold_15; pos 8262131 to 8262848)
attgctttgtaagtattataccatgattcttctttcttcttcttcttttcttcttcttgaatgcatttttatttttgggtacaattttggatctttatgcatgttcaaattggacttgggatctgttttcttgtttatagctagtagcaaacttctcatggaataataacagatcggcttttgattagtatattgatctttttcaatgctgacagaccaacccatcagaatgcaacccaaccttaaatcaattcatgtttctcttacatttaacatgtcttatctcgtcatctagatctgttgtttgcacaagctgagaattctttatggttttaagttcagcattaacaaatgacattctagctttgctactagcttattattttcgacctttagtttgtgcactgaaatatattatatcatgttgtcaaatcagaagcttaaaacttcgcagtagaagacactcttgctatatatatgactttcaacaattttcttttgtatttattcatgcttattaaccctgcaccaatctgctttctcaccaatatttatccatatcttttaagttttcaaatcttagaaggatgcattatgcatagagagatctgaatactgaggatatgtgctttaaaatttgaaattggaagtgagatccaaagttgaacatcctttatgctattgcaggtggctaaagatccatctggcaaagaaatta

SEQ ID NO: 56841 - DNA, 1047 bp, Populus trichocarpa
  Intron number 1 from transcript POPTR_0009s10460.1 (locus POPTR_0009s10460) derived from phytozome v7.0 (chr-ID scaf fold_9; pos 8989102 to 8990148)
ctgctcgcttcttattggacagattcctttttcgagtaagatttctctgcttctttttttatttagttatttttccagcttttatcatttttttggctgtttagttatcggaggagaatttatttatgaattgatcatgatttaaggacttttattggaatctgaggttgatgaatgatgaatgagattttaattgaggtgaaacagaagcacaggctttaaattctaagcaaatcttattgttttgtaattttatttctttcaacgaggatacttggagaattttattacctctccctttcattttcatgtcattagatagatgacagcttcaaggatatagatctcgtttgatttccgtcaccttcgtttttgaaaagatctgttttgaaatcaccgtgcattaatctttcatgatcccgttgtttgactttcatgaggtgctacagtgcttgaaaaataattgctaagggtttttcagttgtaggatcatgactaaggccttgaaatgtaaaatagtatggatttttgttccctctatcagaaactcgttgaattatgcagttaaggttgttgcaatgttttcttttgctcaaaaaagttccctacagctctgaagatcttcttatttgcaagtgaccttggccgcagttagtggtaggaaatattgtgtgaaaatgccatagatatgctgaggcggaaatcttccttttgcattgtggcacatcaatcttgaacaacatttttaattgctatcatacaatgtcaggtataggcgcttatgtctttatttaagccaacaaatcagaaacaaatttgcgtgcaagtctgtaactctatgctatagtaatgttgaatatttattttccttacaattcagggtatccatgtgcccaatatgaccactttatcatagttcgtgctttgtttcttgcctactgtgactccttgcatagaaaaatatgcatgccttttatccataggatcctgataaattccatatctctcagaggctggccatttggttgttgcatagtaaagccagag

SEQ ID NO: 56842 - DNA, 349 bp, Populus trichocarpa
  Intron number 1 from transcript POPTR_0014s00280.1 (locus POPTR_0014s00280) derived from phytozome v7.0 (chr-ID scaf fold_14; pos 108037 to 108385 reverse strand)
gagaaaacccgaggcttgatgtaagcacattgtatctatcatcaattttgattctggttagaatgaatgtactaaaagtagttttattgtaaatctgcaattgtattttcaagcagagggatcatctacattagaagggtttattttatttccaatacttgcttctctgctaaataaataaataaaaacggatgacttagataaggtttttttgcagttcaaaaaaaaaataaaaaacaaagaaaacaggatcctttttcttgttccttatatagacatgccattgatggactgctgcattatcttcaactaatttataccttctttggatctgttttctaggaaatat

SEQ ID NO: 56843 - DNA, 794 bp, Populus trichocarpa
  Intron number 1 from transcript POPTR_0004s05180.1 (locus POPTR_0004s05180) derived from phytozome v7.0 (chr-ID scaf fold_4; pos 3927275 to 3928068 reverse strand)
gctacaaggttctgctcaagaaaaccagaactccacaataattaaaaacatacaacagtaaagaacctatataataaattaacaacattgatgtagtaacctattcagtagaattttgtattgttctttatagttgttctatcttgtgttgtttccatttgagccaatctggcttcttgtaatagacaaaactaataatatctacacttttcccacccaaaaactccaatctcaataatatctaagaaaaaagattccaaagctgagatcaaatccaaaggctgacctcgtacaaaagaaaatctgcaaaacatcaaaactaagtagggagtggatgactgataaccattaacccacatacatgtcccaaactcctctcatttttctcttttatgattatatagataatacataccgttatcagaactgtaggacagcctcttcttttttatcatgaaacacaacagagtacttaatttcctctcattagagcattgacttgctccaagcaaaccagtctttgttcctctcaaaataacgcgtaaattcctcgaaattgcgtgtctttcttcctcccaatcacagaccacgtatactatcaccatatttcaaatgctataaaccaaaagcatgtagcaaaagttattacttcaacaacaaaactaccaagactagtatgatgtgcttcaaagaaactgctctaatgactttccctatctttacttttaacaaactcccaaaattttggcttctgtttcttgtagtcacctcctttctagtcactactctccccc

SEQ ID NO: 56844 - DNA, 595 bp, Populus trichocarpa
  Intron number 1 from transcript POPTR_0009s16170.1 (locus POPTR_0009s16170) derived from phytozome v7.0 (chr-ID scaf fold_9; pos 12353252 to 12353846)
ttagtcttctttctccttctctttctctctgtcaggtgagtcttcttcccgagtcaactctagggttttctcttattgattttcttgatctttgatggtgtttattttatttgattacgcgttctttgccttgtttctgagaaatgaaagtaaagaaagggaaatatgtggtctttggttctgattgcataatttaagtcaattagtgtagttaaggtgaattaaaggaagtgtcttttggttcataagaaggattttagctttggattttgtaattctgctcggattggtcttctttttgtagcatttgacctagtgtctgaagggtttgctattgatatcttgtaaagaagcaatctttgagaaggatgataatgataacgtgcttagatttttaagttaggatttgatgcacaattcacttaaaatttaccacctgttcttggaaattgcaaaaggcctaaagggtttagacttaaaaaacctcagaaacttggaagtgttatgttttaaagaaagctgtgatttttatttgtttgatttttgtgtggtaattgcagcttgggcttttgaaggtaaatctttggatttcttt

SEQ ID NO: 56845 - DNA, 550 bp, Populus trichocarpa
  Intron number 5 from transcript POPTR_0015s13040.2 (locus POPTR_0015s13040) derived from phytozome v7.0 (chr-ID scaf fold_15; pos 13161032 to 13161581 reverse strand)
ctcctgtgaggaggcgaggtgctaaatcagccaaggttatagctttttttttagtgtgaatttataggcggcttcttatttgttacatagagttggcaattgcagcctgctatttatgtatgtctaagaacgtggccagcaaagagaccgtcctatgagctgtggagtggaaagctttacatactttcacgtgggaaaatcaaaacagatgacaaactaatagagggaaattctggattttctttgacttgcgctgaattataagttatgccattgctgtatttgtctcttcacgagaaatgatgagaaggacaagaactatgcaattattgatttaacaatcagtcaccttagaggtttcaatgaatgccacttttggataatgaatgactagagaacttgatgtttgattattctgacttatccttcttgaatagacttgtgcaatgcaaaatttgaattctgctttttaaacctgattcctatacattaacaagtttccatgatacttacaggcatttttagagccagaaaccctagaacaacgtgt

SEQ ID NO: 56846 - DNA, 664 bp, Populus trichocarpa
  Intron number 1 from transcript POPTR_0009s04220.1 (locus POPTR_0009s04220) derived from phytozome v7.0 (chr-ID scaf fold_9; pos 4704915 to 4705578 reverse strand)
gcctccctcatcgaatcttgctggctggtatttcctttctttcctccctctttcttaaattttcgcaccaaccaacgccttttttcctctacattttgttcttcttactgggagacttgatttctatggatctgtatgtgttttgcttacttgtaatgtaaacactgtggtaattttttaagcttcactacataagctaagtgaatgagggggtagctgcgtttttttcagatcgtttggggcctggcctgagtggaggaaacatgggtttttggaaaatagaataaactaacatttgtgatggataatatttgatttcacattgcttgttggccattttgagattgagatctctgtaattcatttttttcttatcactttaatgttttgcttggtaaatgttatctaggtttagtttttaaattccatgtggagtttttgtttttttttgttttttgtgatggaagaaacatttggctgattttgttatttatatataagcatgtgactgcaagttttatttaatgggagaattagaatttagcttgaaaatgagataatggaagtgtttttttttttttttgggttccgctaagcttataggactaatggttttcttttcgatgcagtatttgatcacgcatttcagcgattttcagttggc

SEQ ID NO: 56847 - DNA, 870 bp, Populus trichocarpa
  Intron number 1 from transcript POPTR_0014s01090.1 (locus POPTR_0014s01090) derived from phytozome v7.0 (chr-ID scaf fold_14; pos 1014631 to 1015500 reverse strand)
aagaactccatcgtgaagcactcagttcagtttcttatctcgttttctatctttattttcgttatcgatctgtttattggaatgggtttttgttttttttatggttgttttagtgattaatctgactgtgaaaccctaataggcttaagttttggctgttcttttttggggggtttggtttataaagtttttttattggttttttgtggttattgaggtgaatcaaagatgggtttttggtcacgtgttgagagttttgtgcgtggagtgaagggggactgtgtgactatgcgatttgaagtaagtgttttgggtttgtgacattttgtggattctgatgttttagtgtcttgaaattgtcattcttgctatgatgttgtggttagttttgtcaaaagtggaaaagaaattaagtttttgattttgaatttggatttggattttattaaaaaaaagtgtttgattcaggttattatgattgaatttggtacgaagtagattactgttaataacgagaatgatggttagttcttggtgctaacgagagtttgtcttttgaatcttttacattcatggtgcttcatgcgtcaactgtgctagccaaacctgtgtggaagggtgacatgccttaagctttagacactaattcctaaagaatgtcgcatatcatctcgtgctgcattttaaatgctatataataaattactgccattcaaatgatctagttgctgagtcttattgtgtaagtggtggtaatgcatttcattttagaagtttagggtggaaaatgctctcctttttaatatgtttgatttctaatttccaaaaaatgtttatgcagtgtctttgaagcctgagtattttgagggg

SEQ ID NO: 56848 - DNA, 425 bp, Populus trichocarpa
  Intron number 2 from transcript POPTR_0015s13440.1 (locus POPTR_0015s13440) derived from phytozome v7.0 (chr-ID scaf fold_15; pos 13395864 to 13396288 reverse strand)
aagtgattttttcagtttccttttgtttgcattcttgcatgctagtattcttaattatctttaataaacaaaaaatgggttttcttttctttagttatctatggatgtttgtattatgattgtaatgctaggaatcagcacgttcttatttaaagaaaaatgggttttgggttttctccttaatgattatagaatatagtttatggaagttgtttatgtagagtattattattggtgggttctttgtaaattcctgtattttgattgctcgagtgagaaattgggttttcctgtttgtttttttcttaatgatttataccgtctttgcagtgtagtttacatctatgtttttatttagtcgtgagttgttgtaagatttgtattcatgttgttcatatgtattggggtgataacaggggagtaaa

SEQ ID NO: 56849 - DNA, 335 bp, Populus trichocarpa
  Intron number 1 from transcript POPTR_0015s13440.1 (locus POPTR_0015s13440) derived from phytozome v7.0 (chr-ID scaf fold_15; pos 13396291 to 13396625 reverse strand)
gcaaaacgaaagtcagcagaacatttcacaaacaggtaccgatctatcttctctttctctcgtttttctttttataatcactttattactttctatagtatttatctccttattttattgattgattaccattaaatttacataaatgatgcacaatctgtcattttttctaaacccagaaagaaattttgaattttttgtttattcttttaattctaatgatctgttttattatttaagtgtatgtttaatctgattttatcaataatttgacaaatttctttgtctttgttgaatcaggtcaatctgcagctgtttcgtagccgccaaaaaga

SEQ ID NO: 56850 - DNA, 1041 bp, Populus trichocarpa
  Intron number 2 from transcript POPTR_0009s13700.1 (locus POPTR_0009s13700) derived from phytozome v7.0 (chr-ID scaf fold_9; pos 10873112 to 10874152)
cttaaggttcttcggtattatgtttctcttttaaaagcccggaacatggaaggtacttgtgaagtcaaccggggttgataaaactaattggttttagctgatggagtgttgcttcttggcgaaaaccttttattggggtatcaagtttaggtctttttctggttcctgtttgttccctggaaagttttagaaacgtatagataattctagattgaaatttgtcaagtcaacgaagtcctgttttttaagtaattggagctatcaagattttttttcctttgcttagaaacttctggagtggaaggtcaaggttcagggtttttggcatctgattaggtttttgtaacccgagaacgtggaaactgggaggaaatcgaacattttcttttagtctgtttatggtaaatttggcattttgtagggactgatagggagaaccagtcaactgaccatgccaattacaggctaatcaaagtgttaacttgggagttctgttaggttggttacagaatatgggaacaaagtaagatttatatttgtaatttgtaataggttaaacaactgaagttagcctcacacaagttaatgggttagactaggtgggttttttctacttggagaccactaaccagttctacttttgcggttatttttggagagtcactgtgtttcattgcaacattcctgaaaagtgcttgctttattcttttgagttgagcaggactagaagaaaagagtgttttctggattctctcttcggttttggttttcacaaaaattgcaatgctgcttttaacgaactgaaattttctgttttcaaagattgaatattccctcacaagcataagctttgggaaagccctgttatatgattggtgtcatggtgattcagcacttttgcctttcttttccatgtaattttgataatattcaaatatgaaatagggaaagaatggttttaacatcaaggtttctatttgttgtattttctgtaaatgggaaacaggattacgtgccaaccgtgtttgacaatttcagtgc

SEQ ID NO: 56851 - DNA, 304 bp, Populus trichocarpa
  Intron number 2 from transcript POPTR_0009s12380.1 (locus POPTR_0009s12380) derived from phytozome v7.0 (chr-ID scaf fold_9; pos 10120926 to 10121229)
tctactggtgcttttattcctgatagagttgccgtgtaagcctcaaaatttcttttcttttttgttatagaccctgtgattataattaaaagctgattttttgttttgattaaatgtgaatttgacagtttcattcggtgttttttcattttttagcttgatttttatgctattattcgagtttttttagcttgattgtggcttgatggatttgaattgaacatttttatttaggattaaaatagcaagatgggttttgttttatgtggattatgaattggttttgatgtggcaggtattgtaa

SEQ ID NO: 56852 - DNA, 1011 bp, Populus trichocarpa
  Intron number 3 from transcript POPTR_0009s12380.1 (locus POPTR_0009s12380) derived from phytozome v7.0 (chr-ID scaf fold_9; pos 10121272 to 10122282)
tgaaatctgtagtgattggtaagttgtgtgcctttgagatgatttagtttgtttgaagcccttttctgggttctagttcaggtttcgtgaaagggtttttgttctgtgatgctgtttggaatttgcttgatgagattattcaatgccatgatcacgtgggtgcttgtaagttctagctaggagctcgcgcagcttgctatcccaaatgttaaggagactagaggagtttaattttattcttctttttgcgagaaagaatatgtttacatttataacaccatgtttccagttgtcagttgttttttcatatttattttcaaaccgaggggaataggcattagattttctgtgcaaattgtctctgggattgaagtaatagatggattacaattgaattggactacagtaatgttttctacagttattttgaagttgtttcgtcttctggtagctaaagtatcttagatttttcttgttaagtgactataaccactctgcttttctccaaaagatatcacacatgcatttgtgctttctgtgtaagagcaattgtttacgtgaaggacagataaattgtcctgtagttttaactgaaaacgggagccttcgctattaaaaagtacaggagaaggtcgtcatggagaaaaaaaaaaaaaaactctgcaccgtgtcttttgcttgcatgtttttcttcccttttctttttcaaatttcctctggcatgcctttgatcacgagatttgtttctaaccttcacttcaaagggatttcttatattgaggtccgaggctgttaacacgctcctagttcagaaggagttggcaacaagggtatagagacttatggtttaaatgccttttcttatgtgattgtctgtgcatattcatgggatgtttttaccagagagctgttttgctgcagacatatccaatttatgcaaatacattgggaaaacaatgcatcattcagcatactactttttgattcaggtttcatcctgcttgtatagaa

SEQ ID NO: 56853 - DNA, 889 bp, Populus trichocarpa
  Intron number 1 from transcript POPTR_0012s02230.1 (locus POPTR_0012s02230) derived from phytozome v7.0 (chr-ID scaf fold_12; pos 1862454 to 1863342 reverse strand)
agactttccaagattacacaagacactcgcaaaaggttagtatagtttcctttttcattgcagaaatctttctttagggtatggtttttccttcgtatttattgttttgactgcatggcatgcctgcagataatggaattttggttggttcctttgctgtctatgttttctttattgggttttcttgaatcttgcttctgatggttgtgagaggagatcgagggatggaagagtttctactttctaatgttaatgcagttcttttggttgtttctttagagtcaagagtttcttgatcacttctacattttctcagtaaccaaaaaggacgagatttctgggtttcataagtttgaatcatggaaagaatctttcattttcatttttggtagagaattgactaaattgattttcataacctaactttagaattcagcgctagaaaagtttttttttgaactaaatacacaatgataaattacattttgaccagattcaccgattccccatttcggtttctgagaaaactgaggaatataccagaaaataaagattttgagatcttaaatcaaatcaggtcatgctgttgttgtaggcccagatgatgaagacatttttttttcttaaataatcgtttactcttcatgttttcctacgttgtttatggaaaacaattaatattataatattttatcctttctctaagatatgttcaccctagttagtgcttgaactccaagtttctctgaaatgaaaggaaaaaattttgcacttgaaatgccagaatcattttcttaaggtatcaatcgtgaccttttggtctagtgatgccttttttttggcctcttgtacagagaggtttcgagctgcgaaaaggctgcagataatc

SEQ ID NO: 56854 - DNA, 919 bp, Populus trichocarpa
  Intron number 3 from transcript POPTR_0004s18160.1 (locus POPTR_0004s18160) derived from phytozome v7.0 (chr-ID scaf fold_4; pos 18154901 to 18155819)
gctattttgcgctctttattttatcaggtgaggaatttttgttcttgaagagttcttttagttttgagttgtgatttaatttatattcataatgtgatcggagggtttttcttcttttctcaatgcgtgaaagaaatgggagtatgatttgatttgtgttttgtaatttcagctgtgattcaacgatgaatagttattacatatgttgaatctgcatggcataacaattttggattgagtctgggactaaatagtttgaataatatttgattaaaagggttgttgtgtgctgattatttggtgagggcgattgtgttttactttgtcacctcgagtttgaatgggatagaatgtccatggatatatgaagctaaatggaactcagctacaactagaatccaagttcttatcaatttgaaaatattgtgaatagcactgctgcttatgttgatacaatttgaagcattcaataaaacaggctaatgataatgtataaaaaatgtcattccatgcttccgacattttgtttcattgtaagggtttgcaccgtttctacagtttcacatgcttataaataaatgcttgatgtggaatatctgattcatcttttctgttgttcagtttcaacttttggagctgttttggacatggtaacagacaggtattttctttttcatatcagatacacaccaaatttgaatttttcttgctccttttcagttcattttggatcttacacgtgtctgcgtgactaattttatcaacttgtgctttatccaggattagcacagcttgcctactagtaattctttcccaagtatacaggcaaggtttttctacttgtttcatgttcattgcatttgaagaacttgtactaattatatctgagacttttggttgaattttatgcaggcctggc

SEQ ID NO: 56855 - DNA, 522 bp, Populus trichocarpa
  Intron number 1 from transcript POPTR_0009s09040.1 (locus POPTR_0009s09040) derived from phytozome v7.0 (chr-ID scaf fold_9; pos 8123808 to 8124329 reverse strand)
ccaccattgcaggggtaccctcaaggtaacataatatcttttttcatgtttaattttcttgatcattttgtttttaaccatgttttatgcatcttctttgaactgtgatgtctcaggaaaacactcttcttttcagaattgtctttttcatattgtttgccaaaactactttttccatcaagtttccttctgatcagatccaacaatactcttctttgtatcaatctagttccaaattctcaagatttcaatgcttgttaaaactttttttttttttgtgatacatgcagctagcaacatcttttctggctaaatctaagtttggatttctgagaatcatctttcattttcttatttcttttgaaaatgttttccaatttctgttgtcatggaaaaggtatgttaaattgctggtcctcaaagccaattaattactcattaaatttcttgatgagcactcgttgacattctgttttatgttttgcagttaagcaactactgttcttttgaaggggttctgta

SEQ ID NO: 56856 - DNA, 431 bp, Populus trichocarpa
  Intron number 1 from transcript POPTR_0011s13150.1 (locus POPTR_0011s13150) derived from phytozome v7.0 (chr-ID scaf fold_11; pos 15863738 to 15864168 reverse strand)
gctgcatcagaactaggtatggatttatcctcagactacaaaattcagaatttcttaattgtagagaatcatttattgacttggctaactgcctaaatgattggttctaatactaaatttgctcaagcaaaaggtaacatagaaatcaaatggcattaaaagcaaattttctgcctcctcctcttctttcagggcatcctattgtggttttacagaacatcacatgacatgaaacattaaaatttacgaatctgttatcactttctaacatcatagactgatttgataactgaagtggaaggattccatcagctgaagaaaatttcccacccattctaattagtaattactaaccaaaaacatacaatggccattttgcatttcctgttatagttttttaacttcagtttctctctgatacggtgcagata

SEQ ID NO: 56857 - DNA, 526 bp, Populus trichocarpa
  Intron number 1 from transcript POPTR_0014s05830.1 (locus POPTR_0014s05830) derived from phytozome v7.0 (chr-ID scaf fold_14; pos 4367470 to 4367995)
ttctctctctaatcttcgatttccgcactgctcaggtacacaacacaggccttctccctagctttctctctagtcccctctctttagtttccatgaaaagaaaggaatatgtatatatatatatataaaaagtaaaaatcctaaaggaatttagggtttttcgccaaattttgtttttagtgatctgtttatttgaagtagcaatatctgattttacttaaaaaaatcttttgtgtgaattgacccacaagtgatatcgataactcattccatagatagttttttttctctccctacaataactagttatttggggaaaatcccttaatcagctgctcatgtatctgtgtcatctggcaaaagactccctataaatattcattaaacgtacccagtggctattgagggtaaattccggaggttcttccaagaatctttccataaattagcattactctttgatttttctaattgattttatatatgtgatacagattcgcaagttcatcactagctagctgtcacg

SEQ ID NO: 56858 - DNA, 797 bp, Populus trichocarpa
  Intron number 2 from transcript POPTR_0009s05010.1 (locus POPTR_0009s05010) derived from phytozome v7.0 (chr-ID scaf fold_9; pos 5214511 to 5215307 reverse strand)
ttgaagtccgagttggataattttgtcaggtagcaatctatctgctagaattctttctcttaccaccgatccagtgtctgcatttttttgtgtagttttctttctttgcataaacaaggggaattgctgtaaaactcaaatgatcttggtatgcaatggcaattagagtagattctttggctaattttaatcacatcagatcagaaaccacgtaagatgagattactggtttggagaccaaaatagaggactaaaattgctggaaaatccctatcaaatttgttggtttcagaaagtccaaaacatttgcgtgtgagacttttatcaagcttgattcgtgggaatatcccttttctaaattacttccgtctacactttctacaatgttttgctaaaaaaacatgcttcttttgtatataaaatgctcttgagcgtgtctgtgtgagcctttatatatatgatcaaaccagcatgttttaatgctaacctgatcctagatcctttctggttgtcaatagtttacttgatttgtgcgagcgcagtgtaatgaatgtttacaaatttgaacatcaaaatgttagagaagtcatcacatggtaaccagtggaatattatttatcatgtatggcatcagtgcatcactgctgcgaaatgcaatacaatcgtggctatttgaaaatatacaaacattaaaatgtatgcagtagtttgatttattgccatcgcttttattggtcctgatgcttcttatgccactcgcaggcagggcgctcgagtctctacaattggagactcgt

SEQ ID NO: 56859 - DNA, 719 bp, Populus trichocarpa
  Intron number 1 from transcript POPTR_0004s22100.1 (locus POPTR_0004s22100) derived from phytozome v7.0 (chr-ID scaf fold_4; pos 21036798 to 21037516 reverse strand)
tccaccagtgacttcgcttctgtcactgcatttacgtaattaaattgcttgccttcttcttattctttcctatcaattgcttgattctgctttcatgtttatttaagagaattataggaatagttcagattcaaaaccctaagtttagtattccgttgctgctgctatgttaaagcagggaaggtgaatgtttcaaatgccgtagcaagtaattacaactaattatgatgctagaaaaaaagaagaagataaaatttatgcatgttgtttttagcattttgattgatttgtatgggtcgttgaaatttatgcagggtagttgcattggtacttcataaagaggcatacctctctaaagagcttatgatttagagtatccttccttgttttgcattagctttccttgtctgtatttcaatgtgatcagcagtttggaaatactaagcaagtctgtttgacatgttctggataaactattgataagatttcattgttgatgaacgagttgttttagcccaaggactgaattggttgtgctttgaatgtcttctctgtgcaatcatgctgctgaattttgctacactatcactaatatgatggaatgtcaaatttttaggcgaaccatcatcttaattttttgataacatcaattcttttcttttcttttctgatctgcgatatcagctacctagttgcggccgctagcttgcagtgcttgt

SEQ ID NO: 56860 - DNA, 721 bp, Populus trichocarpa
  Intron number 1 from transcript POPTR_0015s09400.1 (locus POPTR_0015s09400) derived from phytozome v7.0 (chr-ID scaf fold_15; pos 10621779 to 10622499 reverse strand)
ttcttggcattcttgagttgctcaaagttcacagggtaaattactaatgcctccttttctctcctttatttttatttttcatgtattttggctattgtttgtttgctttgctttggtttattattatttttttatacttgtttattgatctgggttttattttgaaaatcataatttgtgttcgatattttttttccatcttagttgagtctttttttcctctctctccagtaagctatgtattttaagcaatgttttggttggtaatattttatttgtgtgcttaattttttagaaaatgtaatggttgttatttgagactcgaaattcgggttaggtggtatcgaaatatcaacttgcttaatgagatgcaaacgacagcacaaattttatgcgttctagttattcagattgggagtaaaaatgatggtttttatatatgcctttcctgaagtacagtagtttctttgtattcgagcatttttgtacaaatgatgtcagtgcttttgatatctgctcatttccaattttagttgcgatatgatcaattttgaatggccatgttaggtctgcctcttctttttacatgtgatcttattcagttttaattgaagaaattttgtttatcgttcaagatttgcgaatcaacatggttgcatgttctgatttctcaacgttttctgaatgccatatttgaatgtatttgggcagcgtgtactgt

SEQ ID NO: 56861 - DNA, 497 bp, Populus trichocarpa
  Intron number 2 from transcript POPTR_0009s09650.1 (locus POPTR_0009s09650) derived from phytozome v7.0 (chr-ID scaf fold_9; pos 8489625 to 8490121 reverse strand)
ccaatgtatgttaaacaatcattattgatgtttccttgctctagcaattaaactccttctattttctctatggttagatgttaatagacgattaggatcaattggtttctggggccccacattcggaatttatgtgttttatttgatgaaaactaaaccgaaactgaactaaagctgctggcattgttacctttttaggggctaacaaatagaagaaactgaactcaaactatgtagttctataacatgattttgtaggctttctacttgtgtgttgcttgcacttccatctcattattgcttgtaactaccccttgcattttattggtatattatttctagtttcctggacctatttaaacttcagggacttgaattataatgttgatcgattaagtctatggaagaggctttgaaaagttttggcattcacatcctaatgatttgcatttgatgattaaggtttaccaactacttggtgatatcaagctagaatt

SEQ ID NO: 56862 - DNA, 785 bp, Populus trichocarpa
  Intron number 1 from transcript POPTR_0069s00210.1 (locus POPTR_0069s00210) derived from phytozome v7.0 (chr-ID scaf fold_69; pos 36445 to 37229)
ttcatcatttgtcctctaatttttcaggtctggtagctgcagtttttcttgcttgatttagagaggggctgctggattagtgtttgagtgttgcagctttccttcttcagttttgttttttttcttcccctgcatgcttcctcatgggttctgttttgttgctccaatttttttctctttggtcttgcttaatctatgtctttgtggtttgctctttttatgaaagattgatgactttgcttttgcctttttccagtttattttatctttaacagcttccattcttccttcggagatgttggttaggtttctttgtttaagttgatctctttaggcagattcgcttctgtatttttatttttttttgccttcttttttcccctcctatatgttcatgcccaaatttaggcattgtttgctgtattttccctgcaatgtttgtttaaattcaggcgatggttcatgtttatgtagatttttgtgtagaaatttcttcatccctgtcatgttaaataatttaagggtttcaaactctttatagtttatgcttaacgagattgtttgaagcatggtcgaagggaaaatttcccacctgctactgtgggaatataacaatggcttctgttactcagtcaaaaataaaagagtgaataccataagcatgggtattgctagagctaggaattcaatatcaatacttttgcttgaatgttatttatggttatgacttattcttttccattttcacagtttgggtgttagattggaaggcagcaacacaccag

SEQ ID NO: 56863 - DNA, 343 bp, Populus trichocarpa
  Intron number 1 from transcript POPTR_0004s13950.1 (locus POPTR_0004s13950) derived from phytozome v7.0 (chr-ID scaf fold_4; pos 14361710 to 14362052)
ttcttaagaatttccaggtgagctccgaataaactctctcacgctactagtcagagtatttttagaataaataatccaaagaaattttgttagttttcttttcttctttccttgctagtttttctatttttttcttcttcttctggtaatgacaatattgccttacttaataagatgggtttgaaattggagtcccgtcctctcttctttgcagtaggtgtaaggaagcacgagaccattaaacacattctataactcaaaagcctcttgataaatgttaggttttttttttttttttacaagcacagcttatcaaggaaaaccaaattgatctaagaatccc

SEQ ID NO: 56864 - DNA, 664 bp, Populus trichocarpa
  Intron number 2 from transcript POPTR_0011s04610.3 (locus POPTR_0011s04610) derived from phytozome v7.0 (chr-ID scaf fold_11; pos 4556373 to 4557036 reverse strand)
ttgtgattcgtcagcttgcagaaattgaagcagtaaaaaataaataaatagggtttctgtttctcatttcttgttaatcttgattttattttcagtagtgattagttacggttgatgctgtggtgttctttgaaggaaatgaaagatttttggaaagagagcgagcccttcacttagactagccaaatgactgtgataagtactttgaattagggttttgtgactcttgattgatttgatgttattgaagtgtttaacctcatgcattgttgaagcgaatgaaatttgattattcaaggttttgtcatttgtcaactataaggtaaatattgttctagaagagggccttgtgaattcaatgaaaaagagtatttttttttgcacttgccagataaccatgacaagtagtttgagttacagttttgttagattagatacaaatgggaaaatacgtgccaatgctttgttttttttttttagtttgcaaaaatgggaaataaaatatatgaaattttgcgtttacaccgcttaatttgtgtggcattgagtgtacaaaatacagactggagcaaatttaatggaactggaatagctagataggtttggatgtttattattgttgtgcacaggctacgtcgaaaaaggtgattacaagagaagagtg

SEQ ID NO: 56865 - DNA, 405 bp, Populus trichocarpa
  Intron number 2 from transcript POPTR_0009s09100.1 (locus POPTR_0009s09100) derived from phytozome v7.0 (chr-ID scaf fold_9; pos 8165122 to 8165526 reverse strand)
ttacttgaaaaagaaccacctctatactttctctggtatgcattgctgcttccgcgcccccccccccccccccttcattttaagttcacagtatggtactagtgcctgaaaaagagaggggaaaaaaaacagaattctattaccagtaaaatgctgaaactgcttacgaaatcctgaaattctaaattgatttcttaattaaacagtacttaacaccattctgctttcactgtgacgtcttgtctcatcaggggttaagatagggtcaagggtgtctgcgacttctccaaaaaaaaaaaaaaaaagaagagaaaattgcataacattctgttcttcttttgtgatttgatcatgttaatatagtgctttgagttaatgcagcctgggtacaagttagcgagggaa

SEQ ID NO: 56866 - DNA, 627 bp, Populus trichocarpa
  Intron number 1 from transcript POPTR_0009s06270.1 (locus POPTR_0009s06270) derived from phytozome v7.0 (chr-ID scaf fold_9; pos 6076234 to 6076860)
tgggtacacagtcaaagcctcagtgcgtgacccaagtcagtcgtgctaactcaatctctttacacttataacttctatctttaacttccgtttttatggattacacgattctgggtcttgtttttaagttgattttactctcaaagttttgatcttttttattgattcaatgattatgtaggttcttgaatttctgggaacgagtgttgttttttggagtgtacgatgttggctaaattttaacattggtagaatttaaagaaagcagtcttagagtggtttagttacctttgaataactttgttaattagtaattacaattcttaattcgagcagttttaattgatggctgagtttgtgtcgggatgtagagttttgaattccaaaaggttttagtgagtcaatccaattagttcaattgatgagaatgtttcaataatcagacgttattcgatgtggtctccgttagatccatccgagaaacttcaagtgtcattttggcaattaggctctgcatttctggaaaaacagaaagttttttgttctatggaaagacaaggtaacaatttctccttttgagacactggttcctacttatttcttccttttgctgctttctgttcatag

SEQ ID NO: 56867 - DNA, 404 bp, Populus trichocarpa
  Intron number 2 from transcript POPTR_0009s06270.1 (locus POPTR_0009s06270) derived from phytozome v7.0 (chr-ID scaf fold_9; pos 6077023 to 6077426)
atcctcaggtgctttcctgtatacattcctttgtaccagtataaatttattttcaaattttaccgttactttggttgagttgttactttcagatatcaaattgcaaccagtaatgtcattttttacatgcttgatttcgtttgtttttggaagtagtcatattttcccgcacatttgtttatccatcttgctgcctttttttcctggctgcaccacatttgcatgataatctctgttataacatccatcattgaaagagccagcatttcgactttgagtgtatttccactttctcaatgattcaaagcaacccaataattttctggatattttctttttctttctgctcttttttttccttcttttcaggcagaacttgttgaccctgcattgaagggaacagt

SEQ ID NO: 56868 - DNA, 966 bp, Populus trichocarpa
  Intron number 2 from transcript POPTR_0009s02820.3 (locus POPTR_0009s02820) derived from phytozome v7.0 (chr-ID scaf fold_9; pos 3577725 to 3578690 reverse strand)
gagaattcgcaacagttgacccggcacttatagatgtacgttctttttggccgtgctctttatttgctatccctgggtaaatgtctgagaaagttcgtacctctaagttttctgttgtccccagtttaaatttttgtgattgcatcttataaatattttcatcattgattacatttcttttctaaattgacaatgaaatctcagcagcaatatgtgtgcgggtaacaaaagatgttacctgtttgataacttatgaaactatgtgtagaaatagtcataaatttgtggctttatctagtaataatgatttctcatggcactctcgtgaaacaaatgtggccttctttgatattttcagttcaaatccctgtaatggactcatttaccatgggaaacatgttctaaatctctatgaatcatcttatgtttctttctcgtgagtttgaaacaagttttgttcttctctctctaaattgttatttgtcttaatacgctgtaagttttttttttttcatttactgttttagatgtttctttttccttccttgcatgtaaagtttattggcactgatgaagcaactacttgcgtgggccttgttattcgaaaccagagaaatggaatgtaagaatcgattttccaagagatgggaaagtgctcagaactttactgctgatgatattaattgttttattttttactctgcattttggcattttatgagttgcaggacttcagttgcccatatggattctacaaaagttgtcgatattggcctcgcccaaatgttgtcaattgttgttgacaaaaattttgatgatgacttggatgtattaatctattccttttctacctcacaattttgttgctttactcacaacttctcttcactggttcatttatttttcttggagtaatccattcttgtgatttttaaatgcaggtacatttgattggtggttttgaag

SEQ ID NO: 56869 - DNA, 849 bp, Populus trichocarpa
  Intron number 1 from transcript POPTR_0009s08770.1 (locus POPTR_0009s08770) derived from phytozome v7.0 (chr-ID scaf fold_9; pos 7916977 to 7917825)
ctttaaccccaatactcctgttaatagcccttcaggtttgatttctttcactgtttccttttccttttttttttcttgcagtgaacaaacatttaatacatcttaatacatcttttattgggttttgtttagtcttttctataatttaatagggttttgctatattttattttttattggaaaatagcttatgaggttgtctatggtttgtttgggaagtaattgaaaggataggaatttgctacatcttgtgctttttttgtatgagattttaataaaacgatggcttaatgggttgtcaatacttggtttggcaattaagccttccatttgtttaattatgtttttgttttgctggaaactagtttgtgggtcaattttgcaacaaaacaggttcggtgttttagagtgaacgtggtagatatttcatgttaatgttgcccttaagtttacttgaaacaaagagcttctgcaaaaatcaccggacataatgtttcaatcaagttccctcttggtcttcgggaacgtttgggaacgcggctgcgactgcgtttcaaaaaaatttaatttttttttaactaaaatttaatatgatttgtatgttttggatcgttttgatgtgctgatgtcaaaaataatttttagaaaatgaaaaaacatcattgacatgtattttgatacgaaaagttatttgaaaagcacccgcaaccacactgccaaacacgctcttcaacagccaaatagtaaaagcttgttttgttttaaaattgatatcttgattctgatcggcagctttttgttttttggtttgcagattatccgcgaagaaactctattagcagagacaat

SEQ ID NO: 56870 - DNA, 933 bp, Populus trichocarpa
  Intron number 1 from transcript POPTR_0015s10420.1 (locus POPTR_0015s10420) derived from phytozome v7.0 (chr-ID scaf fold_15; pos 11363172 to 11364104 reverse strand)
tcaagaagatcaatgtaaccaacccccccttattttaactctttctaaatttgttgtggttgttttagtgatcaaagctaagatcttttctgttaatttttctgtgattggcgtgattggatttttaagattcgttcttgatgtttgctattactagtcatggcatgactcattagacgcagtagagaatttggagtgattttaatggggttaggttttgacattcaagaaatcagtatgtgatgtttattattctacctataatcattcatccattcataacatatctctttgaagttgtttccttgcccattgcttggagatgatgttttgaaagagaaatccaaataagaaattagcaataattgagttgttaagtaaaatatactgtgttgttgaatgacaataagatacacgaatccattaaccgagggatctcttttgctataatttcagatcaatatttgaaaacttcttgttcttttgtttgtattgcccttgtcttctgtttattgttttatttattattaatatccttttagattgtttttttgaatggagatactgttttgaaaagaaatccaatcaagaaattagcaataactggtattgaagaattgtgctgtggaataataataagatactggagtccattacaggggtaacttttctcctacaatttcagattaatcagaatcatgcaataaaacatcatgctgtccgtttaatggacagagcttaaaactgccttttctttaattatatgtatttatatcttgcacttgagagaaagagtggataattcttccttctgcttgtgttttgaaatttgcatgtataatattctttttgttaaatatatttgatttatagatgtcaagctattgatttgaaagaactatatattcagggtttcttccgcttgttggctgt

SEQ ID NO: 56871 - DNA, 1007 bp, Populus trichocarpa
  Intron number 2 from transcript POPTR_0004s13060.1 (locus POPTR_0004s13060) derived from phytozome v7.0 (chr-ID scaf fold_4; pos 12386724 to 12387730 reverse strand)
attggtctaagattgctaagaaggagaaagttgaagtaagtgattattgttgacccacactcattgttactttagtatttttatgataatttgctgttaaagcttactgctatgttttgcttgtaaaatgttttttctttttgcagaatgaatattgctattctttgggtggtttcggtgacaaattttcatttttaggttatgcccaagctgcttttagttttttgaaaaaaaaataaacaggttacaggttgtcttttagcatatcttatacaatttttatgctgctcttttgaattgactgattcattgttgacggtagttttgatcaattatggtactaaatttgaatctttctacatttgtaatggacagcatagtatgatcacacatttgagcattatctgctatatgagttgggttcttggttagatccaggtgaattgagcaccagtaaaacattttaaattgggccattagggaattgtttgtatggtagtgatattgacagtcatagaaagacatgagcttggaaagggaggatcaccaagttagatatagagacactgataacaggtaatgaacgtgtcttgttcaattgatgctttaaggaatcctttaagtaccatttcttgatattattttccaatcataacagatagtaataagttatgggtctattctctgatgtccagtttaaatcatgaccgatttgtaatttctgttacaaatattatcttctcagaatgtataatatttgctatttctaaaatgttccttgtaaagaattggcttttgctttttgtatagaatattccattatcttcccatgacggttgggaacctaaaatgattttgttatttctatccttggatatcctagggagtcacccttggaggtggatccaaatatatttggttgatatttttccctgaaaaaaaaaaggaaaactgtatgtttctgttaaatatgtttgtttgacgcacaagttttcttgttctaggtt

SEQ ID NO: 56872 - DNA, 469 bp, Populus trichocarpa
  Intron number 4 from transcript POPTR_0014s18410.1 (locus POPTR_0014s18410) derived from phytozome v7.0 (chr-ID scaf fold_14; pos 15507632 to 15508100 reverse strand)
aatactatcgataaagcaacaggacatcatagggggtatacttcttactatctattctattgcctatagactgggcggtatatttctctttctgtctatacttttgacttagtatgtgttttataattccctgagataagattatatgtgattgtattttccggtgctgagtaccaggatgtgctcttctttttttcctgcctatatgtacttctcatttgtacgttataaccagaagaaaggtgattggaaaaataattttgctatattatatcttcattctcaaatgcagattttattttacgttgtgaaatttaaactagattcttaatgacattgtttgttcaagataacttgtcatctttgcatttgagtgacttttgttaattacatagaaaccttgagattatggtggtcagtgagctaaacctaattttgccattttgttgtggttttacttttcaggttc

SEQ ID NO: 56873 - DNA, 756 bp, Populus trichocarpa
  Intron number 3 from transcript POPTR_0004s13480.1 (locus POPTR_0004s13480) derived from phytozome v7.0 (chr-ID scaf fold_4; pos 13633942 to 13634697)
gatacttctgcagcttcctctgcatcgaaacctgggtatgtttgcttccatttttctttggtatattctctattcaagctggttatatattctggatagcatatttggttagattctcaggatacttaactctagttgtaaagttacatggtttctcatgaatattaagaaaagaagggtaagagtaggagaataaatgatgtggatggttgttaggtgaaagcagttatgtcgatgagaaatttgtagtttcgttttctctgaaaattaactggaaggatagatgaaaatgtcagcagttttcacgaaaggctaattccttaattgttctcatttttaaacaagataacttcatttatttttatgcgatttgaatgtcaaatcgtgttttgaggtgtttgctttcttctgaacatttatctaggagttgtaggatatggtttaatgaagtcacgagctatgcaatagtgatactaccacaatatcttgatagaaagagcatttgttttgctctcaagtttatatctctttgagtaagaaactacagaaaattgggcaattagcccagctctagtcatgattgttgtaggcttccctgcattggttggacaggctatctggcccactgccactcgtagtaataaactaatatatcccattgcacatcttgcccttgtgcgcgctatacttgtgggtaataatatttttgtattacattatgaatgtgcttaacaaatctgcattttattctcaggc

SEQ ID NO: 56874 - DNA, 784 bp, Populus trichocarpa
  Intron number 1 from transcript POPTR_0011s11850.1 (locus POPTR_0011s11850) derived from phytozome v7.0 (chr-ID scaf fold_11; pos 14639275 to 14640058 reverse strand)
ggtttcggtgggggtatttaaaaatatgataattgttgtttttaaaaatgtttttatttagaaatgtataaaaataatttttattttatttttaaaaaattatttttaacatcggcacattaaaacgatttgaaaacaaaaaaaattaaatttaaatcaatttgtttttaaaatttcatggatcgcagcttgtattatgttcccaaacgataatatcaaaactaataattctacgttgctaggtcacaattattgtgttaaagcatcaaaattatcacatcaacacaattaaaaaatatttaaaaaaattaaattttatatataaaaaacatgtattaatcatgtattgtcaccactctctaattcaccaactagtgacaagtgtgtttttcttctagaccccggtatttagaattttattgaatcctaactaatccggtcgagctagtttaatttaataaaaaataaaatgtttttcaataataatatattttattcataaaactcaaatttaatatcttatttaaaaaaaacaaaaatcaaatcacttgaccaaccactatttttgattggtgacaagtgttgatatagagtttcatcgtatagtatataaatatatttttaaaagataaagaaaggaaagcaataaggtccaagttcaatcacgagctaacaaaagcctataaattttaatttaaaaggtgtagattaactggtcaatcctgaatttgtttcttatagttcatcagttggtgaggttggtgttaacagacacgagtggtca

SEQ ID NO: 56875 - DNA, 843 bp, Populus trichocarpa
  Intron number 1 from transcript POPTR_0011s10230.1 (locus POPTR_0011s10230) derived from phytozome v7.0 (chr-ID scaf fold_11; pos 12690201 to 12691043 reverse strand)
ctgatcttcagactcttaagcaaaatctctggtcggtgagtgccctttttagatatttgttgttgagtagttaatacatgttagatattgtgtagttagacatctgtaggacatagttattgcatgctattgagttcttccatgccaataatgataggtgctgaattttcatattgtgctttatgtaagttgatggtgttttatgatttgttgattcttggaatacggatgtggttttgcttcaaaatgccatcttgaattgttgtgttagtctgtgactgtggtagttatccttgtatgtaatttattttgctgggaattggctcttcttcctcagtctattcctcaagaatttggttcccagctcaagtgcatgctcattcatcttcattccatagaaagatgcattatgatttatctgaatgttaggatgatgcttaatcagtgaatagtcaatgtttgcttgtagtagaatatgtcctagtagatcaatgaagaatgaacttttaccaatatattaactagtggttagctgatagaccactacaaatgttctgagttgatataagttggcatagcggtagcgtgtaaaaatttaaattgagcactgattttgtactttagtacaagtaaacaaggttattttggcacaagatgagttcacaaaagagggccactgcataaaaacttttacctgcttccatgttctacttgtttgttttctattatttgttaccctctatattgatgaatcatgtacctttttgcactggatcagaatagtttgtcttgttctttatatccagctttttatatttctgatgaagatgccctggtagattg

SEQ ID NO: 56876 - DNA, 1009 bp, Populus trichocarpa
  Intron number 1 from transcript POPTR_0011s10480.1 (locus POPTR_0011s10480) derived from phytozome v7.0 (chr-ID scaf fold_11; pos 12927680 to 12928688 reverse strand)
ctgggatttccttgatcttaaccagttttggatttgtaagtcaatcttgtaacttacttctgtcaacccttgtttgttttaaaattttctattttcttaaacaaaattggagcatggtttatgaaagatttgatcgtgatcacttgttgttgatttcaagctgtttacgctactttttttatctgggttttctccattttgttagatcttcgataaaggggaaaactttctgtattttctgttgctttgtagtagatttggatgatccacatttgttgcttaattggatctggatcctttgtattaagaaaatgtaacttggagccattgttcaatgtcagattcatgtttggtttgttgaaattggtttatggaatcattcatttgctagaaactttttgtgtggatctattatgaattgttgtcttaattactttatgtgggatctgatggtatggtggtgatctttcttaattttgagattactttttggtttgctaattgtttttatgttttactttcttgagatttttattccatagataactgatgtttggaatttacgtacttagtttcttgaggacatggacatttcattgctttagatttagttgaactgccttaattcttcatcatattttaactggggaaaatgagaatcatttttggtatatcggtgactacttgaacctattatataattatttgttactattttactgttgatctgatcattttgggtgtgcattctccctagattgccgtcagatctcgtctcttttttccttttctctccatgctttacttaatgtgagctgtggtagttggctattgtttttctcctgagatagatgctcgtggacccatctatatatgcattccttctagtttgtcttatatggtgatcaagatctgcatttctattttaaatctgggcaaacattattctcttcaacttacagttctagggttaaatttgttttcttttccttgtagaagttgttttggc

SEQ ID NO: 56877 - DNA, 920 bp, Populus trichocarpa
  Intron number 1 from transcript POPTR_0011s08280.2 (locus POPTR_0011s08280) derived from phytozome v7.0 (chr-ID scaf fold_11; pos 9376001 to 9376920 reverse strand)
gcccgctaagaagctcgtcatcaagctcgtcaagggtaactactaacaactgctcaatcatgggttttacttatatattacaaaattaatgtgggtttttggtgtgattaacatgatgggttgtgcagtgtagaatttttttttggatattgggatctcgttgctgcttagcttaacatgttggtgtgatttcatcttaggagtgaactgagctattgatttcagtgttttgattattataaatacaaattttatgagaaaaacatatgataactttcaatttttgatctgggaaattgattgcagttctgttagacctcgtagcttcttttgggctttcgtttttcagaatttgttatctattcaatttgctgctaagtatttactccttgtttacatgaattcttttttcttcataataattctatgttcatcaatgttagtttctatatatactatccaaaagcttggaaatagctatgattgtttttcgttcgattatatgtctttctaacatgtcttctatttctcattaacttagcacttcctgttaacacttcttttttagcccaaactcttcaaggtcaattgtaacacctcattatcgtgcatgacgatggggcaagtgctttggtacaccgtggaatgaatgaattcttagggaatgatttgtaaacattaatacagtagattctagttgatgaattggtgtttcattcttcattaatgagctattttcttctgcttccaattttgttatgattatgaatgaattgaatccattgaatttagtagtagcagtgaaatctagattatgaaattacagttccttgtaaaaatttagccagatatgtcacctttaactgattattgtgtttactgaagctaaaccaactctgcccacaaattttgaggaggat

SEQ ID NO: 56878 - DNA, 873 bp, Populus trichocarpa
  Intron number 1 from transcript POPTR_0001s28950.1 (locus POPTR_0001s28950) derived from phytozome v7.0 (chr-ID scaf fold_1; pos 27671675 to 27672547 reverse strand)
tctttaccagtaagttatttgtagaagaagatttcgttacatgcagtgcagcgcatgtgtgccttctaaacttaaagttgagctgctcaaattgagctcatagcaagagatggagggcgtctgttgctttccggagccaaaacggacctgaaatgggttaaaatgaagttgttttcaaggacttctctcccacacaagtgtgaactgggcgggattttacgaatgcagatgctgcgagtcaaaaggacacttcaatcaccaatatactagaattatttgcgtttgttagagaatatataaataattctttgacacaagtgattttcttcctatttatccttttcaattcatcaaacttataatttgtcattgatttctatctccaaaggagatttttttgttaactttgtgcaattcaaatttgaattttcatttttcaaagagatacttgcggagatgtcgtgtattgaagagaaacattctaattaactaattctagcattttattgttttggcttttatgcatgccattcattgaacttttttctttattttctactttgacttgtattcatagatggagatcttcatggagatcttgacaagcaagatgtgcacttgagatcgctggcgttctgagttctgatggtcaagatttatggacaggcggagaaaccgtgtctttcatccgtctaatatgcaggaaacttcgaactactattggtttacaatttatggactttgatcttatacgtgatatccaggattacggtatatcctcgtcaaattaacttctatgtttgtcatctgatgtaggtaattttctttggaaatgcaggcattgattcagctcggagatatactcgatcgagg

SEQ ID NO: 56879 - DNA, 337 bp, Populus trichocarpa
  Intron number 1 from transcript POPTR_0004s21020.1 (locus POPTR_0004s21020) derived from phytozome v7.0 (chr-ID scaf fold_4; pos 20335416 to 20335752)
gggagtgtttcacttgtctcagcagccctaagaaggtaattgattttcaatttgctttctttgagtaaattattctttagttcatgtgggatttgagcactatcatggcttcccttccttggtttttgttaactctagtcatgttaaaaatatatgttcgttttcccctaaattctcactatgttcgattttatttatgaattgaaacggtttcgggaaaaaccaacatggtgagaagttagaagaacaaaaaaatgatgtctgatttgcttagctagagcctacacgctaatctcttgcaggtaacgaaagctttttgctggtgttgtaggctaga

SEQ ID NO: 56880 - DNA, 706 bp, Populus trichocarpa
  Intron number 3 from transcript POPTR_0004s03710.1 (locus POPTR_0004s03710) derived from phytozome v7.0 (chr-ID scaf fold_4; pos 2580613 to 2581318 reverse strand)
aggacttgcaacaacgttactcagggtgcaagtaagtgttcttatgatttccagacattatacctattcttgggttgtctgaagtggattgcttaaccctagctacagaaagaaaaatggaaggtttcttatcacatcctgtttttcgaaattaaattatttagtatttaccggttcccggaagatgtcagtctagtaaaaagcatggctataaaacacctggcctagtgggtcaacctggtgacccgccgacttgggtcgggtttcatttcgaaaagaagtcgattcatttaagaaaaaaaaaactgaaactgatttcaatttggtcaaaaaaattgagttaacttgccgatccgtgggttgacctggtcaaatcacaacccgggtcttgggttgggtcttataactatggtagacagaattagagggtttaaactgatccttttccaaagaataaaagtcttcttggcaatggagatgaaaaaaatgatcatatatattgtttttttctcaaacattacactaaacctcattgtttgataatgcaaatcacaggctttgaattgaaggtttaaataaaaattatttgcgcatgcgcattcattagtatatattcatcgtgaaatttctgaaacatgttgcacgcgatttactccatgcccatgtattcctcagggcttggtttgaagagctgcggaagcaaaga

SEQ ID NO: 56881 - DNA, 502 bp, Populus trichocarpa
  Intron number 1 from transcript POPTR_0004s03710.1 (locus POPTR_0004s03710) derived from phytozome v7.0 (chr-ID scaf fold_4; pos 2581576 to 2582077 reverse strand)
aaagtttgttattgctcctattattttgcgaaaaggtcaaaatcaccctccactattaaaggttacatttttaaaaaaataattttagtggttggtatttttttttgacggggttaatgaataatgagttgtgattggtgggacgaagaagagaagaaagaacatggatagtgacatgggaaaaaaaaaacaagggggatagctaggcaagcatgctttgactttgacttgacttaaattgtggttgtttagtattagtagtattcgcatgacttagagcgtgtttggcagtgtggttgcgggtgcttttcaaataacttttcgtgccaaaatgcatgccaatgatgttttttcattttttaaaaatcatttttgacatcagcacatcaaaacgatccaaaacatacaaacatattaaattttagtaaaaaaaaaaaaaaaagatttcaaattttttgggaacgcagccgcagccgcgttcccaaacgagcccttactagca

SEQ ID NO: 56882 - DNA, 794 bp, Populus trichocarpa
  Intron number 1 from transcript POPTR_0012s07130.1 (locus POPTR_0012s07130) derived from phytozome v7.0 (chr-ID scaf fold_12; pos 7856169 to 7856962 reverse strand)
ttcttcctgagattcgtaacaggcgttctgacaaggtaatatagtggtagttaaaaaataaaactcatcactagcaagtgtatttaatttataactagttttatgacctccccagctatataatatattcaccggtaaactgttttcaaattgtaggagctatagctaagatgatatttttatctctattaattggactggtctcaaacaaaaattaatccaagaaaaaagaaaggatggcttctcatggtttaggagctaaaacctagtagctagtactgtaacaattatagtgcatatatacacagcagtcatcagtttcctttaagaaatataaagcaaagtggattttttattgtcgagttccttacggacgtagttcctttgacttcttcctaactaatatactgaacgaataacttcctctactgatccatgaaagacccacaaagtttattcaagtgtacagcttctgttatctaagtactgcaatctcttggactaccagactatttacagatccttttatttttttttgggtggtgttggtacgtagatatatataatagttacaaacgtttgatgtggtaggttttgcttttgtgcgacttgcatctaattatagacattttctttacatatgttgcgatgtctacttcttttttcaagctacatctgagaccttcggtatatgttcgtgctttactagcttttaacttgagttcgattttttattttattttattttatttttattcttcgaaggtttcggctgccaagatcttgcaggagac

SEQ ID NO: 56883 - DNA, 978 bp, Populus trichocarpa
  Intron number 1 from transcript POPTR_0004s15420.1 (locus POPTR_0004s15420) derived from phytozome v7.0 (chr-ID scaf fold_4; pos 16063434 to 16064411)
cttaaggttaatatttcctaatattcttccataatttccatggcaagtccttttttttggctcattcttaggattccctagctcagtacttttgaattctgatctttgttgctttgtctatgcagaagaaagcaaattgcataaagggagactctagatgatttgggaataaatctggagattgttgatctcttgttatatatatatatatatatatatatattctatttcaccaaaaacaattaatttgcattgggagagacttaaatgagattgttggtgtgttgtgaatgtagcaaaagataaacaatgttgcaaaaaatgtgatttcttttcttaaatcaaagactgctttgattaaacatgaacctaagacattaaatcaaagctgatcattatgtttctacgaatgtctctgaacttcttaaacaagagttgattgttctatatagatttttgataaaagatccaatgtaaactgaaaattgaatgtgacttcaggatcttgatattggtgatgttaatgtggtagagataaattatagagaatggtgatggaaggtcatgagtttctagtgtgcatgcatggttgcccatctccatgtttatttctcttgttttcttgaatttggcccctgctggctgaattctactcacccgaggaagataatcaagtccctactctgtccctgcattgttgctgggagggtgccactaggctacagtccaatcgtcaacaagtttctgagaaataactgtttcactttgcatacggtgcttcatgctttgccactcttatcgcagtgataatcggttcacctatgtgattagcttaaatctatagataatgaaaatcatgtcatgctacaattatataaatcctaaaacatattgttcgaagtactttggttgattttgtcttgcatcagaacatttaagtacttttgcagaggattccgaatacgtttgtgaggagat

SEQ ID NO: 56884 - DNA, 497 bp, Populus trichocarpa
  Intron number 1 from transcript POPTR_0012s01350.1 (locus POPTR_0012s01350) derived from phytozome v7.0 (chr-ID scaf fold_12; pos 956716 to 957212 reverse strand)
atcttcagctcctgctccatcacccacaagcggtgagtctccttgccaatatcttaatttctttgacatttaaattaatgaacaatatattaaattgctagatttattttaaaacatgatttaatgtcaattctcaaattgaaatttgtttttagaacttgaccccttaaaaaccattaaaaaccagatttattttcttttagtatgggattttttttcccttaacaagttcattggcatctcagttctgaatttgattaatcaaatcatttgtttcaattttcatggtgttttaattatgttagaatttattttttcaagatcataactatatttctaccttgttttctgtttcttctttaaaggagtatatacctttgattaagattattgaatatccaggaattaaataaaaaataaaaaaaactcacccttttatgctctcttttattgtgtttgcaggcgctgcaatagaccaaggagtagcttgtattcta

SEQ ID NO: 56885 - DNA, 872 bp, Populus trichocarpa
  Intron number 3 from transcript POPTR_0012s11840.1 (locus POPTR_0012s11840) derived from phytozome v7.0 (chr-ID scaf fold_12; pos 12211165 to 12212036 reverse strand)
tcaggtacttgttctcctaccatttgtttttttcccccttttcctttgtcgcatttggctagaatttgttagttttgatcggaattaaatgatgattggtagtctaattgtggcattaatatatgccactaattatgtctagtactataagagagatttagacaagaattttgacttcatttttgcacctgtctacacatggggctctgaatttggagtgtggacagaaaatgtgttcatgttggacaaaaaggttagctatttcgttgagaggcctcaagggcaaccacaattagctcaacttggaatacttgcaatcagtaaccaaaaacttttaatctgtaatacctcgcttattatacaacatgttggataatcattttatttggtagcaaatagtctaatccaaagattgaatggaaagtaatagcattttttgttactatgctgatctgacacgaacaaacttcttttaaaatctatttttatcctattagtccataaaaacatatactagattatttatatagtcttttgtggcatatctctattcaaatgtggcaaatttctatataatgactcaaaaccctcaatttttgctagtccgacgacatcacatttattgaatttatcaatctatatcatagtatacccatcatgatttattcaatattattggtacgtactgagttccatagtacatgcttgttaatatttggtttaatgattttgtagatgaaattccagcggcttcgaggactggaaatattttccttggctgcaagtggcctaaaaggtagaattccatctgccatattcaacaaggaattgatttatcatagaataacttatcaggcaatttgccagaggat

SEQ ID NO: 56886 - DNA, 365 bp, Populus trichocarpa
  Intron number 1 from transcript POPTR_0015s09220.1 (locus POPTR_0015s09220) derived from phytozome v7.0 (chr-ID scaf fold_15; pos 10478150 to 10478514)
ccaagctctagccagccctcctcttccactgacccgtatgtttcctctacatttttcttttgtttatgatgtaattgttagtttgtttacaagtaatcagaaaaatccataacttttgtaatatatgaggttttttgtttcttttttcgaagaatgattgttgtgacttgtttggtttattcttatgagcttatttgccttgactgtgttttgaaagaatcgagaatgaattcgttgcactagatgatcattgagtttttggttactgggttttgatttagtgtctttactgtgcggtaaccaaacttgtttatgcgtaaataattataggaaaagtggtaagaaagatttttcgactgcgattt

SEQ ID NO: 56887 - DNA, 764 bp, Populus trichocarpa
  Intron number 1 from transcript POPTR_0009s07760.1 (locus POPTR_0009s07760) derived from phytozome v7.0 (chr-ID scaf fold_9; pos 7210603 to 7211366)
cagcagaatttgtggagcaagggatatctccacaggtactctgcaattgaccatgatttttttattgcagtttttcagtttcatatactgtggagtatgtgttgaatggcgttgtgaatgctgccactgacggaagctttcaagaaatcttagttcaatgtttgcttgtaagactaaagatggtttcttttttaaaaaatttctgatgtataataatgaattggcggggttttctatttcgtgttcctttgcagtagattttgtatctttttagtatttggtgatgatagtgaatttcatgagcaagtttcacagtgatggtgactcatgcaattcattggtagattctgcttctctaaccagcccctgtgtatttaattcttaaatgttggatggatttaagaagattgcacccatgattttttttcaaattttgttttgatgtctacttgggtcagataggttcatttgaaaggtgaaaaaaaatatatggcataatttagagcttttaccactgttattcttcaggcatatttgtgataagctgtggcatattttgtctattgaggataggaatagagcgttgaacctcaaaagactgcaaacaggcttgaatagtgcttctcatttctggctcaaaatagggtcatcaaccttttgcattttctgcatataaagataattttaccttataatgttgtttgtcctaaatttttctttcatatgcatcatgaatttattagtatactctattatgaatcaga

SEQ ID NO: 56888 - DNA, 734 bp, Populus trichocarpa
  Intron number 3 from transcript POPTR_0009s07760.1 (locus POPTR_0009s07760) derived from phytozome v7.0 (chr-ID scaf fold_9; pos 7212353 to 7213086)
gcgtactcacccctacaatatcaggtagcgggattcaatgtaacctctcctttttgcttaggagcataagtacccaaggaacactcatactgattggctgttgacagtcaaattatgctaaattttcttatgatgtccactgaaaggggaaaaatttcttccaatgtcatggaacatataatctataacatttttcttattgtggaaaaaatgcagtacatattaaattggaatacttagggatggtgaatcttgatggcagttgatatttttcttgccagaacaagatgaagtaggtatagaaaaggtgcctttcttttttgtatagaattaagaatgctgatggcagtgtgacttaataatagttttatgtccatgtataacttggatgtcaaatctgaaacgcaatgacattaggatatgctccttttctctctggatatttttccctccttttgaaactctgaatcttagtctgatttatagaatagatcctattcgtactgagatttgcatacctctgcctttcagtcctttcagcagtttcaggggtcaaagttaaaatcactggactccatgagagtaagtccatattcattcatcactgtctagaaatatattactgcttaaaggccatctttgtgagataaacttagatttgatgtttctgtgttcagattacatagttataatctcgtgtgtcatactggtggggcttttttctcttcagcatc

SEQ ID NO: 56889 - DNA, 797 bp, Populus trichocarpa
  Intron number 1 from transcript POPTR_0004s06600.1 (locus POPTR_0004s06600) derived from phytozome v7.0 (chr-ID scaf fold_4; pos 5299042 to 5299838 reverse strand)
tctttcggttaccaccacagcaaaaacgtttggtaagacggttttattctttcttttccgagtatgtttgtaagaaaagataacctttcccttttgggctgcttgtttgtttagagagacgtgaagaagataataacagactaagatgtggaaaaagtttgttttttttggagtcttgaaattcagataagtttcaaaaatctgttgaattgacacaaccagttctgggcatttgtttgtattgataaagtttggatccttaatcttatcgatttcaagtacagtgggaaatgataaaaaaagagatggcttttactttgcttcatgggttttaggttgcttgtttttgttttgaaactggttttggagatactttactcacaatctttgtccaattttctactgttgtaattattactttaatggaatttatttgcatttttctctgtcaagttcattattcaatcctgtgagttttcttgatgtgcttgctacatacctacctttttgctgctgctgctgcctcttcaaagctatttcagttctgtttgtacccaattgcattttaccttcacatttctcttctgaagttttatttcatgtgtgatgggaaaaaaacacatcactttttccctctctaaattttagttattgcatttttccttttctcataatggggacgagagtaaattatgtagtgtcatttggttacttttatcggttccctcttttattgaattgttatctcccttttctttgcagaaattactagaagttttgacccatttgtcaatctt

SEQ ID NO: 56890 - DNA, 1020 bp, Populus trichocarpa
  Intron number 1 from transcript POPTR_0009s06250.1 (locus POPTR_0009s06250) derived from phytozome v7.0 (chr-ID scaf fold_9; pos 6064427 to 6065446)
ttgtcctgcgtctggaaaaaaaggtgctcgtagtgattatgtgatcactgagcaacccctgaatatcatccaataaagtaggtcaagggagaatctcatgtaagaggatatgaccaaatgatgctgagactcgtatggtggcaataatggatatttgcagttcttgtctgttagttttataaaatgttgtctgttagttttgatttctctctcttttttagagctagcttcatatgattctttgatttggagattccgaatcagattttaacatggttagctcctgcatagtcttttctttttccttttatcaatggattctttagttcatcctaaaaaattatttgaatagaatttatacatctcaaaatttgcaaccaaataaagctagccggtctattggtttgtaaattcagtatatcatatgatattattttcctttgtccttttgacacaacataaattgaaaatatcatgaacttcaattgatgtataatatataaccacaccgaggtggcgctgcagttgtcaaataatcatcttaacccaataacttaagccgttaggtaaggtttcaggatatgatttatattattatctaacacaccctctaaaatgaaagttctttggatttgaaacttgcacaaattcattttaccttgtgtttaatttttattaaataaatgaggatgataagattcaaatttgtgattacttgatcatcaagactctgataccatgtcgaagaaccatcttaacctaatagcttaaactgttagataagattccaaaatatgatttatattattatctaatagcagtcacaagttgaaacgaaaaatgtataatatattttgtgatattgctgacaaagaaagaaagcaaaacctctttaaatttttgtttttttgactttaaaggatgatgtgcctagctaaatggagccaaaagcatattttaattacatgttctctaacatgttcattttcaactctagggatattattagcagtgacttct

SEQ ID NO: 56891 - DNA, 896 bp, Populus trichocarpa
  Intron number 2 from transcript POPTR_0009s06250.1 (locus POPTR_0009s06250) derived from phytozome v7.0 (chr-ID scaf fold_9; pos 6065542 to 6066437)
cgccaaggtatttctgagtttgtaaattgcagggctgactttctctttgatttggattgggataaatatttttttaaaaaatatattaaaataatattttttaaaattaaattactttttatattagcacatcaaaataaattaaaaatatttaaaaaattaatttaaaataaaaaaattcaagattttttcagaaacacactcctaatcacatattttatcaggtgggctggaccgaaatttagatggtatatatatgcagcacgtatgctggctcttgcctgtaatctttttttttgtttttgggaaattaactagttttctatttcctattcaggcaaaaaaggaaaaaaaagaaagaaagaaagaaagaaagcctttttcctattacaagcaggcgaagaacagtattccctgtttagcacagatattcgtaaattatataaactgctttccctttatcttaaacttcaatattcacctatatatacttttctgaagtaccaacaagagagaagtatatatttataacttattcagcgctgaaagtattttacaaatattcactggttaagtagtttgaactcgagttttgacccaaaaattatcgattcactcattaattatgcatgcaattcgatagttctcagatttttatacttaattcatccgtactgacgtgtttttttgaactatattgctaaagcctccagttatgaagaagattgtgttgagcatcgataagtgctgtaattgcgaaggatgcaggaagaaagtggacagaattttgtccgagaccaaaggtgaaattatggagtctgtgtagttcatgtaatatacggtttatatttcagtattaatggacctgattgatgggggtccttgtgtttataggg

SEQ ID NO: 56892 - DNA, 593 bp, Populus trichocarpa
  Intron number 2 from transcript POPTR_0014s09190.1 (locus POPTR_0014s09190) derived from phytozome v7.0 (chr-ID scaf fold_14; pos 6826715 to 6827307 reverse strand)
gggcaaaaggatattctcggagctaattttccaaggtgagacaatttttttacccttctctatctttctgttaactgtttccataaattgaacaggaaaaaaaagaaactctgttgcttatccaaattgtacgaatggaagagtagacaggttccttaactatatcataatcgcacggtgctagaggccttatcaggctccaatcaagtgctagcactgcttgagacctgatcctgtctcctgacgactcttgtccttagagtctgctaggcacaaggctccaaataattaaaaatcgaggtcgctgcaatatcgatactttagcatcgaatgctgatagccatcaaaagtattggatttgccattttatttaaatccaagagctttgatggccatccacattgtactgaagctcgagacagcattctaggcctccccaattgtctgacttggccgctatggttttgacaagatatatttggaaagagaagattggataaattgtttaaaacatcttattaatgcatttgatcatgtttatttagtaacaatttaacaataattggcgtggtaaattgcagaggatactacag

SEQ ID NO: 56893 - DNA, 803 bp, Populus trichocarpa
  Intron number 1 from transcript POPTR_0011s06400.1 (locus POPTR_0011s06400) derived from phytozome v7.0 (chr-ID scaf fold_11; pos 6663199 to 6664001 reverse strand)
gccagccttacatatctcaaatatctgtaagaatcttttcaggatatattttatttctgtttctatgtgtattgcttgtagaatctcaatgtaacttttaacgactaatttataaattgtggaatggaaataccttaataataataataataataaaaaggaagaagcatatttgacgcagctaattaaacctaacaaacgagaataaaaaaaatacataaaccttaattcatttttattattattgaatgatttctttccagtaatcttaataatcaaaaactcaatattacaactctaaaacctattcggataccaagaaattaaaataattaaagagatatacattaaataggttaaacaattttaaattaattagaaaaatatagtaaatcttgaacaataatgtttaggtttgatcccgtaaaatttgagtatatataatataaattatatcatataacctcacctaacagcttacgctattgagttgggatggttttttgacatggtatcagaaccttgatgaccaatcagtcaccaatttgaatcttactatccttatttatttgatagaaattaagcataaggtaatatgagtctatgcaaatttcaagcccaaaaggctttcatttaaggaagtgtgttagagaataatataaatcatatactgaaacctcacctaacagcttaaactactgggttgagaagattttttaaaggaagaagttaaattctcaagtattgaagatatattatctgttacagtgacctaactcgcaactacatttctggcaatattc

SEQ ID NO: 56894 - DNA, 592 bp, Populus trichocarpa
  Intron number 2 from transcript POPTR_0015s07990.2 (locus POPTR_0015s07990) derived from phytozome v7.0 (chr-ID scaf fold_15; pos 9282184 to 9282775)
ctaactgagcaggtaatatgtcggattaataaggactatggctacaaaaacagaagctaaaagttactttgggagtctagttaaaaagggtttgtgtttcgcatagtcctcaacccacccttccctccccacagagagtcattaagagaaatttcacaggaggcactgtgtttttttttttttctggaaatgatctctaaatttcttgtctcagcccccatttacacactcgaatagaaagaagcttcaggagagaattatcaaagagaatcaaacttctaccgtatcttagcagtgaagctccctcttttctgaaaggagtaagtatacacttttgtgattttgtcccctcttctacggtttatttgaattcctttttccaaaataagagctcaaaaaaacaacagagttttcgtcttttttgtggctgctgcagaaagaaccatcaggaggtcaggcagtggtcttggtgaaggggatgaggtcaaaggccttaaatggtttcagtcaatcaactggaaaaaaaaatagaggcgaaagaactgttgccagagtataaaccagatttgggtggcagactgtccggcgaaca

SEQ ID NO: 56895 - DNA, 331 bp, Populus trichocarpa
  Intron number 2 from transcript POPTR_0004s06710.1 (locus POPTR_0004s06710) derived from phytozome v7.0 (chr-ID scaf fold_4; pos 5369613 to 5369943 reverse strand)
ttgtggttagtactttctgttttttttttttttttttccattcatttctgctcttgaaattctgcaaatttaccattaagctgacaactatggaaaagttttggtgattatgtcataaactcttgattatgtgcttatttgtaaaattaatgccaccatttgatgtacttgtaagcaagaatttgattaatttgaacaaatttgcctctgtaactgtagaatcttatacagtttttggtttatgatttttcatggtaaatatgcttttgttagccttcttaatttcttcttttaagggacttgtggctttgacatcaacagcattggcttg

SEQ ID NO: 56896 - DNA, 880 bp, Populus trichocarpa
  Intron number 4 from transcript POPTR_0014s14710.1 (locus POPTR_0014s14710) derived from phytozome v7.0 (chr-ID scaf fold_14; pos 10778343 to 10779222)
ctttttgtgttgaggattctttctagaaaatacgagtaaggatgtgctagttgttcatgttttgattcgcttccaagataatatgccaatcactaagctttttgaccttttctcaagttctgaacatgcttgtggttctctttcttcatttcataaatatctaaacattgatgttgggatcattttccacaaaaaaaataggaaagacatataaataacttgcatatggcctttgagcttgatatagctcaaatataacgacctggttttgaataatgggcctgtggtgctgatgagaagcgtgttcatataaatttttttaacctctgtatctttgcacgtaaaaaaaaagtcatttcttggctgactatataattggcatagatacctgtgcttgatagttagttagactgtgtggattggttttcccttatttcatcagtgatgctgtttattatcagtgaaaagaatctttcccaagcaataaattgtggtatgagagtcttgggactgcttttcagccctcactttggatttccagtagtgtattgcaacagtgtctgaatgctttaagtgagctgttgtaccaatttgacttagggattagaaaaaacgatccatttaagaatgttgtaagaaagaaaatgtcacaatagggtttgtttttgttagaatgctttggcacccatcgtattcttccatgcagtgagcacattgcttgtgagtttggttgaagagctcaataaattgtctgattggtggaattccatttgtaataatttttatgtcaaaatccatattcaccttcttatctgggatgtactacattaaacatccattctaatattatgaaactttttttttcataggttcaagtcgg

SEQ ID NO: 56897 - DNA, 548 bp, Populus trichocarpa
  Intron number 1 from transcript POPTR_0011s03520.1 (locus POPTR_0011s03520) derived from phytozome v7.0 (chr-ID scaf fold_11; pos 3601642 to 3602189 reverse strand)
tctctttgaagttcctcctgtttgcaagcctcgaggtaattagttggttaattaattaaacaatttatctttgatttctcttaatgggttttgcttaatttattttagttttgagtggattgattttgattctgacgggatttgattttgaagaatattttccttccattctgcagtttttgtctcaattttttttatcatgatttggtggctcgaggagaaagatgaagaatagtaaaaaaaaaataaacaaattataaccctctaattctggatcattaaaaatgaagtatacatttaacttaatgtaatcaagcaattaattgttcatttaatgaaaaataaaagaggaaaatattttatttttatacatgggattttttttagggggcaaaatgcagcatttttgtttattttgaaggaataaaagaaaattttcattattattcttctaaaaaacattttttcagatgaatattgggaatcaaaattgagaaatattgtgaaatattgcagaggctgatctgttggagaatcttggaaggaag

SEQ ID NO: 56898 - DNA, 612 bp, Populus trichocarpa
  Intron number 1 from transcript POPTR_0001s30310.1 (locus POPTR_0001s30310) derived from phytozome v7.0 (chr-ID scaf fold_1; pos 28833089 to 28833700 reverse strand)
caccccaagaactacggccctggttctcgcacttggtaacctatactttccttctctctgcttgaatggaagtataactttatattaaatcgatgtatttacttgcttactttacgacagaaagggttctatcagtttttcttgttatgcttctttaatatgcgttgggtctgaaagagttttccttgggagtgtggtttctaggaacttgttctgttattttcatgttcgtgttatcctaagagcttttctatttcatgtgcgtaactggggatctaagcggatctatgtttgtgtttggatattcccagaaaatatgatgatttattgtttatgagagctattagctagtgcttaagatgatgattttagctctgtgttggttagagtttaattttgaagtccaatgatccctaacctttcttttctacgctactatcttctcctattattcagttagatgaagctaaaattgagttctctttttattttgagttactagattgtaatggtttggatagaaacaagaaatattgaattatgtgttctgatgtttgttttattgttgatttgtcagccgtgtgtgtggaaatccccacggtattatcagga

SEQ ID NO: 56899 - DNA, 635 bp, Populus trichocarpa
  Intron number 4 from transcript POPTR_0015s08230.1 (locus POPTR_0015s08230) derived from phytozome v7.0 (chr-ID scaf fold_15; pos 9492449 to 9493083 reverse strand)
ggttgttcatagctgcaaaaggctataatcctcaagtgtgaatctttttcagatttcaagcgtcaacccactgtatgtttcactttaaactattttattctgtacagtatgttgacaaattgatattgtatattttattgatgttgataaaagttcttaatggtttacttataaggaggaagcccatgtatgttctaattagttgctttctagagtttgaagttctgaacaggaaaagtttctccagaaatctatttgtagctcatggattgtctctctgtttgtcagtggttaccttggaatctgtgatttaataagtcactcaccactcatagaagctaaagattgggttttataaattctcgaaggactttgattaatgatacactactggtataataaaagccttgtttatagactgaaggaaaaaaaaattaattaagttcaaaacttcaatatcatactgggtagaggttattacaataatctgatgcccaacaccttcaagtacttttgtgctttttaatggctctaatctcagtatgaatagcctgctgtatacttatgtttttcttaatctgtcatatacatgaggtatcactaatcttcctatatgtagcaggaggaagtaagaa

SEQ ID NO: 56900 - DNA, 968 bp, Populus trichocarpa
  Intron number 1 from transcript POPTR_0004s04000.1 (locus POPTR_0004s04000) derived from phytozome v7.0 (chr-ID scaf fold_4; pos 2834970 to 2835937 reverse strand)
actcaacaacagagacggcttttgaggactcaagggtatgcgggttttgttttgttttttaaaatttgtttggggtttttagttttttgatgtttaaagattgattttggagttatttcgtgtttgaaatttggggggtgtttttggatttggtgttgaattttgactttttgaaggttagtctctgggatgttcatggaattgaaagtatggaagttttggggattttgtaagtttttgaatttagataaaagggtggatttgaatttagaaagattgaatttaggggttattgaatttagagagggtattggcatttcaaagagttctgattttgaacttttgcattgtagttttaagggtggttttatagaaattcttgttgagttttggaattcgtatttttcttgatggcttcttgaagagtgtgctgcttttttttttttttttttgtggacggctgtttcaagttttgaaattaaagaaatgggttgtttgctgaggagatcattctttggattttgaatttaatattttgcttaccatagattttgaatcttacaaaagggatgtcatttgttaaattttgtaacggtttatggtttctctgtttaagcttggaagtatcgaattaaggaatgattggaagattttataattaaattgtagagtttttcgggaatttatgtttaatgaattccggaatacagtatgcatatccaaaagtaccaagaacttgtgagaagtgaaagttatgaattcttgtcactctttattccaattggtgaatgaaatacaacatgttgggttgtcttgttagatgtttcgatttatgcactcaaaatgatttctttgttggtctgctatctgctatcttgtattgagtatactattctcatcttgctgacatcaagttatatgtcttatttctggtgcacgttgaaattctaaagttttgtgctttcagg

SEQ ID NO: 56901 - DNA, 347 bp, Populus trichocarpa
  Intron number 1 from transcript POPTR_0011s00950.1 (locus POPTR_0011s00950) derived from phytozome v7.0 (chr-ID scaf fold_11; pos 491357 to 491703)
caaaaagtatttttataaaaaagaaaagcaaatatatgaaactcatgtcaacatcaatggaccttaaaattcaaacttttatttaatgcgtagacattatatttgataccaggtgaaaaattacttctgtaaatttaaatataacatcattatcaagaaattttatggtgtttgaactttgaactcgattaaattttacttttttaacatttgtttttaaaatttttcaccgcattccaaacacaatctaaatagaaaaatatctcaatgatgaggggcgcactcctgtcttcctcgatccctctttttaaggaaaagaaaaaaaatccatctttgcagattcaatc

SEQ ID NO: 56902 - DNA, 506 bp, Populus trichocarpa
  Intron number 3 from transcript POPTR_0011s00950.1 (locus POPTR_0011s00950) derived from phytozome v7.0 (chr-ID scaf fold_11; pos 492246 to 492751)
tgcaaggtattttttctttttgtgctgtaagtattttattttattaaattttaagaataattatgacttgggatttttaaatgattgattaatcaatcaatcaatcataaatgggtgagatttttgaactttggtactccataatttcatgttaatgtaataattctctagtttctattaacttaatctcgttgtgcgaaagctagtctgaggatacttctgaatgtgacataaaaaatgtaatttcattagagagctctaggagggaaatgttgtgttgatcattcaattaatggggcttgaattgattggggtgtttttgctcatggagttggaaattatgggactataggaagaagataagaatttttattttggtgtttgttggagtgaatgaagctcttttgcatttgaaacaatattgttgtttgcaaattgaaagtaattgatttgataatgtggactggacaggagccttttgtaaacatcccagaggaaacaatccg

SEQ ID NO: 56903 - DNA, 749 bp, Populus trichocarpa
  Intron number 2 from transcript POPTR_0014s03690.1 (locus POPTR_0014s03690) derived from phytozome v7.0 (chr-ID scaf fold_14; pos 2941656 to 2942404)
tctggtatgctattttctataaacttatggtataacattaatggacgggtgtgtgtatatatatatataaatttaatattaaaaaaaatgaataatgattgtatgaagaaacattagctcataccttgttttgctgatgatgccatattaatttataatggaactccgctaaggagtaccatcctcagctaaagacaaacttgctaaagatatacgtaggttgccatggtaactaaaggccacaagctttctcaacacctattccagacgttataacttgctggcgcataatttttatccagtgataaacactgatctagaaataaaaattcaaaactaaatagaaaaaataattaaaattcaaaattaattagaaaaaaatattaaaacaacaatttctagttctaatttgagtgtcttctcaattttggctggttatagccaaccaataccctatggaaacgaacttttagaatctcctgtcggattaaacgtagttattgtttttgttataatgcatgtttgatgaatttaggcttcttcttcttcttcttcttcttctttttttttttttaagtttagctttgtttacacaaatccacaattgagttacaaacattggtaatcattaaaactcttaattagttaatttaacttggacattactttaaacaagtaaatttgcaaataattattttcttgaatatttcacagactcttattctagcagcatcagacactacatcagt

SEQ ID NO: 56904 - DNA, 899 bp, Populus trichocarpa
  Intron number 2 from transcript POPTR_0012s03840.1 (locus POPTR_0012s03840) derived from phytozome v7.0 (chr-ID scaf fold_12; pos 3071477 to 3072375 reverse strand)
acgcaagattcttgatcacgagtacgtatatttatgtgtgaaaattctatatcacaatgatatgcaacccttttctgtatctaaccagtttaggtgattgatcagaaacatcaaaacatcactttctcttgctctaatatccttccattttttttttgttttactttaaaatgagggtgtgagatgctggtttcatgacaaacttttatagtgtgcttagcattgaaagtttataagatttaattaagagtaaccttttgttttcatcataaaataaagagaaacttagacgaccacttacaatttggaaagtttttataacaaaaaactatctagtcggttaacacccaacatgataataatttacatgcatgtttaattagatggatttgtcatgttttctgttgttttgaagctgattagctaacccagtaactaaagccatttgcctcgtcatttcaagtgatttgaatattgatttcggcattcataattaattgctgtgtgattcgaaatttatatgaaccatagactaataaatcttttataaaaactcatgatgtataatatcccccccacccccccacccccccacgtttattggtcataatgctcctctagattgtctgcaggttgaatcctcagccattgattagttggagagaatttgtttaattagattcaaccgttcttgtgtgttttcttcttcttctgttttttgttaatcaaactaggccaataatgtcattgagagagacaatttgttttcatatgattagtaaatttattacaagttgcatatgtttaattattgtttaaccctattttggctatccatatgcagtcaggtaatctggcttggagatttgaactacaggatatacctgcctgatactaaa

SEQ ID NO: 56905 - DNA, 650 bp, Populus trichocarpa
  Intron number 1 from transcript POPTR_0012s03100.1 (locus POPTR_0012s03100) derived from phytozome v7.0 (chr-ID scaf fold_12; pos 2478758 to 2479407 reverse strand)
catcaagccctgataaactccccttgggtaagtttttgttatatcattgttttttaatttaatttttttgacacgtgattgaccatgcatgtttggttatagttaatgaagctttaacatcttcaatcacaaaagtcaaaagtgaggtatacaaaacagagctaaacatgtttagttgaagaaggggtaagatagataccagataaaaaattattttaaagtgaatttatttcctttcaaaacaaaacacgattacgggaacatgaacatgtccgctctgtctcaactttttctctcgagtcaataaccaaacactatcttaagacatgtttatggtttggcggtttgactctccaatgacccatgtatatgaaatcaccaaacaaccaattgcatgccacatagctggacattagattagattatgctggagtattagtttgattaggatgttttagtcttgacactaaactgctagtgcttatctgttatacttctagttgatcttctaatgtttcccattacactatcatgcatgtttccaccattaattaattagttgcaacttcagcatgaacgaagtcaacataatttacattacatgattaagttatatgctttaaaatctaacttgtgtcatgaatatttag

SEQ ID NO: 56906 - DNA, 221 bp, Populus trichocarpa
  Intron number 3 from transcript POPTR_0790s00200.2 (locus POPTR_0790s00200) derived from phytozome v7.0 (chr-ID scaf fold_790; pos 849 to 1069 reverse strand)
caatattgtggccgaggaccaatccaactttcgtaattccgcaaggccttgactagctgagtcgtttgatttagtttattggttaagtaattttttttatatatggaagatatattgtgtagtactttgaatcaaaagaaaaggccaaatccagcaaaacattgttggatcttgatttgcattgagttagtttattaacatgtggtgcaggaactataatt

SEQ ID NO: 56907 - DNA, 599 bp, Populus trichocarpa
  Intron number 1 from transcript POPTR_0012s09050.1 (locus POPTR_0012s09050) derived from phytozome v7.0 (chr-ID scaf fold_12; pos 10119548 to 10120146)
aattcaagtcgacaggtttgtgtccaactatcaaaattctatcttttcttcatttattaccttcaattattcaatctaagcctcaattctttctaccttttcatctgggtttggttagttatgttttctgctttgtggattctttgtaatttgaggtctgtttggtttccgtaaaattttgaagctttctgcatttgcctggtttttatgtgaatattgtagctatgtttagcttgtgtatctgtttggttggtcagaaaattgaaggaaagtataaaaacgagaggaaattgaagttattgggatactgggtttttggataaaacaataaagtctggtcatttcagctaatttgaaggcataattcagcttattctttctgtaacctgttggagatcagtgcaacaggaaaaaaaaaaactttagaaacttttgtttttttttttgtttttcctttggttttttgaaattgaatggagcgtgagagtatttgttgcctcatcctaatgattccattaataaaaatgattattttagcttgtgttgatatctgtctggttattctttagctttgtattgaataaggcgctgttgagtaa

SEQ ID NO: 56908 - DNA, 362 bp, Populus trichocarpa
  Intron number 3 from transcript POPTR_0004s05020.1 (locus POPTR_0004s05020) derived from phytozome v7.0 (chr-ID scaf fold_4; pos 3773188 to 3773549)
agctgcttgctgcttgtgagagcattgagtggcaggtattaaaatttatcattatgtgcttggggctgtttttgttgaaaatcagtgtccttttttatggtttgatctgtggtgtagagactttgcaactacatgagtttgggtagaatcatgagctgagatgctgatctctttgattgttccttttacctggtgaagaacttcattaacaataaaataaattcccaattaaaaaaattgataattattcttccaggcaactaagctagcaacatgtgttttttgcatgagcttttgaatttaattgaacaatatgattcctgtgtgcaactgctgaagctttcttcttgataggaaggtgg

SEQ ID NO: 56909 - DNA, 916 bp, Populus trichocarpa
  Intron number 1 from transcript POPTR_0014s07250.1 (locus POPTR_0014s07250) derived from phytozome v7.0 (chr-ID scaf fold_14; pos 5479881 to 5480796 reverse strand)
atttggaggctatatccatctgggcactcccttcggtattatacaatctctctctctcccatctctttttctccatagaaatagtggatttgctaacccttttgtctgattgttgacctctgctttctttgaggttttctcgaggagaaagctttgttcttttttaagagtatgttcatgtttttttttgttttcttatttgcatctctgtaactttatggctgatgagcttgaggttgtttggtgtctttaattttatgttctaaagttgatttctttctgttagattctgggaagtgattgttaggtgcataactagagtttgcttctttgattccgactgttattgtcctcttttcttgatatgggctcagttaggtaagagatttttgtttaatcaggtcaataacattaatccaggcttgaatcctgattgaaagtttcttttattacttctatttccgtgctagccagggaaaaagcatacaatctgtaattttacaagagtttgagaatctgattgttgccaaattgagaattgtttcttgaccgttgatttcgttaaggatgtaatagttacgtgagtttggcgattcatcaagaaactatgacaggatcttacaatacccaattggaattggttttcgctgttaaagaaaatcccatgtgttgcttgtctatgattcatcaaagagagcataaaagtctgaagagacggcctttgtcgcatacagaaaatggctgagaatttcttgccttatagatgaattttctgggttttgttgatgtagttcttttcacttttgtcatgttagaatgtgctttgtccatgttcaatgctgttgaactctattatttcttgagttctaacaatagttcagtatttgactttgcaggtttgatccgggtaaaagat

SEQ ID NO: 56910 - DNA, 840 bp, Populus trichocarpa
  Intron number 2 from transcript POPTR_0004s03780.1 (locus POPTR_0004s03780) derived from phytozome v7.0 (chr-ID scaf fold_4; pos 2637348 to 2638187 reverse strand)
ttgtaattcgtgagcttgcggaaattgaagcagtaacagattatggtttctttttttcatttcttgtcaatctttacttatagtgattagttatgattgatgctgagttgtttttttgtaggaaatgaaagattgttgtttagggttttagattagattttaatggtgggtttggatatgattgcgttttactaaaaactgtggtcttttcttgattattaaaagaaaatcctgatagataaaataggccaaagttttcaatttaaagaaagggagtgtgactttgacctagactagccgaatgactgtgataatttctttgaattagggtattgttaatcatgattgttttgatgttattgaagtgtttaatctcatgcatctattgaagacaattaaaaatgattatgtagggttttttcttttgttcactataaggtaatactgactggattaatgctgcattttgatcttgattgtgttttattgtgtggtgctgtctctagttggttacgtagtaaatatccatgctaaaagagggcattttgaattctaagaaaaagagaatttgattgtgacttgcctaataactatgataagtagtttgagttagggttttgttacattagatccaaatgagaaaatatgtgccaatggtttggttgtatttttagtttgcaaaaataggaaatgaaatgtgtgaactcttgcatttatggcgctgaattgtgtgagatttagtgtagaaatacagtgtagaacaaatttattgaaactggaatatttagataggtgttgaatgggtaatgtgcttatgtttatgtttgttgtgcacaggct

SEQ ID NO: 56911 - DNA, 740 bp, Populus trichocarpa
  Intron number 4 from transcript POPTR_0012s00420.1 (locus POPTR_0012s00420) derived from phytozome v7.0 (chr-ID scaf fold_12; pos 140842 to 141581)
gcacatttgtgaatcacacaaaagaacctcatgtaagaacatttataccaacacttcttttgtgttcagatgagtttagtgccaatagttcatgattgattggtacagtaaggtatgaagtataaatcatagtctgttttgggagttgatggagtttgtgggagaattttgtccaaggctgaatatcaaaatagacatgttgcttctgctggctatacgtggctcctatagtgaaggaatactattgtttaataggttatatgctaatgaagacttttgtgtattgtcaaaagttgatgtttgataatgctctggctgatttcaaagagcaaaccgagggaagtttatctttaatcctctgctaaaaacttcaagtgtttctaagagtgacatccctcttggtatcataggtgaaggaatccgattgttggcatgccacctcccctgcacttaattgtcctcttctgtgcacattctggtgtagcgaacttagatgttaatatctaatttctaaccattcattgctctaacaagatattgtatactgtcaactagttttagattttctttcttcaactattggcgtggaatgtttctttaccaggaaggtctagcatggttactggttttgaatgtttagttcggagatgtctagcttgctatttatatggttgatgttgatgacaattacaatgatgctaacaggcatcaaacaattcagtttgggcattatcatcgga

SEQ ID NO: 56912 - DNA, 703 bp, Populus trichocarpa
  Intron number 1 from transcript POPTR_0014s05810.2 (locus POPTR_0014s05810) derived from phytozome v7.0 (chr-ID scaf fold_14; pos 4358545 to 4359247 reverse strand)
ccccaccgatctctctcttcttcgaatcaattaaggtttcgatttgcatttaatttcttgaattcctttatagatctgtgcttgtctttgcatcgaattgttgagatttgtttgctacttctattttggattaattttttatttgagtgaaaaacaattaggttttttatcctaattatttgtatcttgtagatcttaggcttctgcctcatgactggatctatttttttttctctcttgataatcaagatctcaattttgcaaaaagacttaatgtattatatttcataagtaatttgttaatgtctgtattggtatctggataaatgcttgtattcgtggtttatatgatggttttagtgtatgatgatatggggaagaaaatactgaaaattggtttttgcaagggctaatttgttgggtagtaaaaatggaacaaaaaattgattgatagcgttgaattttagatggatttgtttgaggttttctgggttttcatgaattttgatagtagccatgctttgtgtgcttcttttgtttacgcctttgatgtatagtagttttgttaactatatattagttcatgatatcgctgatttgtgtgtttaaagtaatactaatgtgggctgaaaagtgagataattaaccgggttgtcgtttaaggggctgaaatagttgtttgtttggtgggtttcttacagat

SEQ ID NO: 56913 - DNA, 539 bp, Populus trichocarpa
  Intron number 1 from transcript POPTR_0015s09940.1 (locus POPTR_0015s09940) derived from phytozome v7.0 (chr-ID scaf fold_15; pos 11012547 to 11013085)
tgcagcaaaggtattggttaccactctcttctaaggtactctctttcttacactttcattcttctcagtcctggtttatctacttaactgaaggttctttaagggtttagtgctaaactttgctttctgactgactttccttcttgcattttcttgttcttgttgcacattttcggttttgaaggccaatttcgaatcctgctaatttcctggttacttttatgtttcaacattattcttactgtttcgatgcctttgttttctccctaaatgctcattttcactctttctttcactccttccagtctaagattgtttaagggttattaaacctacagcatttgctttgtttgctttcttgcatgcattttctttatgctcttctttttggtgcgcacttcatgggtttttttgaaggccaatttcagttcttgatgttaatcaatgttagctcccctgctttatcttttgctttctctcattttctttccctcatttaacgctccttttgtgtcttttgaagggaaaatcaactctat

SEQ ID NO: 56914 - DNA, 469 bp, Populus trichocarpa
  Intron number 2 from transcript POPTR_0004s01360.1 (locus POPTR_0004s01360) derived from phytozome v7.0 (chr-ID scaf fold_4; pos 751449 to 751917)
ggtcaaaagtaaatgccagaaaaaataatctccaaaatgatttatatgaaaacaaactggcctcgtgttattatagcaacaacagatgatttctggcagattatgttatgggctgctattaatgctccctttgtcttccctcttttttgttgcatgtttatttgtctaggaatttgtttgaatgctagttggctcacaaaataaacagatcttcacccaaagaaaagacagtttccaccatggcagcatccaattgcatggttgtaggttttgcagtttacctttttcttaaccaaggtttcaaagaaatttttggtataatccatacaaaattgtgatgtatattgatcaaccaaaacactttcaaatatacgattaggataaaacgcaagcctcaccacactgcaccaaaaaacaaattgaacacaccaacaattatttttgtaaagttagcggtaacagctaggaa

SEQ ID NO: 56915 - DNA, 319 bp, Populus trichocarpa
  Intron number 2 from transcript POPTR_0004s21690.1 (locus POPTR_0004s21690) derived from phytozome v7.0 (chr-ID scaf fold_4; pos 20740622 to 20740940 reverse strand)
caaccatcgcaggtaatttccccttttgatcatctatttcctagtttatctgtcatggcctaaaatgctttaaggtttcttcaggttttaaaggtagttctttgcacaagaaatgatcactttcaagctttgagttgtttttgtgatcgacttatagtaaccgatatttgctcatctttaatggtttataattggatcttgcttgaattgaccttctgaattagagccatgaatgtttgggcagagtgatttaagtcattttctgttttcctttgccgctgcaggggctgttttatacataaaaaaggaatttcatttg

SEQ ID NO: 56916 - DNA, 886 bp, Populus trichocarpa
  Intron number 1 from transcript POPTR_0011s13375.1 (locus POPTR_0011s13375) derived from phytozome v7.0 (chr-ID scaf fold_11; pos 16136850 to 16137735 reverse strand)
aaggtatgttaaatttaacattcttgatgaagatataatagttatattgagaaactatttactgaaaggttaaatcaaatcacttatgacttttctaatatttaaaggatcatgacacattactagatagtgcacttgatcttcatataaagatcaatcatttattgaattgataataaattaaattatttaatttatttaatcttatttaatttagaattataatttatatttgtgccaacatattaggaatctaatgggtcatataaaataagaatcattgtttagaaactaaactgaaataattaatcaagtgtgacttgattgtaaataagttttagaaattgagggatataatgtaatttatataagaaataacaattatagacctaaaaaaatcaagttagggacttgattgcataaagttttaaaattatcatgaaataatgtatgtggtattattcagggaaaaaagtgatattttactatatatagggttattaagttttttctataataagaatgtcttttttttatatagaaaaaaattacgttagaaaacaaaaagagctatcactcataggcatgacaatctctttatcctacaaaaaagttttaaaagatttctcactattagttcgtataaattacttattattagaagtcagatacttagacgacttgtgatttgcgataacttaactttgaagaaattgattgaaccttaaattaaagatttgatattcagataatctttgtataaattcggaacaatcctagattatctaatggaattttgggctttcaatattttttcaaaatttattattttctctgtgtatatcgtgcagggaaccaataacactatcattgctcatttacattc

SEQ ID NO: 56917 - DNA, 1013 bp, Populus trichocarpa
  Intron number 1 from transcript POPTR_0015s02040.1 (locus POPTR_0015s02040) derived from phytozome v7.0 (chr-ID scaf fold_15; pos 1401544 to 1402556)
caaaggaaaagaaaagtgctacctcccaagcgaaggttttccctgtcccacagaaagtaagcaattactgtcttgttttaccttgtgcgtatccctttattttcaagaaaaatcatagctcagctgaaactttgaattccttgcatatgtgacaatactaaccttgttttgatcaaacaatcttggtagagttaatggcaccaactgagccacttggtcataaattattccatttttgtttaaaattgcagcactcttgttctgttatagatttatcttcccccttttttttttgctgatgttatctgtttttcgtaatgtgtaggtatatttgaccaaataatcacccaaatcatatgtaaggattctctctccattttattactggctcttgctttgcataagcatacacctagcagctagcactgatcactccccccacagcaccatgaaaaatttctgcagaaaatgtttatctagccacaagatgtcatcataatgtagataaaaatatagtctttaaagaggtcatttttggctgtgaattttagaaatggaaaatagctcacaatgcatatggacctgatagaatggtaaatggatgctatccgttgtttatagatatggtttcgaaaacgaagctgcaacagtatgcataaataccaaaaaataacaggagcctctgagtctatgcataggtagccaaaacatgtgcagggttagtattcatgaggacaatgtttttagcccctgcctatctcagcttgcatttggtttagaagatagtgtaattgggtttcagctatctgattatgactcccctgattaatgttattttgtttttacagcactttggtggtttatattaatgatgattggtaagaacctttccgttccttggattataagtttaattcatcttttccagcaggcaaagatgccaatagcagctgactttcttttccctgaaatttttactacacagcgggactcatcattgcaagaactgtact

SEQ ID NO: 56918 - DNA, 552 bp, Populus trichocarpa
  Intron number 1 from transcript POPTR_0012s04530.1 (locus POPTR_0012s04530) derived from phytozome v7.0 (chr-ID scaf fold_12; pos 3816870 to 3817421 reverse strand)
agatttcccggctcgagctaaagcaatcctcgaaggtgatttatgagttcaactctatgatgcggacttgccatcaaatcagccttgatgatggggagaataagaaattgtgttaggcgcaaagagtgagagaaatggatttcgagattgctagggattttctaaacaaggtgaggatcgaatgtgttgtcagtgagattttgaggtctttttttaaaaacattctggactcaaaaaccttcgaacaaatataaaataaaatataatcaaattattggagatttttggtaattactattttttttaattaaccaataaaatttgtatgggccaaagatgaaagaaaaagagaaggaaaaaaacaaaggagccgtattgtgtcccccccccaaaagggctgaaacattgagaaacgagacatgataggaaaagaatctgcatacacagggaaaaagcacactgtattcgaaggtgaagacatggttactcgtgcttctctgtcccgctttcaccatagccccattatttcctgaggggaaacagctgacaata

SEQ ID NO: 56919 - DNA, 538 bp, Populus trichocarpa
  Intron number 1 from transcript POPTR_0009s13290.1 (locus POPTR_0009s13290) derived from phytozome v7.0 (chr-ID scaf fold_9; pos 10626547 to 10627084)
ctagtggttggtgtgctagaggaggtcaagctgtggttagtttctttccctttccctttatgtttttggttctgcattttatgttctcattgtagttagtaacttgttataatccttgataaatttgtgacactacttaccctcatagtgcaagatgtgctcgtcgcgactgccccatttgcgttgttagtggcccaaaccaatggtttataactgtagaactggatgagtgatgatacatcgcaatgaagattttctcgagttgtttctaccgtaggcttaatttagtcatttacttctaatcttgatcgctaaatgtatgagcatgatagaaagtattggaaaacaaatttataaaggaatcctcaatgttgagctctctttcttttcttttgtcttttgttttttaaattttcttaccgattctgctgttttgatttttttaattcaagcattcaaattttgtgtaatgatcaattaccaagtgtgacaataatagaaaatgcatcaatttttatgtgggatgtgcagaatccat

SEQ ID NO: 56920 - DNA, 878 bp, Populus trichocarpa
  Intron number 1 from transcript POPTR_0004s03550.1 (locus POPTR_0004s03550) derived from phytozome v7.0 (chr-ID scaf fold_4; pos 2460756 to 2461633 reverse strand)
ccttcacgttattcaaagccgcgtttcacttccctgtaaggacccctcttctctctccatgcctccttctgtatatatattaagtttatttgttcgtatctgcgatttaaagctttgaactttggtatttttaacaatgatttaaggtaaagcttgaagctttttaatgggattttcgttctgtgttctgggttttgatttttggtttctgggcttttaatggtttgtgatttcatgatctgctgtggttatgtggtgattttttgtttggtctcttggaaactcgaggaatgttgaaaagggagggactctttgcattttctttataattgaaatgaaaatttcttagatttttgaagggtaccagtactagtattagttctgtcatgattagctacatgaagggttttgtagaaatggattttttatggtgatgaatctcgagctttataatttgggtttttttttttagctttttaaagtcaacaaagagtgttttgtatttccttcaagctgattcttatgctaggtaggccctttttgagtgtttctggaatgatttagtttccgattccagaattgccatggaaaggacaatgtgtatccataacttgtttgattaaaccaaaaaaacgtaaaaggattctatgttgcttttagtctcatgaatgcatgtgttgtggtttagatttctatacaattgatggtattttttttttttctgattatgccttctcatgttgtgttcgattgtttgcagtcaagtaggtcagagctctttgcgcgtgtcccgttctcttctccagtcctccacagatatttatctaattttaaagtaattttttcttgcttcttcaagtttatatttgtatatcgaa

SEQ ID NO: 56921 - DNA, 577 bp, Populus trichocarpa
  Intron number 1 from transcript POPTR_0015s08660.1 (locus POPTR_0015s08660) derived from phytozome v7.0 (chr-ID scaf fold_15; pos 9972911 to 9973487)
actggttcttaaggtactgagtttattaattaatgttgtcttcttttcttttttcttggcatttatattctgtctgttactggataagtttgagaggtaaataaaaattaaagttgtcttttttgttcaatgaatttttgttttgtcatttatataatttgtgggtttgtgttgttttgtattgattttttttccgttattgatgaactttatattataagggttcattttattgaattttggaaacatttttgaaaagatctaattaaggaacgttaatttttattttttttggttgttgcaagcatggaaagttagatgggctgtttgacccagaagttaaagaattgagcttttgatgttatcattattgctgtttttgcttgggttttagttgactttgttttcatatattagctacatgtgtattggttggttcagtttgtttataattagatagcttgcataaagatatgattatcttgtttggatctaaagtaccaattgtatatatagcttgccttcatcttttttatgaaaagtttcttgcagttgatatattggaactcggtgtttt

SEQ ID NO: 56922 - DNA, 555 bp, Populus trichocarpa
  Intron number 1 from transcript POPTR_0012s01920.1 (locus POPTR_0012s01920) derived from phytozome v7.0 (chr-ID scaf fold_12; pos 1509821 to 1510375 reverse strand)
tgttggcagttggaaggtagattgacattcttactcaatttatattacattttaatcttttatttttaatctctctatttgctggtttgttaaggcacaagtttatattcagtccccttgccaccctgatttgtaatatttctttcatacgtgtaaaaacaaaaacaccacttcttattcatcatagcaaaggaagggcttcttcttttttttccctttttttattgttgcttggcataacttcatttaaattctttcttaatataaacactttgaataatctggcaaaaactagttaatttgatcacttttgatctgaggctttttggcactccaagttggactatgccagcctactcagtcgtgtgttattgtgtatttggaagtgagtttacataagttagagagctttattgattccacacagataatatccctgagatcatctgtaattcagatcaactgaattgttgtccttcttgaggtcttttgcattctgaatttgttttgtgtatggcagcacagccttcctcattgaacctgggcgacaactag

SEQ ID NO: 56923 - DNA, 715 bp, Populus trichocarpa
  Intron number 1 from transcript POPTR_0014s15600.1 (locus POPTR_0014s15600) derived from phytozome v7.0 (chr-ID scaf fold_14; pos 11622354 to 11623068)
tcttctccgtgtctcactctcgcagaaaacctagagtatttttactctctatttcttttcgttctttcaatttgtaaccattctttaatttattggtgatttgtggaaatttgatttcaatgttttgattttttatttagaacgatttaagtggagttataggagaatgctggagatgtgtgttgtttatttttgacagaaactttcaaacttcgctgtttcagattctaattgtcacccatttaggcaaaagagcagttttcatttatcaacaaaataaaagagtttttatttttcacttttcccatatttgaaggagggctagtacaagaaattagctgagtaaccccagccttttggctcgtaaaagaaaaaggatagaaagaaagaaagttaaagctgatattatcaacagagccgcaggaaatgaactggggaatcagtggtgttttttatggctgaagattgttgggacacacatcggccactgtgattaacaattgaatcctttttttgtgcaaacactagacaaaaaaatatgcgtggaaaaaagtgtttcggacattttggagtaattcatcatctgttttcataggctcttttcgttagtgtttgaagtatgaatgaaaggggaaaaaaattagagaagtgaacaatggttattttgtatttctttgcaggagcaagggacaaaaatacctgatatagagacatt

SEQ ID NO: 56924 - DNA, 187 bp, Populus trichocarpa
  Intron number 1 from transcript POPTR_0001s43000.1 (locus POPTR_0001s43000) derived from phytozome v7.0 (chr-ID scaf fold_1; pos 43053399 to 43053585)
gtttaaaactgtaagtaaggccatcgatagataagttttggattaaattagtgttatcttccaattttctgttttggattaaaaattctatctttctggggttttttcttgttagattgttgagacatatattttcttagtggattttgaatatttttcaactatcagttttggtttctgcagataa

SEQ ID NO: 56925 - DNA, 895 bp, Populus trichocarpa
  Intron number 1 from transcript POPTR_0015s13630.4 (locus POPTR_0015s13630) derived from phytozome v7.0 (chr-ID scaf fold_15; pos 13503166 to 13504060 reverse strand)
tctgcgtttcgctttatacagcttgtcgtttcaaggtcagtagctaattagtctttttatttctttattttttctgcaggaaaagaaaatattgcttgaattttttcaaattatttttgttaagtcttaagatttttgtgatcgatctcttgagctaaaaaaaacaaagtgtttttgtgttttttcttttcttttctcttttgatcttttgatttttaattgataattaaaattaattaagaactgggttttaattaagtaagaatttttttgagttctcgattctgaatgtgagtaattaagtggtggttaagcttgaatagttgtcaatacatataattagtgattataggggttttaagtgataaagttagagtctttttgggttttagttgggtagtgtagttgctgtagctaaagctgagagctaaaaaaattagggtttttgggggataatttaggaaatgaggtttttttgagttgtgattaaaggggggttgattaaaagataattaaatttggagttctttggatcttagttagtgttgcaaatgtttctaaatttagctaaaaattagttagtttttttttttttcctgggaggtaagtttgttcttggaattgtgttgattgagagttttagtttttattgtttttcgtttttctagtgctgatgtagagttatattgtttgttttagatctctacaagaaattgttgaaagctgaaacagatcacaaaaatattgggttcaaatctggttggtgaagcgtgaattgttgattatattgtgcagtcttttgtggttttttttttttttttttgatgtgggttttggttttttatgttattatgactcaggaggttaagaatatttagttttggaaaaattggtc

SEQ ID NO: 56926 - DNA, 960 bp, Populus trichocarpa
  Intron number 4 from transcript POPTR_0009s01110.1 (locus POPTR_0009s01110) derived from phytozome v7.0 (chr-ID scaf fold_9; pos 1243459 to 1244418)
aagtcacaaaggtattcttttatttctttctgcaattgccattcatctctcgtaattactttgtgttcctgaatcgaaattgtttgaaggtacacagtttgattgatttggaatgcacttgattcgtttcatctatactccatgccattccgcagcttagtagtcattttctagtcatgcccacaatttaatgttattgcaatagaggagccttgtttgatgactaaagggggaaaaaaaacgactctatgagagcatgtggttgaatatttcacttttgtgccttttttcattatatctcttaaagtaagtagacttttgcaattggtggtctcaagaattttacatatttttttgagatggagacagaaatatatggacacaaggtaaagcttggacaatttttgaagactcgcaagaatgaatacaaaacaggaagatgtcctgctaggaacaaactgtgtacacttattgaaaaatccatgattttggataaggtttatttttatgataaaaggtgtcacttttgatttccacatcacatataaccaatgagataattgcatgttttttctaggataaggtttggttgaaggctttaggccataatctcgacgcttggcccagatttcctttcaaactaggatgaatattgacccggtcaaactcaggtgacctagcaggtcaactaacaactcctaggacttttcttaaattttttccaaaatgaaatcgtttcaattttgtttttttaaaatgatgttgttttgaagtttacttgggcaaggcagggcaaggcacaactcaagccttgagcctggtcatataactatggcataatgtttctttcatgtcttttttagatatggtttattgtgttggttttcttagttttctctgattgtatcctgttaaactttacttttcaggttatttgttcactctgtgacaccgaacaag

SEQ ID NO: 56927 - DNA, 911 bp, Populus trichocarpa
  Intron number 1 from transcript POPTR_0004s05590.1 (locus POPTR_0004s05590) derived from phytozome v7.0 (chr-ID scaf fold_4; pos 4324634 to 4325544)
cacagctgctgcagcattcactatctgagcctgaggtaccacaaagctctctcttttatgatctatagcctctctttttttctctccttttcttctttctatgcgtgatgtgcataaatatgttaatttgtatatgtattttctaagattctttcttgttcatataaagaggatgtgaaacttgtgtctttctgttgcctatgagtttgttgttgtttgctgaatcagagcttttgtctttagttttgaaaacccatttgattctctttattgaaagcttgtgagttcgatttgcgtaactggatcattgtaaatttataattactgtattagtaccatataaacttgacacagaaaaggactccagttttctgtttttgatttaatttagaggataaatttcaattgtgggcgcaagcagaatgattaccaataactttatgtcctctattgcttcttttttgtgtgtgttgtttttatggggtttagttagcagtttttcttgtaattaaggtcatgaagtcataaccaaggactctgacaatcttctgggaccttagggaaatggcaggacttaatattgtgattagataaattttctatttgttgatatattcttttatgctaatatttggttttgctattttgtatatcaactgaatattcaaagaagtccttgtctttttttggttcttaaaaggctttgtgttctgttgccatctgtagtataaattgttattggtgaggttttttgtttgatatctttgttgattgcatccgaaactgattagaaatatttcagggttttgattttgtatgatttatttgatttcttcttgttgtcttaatggtttgattttttacattattgaaggttgttgatattaagttaacattttctattttaggca

SEQ ID NO: 56928 - DNA, 624 bp, Populus trichocarpa
  Intron number 1 from transcript POPTR_0014s16300.1 (locus POPTR_0014s16300) derived from phytozome v7.0 (chr-ID scaf fold_14; pos 12403179 to 12403802 reverse strand)
cgcaggactgtcaaaagtgctccacaaagcatgtaatgtttctggtctctagctatagtaattaatatcagttttactagtttttacaaatcaataacagcacagcacctctttgaatttttctcttagtttcgaaagagagaaaataaaatatacctaagtcattcttaatttcttgaagttgtctttggtttctgatttctcgtcttctaaattaaaaaaaaaaagatttctcatccattgcttgcttccgagtttcttagcagtgtacctagcagcattgagcatggtagctgtgtattcactagcttgctagcttatacttttagcacattgttcatcaagaaagatttatttgaatggtgggaagtaattgcaaatgaatgctgggaaaagtgactaccaaaagcatgatctctcagctctgataatttatctttatggcactatcatttggagggaaatttcccccaagaaatccttagtctggagaaaggggactgctagagtgaagtttaggaagatgttcaccaacacacttaacaacttgttctaaaatctgcattttaggttcatttaattgcaataaaaatctgaccatatgattgtgatcataaaacaggt

SEQ ID NO: 56929 - DNA, 628 bp, Populus trichocarpa
  Intron number 3 from transcript POPTR_0001s25820.1 (locus POPTR_0001s25820) derived from phytozome v7.0 (chr-ID scaf fold_1; pos 24880283 to 24880910)
atatcagtggtgttgtaaaacctggaaggtaatgcatgcatatgattacttagaattgaagttgttcctaaggatggtttcgaatcctgtctgaaggaatctcatgtacattgagaattatgccagttaattttggttggtattatggaagtcttctggtttacagctagagaatctgttcttgattttctacttgtcaatggcgactgcacaaatagcaagaagttggttatcgatcgcatcacattattaagagttctgttatagaagcaaattcaattaaaaaaattcacttcttttccttaggcttagtaactttaaatgaattatgtcatgctgagatcgtatttgtgttctatctcaattgaagaaaaaataagcagataagtcttttgattttagataaagaagcaaggtcaaatccatatatatcaagtactttattgtgttcaagtaaatattttcgatggtttacctttcatacgactttgtgaaaaagttcggtttgtttatgagctaaaactacccttttgattggtgctctgccggagaattgattagtttcatctgttgccctgagaatcttaaccaagtcaaataaacatgttttgatctgggttcttgcagg

SEQ ID NO: 56930 - DNA, 374 bp, Populus trichocarpa
  Intron number 3 from transcript POPTR_0014s01500.1 (locus POPTR_0014s01500) derived from phytozome v7.0 (chr-ID scaf fold_14; pos 1442929 to 1443302 reverse strand)
gtaaaaacggtatgttcagactctgatttttttaatccagttgaatctgcatttcaagattgtttccttgtaggtgtttgttttttcatttacttttaaaatgcttgttggttattttgttcaagtgctcgtaatctgcgagtattttgatatatctatgtagtgctacaaaacatatactgattaaaatgttccatcagcaactatcctcatctttgtgacattggattctttttcctgtttgtcaaaaaaaaaaaaaactaaaatttattatggattttaactcccttttcttttccatcgaatggctcgtgtcctttggctggacggttcacttgtggtctgcagtgctgcctgaagagacaagtaagtac

SEQ ID NO: 56931 - DNA, 570 bp, Populus trichocarpa
  Intron number 1 from transcript POPTR_0012s12760.1 (locus POPTR_0012s12760) derived from phytozome v7.0 (chr-ID scaf fold_12; pos 13187291 to 13187860)
cttactctttccatcacaagtactactgctcataggtatgtttcttgttattctttaagacagaaaaaaataactttctagtttagttttttatttgatgaactgtagagtgtttttgtttcctgtgtttggttaaagtttgaaacttttttttctggggttgcttaatctgacttgttttttaatgattttttttcatgtttttgttttgttgcaagtaatagtgatcttagaaaagtcgttttttgttctgtggtgggttttattctgattgtgtttttcttttggtttgtttggagaggtgatctgcgaaaaaaatgcattagaagttgagcagaaaagcttgaactgtttaattcttgtctactttgtcatcaataaatagtcttgcacctttgatcttaactagcaaatggttttccaagacttgctatttttaggctttttttttactttgttatttcttgttctgattaatcaatagtctaaaattcttgattatggtatatttaatatgtttattttaatgatgcaggacttggttaggtgcagaggttcacagagtgattc

SEQ ID NO: 56932 - DNA, 420 bp, Populus trichocarpa
  Intron number 1 from transcript POPTR_0004s23230.1 (locus POPTR_0004s23230) derived from phytozome v7.0 (chr-ID scaf fold_4; pos 22011894 to 22012313)
tggcttgaaaagtgaaatactgaccaaaactagtggtatgagtttcaaggttctgcttttttctatgtttcttctagtgattttcatcactttgctcattgtagctagtacaccttttatagaatttcctgcttataatggataaccaactgattaggatttagtgttttatttttacatgaatctcccaaagcaactcagccccccccccccccccccccccccgtgcatctttgttggcttattaatatgtttttcttttcttttcattttttgcaatcaccgaatacattagccttgaagatttcttctcattattgaggtagtgattctcagctattattatttctttttcctaataatctcagtcacaatcatttgattttgttcttgtaggacattctcactttgtgctttcaa

SEQ ID NO: 56933 - DNA, 789 bp, Populus trichocarpa
  Intron number 1 from transcript POPTR_0004s18290.1 (locus POPTR_0004s18290) derived from phytozome v7.0 (chr-ID scaf fold_4; pos 18235845 to 18236633 reverse strand)
caattattgtgggtgtttgagaatttaattgttattgtttttaaaatgttttttattttaaaaaatattaaaaaattatttttttatttttaaaaaattatttttgatattaatgaattaaaatgatttgaaaacatagaaaatattaatttaaaataaaaaaaattttaattttttttaaaatatttttaaaatacaaaaacaaacaagcaatttcattattactggttttgtatccctttttaaacccatagttaatgaagagtttcgtcaattattaaagcaattataaagttacacctactctagttatgatttgtttcttctttataacatcaaaaacatttttggtagttaaaaataaaatttttattaaccttttaaatttgaaaaatataacgaaatataaactaatttgaagatattcttgatgatcttattgaaaaaaaaaaaaaagacctcatataaaaaaggtggaattcaatttattttttttaaataaattaaattaaatccgacctgcctccttctcggaccaaaccatagatgtcataataatgatcgtcgtcgtcaaagccatagtcatcttggatgatagttgctttttatattacccatctcatcatttatagccttacatttctactcttctagccaatctttctagcttgaacaaacttcatatccattctcataacaaaaccaagttctttagtactaactagaggaattaattccaatattatggaattagttgaagaagtggtgattgtaggagctggaatagct

SEQ ID NO: 56934 - DNA, 673 bp, Populus trichocarpa
  Intron number 1 from transcript POPTR_0012s10810.1 (locus POPTR_0012s10810) derived from phytozome v7.0 (chr-ID scaf fold_12; pos 11516062 to 11516734)
ataaatctcctatcttgaatcgcttcaagtataccgtatgtttctgatgcccaccacagccttgccctgtatttttttctttactgctgcgctaagtgtgttgccataaattgatattatttgaaatttcagatgttcacatttggggcatctgcaatgatgcaacttgaagtttttttctatcatttattatttgtgcttcgaagagaaatggagaaattgtcaaaacaactgttttatcatattctattttgcttggtgatgaaacaatatgttttatgaactggctattggcaacgtgagagactgagtttttgatcatagaatctacaggagatcaaagaccatttagtgggttacacagagacttaagaccaatgaatgacaagatgtcgttttttttcttctttggaaccattgtgttgcatcctcaatttagcttcagctgcaacgtggcagcaatcagctgaactttttatccattgcttaggattgggtgcatatcttgatcattctgatctgttgagattgtaaagcattctttatatcatattgcttgtaatgtatgtatgaaaaatttcaatgatatctagggcatttataatacaaccttttaacatacatggtagcatgtttaggtttcgctggatcttcttaagcatatagaaggtga

SEQ ID NO: 56935 - DNA, 313 bp, Populus trichocarpa
  Intron number 1 from transcript POPTR_0014s11670.1 (locus POPTR_0014s11670) derived from phytozome v7.0 (chr-ID scaf fold_14; pos 8644567 to 8644879 reverse strand)
tagcgtcaaggcctgttatcatcttcatcattctggtactgcactcgttcattttaataaaactacgtacttgcatgcaaaattcttactagttgtttgattttcaacgtagcttatcactgcatgcctgaaatataatgatgaaaatatttaatttcttcgatgataatcacctattctaaagtgggttttcatctaatatttctttaataattattatgttccttttcttttattccacggaattgcactcaaggtttgtacaaacttaaatgcaggtaattggagttttgctactcccttgtgtagtggt

SEQ ID NO: 56936 - DNA, 568 bp, Populus trichocarpa
  Intron number 1 from transcript POPTR_0012s07230.1 (locus POPTR_0012s07230) derived from phytozome v7.0 (chr-ID scaf fold_12; pos 8014132 to 8014699 reverse strand)
ctgtttcggcttcctttccctttgcttaaagccaggtaaatttctcatctctctccctccctgcgatttcaattcattattattattattgtatctgaatttcaattcctttaaattctatacttaatcctaaggtgacgttatgattagaaaaattctgtgaacttgtaatttagtatggaaagtcctttgtttcacatcattctctctcttaaatctccatttgctttgcttgttaatttctaagtccctttctctaaaaaatacaacagaggtgattgagatttgtgtttttcccccttcttggttatgtttcagatgtctcaaaatgtttcctaaattttgagatgggttttgttaaatttttggacccaaattaggatgttcttcgcagtttgtgcttttttttttatgtttcctatttcctgtgcgattttcagtttttctgaatctgaaaaggcataataacatagactgtaatcaaatctgtattaattttgcctatcttgtttaaatcccttttggttggcttatatgttctttcgagatgtctttgagtgcagagaag

SEQ ID NO: 56937 - DNA, 487 bp, Populus trichocarpa
  Intron number 1 from transcript POPTR_0001s35790.1 (locus POPTR_0001s35790) derived from phytozome v7.0 (chr-ID scaf fold_1; pos 34138112 to 34138598)
cgcaggccatcccgatccacaacccgtgagtcgtgaggaatttttttttatctttctagattcttgtccagtctgtcaaacaccaaagaaagcgaaggagaaggctaggctagactagactaggccagcattgaggctttaatgctttggattttgataaaagggaaagaaaatcaagctttctttggatttcctaaaaatcttccattttcttatccaacattattgactgttcccatctttctcgtttttaaccatttcaattttcattgtaatgcatggatttgaattatttttagattttttagggttttatgcatggatttgattaatggtgtggatagtccggctgactttaggtttaaactttgcaatggtggtatgccggttgctgactagtgcttcccatttctttttttagttttggaattttgtttttgaagttggcttacttggaaaatattgcaggtcgagaaaatttttaaag

SEQ ID NO: 56938 - DNA, 876 bp, Populus trichocarpa
  Intron number 1 from transcript POPTR_0011s08350.1 (locus POPTR_0011s08350) derived from phytozome v7.0 (chr-ID scaf fold_11; pos 9646602 to 9647477)
ctctcatctcctctgagattagccacttggagaaggtaatattttttatttaattttttttaaaatattaatttactaaaagacgatgacaagagcaattaacaataacttggtatttgatgttcttgttttagtggtttttatttatatgtttatcgattctgataagttgttttcatttagggtcataatgaaatgaaagaaaagaaatgttgtagatagaatgattacagtccgaggagaggaatcctctcttaacacggtatataaagtagtgttaataactcaaaactgtcctgcaaatgttagtgcttctggtttaaggaaactgttagtcatggttccttctctacttgtattgcccaagtgtgtctttgtgcggattctttttattttcttgtttctgaaacaaaggagagaggctcttactcgttacatcttgtttgtaagcaaacgctagaaccaattgagccacaggcgcattgacattaaacataaatgtaatcaacttgaaaggatgataatcgtttgaaccttgttcaattaggtagccatacatttagatttagttgaatcaaggtgtttttttttttttttttttccgatgatggggtgcatcttaatcttggaatttcataattcctggtggattgattagtgacctacgagtccttttccccccctaaattttgattaattgaaaagaaatagtacttggttttgcaaacttttatattttttcaagttggggttggttcatctttggtgatcggttattcaataccggcctaggttggtgaggtttttcagggtagtcccttcttcttttagccactaatcttcttcttacttctcatacacagttatcaaaggaac

SEQ ID NO: 56939 - DNA, 581 bp, Populus trichocarpa
  Intron number 1 from transcript POPTR_0015s01330.1 (locus POPTR_0015s01330) derived from phytozome v7.0 (chr-ID scaf fold_15; pos 826785 to 827365)
ttccacaacgggatcgtaattcaaagtccttaccattgaaaaatcacaaagaaggtattagtactaaatctttggttgtatttatgcttttctttgggttaatctttcaggtgttgtagtacttaactcgtattatgaacaactgttcgacaaatggaactgtttgtcaaagaatcgaacttgcacttcagttgctgagatgttgggtttgaagttttcttattcttatcggtttcataagaagtaaagtctcatcccactaagctggctaactttgaaaggcttaatttggtagatttttttaattactttcctttacttttcaatttttgatgggccctaaatgtgaaacctttaagaactgaagtttttattttcttcctttttactaccatttgtagtttctttccaaatttacatagtgcttgacttgttcttttgatactgctctcagttattgacgtaagatcttttctccctttcttttggattcaaaaagttttttgctgataccattttgttacttttactgaagggtgattatttatgcattgcagggctagaagaagattttatcatcg

SEQ ID NO: 56940 - DNA, 668 bp, Populus trichocarpa
  Intron number 4 from transcript POPTR_0004s16990.1 (locus POPTR_0004s16990) derived from phytozome v7.0 (chr-ID scaf fold_4; pos 17350656 to 17351323)
gcaagttcactcggaacccgactccacctgaaggggtaacgatcatgattaattatttaatttattatagttcatgtggcagacaacatggaacttttgtagtcaattacttttcgttggcttcttgtgttgtgcatctgcatcgtgtaagtacatgcatgcacataaaatcttggatagctgagcattaatatctcattcttgtttagtagctaaattggataaattctattaatgtgaaaagtaaagaacattgtccatcattgcaagctttgtattggggatttatatgtgattgaccctagtaaaagttaagcccagtgaacacagattggtccaaattagaaaactggaagactggtgtatttggttcttaagaataacattatgccttggtgctaggtatcatcttatcaggctgacctatattcttaaaaatgcacattccttgggttcgcctgggcttcttccagaaggaattccactgttttgttttttgagtgcatctttgaacagttgcttatatttgataggtgatcgcaccaatcactggtggatatttggcatgaacattaacaacttcatcaaagtagctatgctttttgtgctttgtgccttttccctttctaataatttggtagtattgcagattgagatagtgtataact

SEQ ID NO: 56941 - DNA, 600 bp, Populus trichocarpa
  Intron number 4 from transcript POPTR_0009s13780.1 (locus POPTR_0009s13780) derived from phytozome v7.0 (chr-ID scaf fold_9; pos 10924026 to 10924625)
gttgggctgctcgcaaattcaatcaaggcatggtcttttctttcccggtcttcttattgttcaatatgtgaattataaaggtcgtgattcaagtatgaatgcaaattcacttagtaatcacacaagttgaatctgcgtagaacaaaatttttggattaaatttgggactaaatagtctgaataatatctgcttgaaaaagttgctgtatgttgattatttggcgagagccattgtgtttaccttacatcttgagttcgaatcagataaaatgttcagggatatatttaactaaatggagcttaacaacagctacaatctaaggtcttatcaacttgaagatattgtaaaagttctttccttgttactagctctttttttttttcctgaaagattgtcgtttgttaggcgagggaaacgttctgttaaataggttaatgataatgtattaaaatgtcattccatgctttctatgttttatttggtcataagggtttgctccattcctgacagtttcaatttagttataaataatgcctgaggtggaatatttgattcatcttttctgttgttcagtttcgacttttggagctgttttggac

SEQ ID NO: 56942 - DNA, 847 bp, Populus trichocarpa
  Intron number 1 from transcript POPTR_0012s08010.1 (locus POPTR_0012s08010) derived from phytozome v7.0 (chr-ID scaf fold_12; pos 9017643 to 9018489)
tctttctgcttctgcttcgtttcttttgtctcgaggtactgttatttcatttctgttcttttcttttttcttggtttagatgatgatattttattgcaaaggttttttttttatggtgtccatttatgggtgagttaattttggagataccctttgcctttggttggttgccaagaggttaaggtggagaagaaatggaaaacgaaatttgggttaaaagtgtttttctttatctggatcatgagttctaaggatatctgttctcatctctcttttttcgagtctaaagaagattcagcatggaacaaaaagttttggagattttattccacaactcttttcatctacaattaaaactggaaaatggagtgtcaagtctctatatagaccttaaatcagaaacttgggacaaaaaaaggagttgtttttttccatttttaattgttcttaattcaacatactatatctctttgactacatgatgatttacaagcagtatttttctatccatggtggctcccttcaacagtcaaaagaggattctgagagcatatactgaataaagaacacaacttataagtaaaaggaaaaactttgtgcattttttttctctcttggttacagagagctggaatttcaatacttaatgcaggccctgcttttcattttcctttctgtgcatgggaatgcaatgatactttctagtttttgttccaatcatgttttttttatatatacattttttatttttattggttttcgagatctatggttgtcaggattagtttatatgtctctgatatgatcctcaggaaaaaatcctagcaggggaaggagcatctacagg

SEQ ID NO: 56943 - DNA, 550 bp, Populus trichocarpa
  Intron number 1 from transcript POPTR_0015s10970.1 (locus POPTR_0015s10970) derived from phytozome v7.0 (chr-ID scaf fold_15; pos 11697746 to 11698295)
ttcttgcggcaattcctaattctcacaaggtttattttcttagaaaccctaaccctagttttctttttttggtgattttcttgcttagatagtgcttgattaaaaggggcgtttcttttctaacatttgaagggtatttttttgtgtgtgttttgattaaatgttgctctaattagttgcaaaatgttattatgatgtattaagatagaatttgggggaatactggatagtaattgattaaaaaggaacagtttttacctaaaattttgagacatttttgtgttttgattggaattttgttatttagtctcaaattgtcaatctgatgtatataataagttgggagtcaagtggaacttgctgttagaaatgtttaagcttcaatacttgataagttagtgatctagactatgaattttttgggttaactggaaatgtttatggcttcaaattgggaaaaattgtctttgtgatttggttatcaagctaatagtgtggttctttcatcttccaaaataggcaaaaccttttgaaacgagttctccagcag

SEQ ID NO: 56944 - DNA, 419 bp, Populus trichocarpa
  Intron number 2 from transcript POPTR_0011s14510.1 (locus POPTR_0011s14510) derived from phytozome v7.0 (chr-ID scaf fold_11; pos 16879262 to 16879680 reverse strand)
ctcaaaaggagtgaagcaaacattcgccaaattgagtaagttgagctacaacttctaatatattgccttatgtgatcatttgggatttttctcttgttcttgaagaagaagtgcaggaataaaactgttgagacctgtctactctcctgtttctttttatttttgatattttacactaaggcctaccttgttctctttggaatagaccttctttcctggtagctcacaaaaactagaaatttaaaagcaatcctggacttccctatgtgaccaaggattgaccttgttggttaagtagctacaagattaattgtgcattggcaagttatttgagttttgatttgtgaacgataagtgaaatgctatgttgaattctgtctttagaagtcatcgaaggttggtgaagggcttctttaaga

SEQ ID NO: 56945 - DNA, 424 bp, Populus trichocarpa
  Intron number 2 from transcript POPTR_0004s17470.1 (locus POPTR_0004s17470) derived from phytozome v7.0 (chr-ID scaf fold_4; pos 17655752 to 17656175 reverse strand)
tggtgagtatttgattaactctacactttttttttttgtaaatgtagttatatttatggtttcttgataggaaagacttcttataaaaaatgaacttgcacgatgttttcctcagttttttcttcccatcaatattcactatataacggtaatgtctcctttatgcttctttgttcatgttcatggcaatgacatgctcttacgatactacccacatacttgtggatgaaactaagtttgtttttttcttagattttctggttgtcaaacttcaaattctttctttcatgctaactggttccctttctctatgtaatgaatatgggatatggattactcgataatgattatacctttaactcttacccttcaattgaatttggatgcaggcggcaccttgtgctgttttagctttgcttattca

SEQ ID NO: 56946 - DNA, 614 bp, Populus trichocarpa
  Intron number 1 from transcript POPTR_0004s17470.1 (locus POPTR_0004s17470) derived from phytozome v7.0 (chr-ID scaf fold_4; pos 17656342 to 17656955 reverse strand)
aaagagaagacttgtgctggtaattaaacggaatcccaaactattagggttttaattttttttcacgggggttattaattagagagaaatttttaatttttgcgttaaatcttcgatcttttctgttgtgcttcaatgatataatggtaattttttttattaatggattgatttgtttaatgggaaatgttccaatagagggaaaatcggattctggtgctaaatttcaggtcttttttggttgatcaatgatttaatggttatatatttcttggttttgaattgagttttttctttcattgttattgcttttgtttggaattgatggtattaaagagagctgggattattgtgctaaattttgggttttcttttgtcgtgtttcaatgattttgtgactttatctttggtaaaattttagattttattttgttctatggataaatttttttgacggggaactaatgtaattagagataaagtttggatttttccattaaattttggaacttgttgtggttatacctttcagtttttggattcaaagttttggcttgtaacattattttgaatattttgcagggctatcactgaaaactcaggagctgacagcc

SEQ ID NO: 56947 - DNA, 631 bp, Populus trichocarpa
  Intron number 1 from transcript POPTR_0011s12040.1 (locus POPTR_0011s12040) derived from phytozome v7.0 (chr-ID scaf fold_11; pos 14826569 to 14827199)
aagaaaagggtcttctctttctgcttctacttctggtaatcattctctttcttttctgttatcatgtagagtcccacaattcttttctttttatgtgttttcatgtgtattgatcttgatcattgaaggggttgttgtgtacttgctgtttgttctttcttttattgcttctgttgggatttctttattgcatgattggtgtgtggaagccgtaagagatttgatattgagaatggcatttttttttatgatttgaagtggtatttttgatgatgattttttctatcggatttgcttatttcttcatttgcatgtacaaaactgtgtggttttgatacctttatttccttcaagtgttctttgattgttgtggtgttatggattctgtgttgtatgtaagtggcgattctatcttggcttgctttggttgttacttcaatgacaatttcgatacgattcatatgtttacttaattttgatctttttttttttttatcaaaacagatggatttggactttcttgatccctagatcttattgtaaagttggttttcttgattcattattctcatgtcatgtggttgtttgtgcatcaggattgttcgtttgtgtaaggttcatctttgtcaag

SEQ ID NO: 56948 - DNA, 712 bp, Populus trichocarpa
  Intron number 2 from transcript POPTR_0014s08020.1 (locus POPTR_0014s08020) derived from phytozome v7.0 (chr-ID scaf fold_14; pos 5950272 to 5950983 reverse strand)
tcgtcattggcatccaacttctctataaaccctaggtaaattggttttcaatattttttgcctttcatgaactgttgataataaatcagtgtctcctggctctgaacagtcacattttctagtttcatgcacaatacaatgtcaacatgcctttggtctgtgataagctttcaagtgttgcctgctgatcattttcagaacaaggttgttgaatctcctgtgtgtgttcactttcttacaataatcatttggggtctggtgagaatgcaaggaattttgtttgttggatattgattgcctggatatcctggtacacctacacacatatgtatgaatttctatatcgaaattgcttcttagttcataacacatctgcacatctctgtgctttgtactagcctcacaaagaaagggctaggtactcaactattttcattattacatcagtcactgcctagctctcttgttttatttcagctgcatgttaactgttagatattgagatttttcttgtgttccttgttcctgctgtcagtatgatgatctttccttttcttttcaaatagatacaattcgcagcagttttcttcaaagagttgcataatttttaacattctgaagggcaaatttgctgttcatgattgtataaactcaaactggtgttctgtactgtgtaggcgacttcctccactgataccgtacaagttgaagt

SEQ ID NO: 56949 - DNA, 393 bp, Populus trichocarpa
  Intron number 2 from transcript POPTR_0011s02330.1 (locus POPTR_0011s02330) derived from phytozome v7.0 (chr-ID scaf fold_11; pos 2108991 to 2109383)
gttcgggcttcatctgggataagtttggtcacattgtatgtatgcagttattccctttttatgttattaactctaaaacttgtctctggcaaatatgatctcttcttggtttacatgtaaatgaaatgattaaaagaaactgctttgccgatcaatacaaattagaaacttaattatcagtatgttttacggtgtctatccatcttttcatcgtctgaaatatttaatcttacacatgcttggattgtgctgaaaatcacactttgattcaaaccttttccaatcctttgaacattcttcttggcttgatgaagttatttcttttagatcacaggtattaatcagatatgcttgaaaaatgttgttctcatctgttacaggtaacaaattacc

SEQ ID NO: 56950 - DNA, 732 bp, Populus trichocarpa
  Intron number 3 from transcript POPTR_0014s12570.1 (locus POPTR_0014s12570) derived from phytozome v7.0 (chr-ID scaf fold_14; pos 9267744 to 9268475 reverse strand)
tccccttccagcttctcaaattcgtcgatcacaaggtcagtttttcttttctccaattccaaatctatttcgcaaccgggcaactaattaccagctatatcacttgatttaagcgtgtttattttcctaatatatatatatatagtcttttaattttcaactggatttggaatgagttttcctttttattcaattgctttgacattttattaatgacgtcaagtcgtcaaccttaaatattttgttagatgttagtatttatatcatcatttcatcaaaatacatatacttatatattttattttataaaataaaaatatcgtataactattcaagtaaaattaaagatcagacgtttaattataaaaaatatataagtctaggcactcaaaatagttttatatctattttgtggaattgtttaccttgtacccagctaataaataaatttttttttatcggtgtcagtgttatatattttttccttttttaaaaaaaaaattgaagcataaatctcgtagctatagattatagtttttctagaaatgaaccatgaaatctagataattttcttgaatatttcagccgtacatgttcttggaagatttatgcttcaaaatcttgataatggggtctaatatttcttaattttctatttatattttgcatttaattgatctgtgtatgagacgaagtttcatttttccttgtggactcccgggaggcagattg

SEQ ID NO: 56951 - DNA, 325 bp, Populus trichocarpa
  Intron number 2 from transcript POPTR_0015s09730.1 (locus POPTR_0015s09730) derived from phytozome v7.0 (chr-ID scaf fold_15; pos 10872006 to 10872330 reverse strand)
tttgcgcttggagataatttaacttctcgctgtaattacactttaccatccataccttataaacaatgaataggtttatatatagggtcctcaagttgcaaatcttttgctactggggctttcaagaattcttttccaccaattatggatttaatagtgtatcagttaaatttgactttgaattgtttgttgcattagagtccctattaacgagtaaaaataggactgagtttttcttttgacatgttaatcgtgatggttgctgactgagtttttttcccctcttccttttgcttctattgttgcagataagatacataacaaa

SEQ ID NO: 56952 - DNA, 673 bp, Populus trichocarpa
  Intron number 1 from transcript POPTR_0015s09730.1 (locus POPTR_0015s09730) derived from phytozome v7.0 (chr-ID scaf fold_15; pos 10872455 to 10873127 reverse strand)
ggaaaagacctcgtttcggctgggacgtgcctcaggtatcatcagctcatttttttcaatttgttcttgacgtgaaagatctaaaatattttattgtgttttgaatttagttccggttctcttgttttttaaatatcggatcttgacttttgattttagatctgtttcgattagttcttatctgtttatggttattctttcgcagatcattattttgtatacggattatattgatgttggtttataaaattaattgaatagtttttttttcattatttttcacaaaaatcaagatgctagattaatattgtatttttattactatattatgtatgctaataaatattttatttgcagaaaaataattaattagattaaagtttttattttaatttaaaaataattagataagatatgctgaaagttgttgaggtaattcagacctaaatcttttgctaaaaatgaagatttcttctattcataatgttagcaatattatttgattctgtaattttttgtttctctcacaaatgagtttttggaaaagagaaaggggatgccgagggtatatgaagatatcaggtgaaaaattttgattttatatcttgagtggtacataaatgggtggctgtgtgtaggctcaggtaggaaatttttgtggacaagaggttgg

SEQ ID NO: 56953 - DNA, 945 bp, Populus trichocarpa
  Intron number 1 from transcript POPTR_0015s08620.1 (locus POPTR_0015s08620) derived from phytozome v7.0 (chr-ID scaf fold_15; pos 9933491 to 9934435)
ttgaacaagctgaaagttttgcttctcttctcaaggtgctacctcttttttacttttactagtttattttgatgtttttgcgggggggttttattgttgtctgcttagttgccttaatatgttaaagggtctaatttgttgtagctaaaaataccaagcttttgttttctaattgtaattattttggtaggatttttaattttttttgggtaatcagtttgcctaattgtgcaattcactaaatcttggtctttttattattggtatcggttctgatcgtttttgtttctatgaatttcgtatgtttaatttggtcttgaggtattttatggtcctataggtgaaaatttatttcctaggaaagtaaaagttttctgttttcagtgaagtgtgacatttttatgcaattcagaagcgtgaatattgcggcatataggtggaattggccgtttcttccattcttctgtttcttggaagaaaagagctagggggtatatatgagaaatattgtatagcatgactgttttgagcacaaagtacatgagagatatagcagaatctgaaaattgttttaatttatttattgtgatgctagtgtgtaagcttttatcgcgtatcgggtatttttagagccaatgtgttctgatatgcccatctgataattgactctgcaaaaacttgtagattgccaatcaacttttgaaaatcaaagtactgtttttcctctacaatgaagtaagattacatgcctgatgagtgatgaattatgactgcatattaagcatttatttgtctctggtaatggtctcaagtaatttggatctgtccatttccatttgtagctgctcagatatcaaaggaagaagttctagcacatccatattccatatttcttgtttttttatttatttaattgaatgccattttctcagtttcaactggaag

SEQ ID NO: 56954 - DNA, 679 bp, Populus trichocarpa
  Intron number 2 from transcript POPTR_0004s08140.1 (locus POPTR_0004s08140) derived from phytozome v7.0 (chr-ID scaf fold_4; pos 6655839 to 6656517)
gattgatgtccctctatataggatgctctcatggtaaatataaggaactttatgcaggtaaatttttatttctttgatgttgatcttagtacttgtcccctatgtacttttttcatcatagtttctatatttataggtcctataacatatatggtgttcaataaatgctaaattcgaaacataaattaaatgcttgtacaatggagtagtagtgatatatttattttcttgtcctgaaacatcttttatgcttagtgaatttctcttaggtcttgaaggaacatatttgtctttgcaagtgaatcataacatggtaatgttgattcaacattttaatcacaaacattataaccttttatagctcaaaagaactgaaaatcaacagacttttgcacacaaaaacatcatataaacattttagtttgtcatttttttttttgcagaaaaagttcagaaaacatcattaagcttgcattcttaaaaataaaaagtagagttacaatttttcatcactgaaatgataaatttaatctactagttgatcttcactattaaattgttttcttttaagttaaaaaaattatctgagatatcttaaaaatgttgatttcatcattttttcataattgatcaccaatgacaagtttagaagcgtggagtatagagttgttatcggaga

SEQ ID NO: 56955 - DNA, 896 bp, Populus trichocarpa
  Intron number 1 from transcript POPTR_0004s21510.1 (locus POPTR_0004s21510) derived from phytozome v7.0 (chr-ID scaf fold_4; pos 20609126 to 20610021)
agctaatgtaataattcctttctgtttctgattttaattagagaccctttattctctctagtctaatactcttattctctcatttaattcttccttttaagttttttcttggagattaacgatgaaaaattgtccaaaatggatcaatttttaactgcttgtaggctatttttttttatttgaattttgatttgatgcgacttgttttttaggtaataaacataacccatgcttcaaaattgctgatttatcgttgtgagtgacgtattttctactctggctttctggtttttaggccacttctgcttattttatctttaatgctactcaaagattaaggttttgtgtaagaagaaaatgaattatcaagtttatgttgctatcacttcttttggtttgtttgttcgcattgttgttgctgtaatgttaatttatttgagttcagcttttgctggttatgcttaataaatgccttaattgtgttttttggtttagttgaaattttaagatgggatttgttgggatttacttgtgaatctaatgaaaaaggaaaaatgctgccttatggctttgttgattgtgagtatggtggatgagtgttcgggaatggtcatcccatgagattaagctctgcagccagtctatgcctttcaggcagttgattgcccttctagctgtaataactaagaaagaaaaagaaattgtatttgttggatctgcttctcttgggttcaatattcgttgacttagtgttaagaaatctgaaacttccatcttttatttcacttacatgggtgattatactaaacacaatgacttcttttattaccttggcttgtattgttttcgtagatttccaagttcctctggatttctcatatatgtctttactccag

SEQ ID NO: 56956 - DNA, 746 bp, Populus trichocarpa
  Intron number 3 from transcript POPTR_0004s21510.1 (locus POPTR_0004s21510) derived from phytozome v7.0 (chr-ID scaf fold_4; pos 20610807 to 20611552)
agaaaagagatcaattcaactttcactggaggaaggtaacgtgaatctctgttttttctgtacctttgttttcctttgaatgtgtgtgtgtgataaggtggtcaaacacaaccttcataaactgtaagatggatatggctggggagaggctgcatgtttgaggtgggccgcatgtatttaaagtggcctgcatgggcattatactgcatgagttgcacaacactattccaaatgggacaatgaagtctttctaatcttggggatcattaaagagtttatcaattaaattcatgtaacccaaatgcgattgtcatatcttcactagggtttcattatgcatttgtgactttgccatcttaaatttttacacttcatttgattgctgagcagacatcagcaacttttacagttaggttggactggctgttgtaggatggtgtgctttttttagttttgagtaagtttttccgcacatctgtattttatatttgccagccatgtctttttcacagtgactacgtaagttgtaacaggtggtgccattgcctactttgaggtccgtaactgttgcaattctacattttcttggtaccattcaaatagacatatttgttgctaattatgtttgtgcatgcttgataaattctagtccaatattctgagatttcaggaggctaaaataactctctaattcattcccaatttttacagcaaaggaggtgcaacgagttgcgattttaaatttc

SEQ ID NO: 56957 - DNA, 615 bp, Populus trichocarpa
  Intron number 1 from transcript POPTR_0015s15770.1 (locus POPTR_0015s15770) derived from phytozome v7.0 (chr-ID scaf fold_15; pos 14973231 to 14973845 reverse strand)
tttcctggaaccactctgttattcaggtttcaaaggtgagacatcatgcaaaatctgttcctatgtgtctctttctttcttgtagcttggcattgttatcgttgtttttttggattatctgttgtttgcttctatccagaacattgaccgagtaaagatatgggctttattggtttctgatcttcataagagtgcgctttttttaatggagtcacatgcttcttgtttttgctttggtttgaatttggcatctgagtttgaatggccactctttcataaattgtattatggtaatcagtcatatgttaatgctatttggatgtgtggcatattcatgaaattgatgaattctgtgctatagtgtttaaactggttctgatgatcttttctcttctcctggtcatgcagattttttgatgtgtagtgaaaagcaagcttctgatcaaatgatttccagagatggggattagaaagctgtggttatttaagtttcagagtgatagatatttggggtacgtgcttatacaattgtaactgaactgggctggttgcgattttgtcagcaagaatgttggttataagagtggtttgattgtttggtgaggggaatcttag

SEQ ID NO: 56958 - DNA, 787 bp, Populus trichocarpa
  Intron number 2 from transcript POPTR_0004s00790.1 (locus POPTR_0004s00790) derived from phytozome v7.0 (chr-ID scaf fold_4; pos 359674 to 360460 reverse strand)
tttcgtttcaggattgagcaacagctcctttacaggttagtttatcttccccataggccatgtggaaagggatttctaagatataatgagccagaattttatgaaaatcaattttcacggtattgctgaaatttaaattctgtttgtattttgacgaatgatgtgtatttagggatgctttagcagtctagatttaaggttattacctgtaaagtatcagaagaaaatgaaaaggctgttaaggaacaaactaaaactgataaatggtacctttttttcttctttcgttacaaaggagaggttcaaactcgagatctcgtggggggggggggggggggggacactaattccagccaagagttatagctcattggctgatatttggtacttgtacacatgaatagctttatccaggatgctttcaagtcataacattggttatctactctcatggctgcctgctccctagtccctatagaatagaacaacattaaatcttgcaaggaagaaaaaggaagagccttgcttttctacagaagaatggtgtttcgtcagcttcagacatctaagacctgttaggatgtcaatgtcgacatgtctagtgtacacgataatacttggtaattctgaaaaatgctagtactaacgttttcgggatgcaaggaaagaaaattgatgtgattctgcttttttcactatttctatggatgctattatctatagtgggttataccatttcttgacctttgacatttactgttattgtgtttctaatcttttagattgt

SEQ ID NO: 56959 - DNA, 777 bp, Populus trichocarpa
  Intron number 1 from transcript POPTR_0004s00790.1 (locus POPTR_0004s00790) derived from phytozome v7.0 (chr-ID scaf fold_4; pos 360415 to 361191 reverse strand)
ttgctcttctcaacccctccttaccctccctgaaggtatgtaaatatacatgcatggatgtgtatgttgtttgattgtattgcctttttggtttgagtttgttttggtttttaattgatgaaccttgtaagtgtgcaagattttcttatgtttttgtggttggattttcaaggggtgataaaagtgtccaaaatgcattgatggagcattgaatttactactaaaagttgattgattgtgtgattctaggcataaaatttgctaatttatgtgtgtttattgtggatcactgatttttgtagtttttttttttcaattgggagaagaataaggttttagttttctactatatgttgaaatgttgattactaggggttgtagatggctttagtggattaagtttgtctgatctgatggtacaattcaattacttggaggttgctcagttgttatagctgtgaaaatgctgaaacaatttcaaaacatgaatctggagtatgtttggaatttcttacatatccctgttaaaatcccagttccttgtcaaggaaaaagtttaattttcttttagatgatgaccatgacctgcttgtttgacgtattttttctagtttgctctgatgatcctggaggatttgttcttgatgttgtgcatattgttgtattaagtgatgccagtactggctaactaccaactctactgttgcttttcatgatgattttcttgtctttttcgtttcaggattgagcaacagctcctttacaggttagtttatc

SEQ ID NO: 56960 - DNA, 562 bp, Populus trichocarpa
  Intron number 1 from transcript POPTR_0012s14460.1 (locus POPTR_0012s14460) derived from phytozome v7.0 (chr-ID scaf fold_12; pos 14342234 to 14342795)
gcggtccagtgaggtaccttagcaatacaacttagaacatcaagccatgtctgtgcatctccttaggagttgattctctttttcaaaaaacaagatgcaaatcccatcaactttaaagtgaaacaaattcaattataataattttttaatcttgctagaaacaatacctgaacacgttgaaatcataacaattcataatgaaataaaaaggacacaaaattcaatctccttcaccgaatctttaacatggaatggggaatgaacatactacattgaattcttttcagtcacaaggctgatcaacgtcttccaatcaaaaagaagtgttctagtaaaataaataaaacagtccaaaagaagtaaatagcatctctctaatctgcaatggtaacttcaacctcaacaccaggttcaattgtaatagaggtgatctgcttgacaacatcggcagaactgaagagatcaataacacgcttgtggacccgaagctcgaatctgtcccatgtgttggttcctgcaagatgacaagatatacatgaaaaaccctttagtagcttaacag

SEQ ID NO: 56961 - DNA, 671 bp, Populus trichocarpa
  Intron number 1 from transcript POPTR_0012s12330.1 (locus POPTR_0012s12330) derived from phytozome v7.0 (chr-ID scaf fold_12; pos 12538241 to 12538911)
tctaaattgttttgtgttcttgttagttaaaacattttcgcattttgttggctctcatatgtattgaacgagcaatcatcattatctgaaaagtcttactgtgaattcagaaattataagatgaaggaccagttttagctgtcaaagtgctaggcttatcgttgttgaactctaaccagtcttcaacagttgtggccttgtttatcttgcaaattttgatttttgtagtttaatcagatagtttagactaatatttgattctgtaatgaaaatacaacctatactcacagcaattaagaattattgcgaaagaaagagagaagatatttggtttagaaagggaaagttgacaacttttcttcttcttttttaactgtgtattctggtttgcatttcaggtgtttgctattgtgattaaaagtagttttagtgtctctctttgtccaattattttgcattccaaagcatcctttgcatggattttatttggttgcttcctctgtgtaatggctttaaattaagaggtgtgtatgtttgttgctggcaattgtgtgtttacttgattagtttttgcaggttgcttgttagatgcacactgaatcatatttttatagaatcaagtatccggaatggtcatttcagacgcagagaaaagaattccagtagtggag

SEQ ID NO: 56962 - DNA, 962 bp, Populus trichocarpa
  Intron number 1 from transcript POPTR_0009s12360.1 (locus POPTR_0009s12360) derived from phytozome v7.0 (chr-ID scaf fold_9; pos 10091599 to 10092560 reverse strand)
tccctaaaacacccacaagtgttactggtttccaggtaattttttattgcttgttgatttcttggacctttttttttcatctcttcttgttcttaatctttactagtattttattattatttctctttcatgtgtgtccctgtcttctatcttttttgttcctggagatagaggagatgatgacggtggtgattatgtgattgtaatttgtggactttttttttataaaaaaaattattggatatttattgggatttcaagtgtgatggttttgtcttgcttcgtgctttggatcatgttcttactttcctttttgcttgataggcatcataacttttggttttaaacaactcacttagggtttatttaaatggaagtaacctttgaaaaatttcagtttttgttcttcttagcttgtgcttcagggggattcttggatttaggttatggattttgttgctgctttaatacctccacatgctaagattggttcaaaaaagctcttttttaatcatttcggcactggaaatcactaaatgctaatgttacatcaatatttttatccttttgaaactgtcaaaccacttaaaaagccttggttttttgcatacaaggatcttttggtgtttgattcttctgttcgttgagtccaaattacctgtattgttcaccgttgattcacttaactaagagcttgtaagcttgcctttcagctcttgatggtgaatcactacgggcttcacttcagcttattgtgtattctttcagtggtttatttcttttccttaatattttttttgagctttttctcaagtatgggtgtgagatttaaatataaacacagagtttcgagttacaactacaatactgagagtggttagcaccctccaggtaatgaagtatacttacagttgatgtaatggaagttctttctctatgttcatttcagttccctgagcggt

SEQ ID NO: 56963 - DNA, 776 bp, Populus trichocarpa
  Intron number 1 from transcript POPTR_0015s12980.4 (locus POPTR_0015s12980) derived from phytozome v7.0 (chr-ID scaf fold_15; pos 13117047 to 13117822 reverse strand)
tgtgtgtgtttttcagcctcttcaaaaagtcccaggtcagtccttcctctcagaccctgatttcccattttgaaatttcttttcttttggtttcagatctttagttgtaaatttttcttacctttttcattttattttctttctttcttgttctctgcttgtaagctctacatgttagttagtggttttgagttaatagcctgtaggttggttaccgggaatttttgtgttttgaatttgttcattttttgagataataaagaaattttgagtctttttgtttggtttcagaagggtttttagaagaaaaaaaaatgaaaatttgaacttaaattggcagcataattgtcactggttcagtaaagttgaggctgctgttgtcttggttgttttgagaaatgaaatgtgcttgcttgattttaatttggatgggaattgtttcatgttggttgacattctaagctagggaagacaaagaaagtgggaattattcatcacttaggttgttacgcgtgttgtatttaagttgtgttctatacttctggccgggaatggaaaatattgaatttgttgatatatgcaacagaagcttgaagtgttctgtgttcacttatgtttctttttacaggaccgcactgttttgcaggttccaagaatatctttattcaagtgttcatgggacaaaggatgcaactttgactgcaaaattggtggccagactttcttggttttttattagtaagaaagactggtttgaaatagtttggttctctgtc

SEQ ID NO: 56964 - DNA, 429 bp, Populus trichocarpa
  Intron number 1 from transcript POPTR_0009s13210.1 (locus POPTR_0009s13210) derived from phytozome v7.0 (chr-ID scaf fold_9; pos 10568279 to 10568707 reverse strand)
gctggcactggaacggtgcgtttttaacttttctttttccacatcttgcttctttactcaatgcctttgtctcctctggatttcgcttcattaactatcaatagtatttataacctttactttatttatttatttattcttttttcatttttcggttggtagtaggtgaggttactgtatagtctttgctatattgttgtttgagaataataaaatcgaagttttttttttattattaatcatggaaatttgactgtttagcataaaaggagtgttggttctctatatgaaactcttgacttttttatatactttcttttttataatcttccattttttttttagcatgatagattcttccacttgattattggttaattgattttcctatttctcatgcttgcagttctttgttggaggaaattggaa

SEQ ID NO: 56965 - DNA, 1017 bp, Populus trichocarpa
  Intron number 1 from transcript POPTR_0009s14910.1 (locus POPTR_0009s14910) derived from phytozome v7.0 (chr-ID scaf fold_9; pos 11586686 to 11587702)
tccagccgctgcttttcgtttccgatctttttcaggtaaggagttttcgtttccttgtttctttttttggtgtgtgtttgaacagaacagagagcgttttctcgtactgtttttgtttctgtatctatttttggaccctttttttttgctttgatatttttttttctttcaactcctggttatttgatatctcttcttcttcttcttcttcttcttctttttaattcatgaagtaaatgataatattattttttttagaattttgttgggagtaataataatactagtttctaatctgtaattacacattttgaactgtttgagttgatttatgtttttgtaactagacacatggcggtgggtttgaattgggatattcaattttgaagtgaaaaaccactttattttctcgcccatttttttattatttatttttaatttaaaaatctaagcatgttttgataattgaaaatacaagcatgagttgacacaaaaacatctttctgtttgatgatttaacatgaccaacaagatctagaacagtggatttgacaactaattgtatttattatatgattattaattattaaatgaaatgttcaaataagaaatgaaaaggattatgggaaccgggaaacctttttgttttgtagctatccgagtgtctaaatgttggttgcttgatcaatgtcagtcccatgaattgttggtaaagaaaagctaagagggccaagtgtaggcacatctttacacttttgcttaaattaaaagaaacccttctttttatggtcaaataagctctttatctttttttgacaaatagtgcctaaacaagtttggtaaaatttgaatcatgtctgcaaatggggttttgattgatctgatgaagagctctggatattgaatttatggtagagtattttttttagttcgtgttagtctttttttttttgggaggggggctttatggaatgaataattctctcaatgaaaattggtgattgtggcagggtttga

SEQ ID NO: 56966 - DNA, 671 bp, Populus trichocarpa
  Intron number 2 from transcript POPTR_0004s18270.1 (locus POPTR_0004s18270) derived from phytozome v7.0 (chr-ID scaf fold_4; pos 18222430 to 18223100 reverse strand)
agccgtttaatcggttaatttcctatcttcctaaggtaatttattgagattttttagtagatcgtgtaattctagttttttttattgttgatttaattagttttggtgaatgggaatggaagaataatgaagggttttgattattggatcatttgaaggggaaaaataggatttttcattgattgattatttatgcttttgaagtgtttggtctgtttttagttctttttgtagagattaaatgtgaaagactagtgggtgtttaggcagtgaagaaaagtctggtactttgatagttctgtgaagaggattttctttttttgatgctgggggaggttgaatcgtgactatggtggttaattttagtgaataaatcgaatgaagggtattggttaatggatgggcagttaatcactcaatgtgaaagcttaatctgtttggtgatggtcaaaggcaggcctttatagtttttttggagtgttgtctgttttcagttatcgttgttatgtttttgtagtgcttatgtgtgagtctttcgttggtgtttaggcagtgaagtaaagtttgatacttggatagtgttgtcaggtgaattcgctttggtgatgttgcatgcaattgaatttgaacgatgttggaagtttgattgcttaatatttgtggacaggaag

SEQ ID NO: 56967 - DNA, 848 bp, Populus trichocarpa
  Intron number 1 from transcript POPTR_0001s14770.1 (locus POPTR_0001s14770) derived from phytozome v7.0 (chr-ID scaf fold_1; pos 11628471 to 11629318)
agctcgatcgttcccctcctaaacaagtactgttctttcttatttgcttctatttcatttcaatgcttatctactatctctctctgtgtttttatatgcgtgtctctctttttgagcctatatgagattgaaagctatatttttttttgagtttttggcactcgttagtggaataaaaggtgtgatttagggtgaggatttggatttggaaaatgggtttacaggaaaactattagctaatcaggttattgatgactggcttagctgaagtcttaataataattcactggcatgatacaaatacatttttgtttcgaaaattgcttgagaatttaacatggaagctttttctcgaatctgttgatggaattatgtaaaaaaataagcgccattgagaagaataaaggccagtcaatttttattgtgtttttacttgaccaaaaaaataagtttttggaatcctttcaattaagcttgtactctattatattgtacttaataattaatttactatcctatcaatgtatttgaataatagttgcctaatgctaattttgaatgaaataattacttctttttttttggtggtatatggaatctatacaattagattctgtttcaaacgagagtaaaatgcgaatcccatttggaatcgcagtgaggatcctactcgctttccatttccaacccacattttaaccaagcatgtccataatgtgttctttactgtttaataagtcttgagtatttataagtttgcaaaatgaaatcaaacactagcttagcatctgattttaagacttcaatttacagcctccaaccaaatacgagtccttcacgatcgagga

SEQ ID NO: 56968 - DNA, 554 bp, Populus trichocarpa
  Intron number 1 from transcript POPTR_0015s05610.1 (locus POPTR_0015s05610) derived from phytozome v7.0 (chr-ID scaf fold_15; pos 5956096 to 5956649 reverse strand)
caggtttgatgtttaatctcttcttttacttattacttgctgtaatggatttgaaattgaattgtgtagtttgcttgaattgcttgtcttatgtttggtttcttatggacaagtttgaggctaagtaacagaagttttacttaaatgcagtattacgaattgacagtcctttaattgataccgctgctgtctttcttaagttaaaaaatgacgttttgcacgagtgtttaaacttttgaaatttgaatatgttgtttgttttgaaatcatcacattttaaacatgttatttatgttgctttagtctctctaccaggtccattcacttgattttgccaaatactcacaaaaactgctaaagttcgatacttgttgagtcttcatatatattcttacatgcctataactgcgaatgatattaagatagtttatactaccattacaagttataactattttagtcagagtagaaaatgcttattttctttggatatgcactgaccctgaactgtttgtacaggtgttttacttcttaggttgggttaagcacctgct

SEQ ID NO: 56969 - DNA, 859 bp, Populus trichocarpa
  Intron number 3 from transcript POPTR_0001s09850.1 (locus POPTR_0001s09850) derived from phytozome v7.0 (chr-ID scaf fold_1; pos 7597762 to 7598620 reverse strand)
gaggcatttttggttcctactccttattatccagggtaattcagcatttcctttccttcatattttccatcttctttgtgctgattttattgtaaatttccaaataaaggtagattagttgaatggttattactttcataagcttaactttgacatttgcccacccatgtggtaggccttgacctttgactttcctcaatgaccaagaagaaggggatcaattagaaatatttaattaaaattaaaagattaatctaagtttgtcgaacataccactaagcgcatataaccgataatgatttatagtgtcagcatctcatgctattattgaaatgaaatttcacaatctagaattttctgacctcgttgtattattgctatggtggggacatgaacatatacaagttgggggtccataaaagtcataaagtatacttagattcttctccatagcaaagacaaattaatattggtatgtctaagatgaaaaatgccaaacttggtggagaagtgtgaggccaatcttccttagtggcctagtctgcacttattttgcccactgacatagatcagaaatacgactcttatattaacttttgtggaggataattctctcatcactgtaactggaaatgatggtggtgggaggccaatatatcaaatgaagcgtgtactttttcctaatttctatagctgtcatactgcaaaatgcttaaggtaaacttaattgagttaaatcagaacatcttagctaaacaaatttaacatgaaatgatttgaaagtgggaaaaaagaagaagagagatttatattaatataaaatttatgtgcttcattgcagatttgatcgagatttgag

SEQ ID NO: 56970 - DNA, 888 bp, Populus trichocarpa
  Intron number 3 from transcript POPTR_0004s03320.1 (locus POPTR_0004s03320) derived from phytozome v7.0 (chr-ID scaf fold_4; pos 2274937 to 2275824 reverse strand)
tgctgattttggagtgcaggctttagtgagtttgggtaattttactatattttaaatttcatttcgattaaattgtatccaatttgatgttatatgatgaaattacaggcaccgtgctagttaattatgttagaagttaactaaaattcgcttacatatggaccatttttcgattagatttcttaagtgttggaatgtatgatgcctttttggcagaatttatttttgtaagtttaagaaataatttctcgtattattttcattacattcggcaaatttgctgtctcctctcgttccatcaaaattgagctgacattaggtcatgctggaatagttattcataattcatgatcaaatgtctgtaggttcaatgtattgccaacatttgctcttgcattgtgcaatgctggtttgactgatcggatattcagtcacgcagagcaagaattggtttgagttgactgaacatcagtaaaaacatcaggtttatgttgagtagggtaatgacttttttgcttgaaaataaaagaacgaatgcatcacataaaaaatcggtgtcattgaattagggggctgcctcatgacagtagcatcacttaatggctgtgatttatgcgtgtgtttcatttcgtgttggattttcatgtgtaagtagcacctctttgtaattttgctatgtatctccatggggttcggtgattgacattgtttttttagtaatttgaggctagtcctagatagaaaatttctttctgaaaagaactattgccatattgtagttattctcaatggatatgctttataatttttgtttttgctaacttgaacttttggtttgtgtttttgttgaaagaattgagtaaagtgttcccttctattccattggtg

SEQ ID NO: 56971 - DNA, 822 bp, Populus trichocarpa
  Intron number 1 from transcript POPTR_0004s04120.1 (locus POPTR_0004s04120) derived from phytozome v7.0 (chr-ID scaf fold_4; pos 2962748 to 2963569)
tctggacttgttaggcacctggaacctcacgccaggtatgtccattgattttttgaaaagggtttttctttttttgagatttggatttggaattgtttgtttttttagagaattttggatttctaatgtttatttctctttattgtaatgttttttttattattattattatcacaccttctatatttttctcttctccattattagattacctttcggttgagttatttatttttgttttttttttcttttgttaaaaatctaaagttttcttgaaatgtgtcgcctaaccctgttgtgtccagaatttggaaactaggtgaccatcgatatgtttttaattgagatttcaatgtctatagatttctttcctgcaggtgtgatgcataaatacttaaaatcttgatgaattttatatgcgacaactaagttcagaaaatttattggtgtaacttgaaaatcactgaagatttatctgaaattttgcataaaagagacaaattttggagtaactgatgtgtggctgccgattagtattgtggctcaacggcactcaacctccctcccccctccttctcaagaggacggctcaggtctgagcctctctcttgtaatcaaaagtagtaaaaagaaaagaaacggatgggattctgaaacttacatctctttatgactactatcgcagttgaaactggttttcattgagatttcctgttctgtttctgtttgtctcatattgattgtgttttgatgtgcatctaatgattttctgtttactctttttcagcttactggaggctatagatctcatccttgaaggtg

SEQ ID NO: 56972 - DNA, 806 bp, Populus trichocarpa
  Intron number 1 from transcript POPTR_1554s00200.1 (locus POPTR_1554s00200) derived from phytozome v7.0 (chr-ID scaf fold_1554; pos 123 to 928)
taaactgcagcagtggttccgtgaaggccttgcaggtaattattatgccttgtcatgcattttatacatttcatgcatgcatataagttgctatattttatgctttcatatataaactgtccattgaaatttaaaatttatattcatccatggcatcctggttgatgtttcttttcattgttctttcagtatatagtttatcatgtgctgagcaatgaatcaaacctagtgtaggtggtttatggattttcaacatcatttttggttttatttgtctttaagtttgtaaagaccaatagagtctcgctcatcaaaaagaattcaaacataaaataatggacactaacagaggatcagctggagtactggcagatgttgagttgaatagaagacgaggaatttgagacagaatgggtgtatggaaatactggaaacttgtgagctctaaagaaaatgcatttgccattccattgtctgattaactgaaatctggattgtgggatttaagtttttaattgctgcacctatgctctgccttttagttacaacttgtagattttggattgtttatttccttttttaacaattttctggatggtgtgtatatatatatatatgctgtgtgcttaattctgtgtacaaacaattcattctcctagatttgtttttccatgtccttgaatgtttatttatttacacatcagggacctgagtaactggcagttttttactcttttttttggcttctctagtacttgttaacagcggttgctttattttcttcttttcagggccattgttgagtc

SEQ ID NO: 56973 - DNA, 480 bp, Populus trichocarpa
  Intron number 1 from transcript POPTR_0011s14850.1 (locus POPTR_0011s14850) derived from phytozome v7.0 (chr-ID scaf fold_11; pos 17107172 to 17107651 reverse strand)
ttgtttctcaaccattcctttcctttgcattgcaggtaagtttctctctccctctttttttttttttaatgtttttgcctttttgtggttaaattttttttttcttatagttgtagtgtaatggcactaaaaagaaaattaggtttagcaacccttagctgtaatataacaattttaatttttttttaattttttttgcttttgttatgcatgtgtgtttgtgcatgtggttgttaagaggagaacaaatggaaaaggagaaaattagggtttgaactttgaatgaatgaggaaaatggaggttagggcgtgtaaaatttgtgattatgagtgataagcaccactcttgctcctttaattgtggttttgaacttgttttgctctttgcaaagggggggtctttatgttaggattttttattgggaaaatgggctttatgttttttttttcttttcttatgtgttgtgtgtagaattagag

SEQ ID NO: 56974 - DNA, 812 bp, Populus trichocarpa
  Intron number 1 from transcript POPTR_0009s06090.1 (locus POPTR_0009s06090) derived from phytozome v7.0 (chr-ID scaf fold_9; pos 5995317 to 5996128)
gaggtaatttgttgctctttaccctatttgcaattgtcattgccatcatcttcaaaagacttcgagttctttatttgttgcttcatttggaaacagattgagtgcctacgaaatattgatgttgtttgtataaataagtttttcatacaaaattcgcatataatttttcatccacgccttactatctatcaattataagtttaacataaaaattctatttgcaaatcattaaaaaaaatttcaacttgaccgttcatgttatttcttaattagcaccttaattttgttattcctttcttttctttttctttttcatatttgagaccagacaaaatatgacatgtcatgactcttatatgcgtgaaagtatatttagtaatatatatatagcatggttcatgtaaaacatgatttatgttagcttaatgattgtgttgtggtgattattttttaaattaatttttatttaatttaaatatggtatttatttttttctattaggtaatgtttgttttgttgtcaaattatgtttttttttaaaaaaaatattatttttatatttttaaatcgtgttgatatgctaatgttaaaaataaatttaaaaaaataaaaaaattattttaatgtatttttaaatgagaaaacactttaaaaaataacatttattataatatcatacactatctttaaaaaaaaaatacgacattcatgagcttgcttcatttaaaaaaataaatgaaaacttaggtagagttgatttttgacgaggcagcttaatatgaacgcaggcccaggttgttcatcactgggat

SEQ ID NO: 56975 - DNA, 772 bp, Populus trichocarpa
  Intron number 1 from transcript POPTR_0009s14760.1 (locus POPTR_0009s14760) derived from phytozome v7.0 (chr-ID scaf fold_9; pos 11499841 to 11500612 reverse strand)
aaagggaggttaaggctaattttagcgagtttcaggtgagtgatggtagtgtttgtttttgtacttggtttttgttgatttactgattcattgtgcatgattgtctattttcatcggatttttcttgtttgtattaatgtggtttgttttgaatttgaggattaatgaagattgaggacttcgaataccgaaaaaagaaaaaaaataaaaaataaagaaagaaagagagagacagattgagtgagtaacttggtgaactcaatgcgagtgacatggttgagttggtgtttttttcatcagtaattgttgtcgttgtcaatctttttccttttttgatccgagtcactgccagtcttttatccggaacattctcggcatatacacgtgaatggtgatagttgttgagcgttttcttcatatgtagatatagttatgccttgttatgttggtatagtacctgagccattgttttgaaatgcttactgtcctttatcatgatttactgttttatttggagcttcttcatgcacggttcaaatttggtttaaaattgtgatttttgtatatttagattggtgatctcttctagcaattgtgcaagtgctattgtgttttcatagaaaatttcaaatttcacgataatttagaaaagatgcagaatttaaatagcacttctttttgggaaaaagttcttgctcttatctgttgaaacttgttgatattctctctcattactttctatatattatacaatagaattggctagaagaac

SEQ ID NO: 56976 - DNA, 577 bp, Populus trichocarpa
  Intron number 1 from transcript POPTR_0012s14010.1 (locus POPTR_0012s14010) derived from phytozome v7.0 (chr-ID scaf fold_12; pos 13993431 to 13994007 reverse strand)
tcccatgtaattctcttttgtttcatttcttttaaagttgttgctttcttgattgatcaatgctatgcttgttgtttctttgttttgatgttcttttcaatgatttcttattgggtttgagctggttttgtgtttttctctttttattttgtgcgtgtgattcttgatcttgggtttcttgttttttctttcatagatctttctttattcctctttggtttgttgtctctgtttgagtcctgtagaaagtttttcttatcttgtacaatgaagttactgtatactagcttatagtgctttaggtggaccaacccggaaaaagataggattgattttgtgaatttatcaatgactattgatttgtgaactaatcaagattgaaaatttgtgttaattcacagttagttgaattgttttttaatctgaatctgatctaaagagatttttttggtcttgggaatgacaaagggagccatagtttttttagactccaatttgctgagtgattttgtagttattgatgtgcagattgtactgatatcaagcaattgaaaatctgtaggtgattctaataatc

SEQ ID NO: 56977 - DNA, 657 bp, Populus trichocarpa
  Intron number 1 from transcript POPTR_0015s08280.1 (locus POPTR_0015s08280) derived from phytozome v7.0 (chr-ID scaf fold_15; pos 9545112 to 9545768)
cgagagaaagttcgaaagatgtaagcaaatttcatgctcccattttgggttcttctttccatttttcctgatgggtgcgcaattttgtgcattcttggattagtttgtgtctagaattttgagatttcattttggttttgcatgaaatctttcaattattcctaggctcttctcaactttttggtctgtgattatcaagtcatgatttcttagataagttcgtctagtgccgtaaaaagattaaagaaacacaattaattttaaaatatgtgatttccttatttgggagcttgacattattacattcttgcacaaaaaaaaatactactattgagcatggtttggccatcttgaaaaacattgctttatagagatagagatgtgatcaactgaaattcaaaggctctgtcttttaattgattgcatgccaaaggttcaaatcttgaagcacttggccttttattagaagctgtgtggaataatcccaattcaatttgggcgttgtatgagcttgttgatgaagattgaaacaagggataagaggcaaaagcaaagagctttatcaacagaatgttgaattattttgtcgactagtttggctagtcgaagtgtttctcagtatattcgctttatttgacctttcttgcaggttctacc

SEQ ID NO: 56978 - DNA, 628 bp, Populus trichocarpa
  Intron number 1 from transcript POPTR_0009s11860.1 (locus POPTR_0009s11860) derived from phytozome v7.0 (chr-ID scaf fold_9; pos 9769271 to 9769898 reverse strand)
gaaacaaaagactgtgtcttggagatacaagtctggtgagtattttttgcaattaaacaattcttttatcatattttagtatttcttttatttgtgattggatgcagagagagagagagggagagggatttgtctgcttgtaagacttgcataatttgtcttctatgccgtccagtttcttggaatctgcggtgatttatttttctgttccgtttctgttacaatctttaaaaggtttaatcttcttcagtgaattgtagccagtgttcggttttatttctctggtatacctggtatggtttatctgtgattagtttttagatgtgattggtttttaggtgagtttgattggtgtgtgctttgtactttatattaggtcttgatcggcttggagaaagaaccgttagttcagctttaccctccagtagtatttttctttctttcctgggggagttacgtaatttattgtttttcaacatctaatcttttggacttttctctggcttattttctcatcttcttatctctttaaccgttgtttcttcaacttatttacgttgtcccaacttgggctttactttttcttaatttgctttaatttcttgcaggaagtagaaaggattggtgt

SEQ ID NO: 56979 - DNA, 622 bp, Populus trichocarpa
  Intron number 2 from transcript POPTR_0012s11570.1 (locus POPTR_0012s11570) derived from phytozome v7.0 (chr-ID scaf fold_12; pos 11942068 to 11942689 reverse strand)
gaagaggtgaggattaaagaaactatgacttgaattgtctttatatcgcgtttctttctttctttttgttttttgttttgtttttttgttttttccttcgggtggttgatttcaagcttttgtttagatagtctgatagccaaattccaaggataataataggccaatagccatatttatctaatccagaatcattttttgaaagacaaaaagaagaaaagtttttaagtttgataactgttcaagaaagatcaaggttcaaaatactgttttagaacttattaaagctgaagatgactgtaatattgtagacctattagccgaaagtgctagataaagccttcttcaggctcatgaaatgtagaaaaaaattaaagattctggatttcttagatgttattcatcatttctgtgtacattgtgacataatggctaatgctgttattttaatgattgtgttttaaattttgaaaacaaatctatattgccaatccttttgctctaagtccaacgtttatgatgcttgttttctactttctattccttttttccctccggatgttataatgtcatgaaaatttttgtaggttcgtagactaaggatacaacagaggatcaagaa

SEQ ID NO: 56980 - DNA, 1041 bp, Populus trichocarpa
  Intron number 2 from transcript POPTR_0011s03035.1 (locus POPTR_0011s03035) derived from phytozome v7.0 (chr-ID scaf fold_11; pos 3024473 to 3025513 reverse strand)
catctcttcctggtatgtcttatttatgagattgctttccagaattcattctgaaaataactttttgtgcattgaaatgaaatccaatatggatttgcacagtaatattatggtaggcatggacacagtagtataatggtatgcaatatcaagatgtcattcaaacacagacctacttaaactgggcatctgaccaaatatcaattggaatcaagaaacaaattaatcatatccatttgttctttttgaaatctcagatgaatgagatttcaagttagtttactcaaccatggaaagtacaattttttgagtaaggcacctttctttttcattgaactgtcaattgattacttatcaagcttatcaaactaattatatgccttatattaatttttaggccaacatgtgatagctactttcctctcccataactgcaattgttatatttaaactgtcatcatcatataatgctctgttttgtttttggaagcttaatatggcttcttaatactcattgaggcatattgaatgaagcacgcatacacactaagattttgtcaatacctgatgcggtataaaaggtcaaggtattcagatataattgcctggaagttatttaatacttttacgggtaaatttatttaatttaataatcaagtctttgttgtgccaaatgatatgttaatatatactgtagtgattgacacctcacctcacctcttttccaattccagtcctcaaaacaatacacataatgaaaaataatgattcacagtcagacatattgagtgcatgcatgatatgtatcttcatgtaaggacttgtgaattgcgactctttaggcataaaagatgaaccggtatgcattgggttaggtgttgaatatacatcaaccatttgttcattctctaaaagtaacaattttttaactcaaaagaaaccatttcatgttcatttctttccttcccttttttttttcttgccttttcttttcatcactgttaaggttgcgatcctcacctcaaggagacattagcaggg

SEQ ID NO: 56981 - DNA, 732 bp, Populus trichocarpa
  Intron number 2 from transcript POPTR_0011s15740.1 (locus POPTR_0011s15740) derived from phytozome v7.0 (chr-ID scaf fold_11; pos 17825233 to 17825964 reverse strand)
aggaaatttggggaaacccttcaccaaagtcagaaatttgtgcttatcttggatcctgacatgttcaaaggaaatatcttcacatgaaaatcctctgaactctagcaatctgcttattagaatagagaaaacagaacatttcgaagaattcttttgctgctaaagtggatttaatgagttgacgcagcctgaaatatacaggttaggattgaaaggaaaatcagaaagacaaaaaacaaaagggctatggtaaaaatactaaggatacacaaaaaaatatcccaaaacagacccggacaacggtttcctgccatcttcccgctggtctgtcctgtcaaggaagtccagagccattaattccgtatctgacagctcatcctccaaaatctccttcactaagagtttaaactgcatctaattcttctacaggtatttatgtaaacataacctagaacttatgatagaggaatggagactgatgcttttattaaacgtgcttttattaaacgtgatggcagtccttgtatatttgtttttgcttttaaaaagtgtttttaaaaaaaattaaaaaaattttgtttttgtttttgtttcaaattaatatttttttgatattttcagattattttaatatactaatatcaaaaataattttaaaaaaaatatttataaataaataacactttgaaaagctgagcatactttattcggtcaaattccagactgtttgga

SEQ ID NO: 56982 - DNA, 655 bp, Populus trichocarpa
  Intron number 2 from transcript POPTR_0015s06460.1 (locus POPTR_0015s06460) derived from phytozome v7.0 (chr-ID scaf fold_15; pos 7255906 to 7256560)
caaagatccttaacaaaaggaaatccaaaaccacagtcacgatcccagaataacattctgagatcaaaacctttaaatccgagttacaatccctgaagcaaacccaacaaaaagactgccatattacaacatcttctttccaaaatcgagagtcaatatgacactgaatccgaactagacgaccaaaccattgagtctcatacattacctcatgcacttacaaacattgaatatattcctgatgatttcttgaatgtgttaacccaaatatcttccaaaaaatacttgattaaaattactttagttttttcggacgatttcaaattagaccctatttccctatttgacacaagtgcagatttaaactgtattaaagaaggtgtagttccaaaacaatttttattgatatgattactccatacaaagcacatcatgactgcattacctccaaaatcaataacatcaaacttgtttttccatttctagaaacatctaaaactaggaatttaaatttgatcaaaggatgttctatccatacatatcatataaacgcattaattcatagtaaacaattccaattgcatgatttacaaaaccatgtttccttttgtcacattgagaaacaattacaaaattctgttttaaaaacaaaaat

SEQ ID NO: 56983 - DNA, 739 bp, Populus trichocarpa
  Intron number 2 from transcript POPTR_0009s14100.1 (locus POPTR_0009s14100) derived from phytozome v7.0 (chr-ID scaf fold_9; pos 11118880 to 11119618 reverse strand)
gcgaggtaaataatataaaatataaaaaacagcattcttttatctgatatctctactgttttgcctgtgtgttggtgattgtgaagaaagcgtagatttttagttgaaattcagttttgaaaagggttggcttttggtatccttagttcttaaaaaaaggggtgttttttacttgtcggagatgttattcattttcgaattatgggtttagtcgtttaagtaaagaagagtgacttctttgccaggtgatgcagtggatgttggtaatagatttttagttgaaattcatagccggttttgaaaagggtgtgccttttaatatcactaaaaataggtgctttttttattttttggagatgatatttgtttttttgaattgtgggtttagctatattttaaataaaaagagaagtgatttttttttccaagtaatggagtggatgttagtgtgtcaaattttatgatatgcattgcacatgatgtgttgccatcttattactgccttgtttgaacttaactgtttggaatgagttttatattggtgtgcttttgtgctaaagatttagggcttttgacattttcctggtatattctgaattcaggaattgcttatttttccaagagagtttagtatgcatgattttaatgttatgttgcttgtaggaattgttcattcttaacgaggaacattttttcgattttagattcgacaagctcaaattctcgaagggggagaagt

SEQ ID NO: 56984 - DNA, 951 bp, Populus trichocarpa
  Intron number 1 from transcript POPTR_0661s00210.1 (locus POPTR_0661s00210) derived from phytozome v7.0 (chr-ID scaf fold_661; pos 5779 to 6729 reverse strand)
tataaggtacttttgatatatttttctctcaaagttttctgttttgtttttatttgtcaacggtttttcttatcagggttggtgagttttcaggttgattaagttttgagagattatgatctgatatttaggttctttggtgtgggccaattgcttcttttatgtgttatacatgtggagatgtttcgaaagttttgtgttttttttatttttgaaggttttttcttatctgggttggtgaaattttgttctaattgtagcttgataaactcttaagagtgatagatatgatgagatattgaggaaaaagaataagtttttcattgatgtctgtgatctaattgcatgatttggagtctcaagttgaaactaattgttaaaactgtgattacactgctagagatatccgctataatatatagtgttgttaaaactgtgattacactgctagagatatccgctataatatatagtgttctaaaccttagggctgttgttatctgttgctttctcctgcagtggagagttattgatctgttgaaagtttcttacattggagaatttcatcttggtgatgattaaaaggcaaacaaaggtaatggactaggaatttctagagaggtcatagtcagtttttcctattaagtgaacacgcctcgaaagtcttgttgatgatagactatttcttctagactctacagtgacttgggggcatgtacgtgtatagagttagtaataaatctgaacagaacagcatacagggaagtttggctatgaataggaccggcatcggagttgatagttgcatgtagtgaacccacaattaattagttagtgtttttaagttgaaacttgtctttatactgttaattggatctttttatttatgtttccaatatttttccccttcttccagctcaaatatacaccgccaggtgctccactattggc

SEQ ID NO: 56985 - DNA, 550 bp, Populus trichocarpa
  Intron number 3 from transcript POPTR_0014s10930.1 (locus POPTR_0014s10930) derived from phytozome v7.0 (chr-ID scaf fold_14; pos 8154069 to 8154618 reverse strand)
tggaacttataacctacctcaggaccaaacagaaggtactgtttacacaatctctcggctatcatggagaatgctcttataggaacaggaaatataattttatgtattcttgtcttatcgtttttgcttttcagcaataactagaggaaccaaacatatcatcctctaatcttgtgtttaaagtaatatcgttttagttgcttagggtgcttcaagtttcaaccattagagtccaaagtcccgaaaaaaggcatgcttttgcaatttttctcaaataagttaagtacgcaaccaaaactagtcaccaaaagatgccggtcatttcaagtaagtttatgtctcactaaacatcaggagaagagaaaacaatgggtatctaatcagtaagattaacaaagtagcaatcaatacaagaacacccaattggaaatctgccttgtttttttaattggatatgggcctcgcttgcttcaaacatgttgtactggttactttgggggacaagacattgtatgtatgaggtttgcttttttcactttctaggagattg

SEQ ID NO: 56986 - DNA, 844 bp, Populus trichocarpa
  Intron number 1 from transcript POPTR_0012s12950.1 (locus POPTR_0012s12950) derived from phytozome v7.0 (chr-ID scaf fold_12; pos 13295074 to 13295917)
agcttcttcactgcttcatcaattgtgtggaaaaagtaagtgtttttcttatgccccattttgtttttttttcttactaatgtcttgaagggagtggatttagttttggtgtttgtttttttttttttgtggaatttttgatctgtattggtaaatttttcttctttgtagcaatttgagatctttagagtctgtttggttcctgggaaaatagggttggatgaagagaatgggaaagaaactgagtggaggtatccactttttgctcactctactttctgttgttgttgtaaaacaattgtaaattttgagactaataattgtgatagagatattaaaggattgattttgggtttttccagttcttatatttatatctgtaagtattggaataaagggtttttttttccggaaaattatatttgatgtttctttccattattgaagtcaaatgggtattcctggaattcgcgtcagaagctgtttgatagacctagaaagcactcgaaagtggatttgtgggctgatttttgacttcctaccagtgtttccagaagacctgtttcgtacctgaactctcattgactcatagaaaggttctactagaattaagaagatgaaatcacatacggattcttttcatgtcgatgtgtttatggtataattaaaactctattgtaaattagtcaccagatggttctgatagtgttagtgattaatgttctgtgaacttcatagttttggataatttgtgttatttttgaagatgctaagtttcttgagagaactgaagacgggccttttccatttatgtctgcaggtttataatttctgacagttttca

SEQ ID NO: 56987 - DNA, 814 bp, Populus trichocarpa
  Intron number 1 from transcript POPTR_0015s12440.1 (locus POPTR_0015s12440) derived from phytozome v7.0 (chr-ID scaf fold_15; pos 12689329 to 12690142 reverse strand)
ggccctcaaagcagcggtaaatattttttttttagtgggatctgaagtccatttgattggttagttgatttttgtggttgtttagattaattgtgaatgggtttttgtttttttgttggtttattagttataactgtgaataagctcttttgatttgttagtttgttgtagtggttgttttagcttaaatgtgaaatgggcattttttgtgtttaatttgtttggttagattttggtgtttgattgtattttcttggaacttgatttgttctttatgtttaaataatgattagttttaatggggttttatatgagcagatccaaaatattttgctcttcttgttgtttttttagttttttggaagttgaaagttgagagtttttgagtttgatcgaatattcttaatgtttggttatgcaaagtttagtgaaaatgaactctctggaacttaaatctgttgtttaattgattaattatttgttcaattgggttttttttgagtagatccaaattgttttgctcatttttgttgcatcctttttatttttgcaaacctgaagtttgaaactttctgtatattaatgtaataaagggctgttgtaaactggattttgtttttctatatgaaatctattatgcaggaattgcactaaagatctctcttgacttttgtttagtcacatcaatgacactagttacagttagaactgtatgttatgcatatgcattttgcatgtgtagatcaaataatggtttaatttgtgttctctgtgaacagggaaaagcacgcttttgaatcatctatttcagaca

SEQ ID NO: 56988 - DNA, 506 bp, Populus trichocarpa
  Intron number 1 from transcript POPTR_0001s39200.1 (locus POPTR_0001s39200) derived from phytozome v7.0 (chr-ID scaf fold_1; pos 38387174 to 38387679 reverse strand)
cagcaggaatcgccggtactcttctttcgattcttacttctttcatatgtttctcgtttaaagcaaatggcccttttgttctgtttttcgatatcaatttattagattcggaaaaacaagatatctcatatggttgtatttgggggttagtaactgcctcagatttcccctttccatctttatttcttacaatttggattgcaacaggaacccatgtacagtttgttcagaaagggaagggaaaaaaagaagatatgtgtgatcttaaattctatgcgtgcattggatactttatttttgcttaatcaatgtaccagccccttttagatgcttgcaattcccgttctggaactcgaagcaaatgtcaaattagatgatatgaagtatgaagtaaatgtattttgctatatgaaatagaattggaatatcatttgagaatttttctttgacaccaatacttgattgttgcagggaatatctttgcttttgggctgtttgtatcacct

SEQ ID NO: 56989 - DNA, 794 bp, Populus trichocarpa
  Intron number 2 from transcript POPTR_0004s08820.1 (locus POPTR_0004s08820) derived from phytozome v7.0 (chr-ID scaf fold_4; pos 7409533 to 7410326 reverse strand)
ctcgacttggtggctcgtcggcatttatagggaaggtaccattataacaataatgatcaatgtttctggcaatgattagaaaataagaaagcaaggatgaagtcgtttttcagatgcccatgtagccaatttgttgaggagttgataaaaaaaatctgccaacgggttttttgattctctggggcttggtaatttaggattgtagtattcaagttagaatcctattatagtgtcatttatgtttcccttctccttctttaatcctttaatacacagaactccttttcttgttacacagacattatttatgtttaatagaaagttaagttgcaaagctgatttcaggagtttcctgagtttatctgacataacaagtttatctggcatccactatccacaaacatacgtcctagcctcctaggcattcatgttatctgaaggtgaaaagctgtcatccacctctccgaggttgaattaaagtcctttgcatagagctatggatagctggagatagaatcaatctgtaaatgcaaggagctgtcaaacaacaattttcctcgttaacaacttagttctattgatcattctttcaacctagtgcattcttgacaaaatattacctgttccctcttcgttctaaaatttaacagcgcgtcagttttgtagcatgccataccctgcttatattatcttattgacatatatttttcacaaaaattaaccatagaaattttgtctgtcatcgatcatctcagatcttgaatcttttgtacgacatgcacaggttggtgaag

SEQ ID NO: 56990 - DNA, 762 bp, Populus trichocarpa
  Intron number 1 from transcript POPTR_0004s08820.1 (locus POPTR_0004s08820) derived from phytozome v7.0 (chr-ID scaf fold_4; pos 7410436 to 7411197 reverse strand)
ggctttgtcttctcgtcaagaactttgtttcagacgtgggaatgttaaagcctcaactttttcctgcccccctttggtttccattcctcgattgagcttccaaagtaagaaattttgtttcttggaatcatagactagtttactttatcttgagttttgatgcacgtcaatgtgtttttctttaatgggttcttcacaatcagtctaaatctcacgggttctagttggaaatgagtgcccatgtcttgtgacttgaagttttggattccatcggttttagtctcataatagaaaattggacatcaaggtgaatctcaagctttgatttttctttttctttttctttttggtaagtgatcaattcaaaagagtccatagacaatctttttagcttttagggaccttataaagtctcggtcttgtagatgccatatcatgaagggctcaagttctctaattgctttattctaccattttgtgaaatgaattctgctggaagaacaagaggaaataattaatgttttgcctttatagtgcaaattccctaaggcatctgcttcttttaccaaattcatttcatttctgcttttactatcaatttggaaatatgaaccttttctttttatgtttccaacttgttataacttgttatgatactcctggctctttcttttgcttcctattttatgtaatccaggtaaagcattcggaggtgatgggtcaccagaaacgaaagactcctctcttgtggtttgttttggg

SEQ ID NO: 56991 - DNA, 916 bp, Populus trichocarpa
  Intron number 3 from transcript POPTR_0169s00200.1 (locus POPTR_0169s00200) derived from phytozome v7.0 (chr-ID scaf fold_169; pos 28819 to 29734 reverse strand)
ttggcaagcactcaagttgtaccttgtggaaagtatcttgtttatgctagatgtgtcaaagaatcatcttaatccaatagtttaacctgttaggtgagattccaagatatgattatattattctctaacacaccccctcaagtgaaaaccctttgagcttgaaacttgcacagatttacaataccttgtgcttaatttttatcaaataaatgaggatggtgaaattcaaactcgtgaccgtttggttatcaaggctctgatactatgttaaagaaccatctcaacccaacaacttaaactattaggtgaaatcccaaaatatgatttatattattctttaataagatagtttgaaaatgtttccggaaagcatgtaatagaatgcttaataaatcagaaatttttttttccttaaattatcaggatttattcgagagaaaatcttaatagttaggttcaattacaaactacatgaaagtagtccattttttatggggatttacccatcacagagattctgttaagctgagaccatttcatcattaacttccattaaaagagatacgagggtgggcaaatgttgtactttcaatgacttcttatcaaagtgaagtctgcaaggttataaatgaaacacacttgggctcagttacttgatttttgaacacttgtcctttctctgttgcactctagttgtgtaacatatttggcttatgtttcatggcttttctccacaagtttttcttctctgttgctctagcggcatcatttatcaatccttgtgcaggatcctgcttatagtgtatatggttttctattgtgatttgatatgtccatactttgcctagccacacctattttccatgttagggttcttaaatgttattttattgcttgctgctatttcaggttcttc

SEQ ID NO: 56992 - DNA, 326 bp, Populus trichocarpa
  Intron number 1 from transcript POPTR_0169s00200.1 (locus POPTR_0169s00200) derived from phytozome v7.0 (chr-ID scaf fold_169; pos 30152 to 30477 reverse strand)
aagagactattgaccatatcaaatgtaagagtcttctggaaacaacagagactttctcccttttttcattatattcaatcgacagtttgaagtagataatgtaaataataattttatgataatgatatttctgcattcataatttttttctccctccaattacttccatttttattttctttctatttcttttgtagtgtttattatgcacagacttaacctactttttgatttgttatagatttccttgcagctcagttcctgaacttggctttatttttctgatcaccatttacagctataatagtacaaaagggtagtgacat

SEQ ID NO: 56993 - DNA, 594 bp, Populus trichocarpa
  Intron number 2 from transcript POPTR_0009s12110.1 (locus POPTR_0009s12110) derived from phytozome v7.0 (chr-ID scaf fold_9; pos 9932829 to 9933422 reverse strand)
ccattcattcgccgacttcctgagttcaaattctggtaatgaaagtaatttttccacttgtgacaattagtcttgtaattacccccatgctgtttgtatgtgtatcaactcagttatcctgttgtgtaattgctttcattgttctttataacctgataaatgattcctggtaatcttccgagacttcaatcatgaatgatccacccttgagtaccttttggctatatatagcccttcaattggtggttctcatagttcttgcagattcaggattgctttaaaagaataggtggttggaaagctaaatagttttagtagtgtgtttgattaagattagatgtttctactattccatgctttctcttaactatatagggctgcttttgggtataggataagtaaacaaaccaaacacatatctataataaacaatacaagaaaaagaaatgggttctcctgccattgagaaggggcgggataaggaagaggggattaaggaaatcatctttgatacatttatgcacaccagtaatcctgttgtttctgtcattatatccaggtactccttcacgaaagcattcgtcatcgcatttg

SEQ ID NO: 56994 - DNA, 936 bp, Populus trichocarpa
  Intron number 1 from transcript POPTR_0009s12110.1 (locus POPTR_0009s12110) derived from phytozome v7.0 (chr-ID scaf fold_9; pos 9933738 to 9934673 reverse strand)
actccctagccaccaaaatcacaagtccatttaaggtcagcttctcttctcttctcttcttttccctctatttttctttactattataatctatctatttatttctttcccctttcatttttttatctgcttggtttgcttcctgattctttgcaccctttaatcccttactttttaccatccaatcaccttgtacgtttatggttcttgattcctatgctctctttattatagatctgtttcttgaaagtatttcctggtttcttgattgttagatcttgtgctgttttgggtttgatttggttgcttaaacgaagcttattttcttcattttgggttcctgagatttgggaagttaaagggctttgtgggtcttggattctttttgtgtgcctttatcatctgggttcctttcaaatttgttaaggtttttatttttatatagttcgggctccaaaaaattgagaaagtgaacggttttgtttgcattggatggtttttatgtttcttgcgtacattttgtcatctgggttctttcaaatccggtttaaatatttttctgaacataaatttggtgaatagcaattttgtttttgctgtagtaattaagaagattcatgcgtttttttctcctttctttttttgtcggtgttatgctttgatttgattggaaattggatattgtaccacctcaccggattttaattcgttaaattgaatgagtattggtcaaattgaagcatggtcatgcttttatagttaaaatgaagcatggtcatgtttttcgagtagcagttggatttttaatatgcatgcatacatacatagatatgggcagtgttatttgttgtgttttctgttttcttatgaggtttttttggctggtttaatttgttttatattatcaaattggcaggattgtgaagattaaattgg

SEQ ID NO: 56995 - DNA, 614 bp, Populus trichocarpa
  Intron number 3 from transcript POPTR_0001s18270.1 (locus POPTR_0001s18270) derived from phytozome v7.0 (chr-ID scaf fold_1; pos 15336162 to 15336775)
gggttttgatttaagagaaactgtcagtctcctgggtactaatctttccttaccatacaaaggaacacagaaatctttttataaatctctgttcctatattgctcttatcagaatctatgctttcctcttctctcctgctatcagctgatgtttttcttatttctatgctttaattttaacatctgtgaataaaatgacattaattcaactgatgcttctgcaaaagcagggctcagttgaggtgatttttcatgctttagtagaaaactggaagaaaggctagggctaaacatttcagaagtataactgtgctgttccatcaatcttccctatttattggaatgctttttttgaaattaatacatgcgaaatcaaagcctccctctaagaactggttgtggtttgtgtttctatgaatagctttccgcctacttttctgctggtggtgccggtaatttatcatctccaacttctgctccttgaatagtttggttatttctcactctcgcattcttgctgcaaaaatacaacagcttaagatttgaatgcttctaactgcaacattgccctgcttgtaggtggtcacagcataggagtaatccactgcaaattc

SEQ ID NO: 56996 - DNA, 715 bp, Populus trichocarpa
  Intron number 1 from transcript POPTR_0004s03080.1 (locus POPTR_0004s03080) derived from phytozome v7.0 (chr-ID scaf fold_4; pos 2068056 to 2068770 reverse strand)
cttcaagtatgtataaagaacatgttttcacgcctttaacttacaaacatgttttctttgttgattttggtggatgcccatcttgccatttagtggactaactaattattgaccaactttagaggaataaaattctagctgtgtgtgtgttttgctaggaatcaccatgtatttgatgtagtttaacacaatgctgtgtttttggtaaattaatgcttagatgatgccgcgctctctcgtttttttttcctttcttcacagtggggtgggggatgtgttaagtttaaggagataaaggataattatttgaagtgtttcttgaatgacccaagtaaagttaccaagtgggacatgtatagagaaattaataggttgaaattaccaagtctagctagtatcttcaaaagtgggaaatgtacagagaaattttgcaagttaagaacttaatacgagtttcgagccttttgttataatttgatctaaagattgtttctgcaatggcgttttcaaagaatgttctgtgatttatttatttattatttcggataattataggtaagaaaatgggctattcgatttagaacgttaaggagtcttcaagtaaatttgtggaattgtggtgtaatatcaaagaagcttaatgcggattgattgaatttgagtctttatttgcttcttacttgtgcatgtgcacactcgtataatgcttggcagg

SEQ ID NO: 56997 - DNA, 653 bp, Populus trichocarpa
  Intron number 5 from transcript POPTR_0009s01620.1 (locus POPTR_0009s01620) derived from phytozome v7.0 (chr-ID scaf fold_9; pos 2153544 to 2154196)
gggtgaacctagtgaggtatatttagaaattgtgaataaaaaagataacattctatagttttcattgtaattgattgcggtagcaagtggattatctttgaattgttgattcatttctatctaatatcgttgcatttggctaatgtaagctgtaatagaataggtggcggccatctgtctgtaacacattaaaataaaatgaaagaaactggcatctacactccataggccatgtgtttttttcaaaatggatgagccatgaatgatctccatgcatggacaaattggatttattcaagttctggcgcaaatctagttgttggatattgatattgttaggcctccaattaacagattaagcttttagatggaatttcttcaatacgaaccatttggtcataatggctctcaaggttgtcaaactttctctttatttgagatcaatagaagatccttaaaatcataacattagatcaatatcataaatctgccagattttacaaaccacgtgatacaattttcaaaattgcagatctaaaatgcaatatataagctctgaatcattctgtcaaatataaactgaagtgtaatttcctgttaatgatatcattagcacagaaatagattcttatagcaagtgaaatttgcaggat

SEQ ID NO: 56998 - DNA, 481 bp, Populus trichocarpa
  Intron number 1 from transcript POPTR_0009s07150.1 (locus POPTR_0009s07150) derived from phytozome v7.0 (chr-ID scaf fold_9; pos 6755990 to 6756470)
ccgcactttcacagccagtctccgatttctcaacggtgggttttaatatctagatctgatctcaatttctcttttcaagtctgtttggatgccgagaaatgacggagagaaataatcaaaagctgaaaaccatttgatttatcttcccgacttgtgcatcatgcgttatttgctcagcaactgcgtatttcatttgctcagaaactagatctgtgacaactgacaatacactgttttaagctattaatttgtgtatcttcgcttcgtttagtgatttgattgttctttaccgatatcatcttctcttatttgccgatatcaaatttgttgcgagtttaaactccaaatcgcagtgttaaatagagtctcagatctgatgtctgtgttgcaaattaattaaactggtttactattgcttagttatttattatgcggctccctttattctttttttattttctgcagaaatataatataaaaa

SEQ ID NO: 56999 - DNA, 594 bp, Populus trichocarpa
  Intron number 1 from transcript POPTR_0014s04110.1 (locus POPTR_0014s04110) derived from phytozome v7.0 (chr-ID scaf fold_14; pos 3271347 to 3271940)
gaactacttatcgcaaggtatgctatatatatgcccctgtttttccttttatggatctgcacttattgctttccattcaccttgttttcctcccttttttagtcagatcaagcttctatctcagcttaacatactcttttgtatttggtttttttcatgcttaattgctactactactctactaggttttgatttgagcattaaggaatctaagatttaacatccggtcaattgatgcttaaaatgttaataaaaatggctttaatctgaagggtttttttttttttttttaaaaaaaggaaacttgaaatttattgaattaagtgtgattagctatccctgatcgattaaataggctgttctctgttctttttctgttttaaagcgcttaaaatccaattaattaagcttgaattgctgtgatctgattctaatcacctttcgttgcttaacctgaaatttcttcaccaatgttttaatgtctttatgaccctttatggttagtggtaatgatttctgataatagcagtgctttgtttgattgatttttaatgtccagggacacaggccacctcctattgagatagtaggtac

SEQ ID NO: 57000 - DNA, 460 bp, Populus trichocarpa
  Intron number 1 from transcript POPTR_0011s15540.2 (locus POPTR_0011s15540) derived from phytozome v7.0 (chr-ID scaf fold_11; pos 17634512 to 17634971)
taccttagacggacttcacttgctaatcatgtaagttgttgatttttttaaaatttttacatgtttgtttgtttgtttgtgatattgctagcaattgtttttgagatttttaacgaattggttttcctaggattacaaaacaaaatatcaaagtctagagattttcttgctggttttttttttttttttggttcactaaggttgtattgtaaggtggctagtgccatgtattttgatcatttcttggccgtattgtcaccatttcttacttctttgttattcattcgggttaaatttctgagcttggtcaattcgagcattttttagaggcaccccagaacatttttttccgtttttttggtttcatggcatgatcaacttggaaagtttaaagaaattagaagggattttcttttttaactttttggggtttgaatttgcagagcaagggacgagaacc

SEQ ID NO: 57001 - DNA, 548 bp, Populus trichocarpa
  Intron number 2 from transcript POPTR_0015s13990.1 (locus POPTR_0015s13990) derived from phytozome v7.0 (chr-ID scaf fold_15; pos 13744473 to 13745020 reverse strand)
tagataatcgaagaagagcaacttcaattaaggaagtaagttttacatttctcgtttatttagatctgtaattatcttttgataatgagaaaatgtagtgaccttaatgtgtttatttagtgttttaatctgtttctgagaaaaaattagaaaagaaatttatttgatgtagtctgttttgattatcggattcgagaaaattagttgctgttgttgttcactaagtgtagtagaatttatttattttatgaaatttgaaagaaaaaaagagcaagttattagaattttatttatgaatttttttggtactttttattttttaatctatttctgagaaagaaaaggattagaagaaaaaaatttaatttggtgaagcctgttttgatgattggattcgagaaaattagttgttgttcactaagtttaatagaatttaattcttttaagaattttgcaaaaagaaaagttagttagtagaattttatttatgaatttgtttggttatttttgtgttagatatattgaggaaaattattcgaagattcgtg

SEQ ID NO: 57002 - DNA, 540 bp, Populus trichocarpa
  Intron number 1 from transcript POPTR_0009s04890.2 (locus POPTR_0009s04890) derived from phytozome v7.0 (chr-ID scaf fold_9; pos 5142069 to 5142608)
atactgttttcaagtctagcagaagtggaggtggtggtgttttttttttttagaaatttcaatgtgaacttatggaaggaaggtcactttataaaagcctctgtcttgggtccatctgttatcgaagcttgttctgttaaggaggatttggttttgctgcaggttgtggttttctagatctaatccttgaatctgattaaaggcatccatgcaaggtggtcaaggctcattcattggaagattttgtgttattctcagaaggtgtcttcattgcatattatccttgctcctggttcccgcagcagagctgctcatcttttggctaggcaagctaataactgattgtattaattggatggaagttcatccagttttccatactcaacgatgtaccgactactcgctgtactagttatttattgagttaatgtatcatcatcatttttcttcaaaaaaataaaaataaaaagcgagtgctaagtattttgtttgaattttttttcagataaccaagtagcaagatttcaagaagcttcaaag

SEQ ID NO: 57003 - DNA, 530 bp, Populus trichocarpa
  Intron number 1 from transcript POPTR_0014s09570.1 (locus POPTR_0014s09570) derived from phytozome v7.0 (chr-ID scaf fold_14; pos 7142694 to 7143223)
ccaggtctcaattctgggttagttccagtcttaaactcttcctaaatttccttgctttgattttacgtatgtgcgattcttactacgaatcctctttcttcaagtaaagaatagcgttgattttgtcgtgttaggaactagaaattttcctcttgtaatctcttcataattagtaaaaaaaacattactatttttttttttaaactgttttacatacaaaactagctagcttttcacttctccaaagtttaatgaatgagtttgtgacatagcgaaacaacaaaattaaacagccttaaaaggccatcaccgaacaactttaattgtgctgataagttgagcaaataacttagtagaggtcccatttacaccacaccagccgaggcagcttcttatgtgcggcaatgatagaggaggttagagtgggttccaagagtgtggtcaggtataaatttcagcgtgcacagtgtagtctttcattacttccacttaaagaaacagttgttctcacattttgcaggcgagtattt

SEQ ID NO: 57004 - DNA, 529 bp, Populus trichocarpa
  Intron number 1 from transcript POPTR_0015s05210.1 (locus POPTR_0015s05210) derived from phytozome v7.0 (chr-ID scaf fold_15; pos 5574630 to 5575158)
aagaaccctaaaaagctctcaacgtcttctttcaagtaagttgctttatatttcctaaaatactacgccaatggctgtctattttctttaaaagaaattttatcagacaaatccaaaaattcgaagatcttactttctggctatgacccatatgtttttattatttattttgccttactagttctgctaattgagacttctgctagtttcaaggcacaaactttactgtgatttgactatctgcttattaattttttggtttctgtgatttgggtttgaattaatttttgcgtctgtaatctttttggagattttcttaggtgcacacaatgctgacaacaaattgtgttaaggttaaataagttctcttgaattgtcgaagtttgaaataatggatgaagataacagtttgaatattcgtaattggggttactatgaaccaacacctgttaaaggaaatctgggtcttcagctcatgtccccaacaatgcctgagaaaccctttttgggttcgcgcagtgccgcaatc

SEQ ID NO: 57005 - DNA, 993 bp, Populus trichocarpa
  Intron number 1 from transcript POPTR_0879s00200.1 (locus POPTR_0879s00200) derived from phytozome v7.0 (chr-ID scaf fold_879; pos 591 to 1583)
gtcaaacaaaacctcgtactgagatagctatacaggtaagactagctgtaggaaatattaaacactatctacacactacacacaaatataatttaaaatcgggtaaaataatggagatagtcatttctttaattccttcttggaacataaacccagtacacccaagtcgcctaggcgattgagattaataaaaatacaatttttatttatttatttggaaggcttatttgatcatggttttcttgctacaagggagagattcaaacgcaataactcatcaaaagagaaacatgggtgctatcgagccacaaagctcattgcaaagcttcttaattttgacctgtttgtttttacgttttaaaaacgtttttgaaaaaaattaattttttatttatttttttttatttcgaattaatatgttttttatgtttttagattattttaatacgctaatatcaaaaaataattttaaaaaataaaaaaacatgattttgatacatttctgagtgaaacactttgaaaagcaaccgcaactatactcccaaacaagctaaaatttatttatttatttctattataaaaaataaattttgtcaaaaaaatcatctcaacccaatagctagaagcaacataactttaagtttttaacctccgtaagacccttgttttcttgcataccgacaacgtagtagttgaactaaactagtttagcttggcagctctgtatagtgtggaggcaaacctgcatactagggctgttgctctgttcttgtggtttttcggcctcttcttcttcgtttggttcttttgctacatctgtgtgtttttgcagatttgtaactcctccttcccgccatcttttggcgttttaatacatttcactagttatatatataaaaaaaaaaacctaaactaaactaaactaaccaagattgcttaatcattgttcttcttgtagggatataactattcatccggggtttggcaatttga

SEQ ID NO: 57006 - DNA, 508 bp, Populus trichocarpa
  Intron number 1 from transcript POPTR_0009s16510.1 (locus POPTR_0009s16510) derived from phytozome v7.0 (chr-ID scaf fold_9; pos 12519744 to 12520251)
atcctctacgatttggttggtctttatttccttttctcttgttggggtttgggtttaattgatgttcttgagttttcttgattttgtaagacaattcgagagcttatcagtatatgggtccattggatgttaatttcttgtcatagatttcaactttcattttttgaattggatttattggtttaattcatgacctgtgactggatattttgacatgttttaccatgctgtgtactagaaaaattggatcttggattgttgtttgcttcaatattgaagaactatttaggcttaatttttgtatgcctatgtttttgacttctaaataaaattggattttggttctctctttgattaatttctttgaccagttcaaattgggcagcgggagaatgccttgattcttttcatctgcaatgatgtcttttactttaacttttttggtatcattgcatgtattgatttggctgaactttcctaatacaggacccaaagaatttgctgcttt

SEQ ID NO: 57007 - DNA, 831 bp, Populus trichocarpa
  Intron number 2 from transcript POPTR_0009s16510.1 (locus POPTR_0009s16510) derived from phytozome v7.0 (chr-ID scaf fold_9; pos 12520255 to 12521085)
gggttgtcttggtcagtggagggtgagcagtctcttcttgtttctcttgagtcgtatttccttcttatatattgcctttgaggatgcgaggcatttaaaccattccatgctcttcattctttataacaccgaggaaaggttaaacatggaggaggatagctgatttggattttgcaggaaaatgtattgtgaaacttagttgatttagctggatgaattatttgatagtggccaatgttctcatagctgttcttgattctcattcatctaaaaagcatatgcttttcttaactattattaatggctgcagaagcaaagcaattgacaaataacactgtttggaactctttcacaacatctattactaaagctttttgcttctgatatggaaaatcaattataaagttagctttccatagaatcgatgatgggagaaaggggaaaactaagaaaaaaaagtggtcttgttttttttttttttttaaagaagaaaagtttacaccagaattctcaataaagaaaaatttggaatgacttggtgattggtctttctcgtatagctgatgaacatttgacacaaaattttaaggttttcactgataagagaggaacatattttatattgcagaaggatcagattagtttgtcaatgcaacccaattctaggttcaccatacatcatttgagtagttagaatgcttggcaaacaatatacttgtcattaagtggctgttgcttttccggcactattttcttatgctattatatgacatgctttttagcaattgaaagagaacttcgtttttctcttgcagggcatatttgagagat

SEQ ID NO: 57008 - DNA, 355 bp, Populus trichocarpa
  Intron number 1 from transcript POPTR_0004s21950.1 (locus POPTR_0004s21950) derived from phytozome v7.0 (chr-ID scaf fold_4; pos 20900885 to 20901239)
ttgtttgttgattaatctctgcgactgctcatttagttttttttttctgtcgtttttgaatatttctattattatttgatttgctttagtttctcttcttcgatttactccgtcaggtagtttgttggtttcaccactatgcttgtactggttgctagtaatacctggccatgagcatcgttattcctttcttccattttttttcttttagggtttaggtttttgcttcggctttcaatttcaaacacctcttatgtaataaattgatagaaaattaaataattaatcgacaaatctaatttcagtttagggttgtgcagctgcaagtagagagatccgtgtatccataataatt

SEQ ID NO: 57009 - DNA, 596 bp, Populus trichocarpa
  Intron number 1 from transcript POPTR_0012s03610.1 (locus POPTR_0012s03610) derived from phytozome v7.0 (chr-ID scaf fold_12; pos 2838270 to 2838865)
tacgcactgcacttcccaggtatgtgtttttttctatgcttctttccttttatcttttttgtttaaaggaggaacagcttaagcatatagacggacaaacatgggtggaggactgttcaaatcatttctccgcatgaaaagacccatctgatccttcattgggttttgggctattccagtatttggtatggactagatatgaagaataagggactttcttgtttttgttctctttgtttctactagccttgaaccatggaggttaatagagagagacacttgatctttcgtccaacaaggcctttatttttatataattatctcaaaaataattgttaacggtttgtatataagattcagcattgagaatacgctaatacccttttgtagcatttttggtgtaatgggacctggactgtcttttttcttacatctggaagataaaatggttaaactaccgaatttttacttcgcttatttttgtcaatagagtctatgctttccgcgttttgattttgctgctagcacgttcatgactttaagctacgaatatgttgtgctgattgtggagttctgtgagttgctgcaggttcaag

SEQ ID NO: 57010 - DNA, 761 bp, Populus trichocarpa
  Intron number 1 from transcript POPTR_0011s12220.1 (locus POPTR_0011s12220) derived from phytozome v7.0 (chr-ID scaf fold_11; pos 14970291 to 14971051 reverse strand)
tgattgtggagcgctcaattcacagactaagtagcgtaagtgacatcttctttctactgtctattattttttcttgtgttcttaccattttctcctgatgttgcattttgtcattgttatgatttgtgaggtactacactgtatttgtgcagaatttgattgtttttccttcctttcactctattacttaaagttcaaggtacataatggattttcttaatattttatttatatatttgatccctttgaaacctgggtatatatggatatatcattcttgatgaaaggttttgcaagcagtaaggcactttgcttggcaattgatatctgccactacttcttttctgatgtttagaggaatttgagtttctaaatagcttttattgactttttgagggcttttagttgatacctctagctttctgtttggttcttggtcttgattgtaggctgaaatctcattgattattacataaaatgcttcagatgtgaaaattacattttggaagactgttatggaagcaccagcttcgttaactttgtttcagcaggtttatgataaaatttcacatgtttgctttaggagaactcaatattgacagaggaattgaaacagaatctgtcagattatttttgtttgcattttcttttctggaatgccagtgttggtttcaatagctttggcgtctaatctgagatttgattctttgttcatttgtttttcagtggttgcgggaaaccaatcggaaacctttgcttgc

SEQ ID NO: 57011 - DNA, 871 bp, Populus trichocarpa
  Intron number 2 from transcript POPTR_0004s07060.1 (locus POPTR_0004s07060) derived from phytozome v7.0 (chr-ID scaf fold_4; pos 5873833 to 5874703 reverse strand)
ttaatattaggtagaattggaactggctggtgtaagtaaggacgtcttttaatgttaattggtctagtggaactctgcctatgctagcttaggttagaatagccggccccaagcctggatataggaggagggttgttgtaggatgacagccaacataaaaccttgaaatttgttagttaattttggcttggtttgtcagttttgtttagttggtaaattgtagaatggtttgttgttgataagctgatacttgtgtttgatgttagcttgatacatgcgtcatactttcttttttgaaattcagtcagtttcgtaagatttggcttgtgctgctagcctgctaacctatatttgattggtattctttactggccaggacacccgagtggcttaagaagatatttgcaatggttaccaagagtgagaggaatggtcctgtgtttcgtttcttcatggatttaggtgatgcaggtatgattgaaaattgctttataaccttatatatcttttcctgggtaggaaaagactcgaatattattcctgatttttggaaaccactctttttttcttctcttatgtggaccttagtagaaatgaataccccaaaattcacatatctattactatggatgttaatcatggttagacccattagtgcttacatgagcataagttgcatgcaatagaaagggcttgttgaatttaatttacaataaaataacttcttgcattgtgattcaagatacatttatgcgtgctattgtccttccttttgttttacacagtctttgtgagtactgttattcagtatgctgatttattttgcaagctataagtaacttgcattctgaattggtttgtgcttcaagtt

SEQ ID NO: 57012 - DNA, 726 bp, Populus trichocarpa
  Intron number 4 from transcript POPTR_0015s08470.2 (locus POPTR_0015s08470) derived from phytozome v7.0 (chr-ID scaf fold_15; pos 9737780 to 9738505)
gtcctaaagaaagtattatctcttctcttttgttgtttctttctccaatttgatatattagcttttctttttgtgtatctacttggtacatggtgctttaaaaattgtacagacagggtgtagtccatgtacaagcatgctgttgtaaatctatgaatgaactcgggaacatcatctgttttaccaatgacaaaacaatttcttggtttgttgtatggattatttgattccaataatggcatggaaataacaattgttttaatcttctgtccacatggatctctggcatccttcagttattgttttccttgtttaagtctatttagttttgggagctcggggagctttcttccattgttaattttgaatgagaaaaatatgaagaggtcatttcatttagtttcaggacttcatgattgatgtcgacatgtttgatggcttctcactaactgaagtactgtaaacattgagtttagggtgacagaatcttatggcatatttatgtaagaccttgttacctattggagtttccaattttagtatttatctttgttctccttttaccttgagaattctgagatgcaccttttctcttgcaaacctctattggctgtttccagttttattcttttatttttgtattttagtaatgtcttctattttgtattttgtgttttcttgcttcgatgcttacaggcctttatgaaggtggtgtctggaaaatcc

SEQ ID NO: 57013 - DNA, 815 bp, Populus trichocarpa
  Intron number 2 from transcript POPTR_0004s04210.1 (locus POPTR_0004s04210) derived from phytozome v7.0 (chr-ID scaf fold_4; pos 3027366 to 3028180)
caaaaggtatgcatgatatcctctttcatgatcaaggactagtttgattttttaccaaatccctcttttctaccaatacagtcacaatttttttcaaaaccagatcttgactgcacatgctagttaattcaagttgcttttaaaggccagacatgctttgggttggcatttcttgcttgccaagaatcagaattagatacttttggcagttcagcactatatattagttaactgagaggactaaaaggcatcattgactcatggtgacatagaacagaggccttcagaaagtagggtagagttttgagccacaaggcttgggctttagtatgttgaatttgtgattacatcctgaaatcttcaataaaccctaaaatttgtgcaactatttaagtgttttgctatttcagacttataagccattcttttagtatgctatcatgcccacaagtacggctaccttatgaaagtttatgtaattttgaggatctttatagggagggcattataaggtggaatgtatctggaaatacccaacgtttctcaaactaactacgtgagtgttaccagcataatcatgctacagctttgtttctgtttagtaggatgtctctaccggtgaagtttgctcttcctctatggattgatgtttgaacatatctgatgaacaagggttaaccttttatagttaatgtgcccaatgaagtattcattaagatactgcatgttttagttttgttctcaattgatatgaatttatcatctacattagtaagcacttatgaattttcctttctttttgcacctttcagagc

SEQ ID NO: 57014 - DNA, 1010 bp, Populus trichocarpa
  Intron number 2 from transcript POPTR_0009s12150.1 (locus POPTR_0009s12150) derived from phytozome v7.0 (chr-ID scaf fold_9; pos 9959377 to 9960386 reverse strand)
agggtaataatacattttactacttttttcattcaagcttacggctttttcatgcttttagttatgtcaaatcgtggggttttaattttattttttgtttttgatcatgttagaatgtttcgattactgggtttaggaccaagtgcagtaacaatgtacgagtaatactagtttcacttataaacgtccgaaaggatctcaaccgttgaatttgttggatccacttgtcaattgaagaggtgtcttttattggaagaatctctgtaatattagcattatttcaaatatatactcaccaaaacaattgtggaacctatctgccgtcagatggcgcgcattttttgctgccaggtttcaggggatgtagcataactttaaggaatattttagctcttcaagtaaagtttctaacttggtacaagctgttgccattctatggaagataaagttttagctgtctgtagcaatatttttaatagttcttgtaagttgtggtaacgtggtggaagagtttgagagaatgttttaaatatgcttaggtaataaaagattgaagttacttgatactatcatgaattagattgttgttttttaggtatttaggtcccttattttgttgacatcgcaatgtcacttctggtgtgttgtatttagttttgacaattagtcagcttaccttttgtctatttctcgtatgcttttttatgtcttggatgttttcgagatctagtgagtttgcatttctgtacctaaaaagtttctgttctatggtcattgtactgttttttttttttctttcctactggggttgagaatctgtaaactattatacatgccttcgtgtgttataccctggcattgttttgttaatgcattttcattagcttgaccagtactgatacgactctgatttcatgttttatttaaatttgtgtacatgtttcatttgattttgtgttttaatgtatcttgcagattagtggatcacttgcaaggaaggcaatcaggga

SEQ ID NO: 57015 - DNA, 703 bp, Populus trichocarpa
  Intron number 1 from transcript POPTR_0011s13110.1 (locus POPTR_0011s13110) derived from phytozome v7.0 (chr-ID scaf fold_11; pos 15821221 to 15821923)
acaattgggctctttctctggcaggttggtaatgattttttattagattgtaaattattcaggaaaattgaaaactctggtagctttgacaatactctgcgtcagacagaataccacagcaccagcgtatccccacatctgctgtcaatctaggtggaagtctaatcctaagcttgcactgtgtgtttagcatcttgaactgttaagtctgtatgtagataccaactaggcttttgtttatgctttggtttctcctgtgcctgtttgacatcatcactagtaaaaaaagcaattctttagccttccttatacgcaaccacacagaagttgagtaagagtagatgaaaaactatgaattcaatttgatgagagattaatttagtggcctgcattaacagcacaagatgaggtacaccaaggaaaaaggagttggttatggctaaaaattgtgcttccaattgctttgatcagtatcttatcagcctcattgatgttttactacagaaggagactttttgagcgagaaggtaaactttaatcaattgagagggttcatcatttactttcaataatggaatgacaaacagataaacatttttgggttgcttccctcttctattttcagctacaggaaccagagtcttaggtgatagaagtttctctggtagaggaactagtttatcggccgctgcagaaaattttg

SEQ ID NO: 57016 - DNA, 794 bp, Populus trichocarpa
  Intron number 3 from transcript POPTR_0009s04450.1 (locus POPTR_0009s04450) derived from phytozome v7.0 (chr-ID scaf fold_9; pos 4825024 to 4825817 reverse strand)
gaatacagagtcgagctgtttaacaggtaataagttgtttctctttgtgttttactaccaggagtgcaaaacataggcattggagatatttgggaagctgggagctttcctttatgaaacaattacaatgttttcttgttgctttttatttctgtttcatttttatttatatgggaagcttggagcttcggtttatgaaacaattacattttttttctagttgctttttatgcctgtttcactttcattatcatcattgtcttctatggtttgttcaattttagattatgcgaattgtgaagagttgacaatcagtactgaagtagtaggatttcgttgtttactgaagtgttttttttttctttgatgtttttggatgggatttttttttatagacaaccaggctatcttgacaactgtttgtacctaattagaattagcacaattgattgaaggagatgaatgatagccctcgtgcttcattaatcttttcttctttagttattggtgattactaagaggtgaaaactgaataaatagccctcgtgcttcattaatcttttcttctttaggtattggtgattactaagaggtgaaaactgaataactggctttctaagtttgaaacacatttagctgtggttatcatctttttatttttcatgtgatctctattggtatcacatcagcttggatttcaattattaaacaatatggaatcatatctgagattaagtatcactttgtgcctgaatttgattatttgattattgttatttcaggcttctcaatac

SEQ ID NO: 57017 - DNA, 271 bp, Populus trichocarpa
  Intron number 2 from transcript POPTR_0009s04450.1 (locus POPTR_0009s04450) derived from phytozome v7.0 (chr-ID scaf fold_9; pos 4825841 to 4826111 reverse strand)
acgttggtctaccagctggtgtctccaaagaacaggtgggtcctttcatttcagccttttctcttctcctatgagatttttagacagtgaaatgggtacccttttgggatttttgttatttatggtgattgttgtttggttttaagtactagtatttgttttgtttttctatttatatgttttgattgataagttattacgattatttacgtggacttttttttaatcagtgttttgagtttttggattttgataatcgtggtgtaggcct

SEQ ID NO: 57018 - DNA, 757 bp, Populus trichocarpa
  Intron number 1 from transcript POPTR_0011s07090.1 (locus POPTR_0011s07090) derived from phytozome v7.0 (chr-ID scaf fold_11; pos 7835826 to 7836582)
tagtgttcaagacaatttgtttgcttgcagtagacataattaaactagaggactatgaatttttaaacacttcgtgagaaattatgatgaatccgagatttatgcctcattttaaggtcagacagatggtgtttataacaattaatgacaaaaaaattagtttcagattctgctagtcattatttatgaaatgttggttattgttttgttttgtaaaattgtattggtgtgatagatggtacacatgtttgtgcttctgtttctcaagaaaatcaaatatcatttattgatagaaatggtgtactgacatggaacgtaatggttgcatatagttttgatatgcaattcttatttttttaggcaggatgggaaggtagtgctcatgatactcatatttttctggaggctattaacaatccaactataaaatttccaaaacctccttaaggtaaatatatgacaataattaattgttatttaaatttaaaatatgtttattctatatttttttatgaaatttgttataaatttttcatttatcattgcatggaaatattctttggttgatgttgggtacccaaatgaatatggatatcttagtccatataaaagtgagagatatgacttccaagattttcagtatcaagggcaaccaacaagccgggaagagcaattaaatcgtgcacactcatcatttcaaaatgtcattgaacgtgcatttgtaatgtggaaacaaagatagagaattttacagaac

SEQ ID NO: 57019 - DNA, 427 bp, Populus trichocarpa
  Intron number 2 from transcript POPTR_0011s15640.1 (locus POPTR_0011s15640) derived from phytozome v7.0 (chr-ID scaf fold_11; pos 17729712 to 17730138)
aaactaatgtaagccatcttctttatgcttaagcatattttatatgtttaataaaaaaattacattttatatgctttgaagtcctaccatactcttacctcttcttgtcttgtcttttcttttttcctctttcctttttactttttctatgtaaaaagtatatacctagatcattcttgataatcaaaagtaaagttgatttcataaacgaaaattaaacaattctatctttttatttatttttattttattttgtgataaaaagaaaatttaaatttgagatctcatagcctccttcatgtatttggtctaaaaaaatattagtatttcttctagattgatcatttctagcttatatggtattcattttgttcactctctgaatcctgcaggtttcaaatcctataggagaggcaatcccagaaga

SEQ ID NO: 57020 - DNA, 624 bp, Populus trichocarpa
  Intron number 1 from transcript POPTR_0014s08350.1 (locus POPTR_0014s08350) derived from phytozome v7.0 (chr-ID scaf fold_14; pos 6211322 to 6211945)
caatctcttgagcaccatctccgccgatactccttgtatgcactcttctctctttccccacaccttttcttttcgttctgtttcttcgtttagaatttctcttactggttctattattttgtttgattcgttgttattttgtcaatcttgatttgatttgatttctgaacgcgattctgttaatgctctgtaaacagaattttcgccaaaacttagcctaatcttgcttttcttttttatggcgtagttgactctgagattttcataggttgactttgtcttccctctcgttttctcagctgccaaacaaattagcgccctttgtttttatttttgtagccatctgtttggttgtttgtaaaaatataaacgtaaaattgaaaccgaaatggtaatttttaggactcgtccaaactgcttgttttttcggttaatattcttctttttttatcttggcagttgaatttattctttttgtttataattatactttgttttatcgcaaaatttgatatattattgataatatactattatttacatttgatctctgttctgattttctgctttatggtggactggaatgcagattgtctgttctcattattttggtaagttctgtca

SEQ ID NO: 57021 - DNA, 729 bp, Populus trichocarpa
  Intron number 2 from transcript POPTR_0014s08350.1 (locus POPTR_0014s08350) derived from phytozome v7.0 (chr-ID scaf fold_14; pos 6211908 to 6212636)
cagattgtctgttctcattattttggtaagttctgtcatctttttaatgcactgttgctttgatactgcatttggatcttgttttttgggtcagttttttaatttgtttgaaagaatttatgattgtgggattgctatatgagtttgtttttcatatattcttgtcgatcaggaatatgatgtttagtgtttttggttttgagtttataatgattcaaattgcagttcctggtcagtgtcatggattgtttagcaaacacgtatgacttaatcattcgaagattgaagttatttgtagtggttgctactaaaatcaaggatacaataaagatatttttgctgcatgcttgttaacaagatcgggagagtgctgaaagcagtgttttctaatgagtatggttacaagttcattgtgttaattagtttttgtgctagtgggatttggtttatgaagcttttagtgcctggaaactgagcgcctgatataaggttaaatggaaagatttttcctaacaagagaaaagaagttcctttattgcataagaacacatcactatggaagttggacttcgaaaaatgaattgtcattgtcatggactctggcttacttaaggtgttatgtgattgccagtgttgcttttgctgtgttcgaaaattttgaattgtgtgaaagatatgagaatatttatcagattaaaaacgtttttgttttgtttgtgatagtggacc

SEQ ID NO: 57022 - DNA, 872 bp, Populus trichocarpa
  Intron number 2 from transcript POPTR_0015s15020.1 (locus POPTR_0015s15020) derived from phytozome v7.0 (chr-ID scaf fold_15; pos 14386700 to 14387571 reverse strand)
tcaattaagttccttcatcctcaccattctcaaaggtattttgaatgaccttttgcttttctttttgtattctgtaggataaatattactgcttgctttctatgatctatgtattgatgatatatgtcaattcatggcctcaaaagtattgatgtttttagctattcatgtcaaacactggaatgggtcgtaattattatgttttggtttggattttatgttgccttgttgtttgaatttgagggatgatacacccattattaaaaattgggcagaaaggctcttctttttcattgcatgattgtggaagttgtttaagggtttcgtcgatatgtttgttgcttcacttgcagttatgtcgtcatggtccctaatgttcaaatttggtttcaatccagattgtggttattgaatgtgaaaatgtacagcttgcaatatatgagacaagtatgaccccttagtcagggaaaagattaatatttgaaagtggcagttcagtgaaagcctaaatattgggatgattgactgctttatttatagaactcgaatcaggtgaagcttgcatcatatctagattatgaaaagaaatttatttaaagcaagcagttttgtaggtcgtagctcagtatccttgtgtcatactttcagttaggatggatggtaatctccctcactcatttgaatgatgctgcaaagatcctctagctgttcccttatcttttatagtcagtttattcttgattgggctttatgatgttttagttattgttcattccatcagattttcaaagaaaagtttagctgttactttgaatcttttgctgattttttgatttcttatgattgtgtttttagatctctgttttgcacta

SEQ ID NO: 57023 - DNA, 679 bp, Populus trichocarpa
  Intron number 2 from transcript POPTR_0012s14200.1 (locus POPTR_0012s14200) derived from phytozome v7.0 (chr-ID scaf fold_12; pos 14174038 to 14174716 reverse strand)
cttttggcaatcaggtttggctttaaactgatctttgttaagtaatttttatttatgtttgttttcaagaaaatgtttttaatgataagattcatatgttgtgtaatcggagaaaactaatgatcaaagaaaattgttttcctgtgaggagaaacttctcttcgcctcttaagggaggaagatttaaaaaaaaagaattaaaaagcacatctaaagttttttttaggtttatttcaggtgcatatatatatatatatattgtaacaattcatgatgcatggtaagtaatttatcataattccgacaacctaagaacatatttaattacttttcaaatgtttacaagctgattaactatgatacaagtaaacgtaaaacaaaaatattattattgagaaaatattagtaacctgttttttcagaaaaatattttcattttctcaaaagaaataattcaataattgctaatcatcagttgtagattaatgatctatatatataagttgctacgaataaaaatactgagatagaattaagtggttggtttaaataacttgtagcgtgggtggtcaagtttttgcaagcatatatatatattgttctttactaatttcttttactttctttgatgtgttgatcatcaggtttttgatccaaagctgatcaacccatttacagc

SEQ ID NO: 57024 - DNA, 706 bp, Populus trichocarpa
  Intron number 1 from transcript POPTR_0015s12490.2 (locus POPTR_0015s12490) derived from phytozome v7.0 (chr-ID scaf fold_15; pos 12722287 to 12722992 reverse strand)
ctggtaagctttctctttattggctttgttgttttgtaatgtaggatttgattcttatatatataatgcatgatttgatttttcgattaactggtatgagttttctcgcaattttgtgacatgggtggttgtattttttttatatgatgcaaagtgggcttaaatgttggattttttatgtcaatggatgctgtgatttgatgccatttactgtatgatatatcaggatttgttacatttcgttttgttttgtcttaatttagttgttgatgtatttcggtaacacgaggaagcttaaaaagcttggattcaaataaatttctgattttggggacccgtgttgatggtttataggtgattcttcttacttaactggattttttaatcgttacgaggactaatagtagctctggagaattacaattcctatggcaatttgctcatgtctttacatgaagctaaacatgtttgtttatttgttcattggtttgctattagaaaatgcggttctctgcgtgtagaaaatggcaatgaaatttcgattacctttgtagctccctttccttttatggaaaatgcataaactatgtcagattattttgctttctttcttttgattgggaaatacgaagtaaaactggtttgtttttgcatcatggtatccttttattttggccctaacttcttcatttctgtcagggaagaa

SEQ ID NO: 57025 - DNA, 900 bp, Populus trichocarpa
  Intron number 2 from transcript POPTR_0014s12040.1 (locus POPTR_0014s12040) derived from phytozome v7.0 (chr-ID scaf fold_14; pos 8903959 to 8904858)
aagaacattatttagaagccaagtcaggggtattttactttacatttctactctttaaaaatatcacgttccttttatttattgtgtagctgccttatattgactgcttgcgctgggtaaccatttaatgcttttcgttgctctatattgactgctgagtagaacctattgaatcaagagggatcggtttacggtttcattaattggccatctttctctttttaacagtagctacgggtgaaaaagtttggtttatatctattcaatgcctttcgtacttagcttttaagcgtttgtaatctgggccatgtgctttttattaaagagttgttgaactagtttgatattgaatcctatttctacttttgtttttgtggataaaaacggaaagggttattgtaaagaatcataatacattcttcttcttggaagtctttccgtcttatataccataagctcatgaactgtaagtgttgacattaatcttccttgaaaattgcatttttattcaacagggtctcaagcttcttactaatgcatgatttgttattcaagtttctgcacatgaacattctcatttggattaggttatctcctttcacttcatttctattgcactgatataatggatcgtgtttctttgaattacgaatttatcttgattctgttgaggtaatacccgaaatgagaaattacatctggatgaatctgttgaactgatatcgatttgttttgtaaagagaaaggaggggagtaagtgatctgttatgcatgtatgaggttcatttaatacgtactaccatcagtaaaatgaggatcttttcgcattggcctagtcaagcttgatatacaagtcttgaagtacaatttgctcataatcaccaatatgtgtttgcaggt

SEQ ID NO: 57026 - DNA, 371 bp, Populus trichocarpa
  Intron number 3 from transcript POPTR_0009s15860.1 (locus POPTR_0009s15860) derived from phytozome v7.0 (chr-ID scaf fold_9; pos 12182338 to 12182708 reverse strand)
ttgggtaattatctacctttttttttttaatcttttcttcgtatcttctaagtatccgttctaaaaaatccaatcaaaaccgattttattttcaaaaacagaataaattaatatttttagttttattttttaaaaacaaaataaatatctaaatgggttttctttttttgatttctcggttcgaatttttaaaatttctaaccaaatcttcagatttaacttctcaagttgatttttttaaagttttagattgatttttacaaatattctacataattcagttattttactcaccggctgttatcttctgcaaagtcaaacaagctaattaaaagggcatttgattgaataaaccacaggagagtggttca

SEQ ID NO: 57027 - DNA, 314 bp, Populus trichocarpa
  Intron number 1 from transcript POPTR_0015s13170.1 (locus POPTR_0015s13170) derived from phytozome v7.0 (chr-ID scaf fold_15; pos 13234511 to 13234824)
ggtggaggagtcagaagcagttgctgttattgagagtaatatgtttctttctttcctcttccctttatccactatagattttatattttctggtatatggtaattttgtaaccttatgtttctctcttcttctttttttgagtatcttttttattctgcttagactatgatttaaagaatcttttagaatcttgaagacattaaaaaaaaaaactctgtgtgctttgttatctgatatatgtcaccttgaatttgattttttttttcttggggctgtagcttctgaatctgctgaggagaaaaaagagggctct

SEQ ID NO: 57028 - DNA, 764 bp, Populus trichocarpa
  Intron number 2 from transcript POPTR_0004s06120.1 (locus POPTR_0004s06120) derived from phytozome v7.0 (chr-ID scaf fold_4; pos 4859586 to 4860349)
ctcaaaatcgtgttattgtcgagggcaaaaatctggtatgacatttaattattattattattactactgtttccctttattttctgtttaagcaactctgttttcttttttatttaattttgagaaacaagaactgggttgtgtttttctttttttaattttttttactgccttgtatccatttatggtttggctgactgcccttcattattgtagttggcatcaaatcctatttaatctagtgtttatgtaaaagtttctttctttgattttttctgagattccaaattttctttggggacatgcttgataattatcagcagtaacttaatggttcaatttcatcccttttcttggcgtgatgatttttcttcctgtctcgttaattacaatgtgaagagcaaagtagtcaaggaaagtgaacgattgttttgggtcaaagaaaatggaggtggatattacacttaaaagagtgttgtaccagtgttttccaagctaggaaatggtgatgccatcttatgttaataattcttttggttcccctctgtctgttaggcttttctgtgcttgattattagaaatttgtctgcaacttatgagcttagtttgggtattcattttgttctatctccttatgaattataggatttttgtcaatgagtttcctggagacataggctgtctgtattttcttgtaaaatttctttcattgtcttgtaaatctttgtcgcaggtgaaaaagcacatcaaggcaggtgaaggtc

SEQ ID NO: 57029 - DNA, 576 bp, Populus trichocarpa
  Intron number 1 from transcript POPTR_0015s11770.1 (locus POPTR_0015s11770) derived from phytozome v7.0 (chr-ID scaf fold_15; pos 12310724 to 12311299)
gaggtcggttggtcggtcctcgattgcttttgttgttagtacagtaaataaatatgttttagagttgttgagtgttgataattatggatggaagctatgatatgataatgttaggcgtggcattatttatttagattgatttctggagtaagttttttccagcttttaattagtgttaagatgcaaaaactttctgattaaatagaagctgttaccagaagcagagttggttgattattaattaggttaatcaattttttgatttaatttgatttagaattgtcaactgttgataattcaattcattttgaatgattaggcatctggtaatgaacatgaattatgtaaaccatttctatgattataattattcaattcattattataatcctagtataggttagttattgctcgaaaagaatgttacagttgagtatatgtgttgcaattaaatgagttatttgttattgcattttcatgtctggcttacccttttcgttctccatactgaatcttctttgtgaaaaccatttctatgcagttatcattttctgctacaaacttgcgtgaccggga

SEQ ID NO: 57030 - DNA, 825 bp, Populus trichocarpa
  Intron number 1 from transcript POPTR_0009s01130.1 (locus POPTR_0009s01130) derived from phytozome v7.0 (chr-ID scaf fold_9; pos 1272194 to 1273018)
ggaggaaagagaaggaggttaagaagcagtataaggtgattgctttttgtgtttatgttggtggtttcgtgttttgttagaatgaaataagaactgaaaatgaatttttctgttaattatttatatgattgcatcatttaagttttactgttcagtttttgctagtgtgaagatgattttagttgcctgtgtaaagatacttcttgaaacatgcactttaacttaatgttaaaaaagaataggtgatgctacagaaaagtttgttgagctaatcaaattgcaaaaaagtgaaaagggttcgggatggaatcataaataagagaaatttttctatgaatgctttagatatagtttttattaattcttccattggacttgctgaaaaatgattttttttattgatgcttttattgaacttgttgaaaacagaaaggaaaaatcatgtcatactgtgaaattagctgcacacattgctttcttgaatgctaaatttaacattttggatttgccatctggtttatcaaggagacttgatgtgcacaagtaacaactattaatatacagcacaagtagcttgattatttatctgacatattgatgaaatctactctaagaaactgctaatgagttgcacatataatagagggcactggcttttatcatctgagttgtttcagttacactttcaataactcatttttgaattttgtaaccctgggttttttgaattttggttgggattgttattcaagctcatttttgctttatgcatgttattttcaattggcaggacttgggagatttgggccttgttgcaaaagcaag

SEQ ID NO: 57031 - DNA, 684 bp, Populus trichocarpa
  Intron number 2 from transcript POPTR_0004s03850.1 (locus POPTR_0004s03850) derived from phytozome v7.0 (chr-ID scaf fold_4; pos 2739755 to 2740438)
ctccttggttcaccaaaggtacttttgagaggtaatgaatccgagacttagctctcttttttcttattgggaaatttagacattgggctttaattccattgagcaatttgattgagttattggatatcatggatttgtttttgaatttgaaaaaggggtgaaatttagttgattttgtcgtaattgttgcaaattattgtttccatgtatgtaaatagtgtgaatggttgtagattgttcatcgaataaacggaactggaattttgatttctactcaaatagataattaatcttgaattgtgctcaaagtttttaaatttactacaatttacaatgggttatatgccataaaaatggcaaaattctattctcttgttgatttgctgagcaaataaattgccttgtcaaattggtttggtctctgtcatttcttggtcgtgttaaaagttaaaacatactataatttgctgttggcattgaatttagcatatgtaattatgcgtaaactacgtcatgtctgtgtaaatttggaactttaccggtattaaaccctgggtattatcagagagctgaggagttcaaccgctattttgtttttctgtttctgcagggatgcctgaaaagataattcatctcttcttttgtgcagatttgttcgttttgttagtacaccagctgtacttg

SEQ ID NO: 57032 - DNA, 886 bp, Populus trichocarpa
  Intron number 1 from transcript POPTR_0004s17940.1 (locus POPTR_0004s17940) derived from phytozome v7.0 (chr-ID scaf fold_4; pos 17980254 to 17981139)
gctctagcttgttggttagtcaggttagcttgttgaagagtcaatctaatttatgatttatataaaaaaaaacaaaaagaacattattttcgttaaaaaaatgatttgattgtttgctattcggtgtgctcatgctttttagaaaattaaattaaaattttttgtttaaatgttttgatggttttagattatgttgaaaataaattttaaaaaataaaaaaatatatattattttaatatattttaaaataaaaaatattttaaaaaacaaccaatacaacaatattaaatattattttaattaacatgtcaaagaacttattcatgtttatcaagaaaacatatagttcaaccaggtctttgctaaccctatttcatatgggcagtttttgcactccaatagaaaataacatgctactttagtgtctttagtgttgatttgctggtttgataggtcttaacttataatttttaagtattttttaaattatttttgctcaaacttcaaaggaatattttattttaaatattttatttataatttttatgtgttggtataaaaaatataaaaaaattatctctatatatttttaattaaaaaatatttttaaaaaatattatgataaaatcataaacaaaaataacacggtttatgttcctttaattattaaaatgatcttttgggcctctgtaaatgggctaaatctaagtgagagttttgagtcttgacccatcatgtgcagaattgggccctggacctataaatccacattccttcttctcttagacaaaggcatcaggcaaatttaaagtacccacccagcaaagcaggctgttgagttttgagcaagcaagaaagaaaataaggaacatcaacaaaaagaaa

SEQ ID NO: 57033 - DNA, 520 bp, Populus trichocarpa
  Intron number 2 from transcript POPTR_0015s11790.1 (locus POPTR_0015s11790) derived from phytozome v7.0 (chr-ID scaf fold_15; pos 12323774 to 12324293 reverse strand)
ctgcaagacaattaatcgtagcaatatctttgtgggttattgtccttgttttgttttttcattgtcattcaaggaattttttataattatgtgcaaagcagtgtaaaaggatatgttttgtggtgtattttcaattttacacactcttcttatcttgagagaattattgttggtaatttgagtttaactttttaaacaaatgacttgttttgtcaaattttgattttgctcttctagtttattgatgatgcttgtcatttatggtttatttaaggttaatgataaaagctattgcataactccattggttttttttatggttaactgtttatcttcttagaaaatattttttttttttaatattcttttatggtttgattgttttctcttaaatatgcaaacgtttattagcatggaaagcctttacattccaacttgcttaaggaaatacatctgtgttttgactgcttgctatggcattgtaggtttgttgaattcttaaataatctttctagccttt

SEQ ID NO: 57034 - DNA, 851 bp, Populus trichocarpa
  Intron number 2 from transcript POPTR_0001s31900.1 (locus POPTR_0001s31900) derived from phytozome v7.0 (chr-ID scaf fold_1; pos 30289842 to 30290692)
ggctctgtacaaggttgtaactttgggtgttttttgggtatatgcaattatggtctaatgggtttttgttattttttatgggtttatgatttttttctgtgtttttttttaatctgttaggttttttgcttttaatcagtgttgtggtagggatgatgggtttattggagattgggggataatggggcattgtggtgaggatggacttgttagtgtgagtttagaagtgatttttttgtgggtgtttgtgtggctttagggtgaggtagtttgtgttccgtggtactggccttagattggtgaatgttttgtaatatatgttggtttcatgttgttatagatttttgtaatactggccttagattgagatgtttcctgaagttagttgagtgttagaaatgcaatagatttatggtttcggagaacttcctttatcgagatgagaatgttctgtagacttttaagggcaagaaagattttagggcttaggacttttatgtcattgattctttagcttcacgctactgaagatttaacaggggcattccacattggtcatttgtatcaagcacttgcatttgactgaatggttattctatttgtttaccattttctattttctcaatcgataacgctcctaagtcttggcccttaagttaacaagagagatgcatcacatgtcaaattcctatgcttaagatattatattatgtgtcccttcattggttaatggaagtgagtaggaatagtaactgcaatgattgatttttgtttttgcatatcttcctccttcttactgtttctatgtgcaattagatcctagtgcttcagctgctgcatcccaagcaaat

SEQ ID NO: 57035 - DNA, 526 bp, Populus trichocarpa
  Intron number 2 from transcript POPTR_0012s07310.1 (locus POPTR_0012s07310) derived from phytozome v7.0 (chr-ID scaf fold_12; pos 8196390 to 8196915 reverse strand)
agcgtagaatcaatacttacaaggagattaaaaaggtgagatccatttttatagaaagaaaaaactaaaaagttctattaaattttaggacccacaaaagtttacttttatgattttcttccgtcaaaattcacatttgatttactacgtactcatattatctttttaatcacatagagtggtttcttttctctttttatgtttctttactcaaaagatatttcatgatattatttgtaaaattatatttatatcccaagtaactaattctactatccgacttatcatagattattggaaaattaactcaaaaatagtgagcaaaaattatgctttacgagaattaatgattctagttgcgcccttaattagttgttatatatatatatatattggtttacgagggagtagcctatttattgcaaattaagccaaagatccttgaaatatatattgattttgtgcccttaattataacaattaattaacaggtaaccttcgagaacattgggaaattattcgtagg

SEQ ID NO: 57036 - DNA, 358 bp, Populus trichocarpa
  Intron number 2 from transcript POPTR_0009s04300.1 (locus POPTR_0009s04300) derived from phytozome v7.0 (chr-ID scaf fold_9; pos 4740430 to 4740787)
ccaaactcttcctatagtaagttcatcgttcttttttctgagaattttcttttttacattatactgtcttcgatgctaaatacttttcgaaacgtgatttttttccccaattaaaccaaataacaaaacgttttcttgctagcctgtttcattttctgaataaaaccatattaaattaaacgagaataactatacctatgtaattagctagacataataattagaactctttgaaatatacaattctgatctattaatgcatttttctcaatatcttttatatgtggattaagaaattgatttgattgttgttttttattatcttttgggcagtcattaaggcttgaattcatcagaa

SEQ ID NO: 57037 - DNA, 412 bp, Populus trichocarpa
  Intron number 1 from transcript POPTR_0012s07080.1 (locus POPTR_0012s07080) derived from phytozome v7.0 (chr-ID scaf fold_12; pos 7765114 to 7765525)
atttgtggaactacacgacatcatcctcatcctccgtaagaattgttcagtttttggatcttttgatttggtccttgaaatcaagaaaccgtgttcattgggattttatttttcatatactggtagtatttgactttttccaacatgaagggtacttgccttgttttataattgactttttgcagcatgaagagaagatgtcctgtcgtataatcattacattagtgttcaattaatgaataataagaacagggtttgttgttagttatccaagagtaattgattctctttgattaacgctaacttgttattatctgcttgctttccatcataacagatgagaagagaagaaaaagcagttgtatttcttaattttaattccgacaacatttcttcatatcacaggtgcgtt

SEQ ID NO: 57038 - DNA, 272 bp, Populus trichocarpa
  Intron number 1 from transcript POPTR_0015s09000.1 (locus POPTR_0015s09000) derived from phytozome v7.0 (chr-ID scaf fold_15; pos 10330562 to 10330833 reverse strand)
gaactcgcctcctctgctcctgtcgttgttttcaggttttattaccctcaaaatttacaattacagggttctttgtttatatttctttatgattagtatcccaattaagctgtaatttataagatactgctgttattattgtttcagttatgtatttttctttctgggtttatttgtttttgtattatgatttgggagattagattcaagtcttgagttttatttttcttcacgcagcaaaacctactgtggctattgcaatagggtgaagc

SEQ ID NO: 57039 - DNA, 461 bp, Populus trichocarpa
  Intron number 4 from transcript POPTR_0014s06320.1 (locus POPTR_0014s06320) derived from phytozome v7.0 (chr-ID scaf fold_14; pos 4807722 to 4808182)
gaagaggtgattgcttttatctttgggataattacaaaatctcttgtttttaataacattttacatcctggacattgcattttgtttgattttttttaataacattcttttgtttgatctaggatggaaaatgtaatttataaaaatatataatttataaaagcatggaggaaaagtaaagttcagatcaaaccacgagggtttttgtaattatcctttttttttattaccatatactattttctaattttgcagttcagcatctgttccgagaatcgagttaatttctgttttccacgtttaatttgtatggtatcagtgattctgataagtgggaattttaggaattttcagaagtttttttctgaatgaatgtcagaggctaagaaactgaaggttttcaacttgtttgatgaactctttcaggacccattgcacccgttagtcttaggtggtgacca

SEQ ID NO: 57040 - DNA, 531 bp, Populus trichocarpa
  Intron number 1 from transcript POPTR_0004s17700.1 (locus POPTR_0004s17700) derived from phytozome v7.0 (chr-ID scaf fold_4; pos 17787738 to 17788268)
cagaagcttaataacatacaatattgtaaggaaatgtaatacagtagagccaaatttatttgcttttgtcgaattttttcttgtgatataatctgcaaaactccagagagaagaacttcaagaaataaacggcagataccataagccatgaattggacaaaatatgcaccagaggccctataggcttaacatgctagtaaattagcgagtacctcagctcagtgctttaaggatatttttctaaagttaatatcaatgctgcgatatgttaagaaagatgattatgacatacttggaaagataaagaacagacaattctgacaaagagcagtacaaaacatctcagcaagtgtctatgactcacagcagcaatttaatttctttgagttgagttggaccatttctcatctcggtcaaatccaagtccaagcagaatacagttctccattcagttagtcatggctaccaagacagtactaaacttctcactcctctcgtcacttactttcattattttagcaataccaatcc

SEQ ID NO: 57041 - DNA, 802 bp, Populus trichocarpa
  Intron number 1 from transcript POPTR_0015s06720.1 (locus POPTR_0015s06720) derived from phytozome v7.0 (chr-ID scaf fold_15; pos 7712990 to 7713791)
gatttcaagacccgaatcgcgggcttggtaggttaggctacaaagcatgggtcaatcaaatatgttggaggctcaattgtttttgaaaaaaaagatgctacactgaaagttttttacacatttggtttattttgaatttgtcttcatgatatgttttgttttggtttctgtttgattaattggtttcgatttgctttttacagagttattttgtcctcttgaatatttttttttttaaaatccataccacattgttattggtcatccaggttgcggggttgcgggtttaatgatgtagcttaaaaatttcctgcaatcttgattttttttaaacatttcaaaaaaacttggttcgacccgaagcgctggtcaatggacttgtatgtttctctttgctgatatatgatgtatgatgcttccttgagaagttagaacattgctgttctaagtttatacagaaggttattatagattaatttcatctgaaatcaatgcaatgtcttccactgaattgtgactccctattgggttcatctttaatctatcacgacctgtaattttgtatggtatcactcttctgggtttctagtatgtttatcagtgagagatgcacactaaattgctggaacaacttgattggaaataatgcatatgttatgtttcttaaattattatttccctatctgtctctttcttttgattatttgatggttcaatgtcaaacaaacctatcacttatttctctggggctatatttgaaagtttctattactttttccccagcatcgcaaggaacttgttg

SEQ ID NO: 57042 - DNA, 863 bp, Populus trichocarpa
  Intron number 2 from transcript POPTR_0015s08790.1 (locus POPTR_0015s08790) derived from phytozome v7.0 (chr-ID scaf fold_15; pos 10138039 to 10138901 reverse strand)
caagtgtatctttatgtttaactatatatggacagaaagatggttattatgtttttttcttcaaaaggtcaactaagctagccaaacctgttcaagatagtacctcacagataggatctttatgaatattttagaggcaacactgcactaggtgtacagaatgattgctcctcatgaaagcaaaaaattatcatctttattaaaggctggcgttttatcagaatattacatgaccatttactgatgttatttttgttaagatatcttatctgattgttttgttatcttgccaatccaggtctgttttgtacttcattgtgtgctatttttctcataagggttctcaagtaagttgcttaggctgggatcttttgatttttttttttggaatttcacttcatcatcatcatctcatttctgtgtttatgtggttgttggcatagtatcttacctggtatttttctgctcttttgctgtcttgttctcttattctttgatatgtttaagaatgcttatatcagtatcacttaccccatttgttattttgatttagatgttatcgatgcacataacattgccttgctaaatatgtcattgaacaaatattaagctctacctccccttgtttgctacctaccctagttgaaataccctagttgattgggtgcatattctttgccaagcatataggaccagatttacaggggcatctaccttaattcaatctctttttttgtggttctagattttaatgcatggaactttgaatgaggatttattgcccaacgatgatactatgtctaacatgttgaaccactatgtctgcagggtgaccttcgtgactctttacatctccggaagaa

SEQ ID NO: 57043 - DNA, 349 bp, Populus trichocarpa
  Intron number 1 from transcript POPTR_0001s07330.2 (locus POPTR_0001s07330) derived from phytozome v7.0 (chr-ID scaf fold_1; pos 5513706 to 5514054 reverse strand)
tgcacagatcttatttgtcccctgcacgaatcaaggtcaagatcgtttcttttatttcttttagatttttttttatcgagcttagtttcctttgttttgaaaaaaaaagagatcaaattttgagcttaaatatcactgtttttagttcttttctttcaatttttgatctggaaaaaatagggttttggtgttgccaatttaggttttgttgtttgaatttagcaatttgagctgattctagttgcagtggatattggtatctggatattgatcaatgcattaaagtttggttctttccttgttatatttttcaggtattcaattttttcctctatcatcagcttttact

SEQ ID NO: 57044 - DNA, 382 bp, Populus trichocarpa
  Intron number 2 from transcript POPTR_0015s09020.1 (locus POPTR_0015s09020) derived from phytozome v7.0 (chr-ID scaf fold_15; pos 10344023 to 10344404 reverse strand)
aagagttggctgtgctacctataactggactgttggttaagaaaccttccttcattctttttgagtaaatattgtgaaattcttttattttcttcgtaattgtataaatgttttggctgatatgcgctctgggaaagcttaatcacagctcaaattcacaaaacacaaatactgaatgagttctagcttataaaaaaatgctgtctataaagaaggctaggttcatgaagttgcaaaactgaaactgagtatgcaattccttgtaaatttacagttgggattttagcacttggaaacaattatagagactttgagtttttttctaatatcagttatactttgtgcagataccatccccccaacagcatatataactgcatca

SEQ ID NO: 57045 - DNA, 380 bp, Populus trichocarpa
  Intron number 1 from transcript POPTR_0820s00200.1 (locus POPTR_0820s00200) derived from phytozome v7.0 (chr-ID scaf fold_820; pos 4026 to 4405)
tagtatcggttatttttacgaacaagcattgcgaggtccgtgcaatcttcttttcttaccttcattttttctaaacctctgtttggttcctaagaaactgaaaggaaagaaaagcataataataaaaacagccttgatcaattcttaagttttacagtaccgcttgattttattttttttctaatcaagaatttattttcttgaagagtttcttgatttccaagttcgttgtggctcaaatgatggaagtttgcttccctttctttgattttcttgggaaccaaacaccatcacacctcaaaaaaaccctactctcttctccgattgaagcccataaatttttatgctttaatcttctcttccagcttcctatccaaacg

SEQ ID NO: 57046 - DNA, 632 bp, Populus trichocarpa
  Intron number 3 from transcript POPTR_0004s04310.1 (locus POPTR_0004s04310) derived from phytozome v7.0 (chr-ID scaf fold_4; pos 3086897 to 3087528 reverse strand)
ccgtttcgtgacagaaattggggtaagattgtggatatttgcatccttgtttggattatttatgattggatgctttagcaaggctggcattcaagagaagtctttgctttctatatgatcaaatgtgttgagatgcgtttggtgtgtgattttgcattgcagtattagaattgtgagaagttacagaattaattattgccatttacaaggtttagaaattacaatgtttcttgatttctttctttttcttgttgaagttcttttggattgtaatattaggatgcatataaaatgttcttgtaggactgtgttttcatattgatttttgttagggatttctttacacttcaaacttgactagacacatttagagtttgtacctaaactttggccaaattgaagtttttaatagtagttagtgaaaaaggtaatatgagattgttgtctattataatttataaatgttttatagaaaaaaaatctgaaaaatcttcttaaagaaaacactgcaggagttctttttcccctgatgttctcttggttgttattcataacctcatacatgcaaatgccatgttctagactcttgttttgatgatggttcatgtgcaggagcaaaacaggcgaccacc

SEQ ID NO: 57047 - DNA, 778 bp, Populus trichocarpa
  Intron number 1 from transcript POPTR_0015s12870.1 (locus POPTR_0015s12870) derived from phytozome v7.0 (chr-ID scaf fold_15; pos 13059612 to 13060389)
gaaaagtaagggtttttcttatgccccattttttttttactgatattttgaaggaaatggatttggtttcggtgtttgttgttcgcgtcatgtttgtttttcaaaagtttagatctgtttggtaaagttttcttctttttagcaatttgaggtctttagtgtctgtttggttcctgagaaaataggcgtgaatgaagagaatgtgaaagaaactgagcgaaggaacccactttgtgctcactctttttatagttgtaaaaaaaagagagagtaaaatctgagattaataattgtgttagagatatcaaaggatttgggttttgtcagttcctgtatttagatttataagtattggaatggagtgtttctttttcttggaaaattacatttgatgtttctttccattattgaagtcaaatggatattcctggaattagacttgaagctgtttgttaaacctaaaaaccagtcaataatgggtttttggacttcttactagtgtttccaaaagaccattttgtactcgaacactcgttggctcatacaaatgcgtgattagaattaaaaagatgaaatcatatgtattcttcttcatgcaaatgtgttattgcaattaagtttctgagacagtgttagtggtttagctcttgtaaattttatagttttggttaatttctgttatttttgaagatgttcagtttcttgagagaattgaagatggacctttcaatttatgcctgcaggtttataatctctgaaagtttacgatatcactcaa

SEQ ID NO: 57048 - DNA, 604 bp, Populus trichocarpa
  Intron number 1 from transcript POPTR_0011s15080.1 (locus POPTR_0011s15080) derived from phytozome v7.0 (chr-ID scaf fold_11; pos 17269055 to 17269658)
ccattgagatcaggaactttcttggcgagaagaaggtaagattcttttactactttcgagaaacccatttggtctttaaggctactgttactgtttgatgcgtgttactactttcgagaaacccattttcttgatgttgggtttagaaactgaaaaaagtgagtattttttattttattttattttattttttaattttagtgttcaactattgacaatttagctggtaactgatgctggtaattgatggtttatgagattattctattaggtttggttattgttagctgattttggtgttgtatgataaatatacagagaatgcaattttattggattgtcaattttgattttgagacaagtaaaggtagtgagataatgttgtgagagtaatctagaggaagaatattcatttggttttgctgtagttccgtgttgaatttttgtcaatggatatgatatgagctgttgccagtcagcagtgttgtgaattttgttcatgtaaaaaaagaactggttttactttttgtggatgatttttttactgatggttcaattttgtaatgctgtttgtgtttggttactgaaggtgaggaaggttgac

SEQ ID NO: 57049 - DNA, 570 bp, Populus trichocarpa
  Intron number 2 from transcript POPTR_0009s02820.1 (locus POPTR_0009s02820) derived from phytozome v7.0 (chr-ID scaf fold_9; pos 3578121 to 3578690 reverse strand)
gagaattcgcaacagttgacccggcacttatagatgtacgttctttttggccgtgctctttatttgctatccctgggtaaatgtctgagaaagttcgtacctctaagttttctgttgtccccagtttaaatttttgtgattgcatcttataaatattttcatcattgattacatttcttttctaaattgacaatgaaatctcagcagcaatatgtgtgcgggtaacaaaagatgttacctgtttgataacttatgaaactatgtgtagaaatagtcataaatttgtggctttatctagtaataatgatttctcatggcactctcgtgaaacaaatgtggccttctttgatattttcagttcaaatccctgtaatggactcatttaccatgggaaacatgttctaaatctctatgaatcatcttatgtttctttctcgtgagtttgaaacaagttttgttcttctctctctaaattgttatttgtcttaatacgctgtaagttttttttttttcatttactgttttagatgtttctttttccttccttgcatgtaaagtttattggcactg

SEQ ID NO: 57050 - DNA, 608 bp, Populus trichocarpa
  Intron number 2 from transcript POPTR_0012s03140.1 (locus POPTR_0012s03140) derived from phytozome v7.0 (chr-ID scaf fold_12; pos 2499926 to 2500533 reverse strand)
tggacgtacccttgctgattacaatatccagaagggttagtttcttgtaaagattctcgtttttttttgtttggtctggtttaaaagtttgagtcgaattgagtttttgctttagctcaattatggtagaatgaaatttttgtgattcaaagggtgatttgttgtcgagttttgattgtcttgatgatattatggataaatttaatggtaaaagatgtagtggtcgattggattttgttttaatttttgtgctctaaagagtggtgttttgttgagtaattaggattattatagttttatttagagtgtaaatgattaaaataaaaaaatttcatatctttgataaataacattgaaatatatgcttatttctgttctattttgaatttatacttgcaaagaaacaaaaattaccacatcctttttaagtttggatgtgagttttagaaagcttttaatctgtttttctctgattatttccctttgtttggtgaccaatcaagcagagtgtggatatgtagtcttgaatcgtgtaatggttatcttatttgaattccctgtgtatttttgcagagtcaacacttcatctggttctgaggcttcgtggt

SEQ ID NO: 57051 - DNA, 579 bp, Populus trichocarpa
  Intron number 1 from transcript POPTR_0014s03180.1 (locus POPTR_0014s03180) derived from phytozome v7.0 (chr-ID scaf fold_14; pos 2557286 to 2557864)
ttacttcacagcaactccagaaattgcccacttgactctttcatttttggtatgctttacttctttgaataccctttgattgtgctacaatttgatgatcagtagtgaagtattttgatagtcttgatctgcaattcttccttcaattcttcttaattcatgttttttattgcttcaaatattctctcttagaggtcagctcagctcttttggccctatttttttccttatatttattatttagtttgcaataaaagagatgaaacaaatcacaacatggggtcatgctaaagcggtaattttaactttcgagtgtcaaaatgatgaggttgcatggccttttttgggaggccagtttggaacaaaattgttctcgacactaaagattctggttttgaggttaaggttgtgtttactttcctttagttcgaaataaactcataagaactaactataataacttttgtgggcattagaaaccaatgggttttaaatcattagtgcctattcacacatggaaacattctctaactgccttttcctttcttaacttggtatttggagcagttggctgtctga

SEQ ID NO: 57052 - DNA, 369 bp, Populus trichocarpa
  Intron number 1 from transcript POPTR_0011s02610.1 (locus POPTR_0011s02610) derived from phytozome v7.0 (chr-ID scaf fold_11; pos 2516047 to 2516415 reverse strand)
agcgaagagctctcaaggcatagctaaccccaccttctttgtttcttgcatttatgtcttttgtagcttcttggttattcttttttgaagtggacgttcccgttttactcaggaaacccaaatacctaataaccagatatttctcttgtttcagcaatgtcatatatacaatcatgatgttcaaaattctgttttctttgctttgagaaaatcccatcttcttttaatcttttcctttgaatgtcatggattttacacccttcatctggattcattttgaattttggcctttcaattatatttgagaactatatttttgttgtgtcctctacagattatctcaggtttgcagaattttaataaagaaaa

SEQ ID NO: 57053 - DNA, 951 bp, Populus trichocarpa
  Intron number 1 from transcript POPTR_0012s13650.1 (locus POPTR_0012s13650) derived from phytozome v7.0 (chr-ID scaf fold_12; pos 13711090 to 13712040)
gagcctttggaagtataataggtaaaaattctgaacctttaattgaatcatatttagttaatggttaagcttcttggataactcttggcaagtgctagtttttgttcctcgctccatagtctgcttgctaaagactcacaaatctcatgcagtgaggtttaaaatctacaaaaatgtgtctgctatttattatgcaactagttacagtcctggagatgactccttaggctcaatataaacaaatagaaaatcaaagttatgcaaattgaaaattacagaatgtgaatggaatggagttgggtactgctggccaagggcctggacttgcaatatttggagtctgcaaatcataactagctccataggatcacaacattcctttgtaaccacacaccataaaatattttccttgtaggaacttgtgatgggttcattttttgtctttctggctctttttgaatggattcaaaaccctccactgtgattaaatagctccaaggcttcagcactatgtgttgggaaaagcatggcaatgaaacatctggcattctcaaatctcattgagtttaaatttgaaacccttttagattatccttgaccttaaaaatgaaagtcttgttctcttcctgaatttttcagtaagaatcaatgttattttcttcctgcaccccagacaagcaattgactggcagaagtctcactgtttcaaactattatctgtataaacttcgtgatttgacctggtgatggattcaactgattgttataatcaacttacttgagtaaaatttctacaggttatcagttgaataaacatattcatctagcttgtggtctctaaattttgctttagttgataatgaaacgactttaacaactggaccacttccagtgttaattaggtttatccttatttatatgaccaaaatagtgaatttctacagactctgc

SEQ ID NO: 57054 - DNA, 439 bp, Populus trichocarpa
  Intron number 2 from transcript POPTR_0009s01940.1 (locus POPTR_0009s01940) derived from phytozome v7.0 (chr-ID scaf fold_9; pos 2408705 to 2409143 reverse strand)
ttcctgtaagtatccctgttatcaatttaacttgaaattcagaatccaaattaatgtaatgggttgaataactatgatttgttgtagcatgagggtcgtttcctttctgactttgattgtttttctcatctcgggatcttggtttgtggagactccattaatacagctacaatcttgaattgaattcattttttcttaggataattgattataaatagtaattactacgtaaataaagggtactattaaccttatttcatagctcacggaaacacctgcaactaaaatttgtaatgatcatgtagctagccatgctagttaattttgaaggatttcgtaaaagggcatgaaaaaacctcattgggtatatttttttttgttcccttttcttctttgctatcaaggtattggcacctctccccattggatttgctgtgtt

SEQ ID NO: 57055 - DNA, 865 bp, Populus trichocarpa
  Intron number 2 from transcript POPTR_0014s13550.1 (locus POPTR_0014s13550) derived from phytozome v7.0 (chr-ID scaf fold_14; pos 9964942 to 9965806 reverse strand)
gaaagagccataacagtacctctcggtctagctgggtatataaccactaagttttgcgatatataatgtatatcatgcatgttttgtttagttctgaaatacataaattcgcgatttaccatgatatttaaaaaaccattaattcatatcattctttttaaataaaaaagattagagttttttttttgggtgctatttaaattcctcttaatgattatatattaaattataccatcaagataaagaaatgaataataaaagaagaagaattttgatcgaagaaacaagatttatctcaagaatttaaatcatttatattcttggaagtatttatttttattttcataaaacaaaataaaaacttgtttaattttcacgacgctggtgaaaaactatttgtgttattatagtgttttcatgtcgaataatcaatgtttaacgtgtgcaaattactcaactcttagacttaacattttaaattaagatggtattattaatttaaaagaaaaggacagatttacgattatctctatcccaattaaactcccaacctatcgattgctccaatggagttctccatctatatatattgaggctttgcccatgatctgcaacgatcttcaattttagtacaaaaagcagatacgaggaaccctaaagtattatggaactaagaatcatacacaaaatgagctgaaacttgtgtttggtcattcattgagtaactttcagaatcagaagatctgagcttcgatgtgattgttaaatgtttgtttagtatagctaaatgcaaagccttttgttagattgtgtgcgcgtggatttctcaaaagttatttaacatttagtgcacggcagattttct

SEQ ID NO: 57056 - DNA, 740 bp, Populus trichocarpa
  Intron number 1 from transcript POPTR_0011s06720.1 (locus POPTR_0011s06720) derived from phytozome v7.0 (chr-ID scaf fold_11; pos 7375447 to 7376186 reverse strand)
ggcgttttttgaggcaaagctggttcaagaagaaggtaagtcacaatttccttcattaagtttgtagcagtcctctttcttttttatttgaaatgggactttttggattctgggttcttttgttgatctctgggatttattgatggaaccacttgcttggtattttggagaagatgtgggggaaaacggtatagaaaaataaaataattaaaaaaagagtacaactttgaatcttgggtattgggctctttttgatatataggctgctttctgatggtcactgagaaaatatgggaaagtgaaggaaattggaaattcgatctttgggtttttccctgtaaaccgagactcgcttcttcaatcacttgaatcgcttagactgcttggctgagcctaagcttattgtcctttcttcattttgagtaaagttttctgttttattttttttaactaaaatttttgtcagcaattaaatgtgcatacatacatgagaacgctggaaacaatcttcatgcaaaaatgtagcctgaaaactgaacctaatgtctcttaaagtgaacaaataaaaatgggatgaatttgggagtgcattggatctcaatgcacttttgcattgcagaacttcgtaaatataggaattaatgtatgcatagcttttactttcagtcagcttgtattttaattcttacaacattaactggtcatatgatgcttatcggcctatggttgataagtagttg

SEQ ID NO: 57057 - DNA, 460 bp, Populus trichocarpa
  Intron number 1 from transcript POPTR_0004s04080.1 (locus POPTR_0004s04080) derived from phytozome v7.0 (chr-ID scaf fold_4; pos 2928046 to 2928505 reverse strand)
tcgccctagattcatatcatcggtacaaggtatggacgagggaagactgaaaactaatataggttcttacagtgtagtctatccatctctgtgaaaagaatccaaatagtagcagctttatgaaatgtttcaagtcaccatatagttttaaacaggatgtgaagccagcaaatttgctttttgaaatgtttcaagtcaccatgttctaagaaatcaaatatccaaatatcatcgtattctttaaacagtttctgtaattattttggcttgaaaaggagttatatgacttcaagaaatagaaaaatatttcatgccttaggaggatatcatctttttacttttctatacgagagatccattcaatttagaaatttatatgatattgcattagggtacctatttttcatcaaaatatgaggcccgagagctaagaactgttcgatgatgttcttgcaggagg

SEQ ID NO: 57058 - DNA, 980 bp, Populus trichocarpa; identical to SEQ ID NO: 55812
  Intron number 1 from transcript POPTR_0004s17160.1 (locus POPTR_0004s17160) derived from phytozome v7.0 (chr-ID scaf fold_4; pos 17495911 to 17496890 reverse strand)

SEQ ID NO: 57059 - DNA, 950 bp, Populus trichocarpa
  Intron number 1 from transcript POPTR_0012s13570.1 (locus POPTR_0012s13570) derived from phytozome v7.0 (chr-ID scaf fold_12; pos 13675036 to 13675985 reverse strand)
ggtctattaggactgccattgatactggttgtggggtaattaagctcttgatccttaatctctacacatattttactttcttttatgatttctttagtcttagcttattaaattaatattttattttcattttgcttccgatttttagaattttaaaatgtttttattcttaaaaatagtgaagataaaaacaaagatgaagtcttttcatgttcctagataagcacccattaattggattttaaagtaacggtgtttagaaatttaagtatatgacattggtatatgtgactctatgtttcgaaacgttacaaagtttctgcggccaaattaaccagctggatttgtaattaaccatttattaattgtgggttatggatctaacattagggttaagagccttggtttttgaaattattttttgtttttttgatgagtagtcaatttttgtttttgtgcaagtgaatcaaggggatgagacaaatatggaattttcattgaatttgttagatttcattcttgaaatatagttatcgttgaaaatatgagtaattaatgagatttgatttactactaaataaagctttaagaagtcgacaaatatagctctcttagctagtcaaagacaatccaaagtataatttagaccgtttgattttttaattaattatttattttccccaaaaatcactttctagataatttagaccgtttgatttgatatccaccagtaaaattcaatcattcaatgaattagattatctcgggaaaatgatttcggcaagaatctttgtatatcactcttttcttgaggctaatgaatttgcaaatatgagttggaatattcttaaactatggaactattttaaaccttgtaaattttctagtccctgaactttgttaggactagtgcaggttgcaagttggggagcatatcttctgtcacgcaa

SEQ ID NO: 57060 - DNA, 1036 bp, Populus trichocarpa
  Intron number 1 from transcript POPTR_0001s42550.1 (locus POPTR_0001s42550) derived from phytozome v7.0 (chr-ID scaf fold_1; pos 42568850 to 42569885 reverse strand)
tcatacaaaatctacatctgatatcccttctactagttttcaaaatgcagactatactacaaatatatcaaaacctgtttatacagaccttgagcaaccatctcctccaacctcaccaaccttttaagctgttactgaaaacatccaaaatgagctgaatgttttgacttccgaaaaacattttgttcatgataaaactctttcaaaaaagatttttatgctgcctataattctacaaaacaaatctgatttctccaacactttctccaacagagaagtgagatacaaaaacaattttataatttcattaagttacataaaatacacattctattctttgattggtttgaattatactatgcatccaaacattacattacatatccttttgcatccatcaagtatgcatgctcggtcacatcaagatccaaaacccctatatggaacctcaccagtggaccaacagttgagtctgaacatccacccttgagaaatatccaaataacccgcaacaaccagactgtagatgcagccccctacaaattacccagtgaagacaccctttccaataccaaacatatcattaaccaaaataactttacaaacaccaaccttaataccttaggaaaatagcttacacgactggaaaaaacaaatacaaagaaccactactagttcagttgacattaaaacctcaatcgacctaaaaataaaaaacccatttttcaaaccttatcaaattacaaaaacaagccaaacacaaatccaagaaaaccaaacagattttcttagagctatcaaaacacacttacaacatcttgacaattcatttttaactgtcccagacacaccacaaacaaccaacccttctacatccacaaatcaagtcaataccttacaaaatagtcctgaggagtcttctaatgaagatacttctccccactaacctcttgaactaaacagactaacctggcaaactcccaaaacaaccattgccctagatatttccatatctactgaaccaactatccttact

SEQ ID NO: 57061 - DNA, 771 bp, Populus trichocarpa
  Intron number 1 from transcript POPTR_0012s05930.1 (locus POPTR_0012s05930) derived from phytozome v7.0 (chr-ID scaf fold_12; pos 5831274 to 5832044 reverse strand)
tctttgacactggtgggttatcacttcttctactttttttctcttgtttttatttttctctttatatcttgtcctcgctatcttttagtcttttgcaattctggggtttcctttggtgcttgtacgaaatctggattttttgtttattggggattttgcggattttcttttttgtttcttggcattaattttgtctgtattaagtttggtgatgagaggaaatgtgattactggtgttattttgctttcccccccttttttctgtaacttgttgaattgtgtttattggtgttgcaaattgcatgggagttgttgttagcattaatttttgtggcatttatggtttgctattaaaatagtgtttgaagtgtatgtttaggtttcctgtgggtacgggtactaatttttatttctttcttctcttttttaactctgcgtgcaaaatgatatgtctgtgcggttaatttcctattttggagtcaatgaactatacgagcctatgcaagtatttgtcccacctaataggatttgattatatctgtactctatcatgcttgttgcttttgctacttgcgagcatttatttttctcgctgaggtgttcttggtttcttttagaacaaatttttccatgttttcttcacttgatattcgttgatgattgccttttgagttgttgaattttcatctgcaatttcttttccccctaattttattttatgctctcatatcgggttgctgacttgtagttaaccagacttggagccagcca

SEQ ID NO: 57062 - DNA, 408 bp, Populus trichocarpa
  Intron number 1 from transcript POPTR_0015s05160.1 (locus POPTR_0015s05160) derived from phytozome v7.0 (chr-ID scaf fold_15; pos 5490365 to 5490772)
gcactctttacaggtatttctctctctacgcttccgcaaacgctagtattattaagaatatggacggaattaagtgtttttattcatcaattgagcaattcttttatttgattctagaaatgttattgaaacttgatagaattttgaaggcattgagttatgattgattagaagatatagagttattggcgcatgattttttttgtgtggataaaattaatggaattaagtaattttatgttgtagttttggttttggaaatagtgaaagtgaagtaaatacttttttttgtcctttaattgtttatgtttatctttttttaaagaaaagaaattatttggtgaagcttgattttatggttttttgttcttttggaatttgtaatgtggattcaaattaatgtgcaga

SEQ ID NO: 57063 - DNA, 879 bp, Populus trichocarpa
  Intron number 3 from transcript POPTR_0014s07530.1 (locus POPTR_0014s07530) derived from phytozome v7.0 (chr-ID scaf fold_14; pos 5659013 to 5659891 reverse strand)
ttaatagttgggttgttgaaatctactgccacaaggtatgcttcttcatgtttgaatgattctatgttgtcctttctgttaaaatattgttaatacttgaattgagaattctttcaaagatttctatgctcatactttcttgcattatgatttgtttttggcatcatttcgtgtaaaagatgtgctttgagtggttttctagtggatttggtatggcttccaaccagtaccatcatccctcattgaaacacgatcgatggaaatacacgagtgatctcaaaacattgaatcaaagtacaaggaatatttactttttaagcctgatttatgattgatagctaaccttttgtcaagttatattcttctatgtttgttggagcagcaaatcaattatttcgcagttactcaagtaatcctagtctttgttaatttctgattgctgtgtcctgatttacaatcagattgccatgtgcttgtttgaattgtactacaacaaacatctatattggcctgatgtgaatgaggaaaagtggctaatgacattcaactatcagtatccatggaatgcaaaataaagggaagaaaggaaagaaagttagctgtaaacccttgtatctttaatcatttttcaaacatattttaaataaagtggcaccataatgaatgaaattgctttggggatcaagcaatgtcctgttggccctgtgttcattcatcattgctctacatggcaaagaaacatctcttgaaagagagttgtcttttggtgtggattccttattttgttggtacaatcttaatataattggttgctgaccagggtacacttgtgatgtgcttacaggtaattagattgtctgccgctacccaggattatcc

SEQ ID NO: 57064 - DNA, 803 bp, Populus trichocarpa
  Intron number 3 from transcript POPTR_0009s01280.1 (locus POPTR_0009s01280) derived from phytozome v7.0 (chr-ID scaf fold_9; pos 1499541 to 1500343 reverse strand)
tcgtaagttttttttttcttttttttttcttaatgtaagtaagtttattctcgttaaaactaattttttttttaaaaggtaagtaagtttattctcgttaaaactaattatggtgatttgggatattgtttttccttattttatgatttaggattttttcccccttaattttgtctcgtgtaatttatgtgggtttagtgctgattttttttttcgaggaaaaaaagaggttaaagatattggaattgtttgccattgttatttaaagcatgaaataatgacaaagtaaatggtgttagagatgttgttttttgagggtgtttggcaaagtatatgctgttaaagatgttgttgcttgagggtgtttgacaggttatatggttttagagatgttgcttgagggtgtttgacaaagtatatggtgttagagatgttgttgcttgagggtatttttatttttggaagataacatttttactcttgcaacgaaacccaaaaggtggttttttgttttttccttctttggttgaagagtggctctttggtaagatactaaatgatgacaaccttatgacgctgggtttcaagatggtgaattgatggtgtttgtgtaggcatgctttgcttctgtgctaccatatcattttggatacacatacgagtaaaagtctataaaattaagtcgtacttgtatataacaactcctttttaaattttcaatatggataggttgtcctcggtaataatgatacgttcacatttctggaaatctcaggttgctaaagagactggattttccagag

SEQ ID NO: 57065 - DNA, 841 bp, Populus trichocarpa
  Intron number 3 from transcript POPTR_0015s14510.1 (locus POPTR_0015s14510) derived from phytozome v7.0 (chr-ID scaf fold_15; pos 14068593 to 14069433 reverse strand)
taacattaccaccaggaaatccccttgtggtgaaggtattatctcaaactgctttgactaatcatggttcgattaatatgtagtgtgtgccattttgtttttttctcttcttttatgtgctatttacacagttatgcaaccttcggattttagaaattcacttttttcccatgacataatattcttatgtattgatttttgttcatgctttcttcaatcatgcatcactcgctttatgagttccaagtgtttgttatcgacatattttctttttgtaatgtttgacaattatttgtttcatttgataagaatggtttgagggtgaaatagagaagtggcagaaacatcactgttctttatagataagctctgttatttgttaccctctaggaccaatgaagtaatcaatcgcaagcttgtgttccctgcgcagtcatatccagtagtattaactggttaatgcatgggaaaaggggcctattgattaaaatgttgccaatttaattttctaggtgttctagtctgagcattggaactagggggatgggctataccatgctggttggttttgtaatgtttgcacaggagtttccaattaatatttgcttcaaaatgattttcatggttcatgtgatagaaatgaatctccctcacttaaacatatgtgctatttgtcttttttgacgccattaaaaattgaaatttgttgtgttacgtttttctatttggttcatctgtcatttctttcaagtcgttgatcttcccttttactaccatacctgttcagctaaaagaaattacttgtatataatttttctgatctgctttcaggaaccaatac

SEQ ID NO: 57066 - DNA, 729 bp, Populus trichocarpa
  Intron number 2 from transcript POPTR_0009s07670.1 (locus POPTR_0009s07670) derived from phytozome v7.0 (chr-ID scaf fold_9; pos 7111471 to 7112199 reverse strand)
gtccttgaagacgttactgaatagtaagtcataatgaactctctttctctgtttttcctttctttcccttttcttttagggttttaataaataaatgcaaaactccactttttgttgaaatgtgaaggttttttttcactcaatgtttctttgctctggtaattttggtgtttaatgtcatggcttctttttttttttttttacaatgataatgatcggcaagaattttgggtatcttgaataaattactgcctttcataaggacaggttcttggattacggtctttgcgattgctggcatcattgtctttgattgctatactgagctgtatttgtatgtgactggtgtaaggcttggttgtaaaattttactgtgcttttattttttccaaattgaagtaaaattgtaatcatggtggtcagtgatgatatgaaggaattgatgttatacttcggtaatgcttactgcttgatgctgatcgagtgatggagtcttatggttggtctgtgcgttgtggctgcacattttgtctgcgacttctctttcttgcaagccattagcgagtgactttgcatggagattagagtactttccatcccatatattcactaaaacatcatcttatgtgatacattgctgaaagactgcttgtttttgaatttgctttaatctgcttctttatcaatgttgtagtgaaattacagctgaagggcgacgcataaccaagc

SEQ ID NO: 57067 - DNA, 597 bp, Populus trichocarpa
  Intron number 1 from transcript POPTR_0001s46460.1 (locus POPTR_0001s46460) derived from phytozome v7.0 (chr-ID scaf fold_1; pos 46829214 to 46829810)
agtctcaaaaaccttcccttgccaaggcttctgaggtaaaaatcaactcccgttcctctagttttggatgctttgtttgcttgatgagaaaatgctatagtggaaaagaaaatgaagttcgttttttaaattttgaagctttcagtattagggacttgaaaagaacaagggtttaagataaatggggtagaatctgtggttaatttatttgattttttttctagaaaacaaaatagagcaaatcaatagatgaaattgattaatctaatgatttaatttgtttgggttttatatgattttatcactcaattaccttcaatgcaagcacagaatttcaatgttttattattttggcattgattaattttgtcttgataatggcttctttgatcaatggtgtagtctatttccattattagttactttttttattagaaaccaaacagaggactaatgatgttgatttggtgctatataatctcccttctttttgcctgaagagtcttaagtttaataaaactggccaggttccactactgaactctctcttgaattttatcagagtgacattgttgcaaaaattaaggctgaggcatc

SEQ ID NO: 57068 - DNA, 686 bp, Populus trichocarpa
  Intron number 1 from transcript POPTR_0009s13950.1 (locus POPTR_0009s13950) derived from phytozome v7.0 (chr-ID scaf fold_9; pos 11030350 to 11031035)
tagtagctttgaagaacaagtcaaattacaacaaggtaaagcttgaaaaggaagaaaaaaaagtttgattccttttgttttatattgattagttgaattatgttggttaatgagtcattgatgatttgtataatcacgggttttaatgattcaatgttaaatgcaagtcctggatttcttctttgttaaatgctagacctggattttttcaatggctgaccaaactgtgagaaaaaaaagtgggctttgaccattccttttcttttcaaagtttctttttgatattttcattattagggtgttggggtttttgtttagagagaacataacgattttgttactataggcatcgatttcatatgttattctgcaattcatggacggaaactaacagaaaaggcgactgctcttttaaattattgtattgatctgttaatcttcagctgtgcaacttttgatttccttgtttttttttagttgtccaaactaatttgctgataagcggagcatggcaaggtcaaaattggtttttttgagtcactacttgttttgttgagcatcgagtgtctagtggcggggttttgtatctgaattgtttcaagtcttaggtgtaagattgttcattttgttttgctgctgatcttgttgcagagcatacttactgtgttgtaaagtagaggaggacg

SEQ ID NO: 57069 - DNA, 634 bp, Populus trichocarpa
  Intron number 3 from transcript POPTR_0004s20740.1 (locus POPTR_0004s20740) derived from phytozome v7.0 (chr-ID scaf fold_4; pos 20171820 to 20172453)
gttggcgaaggttggagttcaccactacaacggaagtgagtttcctgtcttaatgctctatcatctttcttgttaatgtcaagttagcattagctttagagcttgccttttgtatccagggctgatgtttacttggaaatctggaattatattttttccatcctcattctgtaatctaacgtttgtcttttggaattgccattgctaatatttggaattctgtagcttgatgttctcttcagtgcttttttttgttgttggaaattatggttttaagttaatgagtctgaagcgtagtgcaggactctaattgataccttgctacttattctaatatcatagctcatctgaaagtcatgcaacatatgtatttgaaattggtaggttagtctgctgaataatgccataaccattagagtaggatttaatcggtgtctttcatttatggtgtgttcctccaatcccttttctgaaagtatagttgctacttttttaacacctgcaaatggtatttcttgaattcaaaacagttcgtgctatcaagtttggtcatgtttggttattttcattaaaattcgccttttgctctgtggatccttttcctcatcatgtgagtttaatactgtatcagaca

SEQ ID NO: 57070 - DNA, 615 bp, Populus trichocarpa
  Intron number 2 from transcript POPTR_0012s07560.1 (locus POPTR_0012s07560) derived from phytozome v7.0 (chr-ID scaf fold_12; pos 8484440 to 8485054 reverse strand)
gccgatctagcctctttgatatcaccaccgatgtattaatatcacatcccatagcgctaccgggcttcttgattaactgataattgttttgaagccttgagtgttgattgatctggtttgtgtttgactattaaatcagagaaatttgatattaatcataattttaatttttttacacaacgggattttgattagctgaattgttttaagctttgtttgatttcttaaatcagacagatttgattaaattaatatggatttggttgattgagggtcttaatctaagtcagttgtggatatcgacagcaccaaaaataaaaatttaagcatgcttaataatccttggggattatttgcgtaaagttttgtagatccttgtaaaaccgtttcttggttgttgagatcaacgaggaaaagaaaatgctaatataaaagttattagtttttatttgttttcttagaactgaaactatagacttgaactcaccaagtagttgttttttcatttacaatcatgcaatttgttcgatgtgctttgttttctccaccaagcagttgttagaaagggtttgagcatcgccttcatcttatttttatcaggtgacggaaactcca

SEQ ID NO: 57071 - DNA, 1025 bp, Populus trichocarpa
  Intron number 2 from transcript POPTR_0012s13090.1 (locus POPTR_0012s13090) derived from phytozome v7.0 (chr-ID scaf fold_12; pos 13381584 to 13382608)
gagctggtgcaagcaactggcttttgcaatttgaggtaattatatcctcatgcttttagaaggacatgtctagtctagtctgaattgatgtatgagctacaagaacaaaaaaacaggggtcaataccaaagaaaattggtttacaaaaactttccaaagagaatgcaggcccggcagttcttcggtgctgaatacacagtgactttaggggtgaagatgtgttgaccttggttaagttttgttaggaaaccaatacgcaaaaaggtgtctcgtcaatcaacttgcacttcactttatttattacagcccattttagagtccctgtagattcatggcctggattcgtctgctaaattaggacaaatattatgcaattgctacatttattcccgatgtcatgttcttcgataaaatttaactcactagattgtctcttatgtgaccccaatgtcccctgccgaacgaatcatgccaaaagaagttggaagaactgcaaaagatgcaccaaacagtacgttccacggacatggtccccaaaagaactggtccaatacttgtctatattccaaaacttttaacctaagcaaagactttgattgtaataaccaacagtccctgttattaaatcgtcggttttggtttggaggttaggcggtagcttgattactattatatagctgtaatatatggtggctagacaaaacgagctggtgtcataattacgttcaccttttatgttcttacttgttgttcaagatcttcccttgaatcgattgaacatatataggaaccattcacagcaaagatgttagatgagactctgtaaatgttttatattatagtgatcagttgcagaacatggacatgtaatatatatgtaggtagcctcgatgcgaaacaattgtcctgaaacctgttctagtcacctggttaggctagtgggatccaaaatcgtgaaatcactaaccagaatcttaacaataagtcaagtatgatgtgatcttgacagggaggtgggtggtgca

SEQ ID NO: 57072 - DNA, 809 bp, Populus trichocarpa
  Intron number 1 from transcript POPTR_0004s03170.1 (locus POPTR_0004s03170) derived from phytozome v7.0 (chr-ID scaf fold_4; pos 2132405 to 2133213)
ggaaccagaatcggcctcctcgaagtccttcttctgtaagaagtttttagtttctttcttgttcttgtttctgttgctgtttttgtttttatcatcgctgttgttttccttttgtctgttttaaaggggttgtttggttgccgagaaaataaaaaggaggttcggatcttgaaaaatttaaagaaaatttgttgtttttaggtttttcgaagtaaaatgctaatgggttttctggtttttatgtttaatgccttttctaattgtgtgaactgattttatcttatcgtgttgcccttaattagttttaattaattgttgcgtgaatttcaaaatttgggtctctgttatattaattaatctgatttctgtttaagtttatttaaatagcagtaaatcccagtttagcctgaaatttgcccttctgggtttcttctgggtttcgaaatttgggcttctgttatattaatttgtctaacttttgtttaatctgaattaaatagtagtgaatttcagtttagtctgtaatttgcccttctgggtttcaaatttggggttctgttaggttaatatttatgaaatttattggataattcgaagtttgtttactgggttgttgctgatttgtggtttgttttgtgttgattaattgttcatttattggatgtaattgtgttctttaggtttaattgaacaatcgttgctctggttttttggtcccatttctttagttagttgaattttcttttgatgtgatgctttgttggggttttgtagaagaaggaaggggtggaaagtatcccattagataa

SEQ ID NO: 57073 - DNA, 982 bp, Populus trichocarpa
  Intron number 1 from transcript POPTR_0004s07420.2 (locus POPTR_0004s07420) derived from phytozome v7.0 (chr-ID scaf fold_4; pos 6120257 to 6121238 reverse strand)
tttcgattgaattttctccatttctctctctacaggtacttgctagcctattttattttaagatttacagctatagttacattaaatggaactcatttcttgatttagtttttttttttaatgcaatttagttgatgtattggttaattgagattttggggcggctgggttttttgttttgtatgatgtgcttggtttgttgggtttttgatgatggtaaagatgcagacttttgaagatttcagctttagagcagtaaatagaattacgggttttcctttttgcttccttttactgattgtttaagcagtgaaaaggattttttgggttcttaataaagctaaagatgccgaagttgaagttcctcaaattctgttttattgaaagtttatagggctctgagtttattgagatttgttatagcagcatcaaaatcgagctcggggtttcatgggcttttctttttatgtcttgttattgattgtgtttggctgattttgttaaatgtattgatttagtagataaaaaaaggtttttttgggttcccaatgaagttaaatttactagttttgaaatttataaaagagttttagagcttaacaatttctcggggtttctctctgatgtatttttattgattgtttacgattaatgttgttaaaaatatgttttaattttgatttcgggtttgttgccttatcaatgaagctaaagaaatgaagctaaagatacagactttgaagttttcattttggtacacattaatagccagcctaaacaggattttgtagcctcttggtttttgtgttctatttcttgttattgattttttatgttccattttgttaacttcatgatgttttttattttgttgcaggaatacgatttgagaaactttgattatatgataattcattgataattatatgttgttgtttcaattgtactaaacacaggagtgcttgcatttgtttagtacatt

SEQ ID NO: 57074 - DNA, 265 bp, Populus trichocarpa
  Intron number 2 from transcript POPTR_0015s04850.1 (locus POPTR_0015s04850) derived from phytozome v7.0 (chr-ID scaf fold_15; pos 5037062 to 5037326 reverse strand)
caacaactccaagtggtgagctcttgaacttcatacttgtgatgatctctaaattaatttattctctctttttttttcttttttttttgctattctactttatattgaaaaaagaagatcagtggtatttattttaatttgacgaccagataaaagatttgaattctttttatacttatattttatgaccaagaaactaatatttacttttgttatctgttcttgtataggttccaacacaactccaaaaagtgcagcaaattat

SEQ ID NO: 57075 - DNA, 796 bp, Populus trichocarpa; identical to SEQ ID NO: 56237
  Intron number 1 from transcript POPTR_0011s16680.2 (locus POPTR_0011s16680) derived from phytozome v7.0 (chr-ID scaf fold_11; pos 18469973 to 18470768)

SEQ ID NO: 57076 - DNA, 797 bp, Populus trichocarpa
  Intron number 1 from transcript POPTR_0011s06530.1 (locus POPTR_0011s06530) derived from phytozome v7.0 (chr-ID scaf fold_11; pos 7002063 to 7002859 reverse strand)
ttccccaaatcctgagcgttcttggtgagacgaaggtaagaatttattctcaatcccaagctttgttttttctgtctaatggtggtgattagagacaaaaaaaattatctgggtattctatgaatgtgtgtttatcttctacagttctactattaattggtttgcttctgggtattctgtgtttatcttttactattaattggtttgcttgtgttctgttaaatccatgacgtaaagaacaacaaaataatcatccaatagttgtaggttgttaattgtgaacatctccttaagcacagttacgaactttgcttggatcattgattgttgcgttcaaaggcatgctggatcagaaatcatgaatctaatgatgattgtctttcttacttgggtttttgataattataaaatgttgggttttttctttcatacaatcatgcgactaagaaaccatgaaacctgaacttagattgcataacaattctttctatttttaacttgggagcagaagaggttttgagtaaagagtctgtttgttttgttagaatcttcgagtttataacctaggtttttgcatggaatagaagcaagaacagaaatataggaacatttgctctcttttttcgggctaatgtgtttttttactggaattccaaggaattaagatgagcagccactagattttttagtcatgaacgttagcaggacaatatacatgcataaccagtagatagttgctttccttatgaaagagtcgtttctaaacccagttttcataatctgcagaaagatagaga

SEQ ID NO: 57077 - DNA, 505 bp, Populus trichocarpa
  Intron number 3 from transcript POPTR_0015s06580.1 (locus POPTR_0015s06580) derived from phytozome v7.0 (chr-ID scaf fold_15; pos 7524178 to 7524682)
gaactgtagagtcacctgctgcagttgccaaccaggtgagtatattcctggcatcagaggcatctagataaaaggcattataatggtctatttcctcggcattctcagcagttattcagctgttgacataattgagaaaatatcagtgttgaactttctgttattcattatctagaacataggaagatgattgttttaagttcttaaacttcttttaggtagtatgttccctagttctagttaattgttcttcctcttatatgggtttgtgatggttcgtggaaaaacaattcttgccagtcagatccaacttgctagagaatgcactcttgttcgttcttttgattttttctgactagaatggttgccttttttctctcatagtttttctgttttcattacctgcatcccttctgaatgtaacttttatttttattttaatcataattttatcttctggaatgtttcagggtgtcattactcaactctctgagcaaatttccac

SEQ ID NO: 57078 - DNA, 852 bp, Populus trichocarpa
  Intron number 1 from transcript POPTR_0001s24550.1 (locus POPTR_0001s24550) derived from phytozome v7.0 (chr-ID scaf fold_1; pos 23806056 to 23806907 reverse strand)
ttatatttggttgcgaaggaagcaagatttacttggtttgtgtttttttctataatttttttctcattttctattttagttccttatctgattgtagagactctgttgacgggacattgatttctttgtatggagctggttcgtgggcttttggattttgatcatgcatagtactgaatacaacccagtgaatgttctggattgactttttttgagctagttgttgtcaaaacctttcttgtcgaggtctttggattgcaattttatgtcatgccacagcatttcgctaatcagtcactgctggtacttcggtatgggttcataggcaatatgtcatacaggaaaaataaaataatagagaaggggagccataaaattgcctaccgtgaaagaaaatgctgtggcatttcagaattggaatatttatgcttttgtttgtttctttttcctttaaccactgcattgtatacaaatactgcgcagagacttgtctaaagattttcagctgatgccgattcattgatggaatggctttaagcattggaacattttgtttatctttatatcaatgtcaacttcctcaatcctatgtatataatgtatattctatattgtttgtaatgttgcaatatttattgttaaatattaccatgccctggtgttattagacaagtcctccgttattcttattgcaaaagagtagaggcaaaattcggtaatattttcaaaatgctatttaggttatggtttggtctgtcatggttcctgcaagctacctagttttctttgttcttttttcttccaaaatcaccgggtttattttgctttcaggtcctagagagggaacaaatt

SEQ ID NO: 57079 - DNA, 427 bp, Populus trichocarpa
  Intron number 1 from transcript POPTR_0011s01650.1 (locus POPTR_0011s01650) derived from phytozome v7.0 (chr-ID scaf fold_11; pos 1151316 to 1151742)
ggtaagttatatctcttgatgaaactatacatatcataagactagaatgctggtcgtgaactcttaatttctttcagttaagtgtactgataagaaaacatccaagaaaaaaaaatacttatgatttcttcttcttcttctttttcgatcatgatttggttttattgtggtgataacgcacctacaaatttaactatcaatcatggacacgaaacccggtttaatttcttagctaaatgttgtttatttctatcctttatagagaggctactaattatcccatgttgtattttactttttgatgtaggtatgaggcacagtttgtccaatctattgtggagaatgtctcaaagaatttggatccaaaaatattttatgtcccctttcatttcattggaagagatcctctggtaaaatatatcaactc

SEQ ID NO: 57080 - DNA, 467 bp, Populus trichocarpa
  Intron number 1 from transcript POPTR_0014s18890.1 (locus POPTR_0014s18890) derived from phytozome v7.0 (chr-ID scaf fold_14; pos 16428641 to 16429107)
attttgttttctttgcagagtcaaggtctttataggtaatttgattcgattttcttttctgcttgatttaatcggattgtttgctttcgatttcctctaatttctcgcaattattaccgtcttgtgctttttcagtatctaatgctgcttaattgatcatttcttttcatagaattcttttgcagtatttgctttcgatttcgtttcattgtttttagttgctgttgtcaacttttattgtaatgtgagagatagtgcttaaattaaattaaattaaatttgagagttgaattggaatttgaagtctataaatgttgataatgtataccaatttgatcaagttaattcttctatactgggcaatttaagattggattaacattttaaataaatctgttgtccccttatttttcttttccagtttcatttttgaattttttagtttatcgaggttgcaggacttttgt

SEQ ID NO: 57081 - DNA, 997 bp, Populus trichocarpa
  Intron number 1 from transcript POPTR_0001s11200.1 (locus POPTR_0001s11200) derived from phytozome v7.0 (chr-ID scaf fold_1; pos 8689168 to 8690164)
cttctacgaatcagaggattgtgttgcttcaacacgtaattcttttcttttttgtttgtgtggtgatttaatttgtgacgttgaatgatttcgatgagttatatgtgcttttattttgactatgattgtggttgaattgattgttgaatgaggataattagatttgcttaggcgaatgctactagtgaagtagatagtgttgtgtgttggagggaagagggaagaggggattctaagcattttatgtattttttacttgggattttattgatagttagaaattcatttcaagtttcgctctaagaaaagcctgtttttgtagatagtaccttgttccaactttgcactagaaagttctaaaggtaattgaatttggcgttggtccattggagtagtgatttcttttttcccagatatgtttactgcaatggaaccctgatattatgcaataggattggtttatttcttctgcatagcttcttgggaacttggtattgttggctttgcagtgtcctactttcttgtttgatattctacttgtagatttcattttgtaatttcattgtgatggtaggtccttgtgcatcttttcacaaaagttcttgttgccatggggtgcaattaatgcactctccacctccagtgttgtgctttccctgcacatgttgcaattgcatgggtttatcctacccttctatatatgaatgttcctgcctctttttcattacaactggctcaatttttcccacagaattctctggtttagttgtagagcttttaattacttcttgttcgtcatctgtgtcaaccactgaaacatttgctgaatatttaggtatcccaattcataagttggctggattttagtttgacagtttatgggtcttaaatagacccaacatgtttgattgtgtggttgcctattagttttatgatgacaattatgctgcatctttctcttgatatataggttgagggtccgaaatctcctgaagaa

SEQ ID NO: 57082 - DNA, 708 bp, Populus trichocarpa
  Intron number 2 from transcript POPTR_0012s15040.1 (locus POPTR_0012s15040) derived from phytozome v7.0 (chr-ID scaf fold_12; pos 14708401 to 14709108 reverse strand)
ttattgcaactgagaagaaattgccatctattttagtcgatgaatcttctataagtaaacatttattattttcttttattggttttgttatattctttggttgaaattcaagaaacgcttttgtgttttttgcgtttttgattgtgttttctttgtgaacttttctggttggccatgtgatattttagtaataacataagtatagagacatgggtttgtagcattctaattaaagaagctgatgattgttgtggaaaagcaacgtggattcttgccaatgaggtgttggtctagtagttaatgggtttatattgagattcttaggagtgatttgagtttagtgacatcggctggtagaaatctattcaaattcagtgtaaatttgtaatttgtattagtaatttgagcttagtgatttgggttcttgccaatgaggcgttactatactagtcaatgactctaagattgggactttgaatgttggagtgtgtagatttatatcctctttaatcccactttgtataaaaaggcggtgttggttattttaaatcgtgttgaatgaggtggagatggtttgattttggagccagttgattggtctcttattctaatttgcaagatggtatataacttgagttggttgttgatggtatttaattgcttcttgtttcaggttcagaaaatacagaatctgacacccaatattgg

SEQ ID NO: 57083 - DNA, 642 bp, Populus trichocarpa
  Intron number 3 from transcript POPTR_0060s00280.1 (locus POPTR_0060s00280) derived from phytozome v7.0 (chr-ID scaf fold_60; pos 81902 to 82543 reverse strand)
ctgatcagtctccaccttcatttcctcaaaccgtgagtgctcatgcctactccaatttgctacaatgtccattgaattagcaagtgtttgtatcacccattggatcaaaaagtttatgttttcgtggatcaatttatctcgagcatcttcaaaatgtttattgttaaacaaacagacaacaattgggagatttagattatttttttttgtgtgtgttttatgatgtgtaactaattaagggctaaaatagagggaattaatttttgcaattaacaaaaataatcttgcatttgttttgctccccaaattatgaataaataggagttgaaagaggtttttgttcaccccgtcaaaacaatcagctcttctaccttccttcccctgctttcttcaacagttatcctgcatctttctattgattattctagagttttaggatctcgtgtcataaaaagaatttgagtatgataatttagctttaaattcaaagggttaaatcattaacaacaacatttatatttcatatttttcatccgaatttctttaacaaacaagaaagtcatatatatgttcttttctgatctgtgctttctgttctttttaaacctctgtacgtactaatcatcttatacttgtggtcag

SEQ ID NO: 57084 - DNA, 478 bp, Populus trichocarpa
  Intron number 1 from transcript POPTR_0014s08130.1 (locus POPTR_0014s08130) derived from phytozome v7.0 (chr-ID scaf fold_14; pos 6043266 to 6043743)
gatattgaacttgtttcacgcgctgtattgcctaggtaattgaaatttaaattgcttaatatctggctttaattgaattagctaattgctgttcaatacttctttttactgcttctggagtcacttaatctcaatatatactttattcatacttttttttaacaattttactgataaaaaaaaatcaagtgagcttgacatggattttgaagcctttttggtgaagaaaaatacaaaggtcaacaaactagtcaacggctatataaattctgtggtcagtggtgttcccgtacaataataactccctttgatcctggcttaataaccttcccttgctattcatctgaatagacttcgcattttcttgcgggtcgagtcagcttttaatgaaattatgtttagattaacaatatttgggttttgggagtagttttatcattaatgctaattaactgagtttattgtcgtggtaggtttt

SEQ ID NO: 57085 - DNA, 904 bp, Populus trichocarpa
  Intron number 1 from transcript POPTR_0015s04320.1 (locus POPTR_0015s04320) derived from phytozome v7.0 (chr-ID scaf fold_15; pos 4408217 to 4409120 reverse strand)
gtggctgctctaagtgcttaaacagtctttatctggtaagtaaaaaaaaaaaacttgttcctttgttaattcttattattatgttttacttgtttcttgaattctctggtctgtccttaaatggttgttgtcaaagaacgaagatcaagaagttgatagggattgtctgtgtgttcattttttgtttactttatctacattaatggactgagaagaagcaagtgaaacttactgtcagtgagaaatctaagaggagaatatatataaaaaaataaacattgcgagccattggagggtttagaaagtttctattggtgaagatttgagacaattgttgacaaaggagcagtctctttcactggctggagtgcgagtaagtgctaaagagttcattcattaggcagtttcctgtaagtttcaccgttttcgttgctgttgagtgttgctagcaaagaactggtgttgtttgatattagaaatttgttttttctcaatgtatactcacaatggtaatatgcagttagatggaagacattcaaatatcagtgattttctctctatttttctatgaaactttctttagcaatgcttgattcactcttagaatttcccccacaatttctcttggaagttttttattttccctcttttttatttggtttactttccttattgtacgttggttggattctctaacatcgcttggaaggttgctgatgacaaaagacaggactgtagcttacagtagatgttggttagaagttgcaccaaataattagtattttaaacttcaagcatcaaaacatgtacttcccaaatcgtaagtaatttcttttttgccttatctaattgataatcatttggtgcagcttaacaacaagaaggctttaaattcaagcaaatc

SEQ ID NO: 57086 - DNA, 973 bp, Populus trichocarpa
  Intron number 4 from transcript POPTR_0009s13910.1 (locus POPTR_0009s13910) derived from phytozome v7.0 (chr-ID scaf fold_9; pos 10993641 to 10994613)
cagacgtcagaaatgtaagcatttctctgcgtgtagtcttaatttacttgtaggatccagattagaattcactttctatctcaattctatcccatgactatgctctatttgttagaagcttagatgtggcattgctaagttgtgccaacacattgtgcatcaagctccactggatattgtagatgtgattttcttaatagcagtgcagggttctttgcacaaaagtagatgttatttcaaatttgcttagacagctaaaatccagttaacttttctatccatgtctggcgtggcaatggttgttgggtcttgtggtaattttgagatctcacagcttatctacttaagagagtctttctggagatcttacaacttgtttttcacgtgtcataactggaacaacattgcacatagtatatctcaaatattggaggtatggtgatgggggacagattctaataatctgcctacaagggctgcaagctccttaaattatctgttctatcttgaagcagttggaggtggtggggattgtccaccaagtttccatcaataattctgctgtactttgcatggaaatttttgtttgttttgctgattgtttggcctctcttccgggctttgaattaattttgaagtcatatatttgaccattccagccattgtatgcaataggagcatcatagtggaaaagtagaagtgtttatattgtgtgaactagatactaatataaagtgaatgtgatgggttgttctatgaaacaaggtttctctgttaccaaaaggactcaaaccagtctatggagaccctgagatatcccaccgatttttgtgtcaatgtggctgttacttatctgccaattaatcatcaaaatgatagcataagtgcataactacttgcttggtatgagtcgtgcctgattgtttctgtttcaatattttcttggtgcttttgtagttttttcggagattcc

SEQ ID NO: 57087 - DNA, 785 bp, Populus trichocarpa
  Intron number 2 from transcript POPTR_0012s13610.1 (locus POPTR_0012s13610) derived from phytozome v7.0 (chr-ID scaf fold_12; pos 13692313 to 13693097)
gggtttgatcctatctcttctttctcataaaaaacgagctagtgtttatttttatctgtttaaaatggtcagaaaaatagggttttgttagcagggatctgttttgcttttttttttcctgaaccaactgagtgttatgatgaaattttgctatatttgagttgattaggaagtttttgcatctgggttttgggaattttttatttgatttttaattgtattttgttgttaaatcttgctatttagttgaattttcatgattttagtttgattttatagtgtgaatatgatgtttgatgtaaagttttctgctttgttgatattgtaatcccatgaagtaataattttggttttataaggagttgcttagtgtttaatttgatgaaggtggtgttggtagaagtatagataggtagatgatgtcggtagtttggtttgatttttgttaagattttgcttttagattaggcactaagatcacactggttatttagttgcggacagcaggattttgataattttcttattggtgataaaatgtttgatttctgcttttatgtcatgaaaagatgttatagaattttgtgttttagattttagaaaccatttgaatatttatgaccgctcaggatactgtgtttttttatatgagattcatcctgaatgtgccatgcacctgtttctgcatacctttgggaatgtccttgctttgtagagttatttttcccctttctgtctggtgctcaaataacaggtgtatggttttctgaattgttgttgcagat

SEQ ID NO: 57088 - DNA, 650 bp, Populus trichocarpa
  Intron number 2 from transcript POPTR_0004s16220.1 (locus POPTR_0004s16220) derived from phytozome v7.0 (chr-ID scaf fold_4; pos 16627849 to 16628498 reverse strand)
tgttgattcttcttgctggagctggctctctcaaggtgagttatttttatatttatttcttgaagtttttgtctttttaattttttttcatgtttttatttcttttattattgtttttatcattatgagaaattccatgtatagtcaatcatgtcatatgccaaatttatgttgggcccctgcatgtttgggcactgtgagggttgcatagtggttatcaggtgtcttcttcatcggcaatgagaagtcaccgagatggcgttgaactgacctaacttggtgtgattgtttactactgatgtgtagtgggaaatggattttttcgaaactaatttgggttattgtgtgcgtgcgtgtgtgcagcacttggtcttgcaaagcatttattggaatttcggtcttctcttattatatctccgaataaaaccagattgtgcataaatgagttttcggcttgtgttcaagtgttacagcatttgattaatatcgaaataggattttttttttatgggttttactttggttgagttttttagtactgttttttttctacctcttattctgcattgtcggtcacctctgactcaactcggttcctctgctacattgcaatagggcttgctacaccgttgtgacacagcctgctggga

SEQ ID NO: 57089 - DNA, 991 bp, Populus trichocarpa
  Intron number 1 from transcript POPTR_0004s20280.1 (locus POPTR_0004s20280) derived from phytozome v7.0 (chr-ID scaf fold_4; pos 19865857 to 19866847)
ccctttcaagggtgtcaagcttggttgcggtgaaggtatcatctttctttctgtttctttctttacccataagagcacgtcttgtcctacattgctaacagatttgataagtgaggcactgttgggtttcaatctgggattttaacatcatgttttgcttatatgcatgtggaattttcttactttgaatgctgaattatattgtactaatgtttactttgttgcctgatttttttactgtggttgcagctgtgattagaatgttcttgacttatgaactgttgatacttttgaggaaatgggtttgcttgttagtttatttgtaattgagaagatttccttaatgggttgattcgttttccatggtttcgattcttgtttgtttgcagtagattcatgtagatttctgagagaacatagggagagaatactaaaaatctcaagtcttgtactattatcactatttaagacatggccacagccaaaatttattacactcaatcatctggatttttcaagcttgcaagttatgtgaatgcatacaaagcttggaactttgttttcagaatgcttgctgctgttataaaatcttttgaatcaacttcatctttggttcttgagttttcctgtgttgcaattgttgtattgttcatattcttgtttgcgatttggtggtatttcttgcttgtttcagtagataaatactttctcattcttctctctaggaaatgagaagaaaataaaaaaaagacaaaccacttggcctattagattttgcatgccgtaaatttcaaactcaatcacttattgtaagtctgcttgggttttcacagcaaccaaatggaggataaagatgaatctgttagttcatgtcagaacatcgattacttgagtggaattaaagtatttgaaagttatatggcttctcaatatgttttcaaatttatggtttttaggtggttgtggtgcttgtattgttctactctccaag

SEQ ID NO: 57090 - DNA, 703 bp, Populus trichocarpa
  Intron number 2 from transcript POPTR_0004s10820.1 (locus POPTR_0004s10820) derived from phytozome v7.0 (chr-ID scaf fold_4; pos 9393661 to 9394363)
aatcgaacatatcaaaataccaaaacaccttggtggtactgagaatttattaacactaataccaattttttatattgccagaatatgacaaaccaattacttttccattttacagctgctttatctctcctctcttaaattcatagatttaaatgttaaaaaattatagaatctaaacataaaatcctaaaagtaaagagataaaaaaaataagtaaatggagaattgttggacaaaaaataccatatcgcctgaatttgaaaaggccctgttgtttttattttattccttcttttaattgttttttttactacaaatctaaatcttatttaattaaattggcctttaattgaattttaaaattttataaaacatttcaaattctcaagaatatgcatagagaagaaaatctcaacacataaaatatcacaaacttaaaataaaaaggtttaatgatcaaaatgaaaaataaaaaatcattgttcattaaacaacaccgtttacaataaactatgagagaaagcatggtaacgcatagtgaaaacactattttcttttaatttatttaatatataataataataaagttttcatcctgtaatcataatccaacactacattaaacttttacagtgtaattgtcttatttttttgtaaattattattattattattagttatgttcatataaaattcagtttgc

SEQ ID NO: 57091 - DNA, 447 bp, Populus trichocarpa
  Intron number 3 from transcript POPTR_0011s00450.1 (locus POPTR_0011s00450) derived from phytozome v7.0 (chr-ID scaf fold_11; pos 176004 to 176450 reverse strand)
acctattccattctctggaacaatctccagatagtgtaagtccttcgattccatgctacagctagatcaaggcacctgatgattcaagttttcatgctgcaatcttgcacaaaagcaaaagcaaaaaagaaaatggcaaaaacagtagattaaagtgctggttgcgtcccggtgtgtttggtaacgtagatgtttttccattgaaaatgcatattacaattatgtttttttattaacacattaaaaaacacttaaaaaacatcaatttaatatctttgagacgaaaagcaatagttactgcaggaagagatcaacattgtgggaacagtcaataaataagcctaagagatttgtttgcaacttgggttagatggacagtgacactgacttggatttttcatacgctaagcaggttttttgttgataaagtggcaataagggtgcaca

SEQ ID NO: 57092 - DNA, 958 bp, Populus trichocarpa
  Intron number 1 from transcript POPTR_0009s06700.1 (locus POPTR_0009s06700) derived from phytozome v7.0 (chr-ID scaf fold_9; pos 6435862 to 6436819)
gcttcaagacctttaacagatacaacaacttgcaggtatattgccacattttcttgaaacatgtctcattaagctcttcttgtttctcttttgcttttatctacttttttcttgctccattatcagctggatcttggtattttgtttctaatgattaattaacaataattttttaacttcttgcagtagtagcatagtactagcctagtacagaaggtctctgtctaccttaatttgtttgtttgacttccattttgcataaacttcatataccttaactatcttgagatctgtcgtgagtaattgatttttctttcaagttccaactgagattttttgcgtgacataacctttcatgagacgtccttgtgcttctgttactttgaagattaggctaaggtcagctactgcggtggtttaaagaaaacaaatatgcagtgcttcagagttctgaaaaatctgcagataaggcttgctgaacagtgaaattcagagtgctccgatccctttcatgtctgtaagagttcaccgaagattcaggttgttttcactgaaaacctgatcagctcccctcccgaacactgtgtgtacctttaaaggcacatgctaatgtctgttacaactaattctagtatttgtgcaaccctaagttaagcttaaagcctggcatgcacaatctctcaaggttatctatatcttaccagtcccttcgaatatatattataaggaggctgctagagtttgatctcccaacctttcattttcttgtagtgaatcttgcctaatttcttatatatttattgtataacccaagacccagtacgcatctcaaatggatcaaatgtcatgcccctctacccagggcattccttttgtagccattgatcacaacgcttgtttgtttgtttttctctctctctttatatctaactcagctgggttttggttaatattgcag

SEQ ID NO: 57093 - DNA, 828 bp, Populus trichocarpa
  Intron number 2 from transcript POPTR_0014s05700.1 (locus POPTR_0014s05700) derived from phytozome v7.0 (chr-ID scaf fold_14; pos 4254356 to 4255183)
caagttgacagacagcggggggaaaacttgtcttggtttgttggccgagataccttccgctttcaagagtggacactctatgagtatattcagccgatacctttacatgtgtatgttctatactaaatgcctgcttgttttaattttttagaaaaacatgaatctaatgcttttaggggttatttgctgttagataatattattggacatttatttaacattatatttttcctggaagcaaggtgttttacctgaatttcttttaatgttaaaatttcaggctgtcactagtgtcatcgatattttgaaactccaaaattttcttcttattttaaaccttgtgaagatttgattgacttgcatgcgagtattttaaaggtcttccggttcaagatgagtgtgatggggccatcaatgaagaaacccgaagagttcgggaagatccggagagtggccaaaggaggaatatgaatagtcgatttagcaaccatgtccacggaggtacaggaagagcaaacctagtttaacctctgatggactatctaatgattgaagaatttaagctacagtaacattattggtagaatgaagccttccctaggaaatgcaactgggaagaatataactaatcagaagatatctagtctggtatttgattccttcgtatatttgactactatttgctgttcattggcagtgttagaatggatcaacggatcagtctgcagattctccttcaaaggtatttctcccaacccaaaacccaaccaaactcaaaacgctgatcacctccattctttctctcttgtctaatgaatagggtggccg

SEQ ID NO: 57094 - DNA, 744 bp, Populus trichocarpa
  Intron number 2 from transcript POPTR_0011s04610.2 (locus POPTR_0011s04610) derived from phytozome v7.0 (chr-ID scaf fold_11; pos 4556293 to 4557036 reverse strand)
ttgtgattcgtcagcttgcagaaattgaagcagtaaaaaataaataaatagggtttctgtttctcatttcttgttaatcttgattttattttcagtagtgattagttacggttgatgctgtggtgttctttgaaggaaatgaaagatttttggaaagagagcgagcccttcacttagactagccaaatgactgtgataagtactttgaattagggttttgtgactcttgattgatttgatgttattgaagtgtttaacctcatgcattgttgaagcgaatgaaatttgattattcaaggttttgtcatttgtcaactataaggtaaatattgttctagaagagggccttgtgaattcaatgaaaaagagtatttttttttgcacttgccagataaccatgacaagtagtttgagttacagttttgttagattagatacaaatgggaaaatacgtgccaatgctttgttttttttttttagtttgcaaaaatgggaaataaaatatatgaaattttgcgtttacaccgcttaatttgtgtggcattgagtgtacaaaatacagactggagcaaatttaatggaactggaatagctagataggtttggatgtttattattgttgtgcacaggctacgtcgaaaaaggtgattacaagagaagagtgggaaaagaagcttaatgatgtaaaaatcaggaaagaagacatgaataaattggtgatgaactttcttgttactgaaggtt

SEQ ID NO: 57095 - DNA, 705 bp, Populus trichocarpa
  Intron number 1 from transcript POPTR_0012s12970.1 (locus POPTR_0012s12970) derived from phytozome v7.0 (chr-ID scaf fold_12; pos 13308475 to 13309179 reverse strand)
ctttctttgctgcactgcagcactagtcaagaaaggttgctggctgctgctgctatcctgtcattgcatactcttaccactagactcaatttagatcatctcatcatgtggtttttcaaaaggaaaggatcatctgggctctcttcatcttctacgtacagctgagaaagttgctcatgggattgatgcctctggcatgggcttgtttatgaaaatttcaagtagatttattaggatgaaattgctgtaaaggtttgcaagaatcatgactttatcttacagaaatcagagatcgtttgtatggtgagacaatatccaaaattaacatgtttttaagttcatttgatttgctacgcacaaagtgattaataattaaggtgtatatgctgctagaactagacagctagctgcatatatatgaaggatctatacataacagggtaaaactccatggaataaacacacttgcatgcttttggaaagattgcaaaactgtttattgtggagaatggaaatctatctgcatgctttatgattaatgggtatatcctataaatccttattgtggactgtgcaagcattgcacaggttaattttgtgtttcaagacattcaacaattcgtattgccactatgacttgacaagcatttttatttcctattggttttaggagcatctagtggtattggcactgagactacgcga

SEQ ID NO: 57096 - DNA, 959 bp, Populus trichocarpa
  Intron number 2 from transcript POPTR_0004s04030.1 (locus POPTR_0004s04030) derived from phytozome v7.0 (chr-ID scaf fold_4; pos 2869489 to 2870447 reverse strand)
agggagtgctgccgagactctccacggtataggtgagaaatttgccaactatttaacatgatttatgaactactggatttcagataccctgtgatgtttgttgtgaaaggtgcatgtcgtgttcgttatactagtcctcgatcgaaaaaaactaactacatgcattagagtttcaatcacaatcaattattatcttgctgctcgctcagtactgcaacaatctttgctggcagttttgagtaagaatgatattatgtcagccccagattttcgcatgaagtgcgtgacgtgatgctagctaggttagaaaatataacatgtagattctgctcaattacattaagtgcaagtcttggggaggaatgatattatgagctcagattttcagagcataaatgtgtaacctgctcatctgacgtgtagatttatcaaatggttttttggcaagattaatgactatcactgatgcttgtgagcctgtcatttgtgactttggcattttacatttatgctggcttgcgatcgattctttggatggtctgggatttagacattcagtcagacaagtcatatttttaagcaactatacattcagacagaatgtgaaactctctcatgtatgttgcagtttcagtgcacttgacatgtattctgatgtaaccgatgcatggattgtattataactttgtggttcctctaccatctaatacagacataatgaaggccatcttttctacagttatgttacagattatttattctagatcatactttctcagcactatcattttggtttttgtaattctagctgtccaatgtcagccactcaattctgataatgtaaccacaattcaaattgatttccaccctattttttctcatgcacattataatgtgattttcttcttgtaacttcatgttgtttctcctttttgtgttgctaggtgatttgcttcagg

SEQ ID NO: 57097 - DNA, 450 bp, Populus trichocarpa
  Intron number 1 from transcript POPTR_0004s04030.1 (locus POPTR_0004s04030) derived from phytozome v7.0 (chr-ID scaf fold_4; pos 2870495 to 2870944 reverse strand)
ctgctaatcaggtaatagcttcttcttaagtaccatcttaatctgtttctgttttgcagtagtgggttcttaattgtacacaatagaaaagttcaagtctagagatctcttggtggtggttgaggtttttttttgagctaaaaaaagtggggtcaagcttcattaaagaaagtatgaaactttcaaaagggtagctgtcttttatttttttgagctaaattttgtgattaaggaaaggctagttggatttcaaagtaattatatgtaatcaagaagtggtaatttgagaatgtagtttaattggtggcagaaagttttagtttgatcatttattgcaaaaccaaggatttccataaagagtcgatttttatgttgctatgtttttatatcttggaaggttaataactatgtgttgtagaagatagaggtcataaattgcagcagaaagat

SEQ ID NO: 57098 - DNA, 622 bp, Populus trichocarpa
  Intron number 2 from transcript POPTR_0015s15670.1 (locus POPTR_0015s15670) derived from phytozome v7.0 (chr-ID scaf fold_15; pos 14903745 to 14904366 reverse strand)
caaacaaagtactttgctttctcgaggtaaaaaattccatgtgtttttgcttgataattagatgtacctcatgtcatgtccgatctaagaaaacaagctagagactttttattctcagactatagaattagattatcatacctgaagtgcttcaaggaaacgattgcaagcccatttggagaaatctgttctctcttactttctgcagggtattgcttcctcttctcctagattttaagcatttcctccatttaagttttgttctgaattccagaagaatttgggcccacaattcacaacaatttgggttgacttactgaaatactagaacttgcataatgttttgcctcttccttatttcagtggccatctaaacacttgtagtttggataggtgacccttgtatggacgatctcttcaagcttaagcctatccacatatatcacgatacatgggaggtttttctaatagataaacgataatgtctgcagatattcttttgaacatttccttccatcgtttgcttattgtcaattcagatctgtacttaacagttttctgctgtaaattaccttgcattcctaatctcgtttgctaaattttgttttctgatatttgtaga

SEQ ID NO: 57099 - DNA, 574 bp, Populus trichocarpa
  Intron number 1 from transcript POPTR_0015s15670.1 (locus POPTR_0015s15670) derived from phytozome v7.0 (chr-ID scaf fold_15; pos 14904401 to 14904974 reverse strand)
agatcgactcttcgtaccagtctcacacagaaaaggtttgttttcttcttccaaatgtttctttgtttcttatttaagctagaatggtttaaggttggaccttaaattttgtatttaatttttttttttgtgactatttgagaaaagattttatttttgaatctggggtttcttcattttgagctcaattagcgtcaagagccgtttttgtcttctgggcttctctcatactattgcagaattgtgtttcttggtgttttgccttgttctaagttgtattcagttgatttgattcgaaattctaagtgcattgaattagatttttagtgattgtagtgttcggatgtattaatggcatctttccctgttttgcgcattcaatagatccggattttgataggttggagctactggtgttgatcctgggcattgaaaatggttttctattatgtcatccttttgtgttgattttatgaatgttactgtggtcagatggctgcgtattttttccactaacttaagtaagtttgtgaccgcagggaatcagaaaagtttgttgtgaactcttggattt

SEQ ID NO: 57100 - DNA, 925 bp, Populus trichocarpa
  Intron number 1 from transcript POPTR_0009s05530.1 (locus POPTR_0009s05530) derived from phytozome v7.0 (chr-ID scaf fold_9; pos 5622557 to 5623481 reverse strand)
gtgagcgtgcagtctcaagaaacatcaagggacgggtgctcacatgcgctgtttcaggcgcgtgtctttcaccaacagagacacaggaccagtgtggttcctgtactttggtctctttgtaagaacatcaaacatgaatccattgtttattcatgtgattatgaccatggattttcttcctccttctttgacttggatcaagtctttcacgtgaaccggtgcaattcaaatgctatcatttttataattttatttaaaaatataattatgattgttttttatttgaaaatatattaaaataatatatttattttaaaaaattatttttaatattagtaaattaattttacaaaaaaatttaaaaaattaattttttttaaaacgcttttaaaacacaaaaataaaaaggaacacacactcaataaatactcaaattaatattttttatataattctaatatgttaatgatttttcaatgtttattttttataattccgatttcggtataatctaattcaataatatatttcagatattcttcaaagaaaaccctttttttcataatgctttaaagaaaagagaatccttattaatgttgtatatttatattaatgtatttatgtcatataagtgattttctatgatattgattctcttgaattaaattttatgcattaaaattaagtttttttaaaaaaacattggattctagttgttctagttaatgcatttaagaaaattctttctttctaccttttgtttttcaaatttaaatttgaaatggaagaggagaaagctcattcaacacctaaccaaaagcacgcaaaaagccattaaataaagaagaaaaaaacatcttaacaataattagcacatgatagattattttgatcatatatacttgttagggtttgctaagaagac

SEQ ID NO: 57101 - DNA, 892 bp, Populus trichocarpa
  Intron number 1 from transcript POPTR_0015s00800.1 (locus POPTR_0015s00800) derived from phytozome v7.0 (chr-ID scaf fold_15; pos 460331 to 461222)
cctccctcacttctgaacaagcccgctctatcaaggtattggattcttgatccgggattttcttttttcatgcaatcttgataggattgctgttaaattatgattcttgacgttggtttcttctgtttgatatgatcatcgatcaatttcacaatctgggttttgtaaaggtagtgtttttgtagcattttgtagaagttcttaggtaattaatgcttggtttatatgactatgaatgtatgagtagagtgaatggattagttggttcttgaatgctggagtaatgatttattagccatgggttggatgagttatgctagagtgatgattagagaaaacttgcataatgttggcaatttaagttaaatttttgaaatgctcttgctagttcgttcactgaggcactttgaccatttggagaaaaccaaaaaagatcattaatttttaatccaaatttctgtggacaccaaaagaaggcaactgttttagatatttaacaaatgaagttatatgccaagggaaaacttttgcaaatacattgtagctcttgcatcatgggatggcatccttttagattatgccttcataaagctattagtcttgtgattgggatttcaagaaaagtgatgctggtttgctagtttggatacgtactccatatgcacaaccaacatgcatctagattttaacgtgactgggtaattttacaatttgagttgattactactatgtttgcagaatgctgtttgatactgtctttggtaggttttcttatgttttctattatttcccttaatttctgaatgtaccatcaaggcagcataaaaaatcatatgcaggttgtcttttgtgtgtaggttcttgaacaacgggtagagactttggaaagaga

SEQ ID NO: 57102 - DNA, 885 bp, Populus trichocarpa
  Intron number 2 from transcript POPTR_0014s15640.1 (locus POPTR_0014s15640) derived from phytozome v7.0 (chr-ID scaf fold_14; pos 11657926 to 11658810)
cgtttttcctttgacaagtctccagattgggtatttcttgccttttatcatcagttcctgtaactttcatctacctcaaacttgtttgaatttcatctgggaaagaactcggaattttcaatttctgttctttttagtaaaaaggaatatcttgttatttttaggaaaaaaggtttttaaatttgattgtttgtctgatatacttggaatgccaatcaatcattgattcgttattccaaacttgaagtgtgagtttcgtacatggtattatgcttttgcaattctaatagagtactctctttctaggtaaaatggaataaaaaggggataagtggaggaaaaagtgtgacaaaattaatattacaatttcagattaagaagcatatgaatgagaatctaccctggtgacttttcattgctattttggaatcttgttctcttgtcgaaaacacttgtgtttttggaagacatgatctatattggccaacatggtagtctatgatttgtaattaatttgttttgataatcttttgtattttatttgatgtaggaataaatttcacttgtccctaaatgacttcatgcaacttttagcatgactatcaaaaccaatgttttgggtacccgttttcgttggtgtgtttgatcgcatctaagtacatgatggatctgcctgctttgaaaatgctgcagattttttttttaattctttccttttttagaatatatcatatggttgggaaccttgtagtgttaagatcatgggaggactgttagtgttttagtgtgttgagtatggttactgaatgctagctctttttgaacttttttttgcctcctgtgattttagagacttgcagtcttatctctcagatcttagccttt

SEQ ID NO: 57103 - DNA, 1002 bp, Populus trichocarpa
  Intron number 1 from transcript POPTR_0015s05550.1 (locus POPTR_0015s05550) derived from phytozome v7.0 (chr-ID scaf fold_15; pos 5882596 to 5883597 reverse strand)
tgaccaaatagttgttttccggtaatttttttcaggtaacagcactagtttttctcttcctttcactacttgttgactctagatctgccgtgtttgaccgcgttttgtagttttgtgccactttctgcacagatctgtttggtttcagtcactgcttgcttttctgagttgtaaaatgttgtgtgtcgttctagatcgcgagatcctttcccaatgactttttactggttctcttttggggttttgagtggttttgtgctgtatgaagtgactggagtggatgtgtttgagtgagggggtttatgtttttgctgttttttgaatttttgttcgtggtatgataagtgtagtgtttttattacttagagattattagcttattttcgctgttaattaaagccaattctgaaactttcctgtatttggcacgttttttatatttaatgtgtgttcatgaactgaacatgtctatattgatcatctgttgtttttcattttttttggaaattttagggtatgtttatcaattttcatgtcgtaaatgaaatgagttttgctgcgaacatgagtgtttgctttttgctgtgttcaaaaaatgctttttgaaaatttttgaattttttcgcgtcaatttttttaattattttggattgttttgatttgttcatgtcaaatataattttttttagaaaataaaaaaaaattattttgatacattttcaactaaaaaacattttgaaagaacatccgctgttataatcttaaacactgttcaaattttttgttttggggaattgtttattatgaagcacaattaattttaactgataattttttttttctatttttgattatgcagccatacttttagtgaccttgctctttcatgctagctatttgtttttggtccaacgtgtgtttttggttcttgggcttgagatgtgctatcattttgtggcactatctcatggttttaagtattgtgcttttgcagttttcatc

SEQ ID NO: 57104 - DNA, 775 bp, Populus trichocarpa
  Intron number 1 from transcript POPTR_0011s00940.1 (locus POPTR_0011s00940) derived from phytozome v7.0 (chr-ID scaf fold_11; pos 484389 to 485163)
aatctcaagtccttgaattatctagacctgagcaggtgcaaattttatggagttatcccagtttaatacagctatcacataagagaagatagaagcaatggatgaagaaatgcatgccattgagaaaaatgatacctggaagctgacttatccaccagaaaacaagaaagcaataggtgtcaaatgggtctataagacaaaaaagaatgcaaaagaagaagtgcaaaaatacaaagccattgaagagggaaacatttatcagaatgaagttcatgcttggcatgacatccctcgattgagtttaaaggggagatttgttgtattaaactcaatcaatctagaaggtcaaggaaggcaaccaccggccagccagccaccagctgtgaccgaccagccaccagccgcagccgccagccgccttcacaccattggccgccagccgccttcacacttgaaggttgaattatcttgttttgaattcgtgtataaatagcaagctaagcttatgttattctgtgtggagagattagagagaaacactagagagaaagagagagagggcgtgtattgtattaagcttttgtgtttgtcattaattgtaagcttttgtttttgaaataaaaccttgtgttttatcccctctgagtgtttcaaagccaccaccagtggtttctcccaccaacaatcccaccatcacttgcgaacctcacccaacttgaaactctggatctttcatttaatagattcaacggttccgttcctccatttcaaagag

SEQ ID NO: 57105 - DNA, 641 bp, Populus trichocarpa
  Intron number 1 from transcript POPTR_0009s04510.1 (locus POPTR_0009s04510) derived from phytozome v7.0 (chr-ID scaf fold_9; pos 4843666 to 4844306)
gggaaaggggaaagcgaatattttatttagaaaaggtaggttgggctgcctgctatttctaacggataagaatccaacggttaaaacttgtagagggtttttgaaattcaaattttcaaattcgtgggttacagctgtcgttacataaaccgcagagcctttcatctgattgcttaccttccatgctatttatgatttacgaattgattacaattttgatccttgtagtttaataaaactaattaagtggtccttgtagtctaaaagataattaaataatcccttgcaccaaggactatcctcaatttagtggattttttttttttctatccaagaacacccaccttcctcctaatcatttcatctatggaaaaataaaataaattggaaaagaacattgaaatctatagaaagatcaagctataaaatataaacaaaactgaaaaacatagggactaaaaatcaatttgttaaaagtgcagggattaactagttaattgttttaagctacaaggaccaagttaaaattaacactaaatttggtagctaaacagaatctccgattttctttttataatgagaatgaacagaatctccagttattaggttcgaagcagaatagtacagttcctatatcatat

SEQ ID NO: 57106 - DNA, 650 bp, Populus trichocarpa
  Intron number 3 from transcript POPTR_0014s05660.1 (locus POPTR_0014s05660) derived from phytozome v7.0 (chr-ID scaf fold_14; pos 4209607 to 4210256)
cacttctcctcaaggctcacgcgtcagctttggaacatgctgctcctgattgccaggttagataccgagtgaatcgcctgcactcagttcatgccattctatttttttcattctcattcttttctgttaaaaaattatataaattatattttaaaatattatctaacaaattaaaaattttttaattaaaatgattctttatgttatatcaaaactttggtgataaaaaaaaattaaatcatggaagttttaagtttaaaaatttttaaattaaaaaatattttaaaaataatataaattatatcttaaattttacctatatatttgaacttttaaattttaagatggttatttgattttttttttttgatgttatatcactataataacaataaactcttaaaaagcttggcatttggactgtaatcaatcggcaggctctgattcacgtcttttaatgctcttctgatattctatttctcgccaaagttgatgccttacgttgctagtacatggcagatcctaatggttgcaaatcctgtaaacactaaggcgctcgtcttgaaagaatctgctccttcaatcctggataaaaaacatcacatgcctcaccaggctcgaccacaacagagccctgagccacatatctg

SEQ ID NO: 57107 - DNA, 1012 bp, Populus trichocarpa
  Intron number 1 from transcript POPTR_0015s15650.1 (locus POPTR_0015s15650) derived from phytozome v7.0 (chr-ID scaf fold_15; pos 14881479 to 14882490 reverse strand)
gaggaagaaagtcaagcttggacaacttctgaaaggtactgaggataatatatgcctattttcttgttgaggtgctgtgttacaaactttggtgtggttcatcatctggtgctgtgttacaagtattttgttaatagaagtaaaattataactactaaatgagacagagaaagctatggtttttagtttaacacgcgtataaaaccctaaggctagacaaaaatacaactaaagttgtaaaagtctatagtttattcaacaaaagtcccataaaatctgaaaagattggtttaaatacctcaaataactaggaaacaaccaatcaggaaaaataatatagctaaaatccaaaattaagaaggaagaagtataaaatatggactgaaactttgagggcctttggagtgagcttttggcgaatatgagcattgatcgaacgggcttggagtgtgaaaggaagcttagcacaagctcaattttctatcaggaattcacctataaaatttgagctttatttaacaattggattaactgttttgagtcaaactacctgattggataatttctttgactgtttttgtttttcgatctgatccataaaatcccggctaattattccacatcattaaattaaaataaaaaattttggtgaatattcttgcatgtattcattattaaaaaaaaatcaatatacaaggttcccgccatgcttttagttatagtttcttcctgttgtttcctttcatttttggtcgagaccataaaaaaaagttttgatttatttctttacttgccaggattggattttaggagtgagtatattaatctagagatcaatggtttaccatcatgatggaactgtgtcactaccttttgtgcatctgctgattctgaatagtggtgctgtagttgtttttgtagagactattttgtttatgtcaatatgaggctattaattttctctttgcaagctatagggacgatcctgcagagctgctagaggtgtgttggc

SEQ ID NO: 57108 - DNA, 363 bp, Populus trichocarpa
  Intron number 2 from transcript POPTR_0012s12810.1 (locus POPTR_0012s12810) derived from phytozome v7.0 (chr-ID scaf fold_12; pos 13212985 to 13213347)
aaggattgcagaggacttctgctggtttgggtagtgtacgtttcttttctattttgccttgttatttgattaatctctttttgtttcatatttcaatttgcaagaatttttacaattttgatcactcaaaatgtttttattgaattgaattcccaaagaggaacattgttctaatataagaaaatatttcatctttcaaaaataagaaatcgtttttttttttttttttgctgcaaataagcaaagttcatttcttcaatgcatttcatacttcttgctccagaacaaaaggagtgtcatttgtggatttttttttttcatactgcaggtcataatcgactcgcaacctctgacagtggctat

SEQ ID NO: 57109 - DNA, 571 bp, Populus trichocarpa
  Intron number 3 from transcript POPTR_0004s10100.1 (locus POPTR_0004s10100) derived from phytozome v7.0 (chr-ID scaf fold_4; pos 8670577 to 8671147)
aaggttagcgaagctatatattatgattctcttgagttctatacttttgaggtttctgttatttctcattttatgcttgcctgtcccttctattcttgaatcatttattttttcaaatgtttagagccctaaataaagaaagacatgtcctgacaagacagggtagtgaaaggtgttagattctaatgccctaaagttcaaacaagttggtgttgttcaagggttgcatctgtgttgtgtttgcgcgttgcagaggcaagaatagaaatttgcaagtttttgtgtaattgaccttggaatagttaaattttgttatggttaattaatttatttcactagaatttatcatcaaggcacatcttcattctgttgttatactttctctgatggtaaaaatagttgtatcttgttgttctttcaattatgccttctaggttttggaatagggatgcttggttcttagtcacgagtttcatttcagaaaatctacaacatcctcatatggttttttgattgcttatctgaggtaacctttatatttcattcatgggtgtttattttgccttaaggg

SEQ ID NO: 57110 - DNA, 926 bp, Populus trichocarpa
  Intron number 2 from transcript POPTR_0009s15730.1 (locus POPTR_0009s15730) derived from phytozome v7.0 (chr-ID scaf fold_9; pos 12107689 to 12108614 reverse strand)
atgtaagtttttcatgtgtcattgtatttatttatgtttttgctgatgagtttgaagtgggttttatagaaattttgaaaattttgattgtggagttacgttggaggataattacattgacctgtttgatattttttttattgaattatgaatcattatatgtcttgtttgatcatactttatatatgccagggcatagcatcttcatattcattccatatgtgcttgtactttaccatactttggttgaaagttgaattgattgcttggtcttctttcgtttggactttgtaaggagcctgtagatgtaagtggaatttttacgcattgataatatatgctcctgatgggataaagtggacgatgattttacttgagaaagtagttttctttatttctgaaacatggtttattatattttcgtttttctggtttctatgtgtgggagtttaagaggatggattctgtgagcattctgctttgtgtcgggttagataaaactgacaatgaatagatattcaagttggaatatttcttctgtaaaaaacattttagcaaggttcatgtcagtttctggctttgtgatttaacttctttttgctctttatacacatgaaaaatctgttgatctgttacaattagattgggatggtgcacatggaattttttgagtatgcgcgctgcacttgggtagcaatgctacatgtgcagaaaagcttttcattttgatcaaggaagttgatcaaacctttttgcgaaataaatatttgcaatttctactggattggaaattggcaataagtttttgtgcattgttatctctttgaggccatcttgtttgcataaaaattgtgtctttacagtaacttgtcagttgttcatttttcctgatccacgattttgtcttttttattcttctatgcaga

SEQ ID NO: 57111 - DNA, 398 bp, Populus trichocarpa
  Intron number 3 from transcript POPTR_0014s05090.1 (locus POPTR_0014s05090) derived from phytozome v7.0 (chr-ID scaf fold_14; pos 3882844 to 3883241 reverse strand)
tgatgtaatgtccagagggttcattgggattcctggctcaaggtatgatttattccaaacttgattattaaaataaattttgttcgatttttttcttaaaaaagaagaagcaaaaccaacaacgactgatatacttcctgaaaaccattctatttggttttgaaaaaaactgacaattggttgttgttttttgaggtttttaaaaacaaaaacaaaaacaaaaaagtttttgtttatagtttcaaatttagtttttaggaacagaaaacagaaataatatcaacgagccctaaacttcatgtcatgagcagatggttgtgcatattttttgacgagtgctggaatcctagttgtggcttccaaagaagatatatccctaccaaaaacaattgggagat

SEQ ID NO: 57112 - DNA, 599 bp, Populus trichocarpa
  Intron number 1 from transcript POPTR_0009s09410.1 (locus POPTR_0009s09410) derived from phytozome v7.0 (chr-ID scaf fold_9; pos 8343836 to 8344434 reverse strand)
gggagaaggtttcttcgggttctaagatcgggaaggtaaatccttttcgtttttgttgtttttcaagatttagggttcttggattttcttgttaatttgtattgaattttaatttgaatggaatcaaaagcttaaaatcctcggaagaagagaatttggtcttgtttgttgttgtttcgatttcttttcttgatgtttcaaagaaagttggaattgattagaactctagaaactctaacattaatcaaagaatgttgcgatttgtttaattctttcttggataaaaattcaactgataaaaaaaaactaaagtactggaattcagtagtgagtagtgtctctccttttaacttgtgttctttgatccaatggccagtactaagttttaatttctaagttaatggttcaccatttcatcaatacatttgttgtcatttagggcagcagcagcatgttcgggtatatatgtgattttggtaatggtggatgattttcttattctgataattgaaatttgtggaggttaattgtgatgttttcatttcacgctcttgaatattgcagaataaatcgccaaaagggactggccaatcagcatt

SEQ ID NO: 57113 - DNA, 230 bp, Populus trichocarpa
  Intron number 2 from transcript POPTR_0011s12620.3 (locus POPTR_0011s12620) derived from phytozome v7.0 (chr-ID scaf fold_11; pos 15318292 to 15318521 reverse strand)
gtcttccaagttacaccaccttatcggccggcacggtacgaagtctttttcctttgcctagtcctattttgaattatcttgtatgtaatcatgcttatttatttttttctatttttataaacagaagaatttatgcaagttttttatttggtgcaattaattaaactttcattttattgaatgttttgacatttttttatgttatagggacactaaagtacaaggagaaa

SEQ ID NO: 57114 - DNA, 527 bp, Populus trichocarpa
  Intron number 1 from transcript POPTR_0011s05660.1 (locus POPTR_0011s05660) derived from phytozome v7.0 (chr-ID scaf fold_11; pos 5638148 to 5638674 reverse strand)
ccagtccgtgcacttcctctctctctctctctctatgttttatttgtttttcttttcaatcgttctgcttgcttttgtgcttgttgatctcttctgatttcatttttctcgattttttgtgcttatgattccgttcattcatgaattcgtgttaattggtgtgctattgaatgtagaggcttacttgttgtgttattgagatcttgtgactttttggtgattttgttcttatagctagctaatttttttgtgttagcttagttgtttcttcggattttttaaatttttccatgtgtaatttttgtctcttcgcttgttttgttgattttatgggttttggctgattttgattcctttattattattattattattattattattattattattttgtgcattatgtgtgtgcataagtatgtgttttttgtgttatgtagttaagtgtttttttttcccttgctgtattatttggcttatttttggtgtttcattgttggtttgatcagcggacacatatccgtccg

SEQ ID NO: 57115 - DNA, 909 bp, Populus trichocarpa
  Intron number 4 from transcript POPTR_0001s31150.1 (locus POPTR_0001s31150) derived from phytozome v7.0 (chr-ID scaf fold_1; pos 29490082 to 29490990 reverse strand)
acctgttagcgctcgattccatttcaggtagtataagattagtgaagccagtgttggatctttatgtcttttttccccgcatgtttttaccattgtttgctcccttgtttgaattttctcatgaagagtgcatgcgtgggaaattatttccatttggacgtaatctcctcattgccattgcgtgttctacaatttttgtgtttgttcttcttcccccttttcttttctagagagttcttaagttgaccggagaatgatggcgagttagattactatggttttcaaaaccaagttgatctctttgttaaatttttagctccgttaagtttgattcaaggagttccattaaagttgggctgaagaaacttggctacaagtgctttctcagaccatgatggattgatggtcataacaatttaaacaaccacacggccaccttacttcccaacttcttttatttgttagatttgcttgcttatctagtcgaacaatactatttcatcttggcatcaattgaaaagtcaattctagcatcaatttgctaggcttggagatagactagagtaaaaacggataagctagggtaactaataatgttggattcatggcctttcagaaataaattttcttcatccctttgattgtggcaacattatgattattcttagcttgtttctcaaacttttcttttcaatctcaagggcctatagcagcaaggatgctgtactgattcaggtttatatgtatatgtatatgtatatgtatatgtatatgtattgttttgttagatgttggtacttagttttgtcattcgttattgctctttgtcgacaagcaggcactataattttgtaatgtgtgaaactgctactaatttcttcttttggtgtctatcaggtggctgtcaaa

SEQ ID NO: 57116 - DNA, 726 bp, Populus trichocarpa
  Intron number 2 from transcript POPTR_0004s09340.1 (locus POPTR_0004s09340) derived from phytozome v7.0 (chr-ID scaf fold_4; pos 7891603 to 7892328 reverse strand)
tgatattagtgaaaagttttggtctttatagagaagtgattttgggcagccattctgatagtttattactagcaaattgtgttttatttttcatgccatcatgtatttaaatttctatgatgtttagttatttgcttgttttcttgaaaagcttctcttttagcaagtaaactggttttccttttgattagtatgttgctgactgactggtttcttatggctcattgatatgttgcaggttatgagagtgaggatagctcagcaaatgtgattgatggttattcatcaggtaggatttatttttttcatttatggtattgagatttttttcaagtaggaaggctatatgcatattggaggataattgtcctctatgattctttttgagggatcaaatgactcatgtttgttacaattggaactgtcatagtattggtagcatagattaattatccttggcattttgaatgattgtttcgagtatgctttttccactgtactatgaccctatgtgcaacttttgtctgttattttgagcccttgttcaggtctaagatgtttagtagttgtggatggttactatccaattcatcctgtttgatttgttacgttaatggacaacttaacacttgcattcaaaactggattattattttgagatgtctgaagatgatgaaactgcagatgacagagaaacccgtactggcattgaaatactcaagaagc

SEQ ID NO: 57117 - DNA, 600 bp, Populus trichocarpa
  Intron number 1 from transcript POPTR_0015s05470.1 (locus POPTR_0015s05470) derived from phytozome v7.0 (chr-ID scaf fold_15; pos 5817044 to 5817643)
ctccttatctcccaaaacccactaaactaacaaaggtaaacaaaaaccctagattcattcatttattttacacttgcttttaattgttttgctgttttcttttattggattctaattttttaaccttgttaaagtttgtatctttttattccattccagttaatgctagtgtattattgttttaggagtttttggtgatgtgggttctgtttgttgagatgggtggggcttgatttcatgctttctgtggctataagttaaagaaaccattaatctttgtctaggatgttttatgaagaaagtgttttgtttctcatgacgtgattaatttgatttgttttggagttagattatcaagatttgagtcaagtatgaaaatttcagtacttttggaggttttagagattggtatctcctaagtaagatggttaactaggtttaggttatgttatgattcgcttaatggaacatacttgcaaaatataatcttgctgtggtttggtccttcttatatatgtatggtttttcttcgaattccttgcgtgggttttcatgttcaggttttaattggccaatgtgcgtaaaattcttttcttgcag

SEQ ID NO: 57118 - DNA, 514 bp, Populus trichocarpa
  Intron number 2 from transcript POPTR_0015s05470.1 (locus POPTR_0015s05470) derived from phytozome v7.0 (chr-ID scaf fold_15; pos 5817677 to 5818190)
gcagttcgcactggtggaaagggtagtgtgagaaggtgggaagactattccattgcaactgttccagctttcactggaatttatcaattagctaaatgatattgtgtttgcatcaagtagtttagaaatgaaaataagtgtaaattggagaatgaaattgttttattcgaaattgcctttatgagatggtcagctgagtggcatattgatttgtgttcctgggagtgcacatgttttattttcattttaatgctaatcacaacttgaattttttttcttttggctggtttaagtaatggccactggatggttctgtagagggtttcctgcatttggacattttgcgtagaattcaaacatgtttctattaatttattaaacttactgaaaatatagatcatggctactgtgttgtttattgtgtttttctgttgtttacctctaatgagtttcttttaaatctatgcttataactgaaggaagaagaaggctatccacaagactactactacag

SEQ ID NO: 57119 - DNA, 522 bp, Populus trichocarpa
  Intron number 1 from transcript POPTR_0015s15860.1 (locus POPTR_0015s15860) derived from phytozome v7.0 (chr-ID scaf fold_15; pos 15039394 to 15039915)
actgggcaggagtcaacgcactgagaggatttcaggttggtttttctttaaattattccttgttaaagtttataaatttttgttgggtttatcttgttttatgttatttggggtcttatatagttctcagttgattagtagatagatttgtggtaattttttgtcttttaactgtaatgtaggtctaaattatttgaagttattttttttgctagttatattacatagttaggtcggtgggtttttgggatttacttaaatttaagtaatagttaggttggtggatgtttgggatttacttcaatttaagtaaaaattgatgatttactgacttcattttgattgctgaatgtctaccaatttagttcatgtctaccagtataatagtgacatcatctctttgttgatgtattgaagaattgaggcttaacatttattgttgaaactaactacaatgtactgtagtaatctatctttgttgatgtagcaatcaagagaagagttaaggaagaggtaagtgct

SEQ ID NO: 57120 - DNA, 477 bp, Populus trichocarpa
  Intron number 1 from transcript POPTR_0004s05380.1 (locus POPTR_0004s05380) derived from phytozome v7.0 (chr-ID scaf fold_4; pos 4126974 to 4127450 reverse strand)
agtctacttacagcaagactagtgctagagaccaggtgactcttgatataccttgaaagtaaaattatactatgtgaaagaatttggaaaaaattaagtatgctctaggctatacatgtttcttttctttagacttgaaattaaggctaaaatatttttccgaagacttatgatagagcttaggaaaaaattctggaattttcaccaatgatccggacgtatccttgcgttttactagaatgagaaaaaaaatagattatgccttttcttggaagatttgaattcaatatttcctgtgtggggccttttggaaaaaaatctggatagccaatgcatgatttgggtgtgaagttagcaattatcaattaacagattcaataatatataaatatgaaattatcaaaacgatatggattatataacaagtgctaaaatattccaggctctggctgctgtgagcaaactcgttgaccaata

SEQ ID NO: 57121 - DNA, 355 bp, Populus trichocarpa
  Intron number 1 from transcript POPTR_0004s06680.1 (locus POPTR_0004s06680) derived from phytozome v7.0 (chr-ID scaf fold_4; pos 5357179 to 5357533 reverse strand)
agctgctcgaagaaacagatcgaaaggtgaataaatacctcctctttattatattttccttgtctcaattacgtgaattaactctaagctgtggttttaaaaagaattaattagcacactaaaatattggaggataaacagggtttgtgaccactcttcaatttcttccctttttttataaaaaaataaaatgatttctgcaggatcataattactcaaagtactggctacaatcttgacaacaacgcataaagaaaacaaagggattcctcgtgtttctgttaattgaattgtattaatttgcgttgttgttcttgtacacaaaagaggcttgactcgttgaaattggatacac

SEQ ID NO: 57122 - DNA, 545 bp, Populus trichocarpa
  Intron number 2 from transcript POPTR_0004s16350.1 (locus POPTR_0004s16350) derived from phytozome v7.0 (chr-ID scaf fold_4; pos 16836608 to 16837152 reverse strand)
agaagcttgccgtagaggctttgcaggttgccgttagtgacctaccattctgttttttttttttagatatatataaaagaaagtatttttctccattgttattgttcacgagagtaaatcttgattgaaaaattagaataataagcgttttaaagacaatgttttgtttttcaactgttaattatcttgattttgcatgatcaagtacaatttgattaggttcacaacagatctatttctgcataagtttcacctaatatatgatctctgttattaattgctctcccttgactattaaaccacttgctttggattcatgagctaagatgttttgattcttgtacctgtaatcttactctaattcatgctcttgtagtgatatgcagagtatctaattattttaacttacattatgtagctctaagttcttcaactattgatcaagggacaacaaaaatctccacagaaattgatgttttccctcaatttatttttatttcttgtttttaattaggttaggactgtggctcggattgtgcaagggg

SEQ ID NO: 57123 - DNA, 750 bp, Populus trichocarpa
  Intron number 2 from transcript POPTR_0004s14170.1 (locus POPTR_0004s14170) derived from phytozome v7.0 (chr-ID scaf fold_4; pos 14657210 to 14657959 reverse strand)
ctgatgtgggtatcattccctgctctctatttttcgatactcgtttctttgtgttaattttatttcttcaatacaattgatagcacaattccaaccataatttcttgaatatttgacagagtggataaggaaatctttttcaaatcaaagaattgttaaatgcatttttttatggttaaacatgttgacttacctatgtctgttgtttcttttggtaacggtgtcaatacagggcctgattgatgaagaatttgattcatattgctatcaattttatctgaaaccctatcgaacttagatgtagcaagccttattgtagatttctaagttttgaggttgcctacgtttaattgcagctggcatcacatgagttctgtcactgtcaactcactttggagtatgataagttgaagttggaaattgtattgaatttttttgtgcaatgttttatttatttgattagatgaactattaggtccattctgtttgttgacaagcaagaagttttggtcaagatggagtaagggaaatcttagatttctagaacaatataatggagtaagggaaatctcaatgctgatatgtagtgttgattccattcatcatagcagctgtgtatatgtgtggatgttccatcgtacatgtaaaaattactgaatcataaacaacgtttgacttgccagtctgacgaagttttctgtttccgttcattcaggaagaaatcgagattgaagccagggttctacgtgc

SEQ ID NO: 57124 - DNA, 585 bp, Populus trichocarpa
  Intron number 1 from transcript POPTR_0012s04030.1 (locus POPTR_0012s04030) derived from phytozome v7.0 (chr-ID scaf fold_12; pos 3248428 to 3249012 reverse strand)
tactgctgaacattccacttccactacatcttccggtgagctacttcacacatcccattattgtctctgttatgttgccaagctagctatgaatgataattaactcaagggttttatacgtacaaaaatgttttaaaaaaactattgcaagtaaaaatgtggcagatgataaatgattaacgtttgattccaaaatttgtagtaaataatcaatcagttaacatggaaaaataataattaatttggtatataaaactactaaatagtgttttatctctggacatattcttctgcaggagaaagaattgactagagcaaaatggaccaaagaatgaacagaaagcaggattatttctctttggtgaaattagaaatgactagctagtcatggtgcacccattgagttttaagtgagtgcttattgtaagccgttgtctttgtgacttgcatgtgagaacaacatcatattagttattataagtgtaaaacatgtcaaatatcctaaaccagttgaaattatgtgccagtaggtgtttctgcatatgctattttcattctgtctttaattttggtctacggctagag

SEQ ID NO: 57125 - DNA, 672 bp, Populus trichocarpa
  Intron number 1 from transcript POPTR_0012s00730.1 (locus POPTR_0012s00730) derived from phytozome v7.0 (chr-ID scaf fold_12; pos 411334 to 412005 reverse strand)
gaagaaagtgaagaagaccttatctcatctcaaaggtaacacataaacttatcataccccacagtactatttgcttaatttgattaattttagcttgctaggacatatatacatatattatttagtaccaagttgatgctcaatccttttttttttttttttttgaagagtgatgtaattacaatattttcattgattagcaaagacaatataataatttcactataattcatcaaaagaaaaaataatgtaactgatagtttgtgtccagtgtgcaaaatggtatgtatgggatgggccttggctgtaggctcaattttgagatatagagaaggttgcttgattatggacctctagttatcagagccacaaaagtattcactttcatttttgctcgtgggcttcaacttatctcttttttattcctttaattttttatttgtttttattaaaccccttttaattttttcttagactgagcaagattcatggaaatggaagaaagaaaaaaaaagaattccttgtgctcttaccatttagatatataagcaaatcatgaatgtgcttgataaaattaaacccattggccatttcaatttcaaggtgattatgagaataattttgtaagtttatgttagctttgtatggaaatggcaggaatttactctgtaa

SEQ ID NO: 57126 - DNA, 353 bp, Populus trichocarpa
  Intron number 1 from transcript POPTR_0081s00250.1 (locus POPTR_0081s00250) derived from phytozome v7.0 (chr-ID scaf fold_81; pos 93116 to 93468)
atttaaggttgagttgcatttccttattaaaacatgtttgtttttgtgtttcaaaaatgctttaatttttttatttttaaattttttttttttattcaaattaatatttttgttatatgatgtgattatttttgttatatgttttgtattatttgatgtgattgaaagtggcataggtccccaaaacttcaaattttccaaaaacataactataggtctcatataaaggagaggcagtgattaatgaagaatagtgggaaaaattattgggcctaactcaatagccagaaccaatgcttttaggtctggctttgacagctccttgggtctggctcggtagccaaatccaaaga

SEQ ID NO: 57127 - DNA, 936 bp, Populus trichocarpa
  Intron number 1 from transcript POPTR_0009s05650.1 (locus POPTR_0009s05650) derived from phytozome v7.0 (chr-ID scaf fold_9; pos 5698831 to 5699766 reverse strand)
ttcactaaggtaggtatagtattaccattttcagtaatttgttttttacatcattggaaacgacaatgcatttaatcatctgaatatgatgtcaacgggtgtttgattgggacggtcaattggatagattttgcttgaaaaagtttaaaattccatactttggttcctatttcatgtgcgtctgctttcgacaaatcatttggacaatttgaatataatgcaaaatggtacatttttgaacttcttcatgatggtttcatcttaatggtaaagcatgcttgtctgtctatatatgtatgaagagaatagtattgaaagatactttttttatcctgttggtttatttctatgatgagagatcgacttatagagggaatacaaatggggtttagagttatctcaacaccagtgtttcacttgggtggttgagttgtttgataatgtgaggttggagcataccaaaattcataagaagtatacgatggtgcttatagggatatagcactgtaaattggttggcacgaagaaaaaaggcagttattgattttcttgagggtaagtcaattttctagtggtacgaagataatctttgcacaagggattgttatgcaatggtaatgaagcttgtttatgccattaccaactatttgactgatccaagcccaatccttcaagtttagaagcacctccataccctgaaagaagtgagctcttccctcatgatgactagcaaaaattgaactggaaattttttgatctgctccacttgtaatgataatgagcttttatgtgccttttctgcttttatgttttccttcttcctcgtccatcccttccagttcgctgcatttgtttatagtttgtactgacattagatttctttaccttgtagtgacttttactttttttaaaaaattttttagactgctgcagagt

SEQ ID NO: 57128 - DNA, 937 bp, Populus trichocarpa
  Intron number 1 from transcript POPTR_0009s11110.1 (locus POPTR_0009s11110) derived from phytozome v7.0 (chr-ID scaf fold_9; pos 9337925 to 9338861 reverse strand)
atcttcaaaagaaagctgaagagatctctcgcaatgtaagtcttctttttttttatcactcagtcattcgctcccttaagtatttgctttctttttgggttaatgaaatctgggtttggatttatttgttttctttggtgctagatctggtttgttatgggaaaaaatgttttttttagtttagagtattatttttttatgattttttttattttgattgtttttttatttttcgatttaggttttctgttttcggtgaaaatgtagttattttagtgatcacttttgttttttagtttgtttgtgcaagtgaatgtgatcttggactgatggtggttttttttaacctctatggaaatatctactttgtgatattacaccttttttttcatcacctttttaagttctatggagatatctactttatggcaaagctatatgttaaaatcgttttgcttgcgggtttgcaaatggaagttttcatcggcaacgtttgatcccgtttcttcatttgaacttttaatttaatttcttagggcgttaagccccgattcataccaaaaaaaactttaaaatattttgggtttctttctattcaaagaatatgaaaaagaaaggtaagttttgtttttcatgtttaagtgccgtgttcaataaaacctgacttggatgcagccaccaaggtttctacttggtttcccatctgttgggatatgattgctcaaaaggattaattttttgatgaacaattgagtgtttgtttatgaattactgggattatgcaaaaggtgggatttggaattgtttttttttcacaatatgttgtcctatttattttgcatttgcattgttgttggtggatttggcttggatttcttttaatagttcctctgcgtgtgcaggctgctgtggttgcagaaaaggcagcaaagagcat

SEQ ID NO: 57129 - DNA, 425 bp, Populus trichocarpa
  Intron number 1 from transcript POPTR_0001s22725.1 (locus POPTR_0001s22725) derived from phytozome v7.0 (chr-ID scaf fold_1; pos 21606107 to 21606531 reverse strand)
tgggagactggctctgtaagtttcattttttattttcttctactatcatgctttgctaaacccttccgtgtatttgcgtgtagatgttctttcttgatttttatttttatttttatcctatccttcaatcgggatacgtaaatcaaattcttagatcaaaaactagcatgcaacttctagggttcttctttaaattgaaaagatccataaccattgctccttttttaggttaatctataaccgttgttatgttaagaatttcatttgtataaatgctaatgatgcactgtatgcttaatgaagattttgatgatataattacatatttaatttcaatattttgtgtgtgttagtgtatattaattttcttcttacatttttctctttttctttctaagattttggattcgacaagaaactttata

SEQ ID NO: 57130 - DNA, 423 bp, Populus trichocarpa
  Intron number 1 from transcript POPTR_0014s02290.1 (locus POPTR_0014s02290) derived from phytozome v7.0 (chr-ID scaf fold_14; pos 1941100 to 1941522)
cctctattaaatctggtttgagctctttttttttcatggttatgccttttttaatgcttcaattagtcattatcgagccggtggcttactttattgttgtgagttgaatttttttctttgctatgttcttcaattctctgttcaatatgtttctgttataatgatcagtaagggttttcttgtttaaactttactgcacggtcagtgagattttggaggataatgtgatttcaacagatcttgtttacgcacaaaattgttgagattagcaaattggttgtattttgaccatatccttcatcaatgatcaagtaatttccaaacaatggcttaaataatgtctctgttatcatccaattttgaaattcttcagcgatgtcttattctctgttatctgcccaggaaagtggcagagaagcaaat

SEQ ID NO: 57131 - DNA, 431 bp, Populus trichocarpa
  Intron number 2 from transcript POPTR_0009s12270.1 (locus POPTR_0009s12270) derived from phytozome v7.0 (chr-ID scaf fold_9; pos 10046521 to 10046951)
cggaggaagtggaggtcagtgccgccacttacgaggtttgtaaatagctagtaaacggtcaaaaacaaaattaaatctctaaagtctttgaattctttataattatggagcaagcaatgaaaatttattaattaacaaggctggtaagtttcttggattataatcatgagatttttcgttgtcgctgctgttgatggtgcaagatttatcgataacacgtacgagccttgccctttaaccatggatcgatgtaatatagctcacatgcccagtttatatcatgaaatatcattgttagaatgttagcagctacgttatgattctcataacaaatctctcttctttcatcaagttctttccaattaaaattcatctcacaattattgcccatggtaggagatatcaagcaagccatcgcacaacaacgaagc

SEQ ID NO: 57132 - DNA, 993 bp, Populus trichocarpa
  Intron number 3 from transcript POPTR_0004s16700.1 (locus POPTR_0004s16700) derived from phytozome v7.0 (chr-ID scaf fold_4; pos 17094443 to 17095435)
tgaaggctgcagtgactggtaagctgtgtgtttttgagattatttagattgttttgaagcccttttccgagttctagttcagtttttgtggatgggtttttgttctgtgatgctgtttggaatttgctaggtgagatctttcaatgccattattacttcggtgcctgtaggttttagcttgttagaaagctgtggctgcttgctatccaaatgtcaatgggactgtgctttgattttcctttctgcgagaaagaatgtaattagatttataacaccatatttccagttatcagttgctttgtcatatttctttcaaactgaggggaataggcattgcattatatctgcaaagtcgctctgggattgtaatagatgacaattgagattggattacagtaatattttctacagttatttagaagttgatttggcacgcggcatatgaagtaatttagatttgtcttgttaagcaattacagccactctgtgattctctaaaagatatccagcgggagcaaactgttatgggcagggcagataagttgttctctacttgaaactgaaaacgggagtagctgatatatcaaaaagaatgggaaaatgtcattatgaaaagaaagaagagtgcttgcaccatgtcttctgtttgcatgctttcttcccttttcttttccaaacttcctctagcatgtgattggatggacatgccttgatcgtgaggtttgttatcaaacttcacttttaaggagcttcttatattgagttctgaggagaaatacgtgtccctagttcagaaggagtggacaactagggtatagagacttatgtttcaaatgccttttcttatgtggatgtctgtgcattttaatgggatgtttttaccaaacaactgtttgagtgcagacatatccgatttatgcaaatacaatgggaaaacaatgcatcattcagcatactactttttgattcaggtttcatcctgcttgtatagaa

SEQ ID NO: 57133 - DNA, 530 bp, Populus trichocarpa
  Intron number 3 from transcript POPTR_0004s13700.1 (locus POPTR_0004s13700) derived from phytozome v7.0 (chr-ID scaf fold_4; pos 14118174 to 14118703)
gtgagcaaaagaatcgaatacatctctgctgaattgtatgttttttttcccttctatattcttcgttttttcgtgggctgttctttcttatttactaataatttatttatttttaatcacatctggatcgagatttgtgcctattgtgcgttgtttattctgtaaccagtgctcaattaccatcagtaaatgtggtcgctagcctgtaccgacataactctttgagttgtcatatgttggaccgatccagtgttcttttcctgtcatttcttgaatacggaaatacctattcaacggacaatgtctatttgctgctgtttaaattttatgagctttgcttaggcctcttgtagaagggagatttgcggaaactaacaacaacaagaaataaagtataaagatttctaacttgcagaagattttgttttaaagcccttatcttttgtattgtttttgcttgtacaatgggtaaaactgaatattggaaacaaatctaataaggaacttttcacaatataggaagcgacttg

SEQ ID NO: 57134 - DNA, 770 bp, Populus trichocarpa
  Intron number 1 from transcript POPTR_0009s07860.1 (locus POPTR_0009s07860) derived from phytozome v7.0 (chr-ID scaf fold_9; pos 7294464 to 7295233 reverse strand)
ttgcagaaactacaaaacgacacgtcttcgaccaggtcactccctcactccatcgtgctgtcaatgtcgtacaactgtatttaaaacaacgtttattcttttgattttaaattaattgttttatatttgtttttaaattgttttggtttatttttataaaaataaattataaaaataattattttaatatatctctaattaaaaacaatttaaataaaacgttctaggttgaaaaggctacccttccggaaaacaaacaaaaaacaaattttttgttgttaattaggccttaaaacgttgaaaaagacaagcaaaatactgtgggctgctgcaatgtggactggtaataacccagttgtctccgatctttgctcggccgttgttattttcgcgtttctgcaactatggaaagaaaccgcaaaacatgggcttgaccaggtttttttttttttgctttagttttaggataaacacctgattttttgcactatattttgattaacaagcttgtataacgactactgggaatttacatgcaatatcgatgttaatttctgctttttgatggattccatgaggtgatattcatttattatttgcttcataggagattttgtctatgagtcataccttgtttcttaaaatgggacgtgaaatatcaatcttctcctatgaaatctcctttcgtgttcagctaattaggggttgattgtcctttttcttttctttgtttagaaactgaataggaagctcgtgcatataagcatcgg

SEQ ID NO: 57135 - DNA, 360 bp, Populus trichocarpa
  Intron number 2 from transcript POPTR_0015s12490.1 (locus POPTR_0015s12490) derived from phytozome v7.0 (chr-ID scaf fold_15; pos 12722287 to 12722646 reverse strand)
gtttataggtgattcttcttacttaactggattttttaatcgttacgaggactaatagtagctctggagaattacaattcctatggcaatttgctcatgtctttacatgaagctaaacatgtttgtttatttgttcattggtttgctattagaaaatgcggttctctgcgtgtagaaaatggcaatgaaatttcgattacctttgtagctccctttccttttatggaaaatgcataaactatgtcagattattttgctttctttcttttgattgggaaatacgaagtaaaactggtttgtttttgcatcatggtatccttttattttggccctaacttcttcatttctgtcagggaagaa

SEQ ID NO: 57136 - DNA, 1010 bp, Populus trichocarpa
  Intron number 1 from transcript POPTR_0004s08840.1 (locus POPTR_0004s08840) derived from phytozome v7.0 (chr-ID scaf fold_4; pos 7428874 to 7429883 reverse strand)
ggcaaacaggtattacatatattctcttggactggttcttgtgtatctttgctcatttcttgcatcattttgacttctgaattctgttctgttgggttttcttgttttttgattggtttttatgtttggttgctctgatatttgacgttatgagttacttgggagtagctgtacaaagggttttaccactttctgtggcgctggtgttgatcataggtttattgagttattaaggttaattggtatttaagactcatgaactgatcctgttgctgttgcgcttggatgactgctcttgttgttattatcatctctattcaaattcaaggggatccgggaaaaagaattttcttttcccgaatcctaaaactcaaccagcaatgaacttaaaagtattcttgtcgttgactctggtttttgagtcctgtttttacccttcgaagttccagctgatctgttgttaacctcgtcactcttatcaatttcatagatgaagatcagcaagttgacttttaaaatgaaaagttcttgcactatgcagtctaatgtttcaagaagttcaaggttgtacaccataatcttttcagatttgttagaaattcttgattttctatattatggtcaagttgcagagccttttcccaattgagatttcccctcactaaaagtttctcttgttatttaattactcatttccttcaagaaaaaaaggccggtttcaataattaaattatgtttcatcatcaaaatagaaagataattataaacaaacaaaatgtatggctgcgtctttttcgttctcagtactagttgttaaaaaaaaatggaaataaaatatttatgttggtctcttataatttgcagtggttagatttttgtcctgtgcttgtggaaccttgctataacaccaagaatcttggatttttcttctttttttcccctgaattgatgtttataatacattttctcttgcagaaactgaagactcgcgttataaagcagaatatcaa

SEQ ID NO: 57137 - DNA, 602 bp, Populus trichocarpa
  Intron number 1 from transcript POPTR_0015s09690.1 (locus POPTR_0015s09690) derived from phytozome v7.0 (chr-ID scaf fold_15; pos 10839052 to 10839653 reverse strand)
ctgaggcccaggttaggatcaaagttttcaaatttccttcgtattgattggattagatgaaataaaagaatgcaaatttgatgttgaattggacagatgaggctaggattataaaaaaaaaaaaaaagcactgaagagatcagtagaatacattttacacatgttagagattgcttgtaggtcttttttttgttttgtttgtaggtcttggagattgaattttgagatgatatttttgaggttctgttattaattttttcttggaaaattctatttcatgtttaataaaggctaatgattttccttttttttttttggttcttaattgttatcataaatcctctgttttttcctcttttgggtgagatcacattcttccgggcctgtggtgttcttttgtaggcgatagacatttacattagagacgtgtctgcatttctattccggattagcaattgggagggtgggcaaggagattataatgatgttttaaaatgatttaactgtatttgttgtttatgttactggtgataaactttatgtctttattaaaatcctaagttttattttagtttaattgcaggcaagatatttgttcccag

SEQ ID NO: 57138 - DNA, 1060 bp, Populus trichocarpa
  Intron number 2 from transcript POPTR_0011s15930.1 (locus POPTR_0011s15930) derived from phytozome v7.0 (chr-ID scaf fold_11; pos 17937214 to 17938273)
tgctcgctttgtatctctcaagccctgaaaacaaggtcccattctgttggatccgttgttgttttttaccaagttttttaatttttttatgatctgttaagattctcgcattattgatttgtttttcgtgctggtgagtgagatctgttttttatttgtgggattttagttaagaaaagattctgttttggggctcttaattttagggaattcaagtgtttagagtgtaatgttgtttttgagttttggcgaatcggttttgggtcgaatgatctgattttgcttagtttggttctggttatattttgcaagtttatgtaagagttgctgattagtgtgtgcaatgtgggatcccggtggagtttcgagtgatttgataagaatctgaagacgtgcaaataattgagagtgtatgctcaatttttcaagttcttagatttgcccatttgaaagaatgaaagagacagataataaaatttccatggcaaatgtggtgtgaatctcaccattgtgttgcctcaatgtatattcttatatgttgattcttgtgtttgcacatgtagatctagaaagggaagctatgtgttaatgatctgtggattcttggtgcttgtaacataaactggaagatatagaaacccaaattgctatgcttatttgagagttgctaaatagcgtgttaaaaatgggattatggtagagtttagggtgatttaaaatgaaccatttgagaacggatggttgatttttttaagactgtacatctttggttttgagaaaatataatcaaactttgttatggcaaatattgtgagaatcttacacctgtgttagcacaacatatattcttatattttgatttttgtgcgtttgtgtgcatgcctacttgtttgcatgtctagaaattagaaacagaagttgtgttttaatgatttggttattttattgtatgtaaggtgaggtaaaagaaataaaggtcaagaatgtgtgaagtctgtcttagtgattgcttgtaaattaaacaggaatccacgatttcaagcttgaaagagtggttggc

SEQ ID NO: 57139 - DNA, 505 bp, Populus trichocarpa
  Intron number 1 from transcript POPTR_0004s12760.1 (locus POPTR_0004s12760) derived from phytozome v7.0 (chr-ID scaf fold_4; pos 12006614 to 12007118 reverse strand)
atcagctaaagcagaaaaaggaagacgatccaaaggtgataattacacaaataatataaagtcactttttttttgtcggattttatctgattagaaattaagtttacttcgagtaaaatgttgtaatggactgttaattttgtgatttaactcacttaattgagttgctgccttttaattttaatgaattttgattaagttagttaattattcactcacttaatttagttgctactttttatttcttagtatttttttagattaagttagttaattaacttgaaaagcttaattttgcactttatttagttagttcaaatttaaggacagtatctaggcgggcacgcgaatgctgaagttatgcaatgtattagggtatttggaatatgtaattgatgtgagaattttctcttcttttcgttttttctcgttccttttaagtttgtaatctctgggttatgctttattaggtacttcgtaatattgctattgcggagtatagtag

SEQ ID NO: 57140 - DNA, 568 bp, Populus trichocarpa
  Intron number 2 from transcript POPTR_0004s06825.1 (locus POPTR_0004s06825) derived from phytozome v7.0 (chr-ID scaf fold_4; pos 5453899 to 5454466 reverse strand)
aactctttaaagagttcaaggtaagaaccaacactaattgccatatttttttttttgctctgtttataatattcttgtaaattatttgtgtttgggttcaaaaggaaatatattcgctttttcattgagactactttattgatgtgttggggtattgatttttgaacctgtatgtgaaatggaaaatcttgtcaggattcacttgctttatattcctttttctcttatctgtggggtgtttagtttatgtagtttgctgaatcaataagatatggattaaggagttgcaatattcctctcatttttttatttacggataaccataaatatgcatctcttctccaacacaggtattgtagcagagattgatttgtgttctaatttgttcttatttcttatttactttttaatatcatttaatttctttagttattacataatcttgcaaattctgaacaagataacacaatatgattaatcattttcatactttgaaattttgtgcactctttttacttggtgtatatatatattatttggtagaaaaaatattccttccctgaggaag

SEQ ID NO: 57141 - DNA, 420 bp, Populus trichocarpa
  Intron number 1 from transcript POPTR_0004s22680.1 (locus POPTR_0004s22680) derived from phytozome v7.0 (chr-ID scaf fold_4; pos 21543303 to 21543722 reverse strand)
tcctcacagacttgcccctttatctgtaagtttgcaaatctatgctctttttttcccacttagtacaattagagttgttctccgtttgcgtagttcgcgatatggagaatttggaagctaaactatgattaggtcccttccgtggtttattggaatcggaaaagtatcttacttgagagagatacttggatcaggttccatttccttgagattgattcatgtttcaaagctaaccgtgccttcttgtttgcgcaaaatgctaaatttgagtgctaagattgtttgattgggttctacttgagttagaatcttagagataaatatttgaaagttgtgtttgctttttttgtttttctatgttgtcttcggaactaaaactgaaaagtatgttcactttgatctggtaggaaggaaggatcg

SEQ ID NO: 57142 - DNA, 878 bp, Populus trichocarpa
  Intron number 1 from transcript POPTR_0009s09000.1 (locus POPTR_0009s09000) derived from phytozome v7.0 (chr-ID scaf fold_9; pos 8092274 to 8093151 reverse strand)
cgttgatttctgcgtctccagttctcctccttggcgtaattactctttttctcagtttgtttgcgtcttaagtatgaatgcatttggggaattctgttgcctctgtgtttcttcttcttcttcttctttgtcgtccctcttctgtttcttgctcctcgttacacgttctcttgcatcgcacgatgaaaattctaaacatttgttcttgttgctttgttttgcgagttcctattgatgaacttcccgcgcttttttgctcttctttatctgccacccatttctgtttactggatttttcttatttgtgagattttgaaatttgaaaaataacagtttccctgccattttctattctcgagctctgcatttgcttatgttttgttaaattttacttttacttttattttttcaaatccgaatgttgttgtattgacgatcaaagacctaatgcgttactattatctctgtgtttcaaaagagttgcttggttactgagaaaagcagagggagaaaacgaagacgaacttttgaatcatctattttttttcttaaatggaattaggatataaggtattgtttacctaaaatgaattgtgactgtattcgtggaactttcggtgataaatgagagtctcgttaatacttaaattcattgttctccagtttcttttaagtaaccgaaacaaaatttcaccccgaaaaggaaaaaaaaagggacaaataattcactaaatatatatttatttgtaatcttagtgcttgctaacgatgatggtgcaattcaaactatattctataacagaaaatcaatttgattttaagaacttgttctgctggatgcagctgaagcaatactactgggatttcagcattatctg

SEQ ID NO: 57143 - DNA, 522 bp, Populus trichocarpa
  Intron number 3 from transcript POPTR_0001s35350.1 (locus POPTR_0001s35350) derived from phytozome v7.0 (chr-ID scaf fold_1; pos 33715645 to 33716166)
gtacacatgtgcgcgcgtgtgtttcttcataaaatcaaatttcatttatcggaacaaaaggtgtgccgacccaaaatgttatggctgtatgcagctttgacatgcaattcatatttgtttgagcgggctgggaaggtagtgcatacaatacacgaatttttctcgaggcaatttataattcacgtataaaattcctgaagccaccaaaaggtagtaccgtgtgtgtgtgtgtgttaatgttaattttcttttcgcaattttcatttttatctcattatatgtttttacaggaaatactaccgggttatttcaggatatcataatgaatatggatatttaggtccatatagaggttaaagatattatttgcaagaatttcggaggcgaggacaaccacaaactcgtgaagaaattttcaactgtatccactcttcattatgttgtgtgatagaacgtacatttgaactttggaaaaaaaaaatggtgaattttacagaatgtcatagtttaattacaaggcgc

SEQ ID NO: 57144 - DNA, 463 bp, Populus trichocarpa
  Intron number 1 from transcript POPTR_0004s22730.1 (locus POPTR_0004s22730) derived from phytozome v7.0 (chr-ID scaf fold_4; pos 21588956 to 21589418)
ttgtaacacaattcgctcatcgaaaccgcattcaggttagctgctattaaatgttgatattttcaatatgcatgaatcttgtttgttcattatttgattgcatactatccattaatgtaaacaataattgatctctaatccgtaatggtgctgaatgcactgggatgatagagatttgaggtttaagtatttaatggttccacataaggattgatcgtaggagattctgggttttgaagagttttttaacagaggctgattgaatgcttgcatttatgatttattttttctccacttttgataagtttttcttggtaaagtcaattacttatggtaaatatatggacatgtaatcattgatatgtctgcttatgagttatttgagacattttcttgtgtttctaatatggttgctgtgaactttttgtcttgcagtcattgcttcgaggtaggttcttgcgaa

SEQ ID NO: 57145 - DNA, 437 bp, Populus trichocarpa
  Intron number 2 from transcript POPTR_0015s11420.1 (locus POPTR_0015s11420) derived from phytozome v7.0 (chr-ID scaf fold_15; pos 11987219 to 11987655)
aatatcgacttgttaatgtaggagaagaaactacagacaattttccacagacagagaattcagcccaggcaagttattaattgttacatattttatgcagcactactgtctgcattaataggttttgctgctcaggccaacaaaaaaaattcatattttatagtttctgagttaatattgtcgatcacttttctttgtttttactgatttttcttttttttgataatagtcggggtgttttaattatccaaagacctgtctatcattgagtcgtcaatggtatcctggttacaaaacagttattaaaaatacaagtaaaaacgcattaatctgcaaagttaaaggatgaaaagagttgaagtgtaaaaaagagttgtttttactgaataacattaactctgatgttctctgcagaattcttcttatcaactggataa

SEQ ID NO: 57146 - DNA, 574 bp, Populus trichocarpa
  Intron number 1 from transcript POPTR_0011s03030.1 (locus POPTR_0011s03030) derived from phytozome v7.0 (chr-ID scaf fold_11; pos 3005848 to 3006421 reverse strand)
ccagagcagcctgtgatctacccttttggatcctggtaagtctttctttaaatcctaatatctaactgttgaattgtgatttcggattttgttttatttatctttttttgcgctagactcatcggactttagggttattttttggatatcgatatctgggtttttttgtttgattgcttttcttattcgatttcaaattctggaaaccccaatcttgttctctgttggttttcgtgtttatactttgcttttgtgaattaagttaatggtaaaataactgttgttgtgatttaatgcaatgcgaagaacattaaaactttgtgtgtgtgatgcgagtttgaattgaatatatatataaatatttttttctgtttgatatttgacttgagggtttttcgtggctcgcctgcgttgctggtttctttcatttaaatctacattttttttttccttttctgggccttccgtatttgttttgaaacttatgcagggttgtatacttttcccttgcttatgcatgttggttttgttgacgttagggcactgcttggcacagtgctgctggtcatataat

SEQ ID NO: 57147 - DNA, 725 bp, Populus trichocarpa
  Intron number 1 from transcript POPTR_0011s07760.1 (locus POPTR_0011s07760) derived from phytozome v7.0 (chr-ID scaf fold_11; pos 8603702 to 8604426)
attgaaggtgtctacaacaaggtaacgactctttaactttgcttgtagatatttattaaagaatcgactctttaaccttgcttgtagatatttattaaagaatgatttaaattatattttgaaatattatttaaaaaatttaaattttttaacagccttaatgccaccacgctattgccagtagacgttgttaaagattaaaaaaaaaaaaaaatgagaagatttaattatggtgatgatataaaaaaaaagttgttcctatgttattctaatattttaattggaattgtttctgatttattattatatattatagatagaatataaatatcatctatcaactgtaatttgccgactataaattcttatccgaatagaagagatgacacagtcaaaattggctgcaactcaaagccaagaataaattcttatccgaatagaagagaagaaacagtcaaaattggctgcaactcaaagccaagaataaattcatatagcattgtttctgagaagaaattgaaatttctccaccatacatttctatgagacacctcaggcttttctcatagtttaactagacaaactctgactagtccatcgaggcccatctgaggagttgtatgattttgccattattttgctcctgtctcgttctatcagctgttttttcaaaattatttttgtgctgagtgccattgtttgacttttgtgccacttgttaatcg

SEQ ID NO: 57148 - DNA, 690 bp, Populus trichocarpa
  Intron number 2 from transcript POPTR_0004s19340.1 (locus POPTR_0004s19340) derived from phytozome v7.0 (chr-ID scaf fold_4; pos 19199725 to 19200414 reverse strand)
atactctagctaagcatttattccattgtatgtgtttgtgtgcttttcttgaatctcttatctggtttgaccacttctgttccattattgattcttgttatagtcttgttgtgttgaacttgaagtataattatgattggtagtttgattggcattatttatttatgattgtttgactgatggcgaggaattgttgatttctctccttcttgttacttttctagtttgttcaaatcttgaagtattgttcaaggctctggtaatgtatccaataattccaattttgctcctagtcaatgctttattgaattaaaatgttctccatatgttatgatagcgctgggtttggtccttctctttttatcgcaggattgatttacttgatatagggttcatgcctctatggtgcacagtaaattcaattgcattgttgtagttgtttatgctttatttcaaatcatcaataagtttattttttgaatgaataaagaattttattccattaaaaacaaagaaagatttcaattggagttaaagtatttacaaaagcaacccaacccaactctaaaaacaaaaacatacttaatgcctagtgtgatgcatcttttttagatagttttctgtgctgacatatcatgggctaaacttgattcttcttccattcttttcaggggaaaatcaaaccattga

SEQ ID NO: 57149 - DNA, 430 bp, Populus trichocarpa
  Intron number 2 from transcript POPTR_0012s15010.1 (locus POPTR_0012s15010) derived from phytozome v7.0 (chr-ID scaf fold_12; pos 14693037 to 14693466 reverse strand)
aatcttctgtaagtaaactttttttttttttttcggttttgttatattctttggttgaaattcaagaaacccttttgtttttttgcgttttttattgtgttttctttgtgaacttttcgggctggccctgcgatcttttagtaataacctaagtatagagacatgggcttgtagcactctaattgaagaagctgatgattcttgtggaaaagcaacgtggattctagtcaatgaggtgttggtctagtagttaacaggtttatattgagattcttaggagtcatttgagtttagtgacatcggctggtagaaatctgttaaaattcggtgtaaatttgtaatttttattagtaatttgagcttagtgatttgggctcttgccaatgaggcgttactatactagttaatgactctaagattgagactttgg

SEQ ID NO: 57150 - DNA, 891 bp, Populus trichocarpa
  Intron number 2 from transcript POPTR_0009s06440.1 (locus POPTR_0009s06440) derived from phytozome v7.0 (chr-ID scaf fold_9; pos 6215546 to 6216436)
ctaagaaggtcgagtctggtgataccgtaagatttattttttttcctggttgttgtgcatgaatttggtctttaatgtgaggatgtttctggttagttaaggttttggattttttattttcttgggaatggtgtgaattgtgattgtgtaggataatcccatgattggccactcgaatttgtattatttaaattttggtttattggatacctgtgttgaatttgggattcaggggtgttctggatagctatttttttgtatttgagctgatttttggcgtctgcagttgcgaatttgaacttttttttttttgtgattcggatgatgaaatgattatcttctcccaaatgctatctatataattcaattaatagaatagaagtagttaatttgactgaaatgtttagtttggattttgaattgttcttgaggatttggagttgggtttttgagtttgacctaatcttggatttgtttagacattaaaaagcatggaagtctgagacagttgaaactcaaaacaatcaccagcatccgctcattttctgaacgctgattactcgtaactgtttttcattctaatatttttgttattgatttgcgttagcttatttataatcctgaggagattgaaaagaaatttatgaattcttatagcttatttattatatttttgttatcgggcagcatggtattggaacccttttattgcactaaaactttctcatctagatgcactggcatgtttccttaggcacaaatccacagctgatgagctatggaaatcgagtaaaatgacttttggctgctattgtgatgacatttgctaaataccaccaccatttgtttaattcaggttgcctcagaagatactccaggagaagatacagg

SEQ ID NO: 57151 - DNA, 655 bp, Populus trichocarpa
  Intron number 1 from transcript POPTR_0011s04660.1 (locus POPTR_0011s04660) derived from phytozome v7.0 (chr-ID scaf fold_11; pos 4649702 to 4650356 reverse strand)
gttcgagcgacaagagtatcaaggttggtgaaaagatctttaatagccgcattaattgcagaaccttgggaaaatgttggtgggcaatcagaaattaaaaaaaaaaaaaaagtcttgatcagggaccacaacgaaggactgtgatggggccaaaagaattcaccttttgatagataatccttaaacaataaagggggaaaaagaaagttgaattttgaaaaataacagacaaccaattagagcgaccatgtcagcggacttacaaaaaaaaaaatttataataaacgtgtttgaaggtttatgcacgtaaacctagagagtcaaataattcaaacctctttacttccttttatttgttttttgctgtgtcttgcctaatcaaatgcctggtattttctcctgatcggtccaaatttagaattctctaccttgaaatcaaactagctagcaataaaattcagtctttctatcaatttcactttgtaatctataaatactaacgcgtcgaacccagttgaaggacttataaaaatcacaaataatacgaccaagttctttacattgttgtccacagatttttgttattattgtttgcccatcttcttcatcaagccatgcagcagcgttcagcatcgacagccaagaacttggttcg

SEQ ID NO: 57152 - DNA, 142 bp, Populus trichocarpa
  Intron number 1 from transcript POPTR_0214s00230.1 (locus POPTR_0214s00230) derived from phytozome v7.0 (chr-ID scaf fold_214; pos 39209 to 39350)
gattgggcaagcttcatataaaaaaaaaagaaaaagtttgttttttaattatttttttcttttggttttttgtttattataagagttttagttatccattaacatcttctttgactcattttttatttcttaggaagtataa

SEQ ID NO: 57153 - DNA, 897 bp, Populus trichocarpa
  Intron number 1 from transcript POPTR_0001s17800.1 (locus POPTR_0001s17800) derived from phytozome v7.0 (chr-ID scaf fold_1; pos 14679509 to 14680405 reverse strand)
aagagagggtgatttttctacagttatggatgttattagggcgaagaagactggaagttaataaattttcagctgttggttttgttttctctgtttaggtttctaagggtgcaggggagagtactgcaggtgttgaattagtaacggcagcaaaattaaacggttgagattttatcatatcaaaagtaatcaacgatctatataattttggttttatattaatatttaaataattattttttcaattagcaacagataatccattgcaaactttacgttgcctttagcaataaattttccattgctaaagtctgttgctaatattaaaaaaataatatatgtgtaatccgttgcaaatctgttactgaatttagcaacggaattatccgttgttaaattctgatgctaatagcccatgtttttaatagtgtgtttacccttgaaaacttggagtgctagcataaataatacaatcatgaataccttgcctaggctgctggatgcaatggtcagaactgttgcgatgacaacttgattgtgtcagttggcctctttaagtcatatccttcatgtcttgcttttgggctttggaaacatgggctaagttaactgaatatggaacaatcaaatcccgttcactgcctttgtgcggggtattcttcagtgtggccttggttttgcagttaaattattggaacaccacgctcatatggttttcagtgtggcttgcatgtcatttcacaggagctgtgcctcatgcatttgtcttgtggatgtgtctatgtcagttgtattttctttagttgattgaatgccatctcatacttgtaaacctctttgaattattattttttgttgttatattcactggtgtggattatgggttttcaaatgcag

SEQ ID NO: 57154 - DNA, 650 bp, Populus trichocarpa
  Intron number 3 from transcript POPTR_0004s11470.1 (locus POPTR_0004s11470) derived from phytozome v7.0 (chr-ID scaf fold_4; pos 10199734 to 10200383 reverse strand)
ccttggtatgtcactccccatatgttgctcacaaaattatcatgctcttcattgtttgttttcgggtggctggtttttccttactgattaaattttcttgtattgaagaagaattggtggtaattctcgtaagttgagacatccctagaaaatctctgtttagcagtttaactcgtcaatgtggctactgtgtaatattttttgtgttcgtattttgttgcttgaaatgcagaaaggatatatattgcgccttggttttcactttgatttccccttttgttatgttagattcatgcaggaataatattttcatatatgttgtctggagtattagtttgatatggatgggctgtcttccgttgtggtgcgtgccttgcttctgcaaccagacaccacaataatctatatattggtgcggtgtcaaacctcaaaactgatcttgctgttgcttgttagaaatgacgatttaggtgtctattgtgaggaatgaatagcgtgtgaactagaatttacatgctttgtggatatttctctttaaatctggaatacagttctgagtatcatcattttcctttgaaagtgctgagaatatttgacaattatggtttgtgcaactggaataggcctcaggagatcaaagatcaagattg

SEQ ID NO: 57155 - DNA, 1013 bp, Populus trichocarpa
  Intron number 1 from transcript POPTR_0009s01380.1 (locus POPTR_0009s01380) derived from phytozome v7.0 (chr-ID scaf fold_9; pos 1635081 to 1636093 reverse strand)
taaactcctacaatcctattcacattcagatccaggtatgtctttttacattactctcctcaacttcattttatgttactttcttatctatccattgaagtttttatgcttaacatgggctctacttgcttactgaggagggaaagtacaagaaaatctcaagttgctagctacttttcttttcgtgggggcactccaggcagttgttaggttacgttgagctgcaaagttttggtcttttgcattttcttggcaacaaaacagagtactagtactaggcagagcagttttctaagtttcagtgaattctatttgataagttactgaaaaaagagtttgtataaatgggcttgctttattttttctctttttgtatgattttttattgtatcaaaatgatttcttttgtttagtttagcatttggggttttggtttctcttcattatatattttttttcattttgctgtcattttcttttctatgatgtaagctctataaaagagctgattctttttgaccatctgtttagttgctgagaaagaaaggaagaaagaaaaatgaggaaatgaaaaagaaaattgaagatgttgttttcttgattttttttcttttcttgtttcattcattttttaaatttttttataaggctagttacgaatgtaatgtgataatgggatctttatactgttgagaagtgctgccttgctgtttatcattatactacattttatttaagaaaaaaaaagagaaacttacaagcaatatgggaatggggtttctatttttttttggtttttgtttcccttcaaaagtaccttagaactctattcttttctcacttgattgtgggcctttgatttaacaattccaaaatgtttaaatcttatttacttttcttttctactgtgtctcctatacttgcctgtcaatgttcagtgcataaccataacatgcagggatatgaatgcacacttttactaattgatgtttgaaactttgtatttcttgaag

SEQ ID NO: 57156 - DNA, 438 bp, Populus trichocarpa
  Intron number 1 from transcript POPTR_0009s16470.1 (locus POPTR_0009s16470) derived from phytozome v7.0 (chr-ID scaf fold_9; pos 12498084 to 12498521 reverse strand)
gcacctccagtctgcctctctctcctttttaaattagagaaaaagagtaaatgcgcgtgcttggtttttgtttttggttaatgggttttctctattgaatttgttttttgatgggttctgtcttaactgcattatgattttggccttgctgagttcatgtatgtttactatatttgttattttttgttctttgatgtttaatcttcgaaaattaactgcaaatgttgttgttttcaatttcctgttgaaattatttagtttcaagcttgaaattaggtgatgaatgcattcctgagacttcagtgagctaatttattgtgtttttgttgcttcatttctgagaagtttgaatttttaacttcccaagttagataatcatggcaaattttactattattgaagtttgcattgtgctctaaataggttctacagctgtga

SEQ ID NO: 57157 - DNA, 581 bp, Populus trichocarpa
  Intron number 1 from transcript POPTR_0001s21100.1 (locus POPTR_0001s21100) derived from phytozome v7.0 (chr-ID scaf fold_1; pos 19448843 to 19449423 reverse strand)
ctttgttgtgtaaagaattcggatcggtaggtttttcctcagctattcataaaggaacttttttgattatttgattgctattttctttcttcgatttttagttcctttgatttttttgttgtttatggtttctggatattgctatagttctgcttgttttggtaaataaaattgggaatttacatgggttttgagttttggatttggccgtatttcgagattatttttctttcttgatgttagaaatagtgtttttatttgcttcacggttttgaaatatagggtagaaattaaaactgaggtaaatgggtttaagggtctagatgttgaaatcaatttttagtgttttcttgggtagctttgtaaatgatgggagggataccactatttcattggattttaaatggggtattttcaagatatcttggtactttctgaatttcttaagggatttttgtctacttgctgaaataaggtgatgaagagtaacggcattgagtttgcatgctaataaaaaacgatcagttaatatgagtttgtgattgattttatagtaaagagcgaggaaagaagcagctgac

SEQ ID NO: 57158 - DNA, 777 bp, Populus trichocarpa
  Intron number 1 from transcript POPTR_0004s09840.1 (locus POPTR_0004s09840) derived from phytozome v7.0 (chr-ID scaf fold_4; pos 8358105 to 8358881 reverse strand)
ctgttagcttgttgggtcaggtctgtgtctttcctttctctctcccacaaatgtttgatttttgaattcttggtttttcaattattgttataatttctgtattgaatgtgccattttcttgaaaatttgataccataagttagcgtataaaagatatgtatatcctatatggaagaaaggctgtattttggtggagctttattcttattgctgtttctctctatctttttttttttattatttgctttggttgactgttgagaaatgtgtgatgtgggcaaaaaaaaaagatatgtaaatcctttcctcgttatttggatcaattagtataaaatttacacgattgattagtacaaaatcgcgcgtttttttgacaatttctgtccggtttaagtgggttttaacaaaaagagtttggaagatttggaaggaaaggcatttcttcctatgacttgcaagtaaccaagcaatgatcttacattcaaacatcaccaaatttcaaaactataagttcgttgtctcatacttttatgtctggcttgtaatctttttattgtttcattcttcttcttttgagatatagcaattcagtcatttattgcttaatgccatccctgctgtatgagctagaagaaccgttttcctatcataggcattcgaaggtgttaattatataagggcattgagatgcagtggaacaaatacctggaattattatgattgccattatagcactgattaggcatatgttgcctatgtttatgcagggtgaaagtg

SEQ ID NO: 57159 - DNA, 821 bp, Populus trichocarpa
  Intron number 2 from transcript POPTR_0012s13330.1 (locus POPTR_0012s13330) derived from phytozome v7.0 (chr-ID scaf fold_12; pos 13530659 to 13531479)
ttgaagagcttgtttacaagaacattcgatttgaggtgctttctcgtaacttaccttgcatttagtttgattgatcatagttttttttgctataatataagggattgtgtgttgtttgataagtggggtgttttagactattggttgtggagtttctgggctttgctttttggatttgatatttgatggcaagtacaagtaggaaccggataatgtgtgtttggaattaaactttgatgctggggagtttttgtattcctaatttactgagtgtttttccatttggaatgatggttttattttttagtagttatgctgctcataagggatctgtcaagttcaaatctatcaacggatgtgtattgtagttaggaggtcctgtaagttgttgccttggtcttttcttgaatttctagctctgttgtattgatcgtgcacgttttatgactttgtgttatcttaaacgattcttatcaaataattattttgagtactggctttcatactatgtaacataaggaaatgcagttatcaaatgttattcagtcatatcgtgttaattattggaccatacagcggagccatcaaatcttcttaagagtgttatttatacaatatgcttgcaagaattagtttttgcttaatcccatgagaatttggaaactttagtttaatacaattttctgtttgaattttttagcaaaagaagcttgcttgatcatgcaaatcttctgtgtgtgaaattatgctagaaacttaaccatgtttgtctattaatgttatcaggtctgggatcttggtgggcaagatagactcaggac

SEQ ID NO: 57160 - DNA, 465 bp, Populus trichocarpa
  Intron number 2 from transcript POPTR_0012s04330.1 (locus POPTR_0012s04330) derived from phytozome v7.0 (chr-ID scaf fold_12; pos 3555135 to 3555599)
tggttcttggatttgactctgttgagccatatttggtaattctagtcacttgattttctgtcatctgttgtgatctaatgcaaagtttggttctttcttgtattcatttatgatttgactggatgttttctgcattccatgtatgtttttttgatagttcatcatctaaattttgtattctggaattattattgttcctgtcaactttgcttgcaattcatcaccaaaaaacttttttttgtttgcaaacttatctgattttttttatttgtcatatatgtcattggtgtgtcagtttgttgctcgtgttgtcagtttggaggaatgatagtattaataacctttactaattttcgcgtgattagttttcttttcctgtgtttatatttggtgcctgaatccttttctgggtaaatttatgcttgatcagaatcgtgttgcaccttattttggtgccattgtggg

SEQ ID NO: 57161 - DNA, 950 bp, Populus trichocarpa
  Intron number 3 from transcript POPTR_0012s04330.1 (locus POPTR_0012s04330) derived from phytozome v7.0 (chr-ID scaf fold_12; pos 3555660 to 3556609)
cttacccgtcaacaggcctccaaacagtcttcgtatgcttgtaattccaaattattgtgaactttgatgctattctgatcagccatgtctgccaatcagtcatttgatttgtaattttattagattagattatctagtcctgtataccattttcttatttgatttggaaaattttattaacatgacaaaatcatttttgttcatggaagttttatttgtaacatccatcagtaaatgttacactagaaacactgactgaatttgtatgtgaatggaattttagtagacataagttttatgcaaaaatatgataccggcaccacagttcttatatctgtacagtatttggtggaaagaaaacatatttggctgtatgagacgaatggtgtaatgggataactaataaccactgttagacacgatgcataagatttgtgatttcggattttcgtcatggttgtctcggtggctagtcttccccttgttctctctctaatctatgaatgaaactgttctaggtcaattgcactagttgatgttttctagatgctacaaccaacgaaataaatgaatacttctaagattaagtgtacaaaagaattccgtgttttctttgtttcatcaactaagaggtctcagcatctctctctttttctttctggatggaacatttgagtttaagtttgttctctatatctccttctgattgcattgcttttcttaagggtcaggaaatctgcatatagaaaaaattacatcagccatacaacttcctcttcatatggattttaatgtctaatagctatggtgggatcgtttcttaagctttgtgttatttactgtttgattgtctggtatctataaaatgcccatttaaattgtcgtcttgcgtaaaaaatttctcctacattctctgctttaggtgggaataaaggttttgatatagttgt

SEQ ID NO: 57162 - DNA, 528 bp, Populus trichocarpa
  Intron number 2 from transcript POPTR_0012s09520.1 (locus POPTR_0012s09520) derived from phytozome v7.0 (chr-ID scaf fold_12; pos 10516517 to 10517044)
tgttctgatcttggtgggttctttctcaaggtaatgttcattcttataactttactgtgtacggttctttgatcttgagagatttttgaagttgaatcatgtactgaaaggagtctaattccattgagttttcaaccttttgctttctttctatgcaattatcttttcaattgtctaatcatcatgtttcttcttgttttatattagtttaaagattttggttatttttggcctaggggtctgaagggtgttcgtttttctgctttagaaattgtattaggaactgtttgattcctcatcttttcaatccgttatgttcctcttcatcttttccttgttagtaagctttgtctttgccccccccccttttttttttccttttgctgtccattttgattattggttggtaataatgtttatgctgttttggtttgagagatagctacattttactatatactttttgtaattaattttactggatttaaattaggttgcccaaatcattgggaagcctgacctggctcc

SEQ ID NO: 57163 - DNA, 198 bp, Populus trichocarpa
  Intron number 4 from transcript POPTR_0011s05160.1 (locus POPTR_0011s05160) derived from phytozome v7.0 (chr-ID scaf fold_11; pos 5060841 to 5061038)
cttttgcgaaggcactctcaaagagctcaaaagaggtaggtagagaagaaagggggattaaaacgaagataaaatttttgctttattgttttttctttaagatttttgaatgggtaattaatgatgagcatatgggtgtggttatgtgattggatgtctgaagtgtgaaaattggttgaagagtgagactgccaagtt

SEQ ID NO: 57164 - DNA, 537 bp, Populus trichocarpa
  Intron number 2 from transcript POPTR_0011s01030.1 (locus POPTR_0011s01030) derived from phytozome v7.0 (chr-ID scaf fold_11; pos 538641 to 539177)
catcctaagcgctgctatcatagggcaaaactttggtaacaatttctctctatattgaattttcaaatttaaaactatgcatatataagatattgtataatttttgtcttcctaatttcatgaatgcagaaacagctttactgttgctagatctggatcaatcgctcgccagcttgaaggacagaaatcaaatatctactcttcaacttctagccgaaatgccagctgcttttgagagtgaatttcccatgggcgtatttgaacgactcatctactattgtatgcctactccaaccacattattagaccttacaatattgcctatatattcttgtttgaataccatggacatacacatacacatatatgtatataatttgaactctaaattatgttgcaggccttcctctgctcgtttacctaatgtaaattaggctattatcttcgtagcttttttcttaataaaacttttgattattataaaaaaaaaataatgttgcaggccttcctgttccacgtcaccgcgaggtaaaatca

SEQ ID NO: 57165 - DNA, 541 bp, Populus trichocarpa
  Intron number 1 from transcript POPTR_0009s08850.1 (locus POPTR_0009s08850) derived from phytozome v7.0 (chr-ID scaf fold_9; pos 7993990 to 7994530 reverse strand)
gcatccaggtacctctctccccttctctctcaccagatctgtggattcggtttcatttcgtgtagatctgatgctttatgatcgtatgcatttccgcttgtgtttaaatcttaagatttgtgtgtgttttatttggatctgtggattgttttttgagattgttcggtttttagttagatctgtgctttaccggtgtcgttttgataatttcaaattggattttcgattttttgttgagttttcctttgcttataacagatctgtgagtttttattgtcgttttgatcttatctgttaattattgttttcaaatgtgtttatatctttagattcaggtatacttcttaatatttattgatttttttagattttgcttagatccattaatgatgttcatttcagaatcttagttgttttttcttatcaaggaaaaataatttacttattattttgtatattcaagttttatggttattttgttttttaattttgtatatgaattactaataaatgttcttgtgttttttttttctgtagcctg

SEQ ID NO: 57166 - DNA, 595 bp, Populus trichocarpa
  Intron number 1 from transcript POPTR_0009s00590.1 (locus POPTR_0009s00590) derived from phytozome v7.0 (chr-ID scaf fold_9; pos 631204 to 631798)
tttggaactccttacctggtaagaatcaaggtttcgatcttcaaccagtcgaaaatttcaactccccctttttctaatggtagctggcctccccctctttgtttgttcaaaatttcttgtaaatctcttgctcacaagtgtttattctacctataaacccttaatcttggatgggttttttggaatttttggtgtttttctcttggtttggcaagaataaattcaaaaacttcctcattttctcttagtattaaattgaaaaattgggttaaaaaaacacagggcatggatggctattaggctctttttgctttgtgaaaaactatatggaatttaacttaaggaagttgaggaaatcatatttcaaattcagagtagtttggtatcttcattttcttttattattgttgaataaataacaattgagctgaatggttatatcaggttgcgttttctcgaggaagtgtttaaactttgttattcagtgtattgaaattttaaattattggtttcctttttcttttcttttttttattagaaagtggagttagagtaatgtgtagtttatttattttgtttggatatatgtaggtgg

SEQ ID NO: 57167 - DNA, 990 bp, Populus trichocarpa
  Intron number 1 from transcript POPTR_0004s07390.1 (locus POPTR_0004s07390) derived from phytozome v7.0 (chr-ID scaf fold_4; pos 6092438 to 6093427)
tcaacaaggttggaccttttcacaatcccaggtaatctaattctcaatcttcttgcaatttagattagtttaaggttattggttttgtggggtgtcttgaagtttgtgactttttgatgatttgagaaaatggggtttgtgggatttgggttagaattgaaattgtggagtacggttttggagaattttattttagcattaatggcctaatgggtttgatttcaaagaacccatgtttagtttttttgttcctgtttgtgctggtttctttaatttgtgtggacctgagctgtgaggaagtggatccgtgatttggtttcctgtaaaggaagatcaaagattggaacttgagcatgataaagaaatgggttggttactgattaagttgaaatctcatatagcttaatgttataataggagttgattaagtaggccatagtgtgctgaggagataatttgtttagtggcattttggaaatgaaattgtttgatttgaatagagaaaattgtaagcaagaagcagtagttaatataagagtgggtctagagatgtaggaggtgtttctttttctggtggctcttgtgagctagaaaagtttaggtgtttgagagattttaaattattttgtggatgcggaacttggatctacattctcagatcttttaagcaatgagaaaactaccactcttaagcaaaattatgctggaattatgtatattttctcttttctactataaatttcatgtgcgttttgtgtatgttgcttgggtttagaagtcttggctagtagcacattggattattttgaattagattggaaacttctttagtactcgagacattctaaatctttcgttgttatattgatattttaacagttccattatgcatcacaaggattttcttttcagtcatgattatctaatgttatttttttcttgttctttctgtcagtgaaacataccggtatttcgatctgcctttctgtt

SEQ ID NO: 57168 - DNA, 261 bp, Populus trichocarpa
  Intron number 1 from transcript POPTR_0012s08860.1 (locus POPTR_0012s08860) derived from phytozome v7.0 (chr-ID scaf fold_12; pos 9927814 to 9928074 reverse strand)
gtcgggtatgtgttgtgttccatttttttttattcatgtaatttgaaattttccatttaagtttctgccttttgtttttgtcgatcaaagttgaattagcccatattggaaatatatgatattgtttgccctgtctctttctcaggtcaatgttatggtgattttattagttgctttgttgttaatggggttcttttatttttcttcttctttgtctttcttgcagtataaagaggtattaggcaggggtgctttcaagaa

SEQ ID NO: 57169 - DNA, 662 bp, Populus trichocarpa
  Intron number 1 from transcript POPTR_0014s00290.1 (locus POPTR_0014s00290) derived from phytozome v7.0 (chr-ID scaf fold_14; pos 113838 to 114499)
aagaagaagaagaagaaagatctgcatttattaaggtctgttcttccttctccaccggttccccatttatctgcttgttttgatgatgcgttttatggtctttattattcttaattaagacttacattggttgactttgaaagaacaaatctttagcgtctatctcatcgtcaagaaattcatttgttgttaatggatagctagtaatcaatcctatatttagtgaaagttagacacttgtgattcaaaatgctgacctttttttttttttttttacaatgtttgcttataatatagcattctgtcttttatatgtatgtatgtatgtttcatgattagcgagggatgcacccaaaaactggatgagacatgggaagtttatattttttttctcaattcaatcttcttatgccttgagagcatctctgaatagactgtaggacataatctgctgaatttaactacaaagtttgattcctgctccaagaaacatacatgatcttcaaaacatggtaatgattagctcagtaattttcaaatcatattcatcatcttgatctatgtggtcttttaaggtgttttcaagcagtaatacactaccaattaagcagcaaaagttattgatgcttgtattagttaccttagtttctttatatttttag

SEQ ID NO: 57170 - DNA, 666 bp, Populus trichocarpa
  Intron number 2 from transcript POPTR_0004s11850.1 (locus POPTR_0004s11850) derived from phytozome v7.0 (chr-ID scaf fold_4; pos 10701184 to 10701849 reverse strand)
atgtattttttgagaaactgtgtgctaagtcttgatattggttatgactgtgcgaaagggaatagtgttatttagtgactggtcattcaagttgttattacaggaaaggagttaagagtgtggagaaactaaattagtggtgcaaagtgttttgtttttggatctgaaattttagtttgagatcattttttttaaaagtattattgtgctgcatttttggtgttctatgacatgcgcaacaatgtgattgttctagttgacatgaaccattcaaaattagtccgatgcatttaattgacctaattagattacttggtaagaggaaagaaagaaagtggttctgctgttcaggagggccttttggatcaccaatgttaatagaaagtgataaatagaggaggttgaagtacccttttggatataattgtttatgacaattgtttgtagcttctgtattttgtgtagattatcgaaatttgttctctggcaacttcttgttggcattttcaagcacattggctgtaagctccaatactgtttgttacataggatgcttttgaatctaaattctgtgtaacttcttctcagggaaatcttccaggcgctgagatgctttaagtgattgctgaggcatatcttcttttaattgttccttcctggctgaaa

SEQ ID NO: 57171 - DNA, 389 bp, Populus trichocarpa
  Intron number 1 from transcript POPTR_0004s11850.1 (locus POPTR_0004s11850) derived from phytozome v7.0 (chr-ID scaf fold_4; pos 10701864 to 10702252 reverse strand)
aaatcaaatcaagcgtgtttccagaaaattactaggtaccctttactctcatctctttcttcttcatttatgtcttcgatctctctctctctctattcatgttcttgtgaaaatagtgtgtgtgtgtgtgtgtgtattatgcgatttgctactcatttattaatttacgggctattaatttatgggttcttgatagattgacttgggtttatgtaagttttggttgttatttatagcagttttagtggaagaatttgtggggttatgcatggccatgagggtaaatttcacttttttgggtcaatttatagagttttcgcaatatctgattttggttttgtttttgagttttagggcgtcaaagggtcagtgattggagcttcggatag

SEQ ID NO: 57172 - DNA, 437 bp, Populus trichocarpa
  Intron number 2 from transcript POPTR_0012s09680.1 (locus POPTR_0012s09680) derived from phytozome v7.0 (chr-ID scaf fold_12; pos 10647296 to 10647732)
accgtaaaaaagaccctgtatgtgttgctcttcctttctttctttctctattacttttttgagctgaaacttgtaaatctatgccattttctatgttttgatttctgggtttttcttttctttttctttttttgcggagttaatgtgtcatagactcatagccatgcttgtagtacatgtgtggtggacatactgatgttgcatgcatttattaaacgtggtataaaaactgccttactagggtgtaattttgtttcttgcagttattggctgttgcaagaagaaatagagaggtaagttaattgtattacattctgaatgttgacgatggagtgcagtttagtttttggttcttgatggtagttctggtgtcacttgagcgttgcttagttatgctatagttaatgtaatacaggttgaagtagtcaacccgctta

SEQ ID NO: 57173 - DNA, 509 bp, Populus trichocarpa
  Intron number 1 from transcript POPTR_0014s14590.1 (locus POPTR_0014s14590) derived from phytozome v7.0 (chr-ID scaf fold_14; pos 10673884 to 10674392 reverse strand)
cactagttctaccaatactagggtaatttctagtatgcacctatatcattcttgattattattttatttaacaatatgttgcataataaattcttcttcttcttttttttgtttttttttttttggaggcaggcctgcaacaatgtttttttatccagcgtaagtaaaataacgtttaaagtaattttcactcgaaaagtttaaagtaattttcactcgaaaatacatgaaaataatgtttttttattttttaaaaaatatttttgatatcagcacatcaaaatatccaaaaacactaaaaataaattaatttcacgcgaaactttttttcaaaaaatcacgagtttagtaaccaagttccaaacagttaatttctctaaaaccccatcattattaatttctataaaaagaaaaggaagaaatgaaaagatcaaagaaacaatgttaatgttaattcccctcattaattaagaaggaaagaagttatcatgcattaacatattctagat

SEQ ID NO: 57174 - DNA, 729 bp, Populus trichocarpa
  Intron number 1 from transcript POPTR_0001s46640.1 (locus POPTR_0001s46640) derived from phytozome v7.0 (chr-ID scaf fold_1; pos 47011346 to 47012074)
cataataattttcaacagggtgaatcacatttactaataaatataattttgtcaaattgattaacaaggaggatatcctcgaattgaacataaactaactgttaaatcatattgtaaggaaaacatgaagaagaagaagctatgtacgtcgactgcatcaacttgctatttctaaattaatttgaattttcgttttcgtatacatttcaacttggaaagcaattacttggatccttcatttataaaaataattatctatttggcgatcaaaatcatcttgactgaatagaaaattctatccatgcgaactgatgacacttcgaagaatggtggcaataattgcactgtgatcacagggatataaataaagactaggtaaagggtcaataaatccttttactctaaaataaacaatgaaaaaataaattatttaaaggctaaaattatgatagcaatatgcactgccaaattaatcaaagaaagcaaccttaatacatcaagaaatatttaaaccataattcctattttgtcatacaagttggttgaaatgtcacatgattttcatttttcatcaacgggaatatgattttgatcagttctataaagccccttaaacctctagcttgtacagaaaaatcacaatagtcatgggatctctaagcatttcaaagttgcaattcttgcttcttcctttcttgacatttttatgggtagcttcagctgatcatc

SEQ ID NO: 57175 - DNA, 541 bp, Populus trichocarpa
  Intron number 1 from transcript POPTR_0015s10670.1 (locus POPTR_0015s10670) derived from phytozome v7.0 (chr-ID scaf fold_15; pos 11532735 to 11533275 reverse strand)
gcttcttgtcctccaccgtctcctcctccaacccagtcattctcttctcttatcaaataatgtttctctttacttttaattttactgtttggtgtttaattaattttaatattttagttgaaatagtttttttttttccacacacacacacactaattgtgatagggttttagggttattgactgtaggcctgcatctattagaatggtggaaatgtttgttgtaatttgatatttttacattgggtaattaacgttaacgaggatttagagattgtgattggtggtaatgaggagaaggaatcttgaatttttcgattgctgttgtagggtttagtggttgcatttttgttgagtaagatgttggtgtagagaaagtcatttatgtaattaaaggttattagggttggcttatttgctattagtgtctagtgttttatctttgtttacggcgtcttcgttttattcttatgtgaatgtatgtgttcttttctagtttgctgagagcttgtttgaatgctggtaattttatgcagggtggg

SEQ ID NO: 57176 - DNA, 521 bp, Populus trichocarpa
  Intron number 2 from transcript POPTR_0012s06840.1 (locus POPTR_0012s06840) derived from phytozome v7.0 (chr-ID scaf fold_12; pos 7323654 to 7324174)
aggtctcaagatcttaaactccaaaaacatcttaagtgagaaataaaacgaaccaaacaggagttaaaaagtctttgtcaatagttttacttatccattaaaaagtcaatctgtggtggtacctgttccaagactcacccaaaaccttctaaaccacttcataaacaattaaccaataaatacaaaaaatgttttcataccaaatctaaaccttactacaaaatctcccataaaaaccaacaaaaaattctcaattcaaacctagatctaacctcaaaatcattccctgttacaaaaatggctaaaaaggtcatacttttaatttttatcatgtaaataccgaactacatgaacttcaattagaagaagaagttattcatcatattcaatctcttttacttgaagtctttgaaactgaaacaaacccttaagacacttctaaagaacctctataaattgataagttggtaacaaattctgacttagaagattcttttgaccacatttccagacaaatcaat

SEQ ID NO: 57177 - DNA, 573 bp, Populus trichocarpa
  Intron number 1 from transcript POPTR_0001s22120.1 (locus POPTR_0001s22120) derived from phytozome v7.0 (chr-ID scaf fold_1; pos 20759526 to 20760098 reverse strand)
ttgaggtttctgatagagatctctttcactacgatgtacgtaaccctccctccctctctttcattacgtaaatgatcgtccaatatacgtattgttttgtgtatgtacatacgtaccttttgtgttgggtttcagtaccgtatatggattgttttgtgtttgtttaatagtattagctcctttatttttttttctactaataaagaacctgtttttaaaagcagttatttttttagcagtgaccctatagctgacttcgatttttttcttttctagattttttattatatttattgttttctctttggaatttctcgtttttttttccacgatgaaatggtttgtatacatattgttaattataattttcagtaggggtgtttttgccctttatttttgttttattttatttttttgtggataacatgtttcagcaataacaaaccttttagtttattttatgtaagtcattttctttgtggttaaaaaagttatttgacgttgagaattttgattgatggcctggtttttggattaggtggcaataactcctgaaattacatcgaagaaagt

SEQ ID NO: 57178 - DNA, 790 bp, Populus trichocarpa
  Intron number 2 from transcript POPTR_0004s22700.1 (locus POPTR_0004s22700) derived from phytozome v7.0 (chr-ID scaf fold_4; pos 21551227 to 21552016 reverse strand)
ggtcttaattttgagagagtaaagtaagctatattttactctccctgtttttcccttatgtccaaatctcttgttacataccctatttaagtgcttggaactttgttcgacatctgctcataatgttggtcttggagtgcttttaactcactctaatgtctgtgtgtgtatttgtgtgtcatagcctgatatgctttgtgcagttggtttctcatttcctttaatagttgttggtgttgcttctgttaacgccaaacactttcatttaaatcttgtgaaatatccacgtggaaaaacaataataaaaaatagtttattatggatataattccttaatttaccactcaggtttgtgatattgagaatttcagagtttagtttaattatggtatacgagctcgttgcatcaacaaagtggagtagtaaagaggaaagagctcattgagaattatatgactgaatgttgcctgagcagaaaaacgaagccagaagaaactatggggtgtttgttttttcggttgaaaccgtgtttcgtgattttttgaaatttgtttttcgcttgaagttaatttttttttgtatcgttttgatatcaaaaatgattttttttaaaaatatatattattttcatgcatttctgagtaaaaaacactttaaaattcaaccactaccacactccaaaacgctatctaaattggttaaacatcccattgttttttttctccttagttattttttccttctgttttctgcaggtattggttgtccgtcggtgctcagccctcagaac

SEQ ID NO: 57179 - DNA, 794 bp, Populus trichocarpa
  Intron number 1 from transcript POPTR_0004s22700.1 (locus POPTR_0004s22700) derived from phytozome v7.0 (chr-ID scaf fold_4; pos 21552034 to 21552827 reverse strand)
tcttgaagtccttggctactacaatccgcttcctggtctgttgtcccttcttccttaaactcaaatttccatgtttttttcattattttctgctatatttcttacattttgttgtcctttactgttagcttaagcacgagtagaaaaaatgtcttataaaaggttgtcttttgtttctttcatgtctatgtttatcgaagatagcagtgtttagtctaatatttgaaattgggagtaattattcagtatgattggagttgtactcctccctcgcatataataggtgtcacccatgactttttctcatggtgttcctatggtaatgccttttttataatcgagataaagtgaattagtgtattttgatttgttttatcaattattatgcgggggaggagtacaactcttgatatacctaatttaggtatcttgaaattactaagatattgtatgaaaaggaatattattacattccctaatattattttgttggatccaagagatgggaactgatttgttgggattaattagagcctgagatggtgtagggaaaagaaagggcagagctgaaaattgcttcttgaaagtcaaatgtcgaacactagttttaagcgaattcatttacgttttgtcatagtctttcgaagtttgaacagtcactcgactgatgattaacttttttttttgttcttgacatttttctttggtatatcaactgccagtcaaggcatattgatctgcgagtagctaactttatttgtttaaaaaaaacatactgttttttgcaggtcaag

SEQ ID NO: 57180 - DNA, 781 bp, Populus trichocarpa
  Intron number 1 from transcript POPTR_0011s04930.1 (locus POPTR_0011s04930) derived from phytozome v7.0 (chr-ID scaf fold_11; pos 4879589 to 4880369 reverse strand)
agataggacgaggaggttttggtactgtctacaaggtggtcagaaattttcagatggtttagctataacaatgatatcaaattaattagcttgttgattttgttgaaagtgacgaacttatactatcctttggaattcattcaataatgaaacacatagctttcttttctttgcaatgtgtttcctatctaaatttcatggtcttttttcattcattgttgtcataacttgcaacctcaaatcattgaatggagtagtaaaggaaaaagtcatggtctgtttcaaaacttatcgtggcaaaacatgaagcatgcaacaatctacaccgcttctttcctaatctattcaaattcttactatgcttgaagttatatacttatgttgccatcaaatacactatgatttttgtcaaccacgtaatgctcctccataattatcatgcaagtatgatggaaaactattctgctacttgagatattctgagattctcctattgatatctctcatgtgtttacttaagctcattttgctctaattttgttgaagagagcttaaaacaccaatctttaggactctctttgccagtttctttcctaaactaatatttaactcaattgtctcagttatcattcttgaatgacaagacatattatctatattttggtatcattgtatcgaagatgcgctcgtcattttgaccaatttacatttataaagacttattttctacttgaaattgttgctagggaaccctcaaaagtggaacacaagttgctgtgaa

SEQ ID NO: 57181 - DNA, 831 bp, Populus trichocarpa
  Intron number 1 from transcript POPTR_0015s04250.1 (locus POPTR_0015s04250) derived from phytozome v7.0 (chr-ID scaf fold_15; pos 4309351 to 4310181)
gtactaccggtactgctgctagtaccacgaagaaggtaatacatttctctgcttttgttgtttttttagttttagttttcggtgttttgtaaaataggttgtgctatatggatatccttttgctgattgttggattgaaaatgatgatttctgttaattgcttgtgttatttatacatttgctgagttggatgatttctgttaatggtttgttctctggttagtctctgtgcgcgcgcgctgcgagtgctaaatttgtatttgttgtgaaagttttgtattactagaaaattggtttgtctgcctgttctgttctgagaagttgtgattttcagatgtgttggaatcgttttgctagttgttttatgttggtttttgttaatagggttggatagctattatggcaggtaaatatgtcttttgtttgtggacactggaaatgttctagaatgaatattcttggcatccttatgacttgtattgtgcatgtttttaggcatggaaccattcagagagatttgtttcatttggaaaaccaattagttaatttgagatgcttaattctggtctagtcaaacatataatatagatttgttcttcctgctgattgatagattgttttctaaaagtacttatttgatactatgcttttgctgataatggtaagattttgcacctagaactgtgcaatacatttgagttttttatacctatagaatcacttgatggtaccatgaataagataatgatatatgtcttttttttgtggggacaagtatagagcaatcccaattcacataattttgctttgtgttttgtagatctattgcac

SEQ ID NO: 57182 - DNA, 570 bp, Populus trichocarpa
  Intron number 1 from transcript POPTR_0004s10610.1 (locus POPTR_0004s10610) derived from phytozome v7.0 (chr-ID scaf fold_4; pos 9141663 to 9142232)
tctcttcctccatcttctgtaagatttcaattttccttaattttagcccttttcgtttatcaatttaattttactatctttttccaattttttttgatccgttaattagttcatattagccagagagtaatttacttttgaaattagatacgggtcctgcagcatatgctagttttactgcttggaatgcaagcagaatccttcaaatacaagtgtaagcaagttgtgtcctgttggactccacctctcatggtgtacaatattgaccgtaagaatttggaaatacatgcatcacagaaaatgacagcaagagcatagccagattagttgaatattcttcttgagaggtttcctctcagaaattgaacacactagctacaagagcacatctttccttcggttttatggtccgggtatcctcgggctagctttcgtgtatcctaccaggtttcttttgtctttctttgatgttgtgagaaagaaaacaacccagatgttgaatgctaattttattatttttgtgtacttacatcaggtgagcagtgtggtggtaaagatcacagcaatttg

SEQ ID NO: 57183 - DNA, 357 bp, Populus trichocarpa
  Intron number 1 from transcript POPTR_0014s10110.1 (locus POPTR_0014s10110) derived from phytozome v7.0 (chr-ID scaf fold_14; pos 7580723 to 7581079)
tcattaaaaaagtttcatctacttcctttcatggctttcagcccatatttaattttatagccgccttgttagctttaatttgcctagcgttaaattgatttgaaggtctcattgaaattgctggtcaaatgattaacattaagtgcatttcttttttcttgctcacccctgttccgataatttaacaaaattatttatcttcttcgaaatgccaccattttagactctacaaaaattagtgattctatttgtctttcttttgcttatgctataacataatcctggtctttttttgtagttcaaagtcaaactaaatgttagtttttctgtagatacaaactaaattttcgacgtaag

SEQ ID NO: 57184 - DNA, 625 bp, Populus trichocarpa
  Intron number 1 from transcript POPTR_0001s04240.1 (locus POPTR_0001s04240) derived from phytozome v7.0 (chr-ID scaf fold_1; pos 3349645 to 3350269)
ctcattctccgcctccatcgactcctaggcaataggtaattacatatactatatatcccacacaggaattaagacaaatacaaatatttgtatcggttaattttgtttttagtctttttttaatacaatctttttctgggtttgtcttaaattccttttttctgaattgggtctctttcttttagggttttgtttttttggtttagttagtatagctagctagttttagggtttcactgtatatatgttgtggattgctcgtgaaagagatttccttcactttttttttgttcttattagagtttggtcaattaacattcgagctggttttgatccatgtataatttacgtgagctctctcttcaattattttatagctagtttagctcgaaacctgcatgaatctggttttcaatgaatcatgtgcttgaatcttgtaaacgatctgtgttcttaaatttcaccttcttcttcgttcaagatttgagctagaaaggaaatgtatatcactttactttgaacaaattttagctagatcttagcttggactagctacttgtgttgatttggtcaatgggttgtttctttaggtggtcattgatagctgggagaattccagggcgta

SEQ ID NO: 57185 - DNA, 993 bp, Populus trichocarpa
  Intron number 1 from transcript POPTR_0015s13330.1 (locus POPTR_0015s13330) derived from phytozome v7.0 (chr-ID scaf fold_15; pos 13328799 to 13329791 reverse strand)
gttctcaagtacgtccctctctctccaatacgttttcgtttccatgtatatggaaatgggttgtatttttcttcgttttttcttaatgggttgttgttttttcaagtgtttaagcagtctatgaattgttggattcaatttgagtcgtctcggctttgtttgaaatatattacaatctgaacatctgctgtagagatctagaaccttcgttagatatgacaatacaaagtcaaaaaaagtgattttcttttgttttataaagctaaaaaatgcaagctttaagaaagttttaagccttttggtgatggaatttcccacctccaatcctttaattatgatgactaactttataaatttttggtgaatggaataattttaattatgtttcaagtgagtcttttaattactccccggaataagacccaagtaatttgctatattgcctgagtcctcggctccttggtagagcattaagctataatctatgtttgagtgtgattgatgcagtgcaggaagataataaagtgaaaacacagtgaagtaaacaagggaattactaagacttgaataaaattgaagttgggacaacaagagcttaaggtttagtgatttttgtgacgctttataggatcttctggttggagtgttgcactagggtattcttattagtttgattttaagaacgtgcaacactttgatgtggctaataataagtgacttattactcattgaactgacttgttagtccagagtaacaggtagttttttggagttgcatggaggggggttttatgatttggtcgagttctgtgatttgttggatcatgcaaatgaagtcaatttatgttttagatatgcaatcatgatcatcatcaaacatgcccgcccttgaatggagcatatttattgatttgacaatagattttctttgtaatggtttctttctggatgatctcaggactgaactctgccgcttcagtggggcgaagatat

SEQ ID NO: 57186 - DNA, 734 bp, Populus trichocarpa
  Intron number 2 from transcript POPTR_0004s14130.2 (locus POPTR_0004s14130) derived from phytozome v7.0 (chr-ID scaf fold_4; pos 14628266 to 14628999 reverse strand)
tgctgttcttgaggtcgaccttttcgtttttgcatcccttttcttttctttggtgatactagtgtttttttgggttatgagatatatcttgttttcaattttgcaagagtactgcttaatttaagttcataaattatggcttggaggacttggaaataagtagaatgtagatttcttgacatcaggtgtgccttttatgcatccctaggttgtcttcaatgaattcaaaatataccgcttcattcctatggatcgagaataatctcatctcatctagatctttttatttcctggacatgagatgggttttagacctggatttatcataacctgaggcgtcgctaagtctcactagagctcaatatttggttttcttaagatgataggggcaggcatttatttgcataatgtgaaagaaatccaggtttatcagagagaaccaaattttgtgacgatcctatttgggacggtggtacatttgtaatctgcctgatggtgatgatccaaatttttcctcaatgctagtttctttgacagaaattcagttgtattaaaaagttcatggtatggcctatctatttaaagggatgacctcatttgtatgaagccttttctcctttcatttccttctcatgctttcctttttctcctgacagctcatagttgcttttttatgagagtttcagcagccaaacccaacttaatatttaggtatcatctttaggtatttgcag

SEQ ID NO: 57187 - DNA, 525 bp, Populus trichocarpa
  Intron number 1 from transcript POPTR_0004s23820.1 (locus POPTR_0004s23820) derived from phytozome v7.0 (chr-ID scaf fold_4; pos 22453344 to 22453868 reverse strand)
aaatcttctttgctaagctctctcgttgggtaagttttgagctttgattgattattgtttgttctttgctttcgatttcagtgcgcagggtgggagtgtccctctcgatttcttgggtttttaccgcatcacactgatcacacttaactatttagggtttcggcttttaatatattggaggaaaaaaaaaaataggttcttggctgcttaacttagattagggtttgcttactagtgtgctacattgtttcttttagatactttccctttttgctctttcaatattttaattttgctttatatttttttaaaatttttgtttcaaattatgttggattattgaatcaagaaattgtatgattaattgttttttaagaaaaattagtgctttttatgccttaaaacattagcttttgtattgtttcacatgaaattttatgtagtgtggttatgcaattgctttatcttttgctttcattgttgtgcttagggtgtgattctaattagaagagtgtttttggtcgt

SEQ ID NO: 57188 - DNA, 581 bp, Populus trichocarpa
  Intron number 3 from transcript POPTR_0004s14080.1 (locus POPTR_0004s14080) derived from phytozome v7.0 (chr-ID scaf fold_4; pos 14569527 to 14570107 reverse strand)
gtaacattgtcaggtcatttccattccctttaaacttttcactaccttaacatatgccaaactatacaggaaactcccacctgaggtgagagagccttcggaggtaacctggaaagcatgcttatggactaggcctccaacatatttctaaaggcctttcacaagattttgttgaaaacatggagttgtgttgttgtatatcatggaaacaagcaaaagggggtggatagttttccttgtcatctttcttagatgattatagtgggagtttagatttctagcatagaaggaaatcttttgcaagtttaaatgatgctgcacagcctgtctgttcattgtttatacacatgaccgccttactaagttgtaatagtttcttctgatgaattgataaaagttatcaccacttttgtagtgtcaaatcatcttagtttgtggttctgctactgtttttccctataactttcattctcctttgtcattaaccatcctcaactgtctaaatctttcgtttttctttccttcttttgatttctcatgtaacaaattatctgatttttattccggtgacagactgcagg

SEQ ID NO: 57189 - DNA, 648 bp, Populus trichocarpa
  Intron number 3 from transcript POPTR_0011s09980.1 (locus POPTR_0011s09980) derived from phytozome v7.0 (chr-ID scaf fold_11; pos 12418837 to 12419484)
tcctatcccatagatatttggacaagggggaaccggtaacatatgaactcatttttcctgcatatagtaatgcaatgattaacatgaactaaccctggatatatttttgttgtctgctgagacttgtgttattatcgttgctttttttttttccatccatacatccattgcatcttttaatcatcaactggataacttattttccattttcattctatcaataaaattgtgtgagatggtctcgagagaagtatacgtgaatcaatctgtattccattactaaattgttaattgtgttaaaagatttgatttcatggacactaagtttcaaccttgtcactagggctgagaaggaataatcaaatttaattttttgccaaagctaatatttggcttgatggcccatgaatatctatgctaggattgctatgaatctttcttatgatcctataccctaagagaattcaataactgccgttaactttgttaaatattttatcaaatttgagttttcttagctgtttgctacctgggaacaattgtgccctttcttttggttactttgccaatcttctttcactatctcatgctctactgtttctgaccatttcaggaagtattggttcggtttgctggttttggacctga

SEQ ID NO: 57190 - DNA, 648 bp, Populus trichocarpa
  Intron number 1 from transcript POPTR_0004s03410.1 (locus POPTR_0004s03410) derived from phytozome v7.0 (chr-ID scaf fold_4; pos 2351862 to 2352509 reverse strand)
tcactcgctaaactcattgtcgtttgcaccgtcaggtaatattccctcctctgtttctttcttctctccttttttttggcttcatttctcttaattaagttttaccgttacttttccttcaattttcggatttttttatttttttaatgaaattatctaaatgaagctgcttttatggttgtttgtgttaagtaggtgattagtggttttgtaattttatgattagcatttgatcacctttttgttgcggttaaatgtgttttttgttgtttccaagggtgtttctagaattagatattttaaatttttgaagcctgttgttgctattacagagatccaatccactctgttccgttctgttgtaactggtaattaaacagtataaatattaatatcttaaaattgcttggtgtggtattaagcaatttggatcaaatataatttgagaataatataaatcatgtatcatagcttagttattaaatttttgtgttaaaatggttttttgagatgatatcatggtttggttgatcaaataattatagtttgaatttcgttattctaatttaagcttttggatcaaaatgattatttggaataaaaaaatctcattgctatgtttttcttccggttgcagtggtgggggct

SEQ ID NO: 57191 - DNA, 449 bp, Populus trichocarpa
  Intron number 2 from transcript POPTR_0011s00830.1 (locus POPTR_0011s00830) derived from phytozome v7.0 (chr-ID scaf fold_11; pos 417788 to 418236 reverse strand)
aacagaggaagaatctcatagagactactgtacaggtgagaaagtcagcttcgtttcttatagtatgcaagtgcgtcttaatatgaagctgcatattggactacatattggttaattctcgtgaatattagactattccaacaacgggttagtcttcttctaggatgactgtgttatatgaaagaggatactgcgtttaatctttatttatttgcttccaatagagagtgatttctcttaaaatgatctattactacccggttttcgagatgtctagccatttagcttgtttgttctcttttctgtgcacgtgatatgtttctacctatttatctgttttccttttccgagctcctaagagtgtttgtttgccatgaaagagcaggttttttgtttgattatttagtcatcttgattgatagaaagcttctgtttctggtttcagaaat

SEQ ID NO: 57192 - DNA, 749 bp, Populus trichocarpa
  Intron number 1 from transcript POPTR_0011s00830.1 (locus POPTR_0011s00830) derived from phytozome v7.0 (chr-ID scaf fold_11; pos 418315 to 419063 reverse strand)
aaggtgcttctgttgtcatctcttctcgcaagcaggtgctctttctgttgcttcaacatttccttctttttctttttctttatcatatcatttcttgtttttcagggatcaaggttgattttttctttctgggtttgttttggtttctggttgttttaggctttctctggtttctgctggtattggatttgaggaagtatataaactttgaactagactccacctaaaatggtttaaaaaatcatgttctttttaagagcagaaaggatatgccaaatcctgctcagttgaatgaccttaactcatcactttgaattgaatttagttctgcttcgcaatgcacacatcatggtctgtatttgctttgttgtttgaagttcgatctcatatgggatgagctgaaagtgattctattagtactgttaaatggagtgttgcaagaaatatttgccaaggccaaaatttactgatactcgtagagagtttttatactgtgatagaaaatcaaaataatgatgtatcgatacataatttgctacttccagatgccatcctttcccatcattcattcaagtatcaagtggtttttggttcttttttatcacacgatatttgaaaatttaagcactaaagttagcttttttatgctatttctagcagtaactgatatgggcttttttcttcgggtttatttggattacttccgggatgaaatttcttttggtcttttgttgaattgatccagaaaa

SEQ ID NO: 57193 - DNA, 646 bp, Populus trichocarpa
  Intron number 4 from transcript POPTR_0009s03180.1 (locus POPTR_0009s03180) derived from phytozome v7.0 (chr-ID scaf fold_9; pos 3855387 to 3856032 reverse strand)
tgtgtctccaccttggtttgacagattataggtatggtttacaacctcagttcataaataccatctattaatttcctagagcaaaccaataaatatgagtcaactctcacgttaaattgttaatctcatctagattgatatttggacatagtgttcagtcccacattcataatacttggtcaatgatcttatgaggatagtatccgttcatgttataactcttaccagtggcaagacatagcaagttcattaaatatctcacccttcacaattactggaaatgagttctgcatcaactgattagtcttcttaacagtgggttgtcataggttaaggtggacagatataaagctgccagctaaattctttagttggatactgtatagaattgtttttataatcagccttgcatttattcggtttttcagttttctgatggttggcctgaagctgcttctcaattttcttataaattagtggattattgctcttggtttaaatatttaactgattttttgaatttcagtaattgcaatgaaacacatcatatttatgcttattattcttcttcccctgaaatgaagacttgatgctatctacttgttatccaggacttttgtgggaacaaacttaaatcctctttggg

SEQ ID NO: 57194 - DNA, 498 bp, Populus trichocarpa
  Intron number 1 from transcript POPTR_0004s05050.1 (locus POPTR_0004s05050) derived from phytozome v7.0 (chr-ID scaf fold_4; pos 3798879 to 3799376)
cgtaagattggccctttttttttttaaaaaaaaacgtttaaattgtgggtttcttttatttttttcattggatctatctggactcacttcactgagaacttgattattctgttgcttatttcgatgtatttattatgcttaaaagatttttttttttaaaaaaatttgattcctgttgtttgaaaatacatcttctaattatttaggtgtgtgtgtgtgtgtatactttttatttgaaaaactaagcatgttggccttcgatgatggattctattctgcttttttatatcaatgtctggtttcagctacaattatatatgggtttggctaatttttaggttgcaatagttttttcaattttcaggagaattttttttagcatgtaatgtgattggtgaattaagaatttcctgacttttctttctttctttctttgtttttttggctttgtaatatattgcagttgctggcacctcaacacgtcctcgaacgtttaaa

SEQ ID NO: 57195 - DNA, 537 bp, Populus trichocarpa
  Intron number 2 from transcript POPTR_0015s15410.1 (locus POPTR_0015s15410) derived from phytozome v7.0 (chr-ID scaf fold_15; pos 14702087 to 14702623 reverse strand)
ccttgtagccttatctcccattggcaacaccccaggtaacttacagccatacaaaggatttcttcttatctacttctatagttttagctaccttcgtatgctcaattgattaaattgcccttgcttctatttcataatgccacaataatgccatcgtgatttttaagctttgcttttcaccttagaaaattgtagtagcattcaaggaaaatacagtattaagtacgtattataataaacagtatctcaagtcgtgtcatcgtaattgccactgcaagtgacataaatgatgctaagcttaaataacatgataacagtgaaatgcgagattaaagtgtatttataattgcaaatcttgtgtaaatttattttaattagtgcaggacatgggcaattaaacttaaatatctacgaactttattaaaaaaacaaattgtagatactttttctaacactatttgattttcttacaatatagggctttaaatcttctgggccatgtttttgtttgtgcagtgtcactaggacaaaccctag

SEQ ID NO: 57196 - DNA, 432 bp, Populus trichocarpa
  Intron number 1 from transcript POPTR_0011s05260.2 (locus POPTR_0011s05260) derived from phytozome v7.0 (chr-ID scaf fold_11; pos 5140319 to 5140750)
gctttagtcgctgactccttcgttctatctctttcatatcctttacgtatttatacattcatctcgatttcaattttgactgcattcgtattttcattaatttgatcattaagttttgatattgttaataattaggttttattttgttttgtttgctcaaatctacatgatgatcaaacagagaattgaccgacttaatcttcttgtttattgtgataatcttttttgttagtttaagtaaataatcgcattaccattattagttattgttggtaaaaagtctatggttttaaatttatactttctcttttgatgtccggcgagtgacaaatgagaaaatttaaatgtgcgtgatcgtgtgttgtaacaattttagttagttctttgttgaagtaatcacaatttggtggccttaactaagagttactcctc

SEQ ID NO: 57197 - DNA, 699 bp, Populus trichocarpa
  Intron number 1 from transcript POPTR_0001s03440.1 (locus POPTR_0001s03440) derived from phytozome v7.0 (chr-ID scaf fold_1; pos 2783120 to 2783818 reverse strand)
ttatctctccttttctgcttcctagcctctcaaaggtatgctagctcttcttgtcgttcttcttgattaattcttgtgaatttagctctgtctcttcttaatcttttttggtttttaagcaattagacaaggtattttaagctcgtaattagactggtaaatgcacgagttaaatgatttatgtaactccttgtgtctttgggaagagtttcacgggccttggtggtttgtaactcttttacctgtgtccttaaatgatttatgttagggaagggttagggtggaaggatgagagaaatctaactgggaaaggtttagacacattgattctgtgttttaaatgatggtgatagatatatttgctgttccttttgtgttggctcagcagtaatgttgatggagtcattttcacattttaagatttaagaagggcagagggcctttacttttcttttttcttcatgttgttttttgatgtttcggatataattctacaacaaaaagatttcattttcattatttattaatgccagccgctgcgtataactgtgcaacccaccgagaaactttgggtccacaaacagttttgggctggaaagggtaacagtcatcattcagaggatacccactataagttttgtaacaatttgcctttcaactgcagagaacttggtctgggagtgggatagatagagcatt

SEQ ID NO: 57198 - DNA, 797 bp, Populus trichocarpa
  Intron number 2 from transcript POPTR_0004s03830.1 (locus POPTR_0004s03830) derived from phytozome v7.0 (chr-ID scaf fold_4; pos 2722048 to 2722844 reverse strand)
agaggactattaagactactggtatgtatcaatcttcaatgctagctagcatcactttctccttcaacatggtggaatatcacgaccatgcatgtgctaagttttctccttgagaattgttcaaacaatgatcttttgaatgagcagatattcaatagttcatgttataatttcagtgtagatattggagatctgtgaccgccaggtactagtgctagtattttgattttaaattatttaaaaggactggctaattttaacgaaagctcatttgaaatctcttgcaggctttccgttttcaaattgactttgaatgtctttattgacattattagttttgaaattgaagtttcagtggattaatttaacagggtttttttgtgaataccgcactgattcaatgccctttgcccgtcttgtactgaaccagaaatgctctaggaatttacttgttgtgttctttgcaaataattttaacgaacaagtcattacttttgggatttgtttgaattagaccaatcaaggtctatcaacatccactgaaaaatcaactgagagagaatgagagtctagattatgatcaagtcgtatcttaaacttagtcttacaaacttttgttgttggtgtgaaacaaagaaaattacgtgtgagagtattcgtcgttttagtatagactaaatcatattatggatgcaagagattcaaaatccaagtcctcttgaaagaaattccttttttttttaattatttcaaaattgacttttggtgattcttgtttggtttctgggcaacagctg

SEQ ID NO: 57199 - DNA, 520 bp, Populus trichocarpa
  Intron number 1 from transcript POPTR_0001s10670.1 (locus POPTR_0001s10670) derived from phytozome v7.0 (chr-ID scaf fold_1; pos 8297375 to 8297894)
ctcttcagcttctaaaacctctcgcttctactctggtaacttgttactccttgcttcttgtactttttttttttgtaactgtctatctttcttagctctgatttaaatgtgctctcgcgtgtcctccaagagcttgtgttattaatttaattgagctttaattttgatgtgcatttgaggtttatgagttagattgcttctccgttttttattatgtcatatttttggtttttatattcagattgtttgatgtgtgtagttacttctgttctattgtggttacggcttgaatttctgtctctttgtttgttactgataaatacatcatgattaggtacacttataagttaaagatgaatcttttcttgaattttcctgtatattttttcttcctccaatacaaatatgtcgtatttgatcaatttaagttgagtcacaaagctttcttactgacccttcaatactttgagttttcctctttgtagaagggagagctgcagcggcagtggtggcagtttca

SEQ ID NO: 57200 - DNA, 583 bp, Populus trichocarpa
  Intron number 1 from transcript POPTR_0011s11760.1 (locus POPTR_0011s11760) derived from phytozome v7.0 (chr-ID scaf fold_11; pos 14538933 to 14539515)
aaggtatgtatacatgtataatgtactgtactctatggttttgctcttgagcccttgatcgatttttcttgctttggttacaacattcttgaagattaaggacatgaatttttagatttattctaagtagtatttgtttgagatgatggggttagagataatattttttttagtcacggcccttgtgattaaattttggcggttcatgtgttcataggaaccctttgagatgtattttggtatttgaaatgtattttcttttcgttagaaaaaccagtttctggttgttaccatgtagtgttaatttgtttacattgcctgatgtattgagatcacttccatgatcatattttcgtaatttgaattcagagataaggaatttcaaacaattataattatcacaactctggaatctagttcagctgttattagggctttaatttgtggtttgttgagctgtttggcactgatcacacatggccacatgcatttttcaatggagtactagccgtgagagttaactaccagtttgaatgcacatattgcaggaaaaagttggattaagttcgtctgcagattctgg

SEQ ID NO: 57201 - DNA, 408 bp, Populus trichocarpa
  Intron number 1 from transcript POPTR_0015s08260.1 (locus POPTR_0015s08260) derived from phytozome v7.0 (chr-ID scaf fold_15; pos 9528110 to 9528517)
ttaatctcaagtctgcctttccaacttgggaaaatgtaagttctttaaattttctttttgtttttgtaaatcttcttgtcccttttttatttgctgtgcttacaaatctcgcgctttcttttgcttgtaattgatttttttggaatttatgagtgttattgaacctggttttgatgggcacagctcatttaattgataatgaatggaaagttggagtcaatttgatatgtttttggaccaacatttttcatgtcttggcgtgattgttttggcgtgatgggtgattaaacttttgtagaatttcttaattgttgttggaactgatatttttatgcattggcttggttttgaatggtctactgttgtttctgtttaaggtacttgctgctgaatcaaaatttatagagg

SEQ ID NO: 57202 - DNA, 403 bp, Populus trichocarpa
  Intron number 2 from transcript POPTR_0014s10220.1 (locus POPTR_0014s10220) derived from phytozome v7.0 (chr-ID scaf fold_14; pos 7671197 to 7671599)
ctccatcctgtcctggtatgtcttgttcttcctcccttgcatgtaatttatggtagttgttaaattttatgctctgcttaaactaatacttggaacaaattaaatcgaaaaattgggagaatttaggagagatgctccgtacgtttgaattaatctgcctgaaacttcaaacctcatttcaccaaaatctaaaagttgagctgccacggtctagaactcgagaagccataaaaagaagttcgccgtaaacccccggaaaaacaaggaaataaattagataagatgtttgcaaagcatcacgggcattacagaacagggaaaaaaacaagacattgaaagccctactaaatcttaatagaagtggttggtttctgattcaggtgtggaacacgtgggaggagat

SEQ ID NO: 57203 - DNA, 933 bp, Populus trichocarpa
  Intron number 2 from transcript POPTR_0004s13540.1 (locus POPTR_0004s13540) derived from phytozome v7.0 (chr-ID scaf fold_4; pos 13848322 to 13849254 reverse strand)
tcttggtgcactattgagtctgatccaggtattgtttctaaattcttatgagtcttatattagttcaaaataccttagaggagttgcttctgtgtcagtttgagggttttgaaaaatctaaagcagaaaggttttggggaagtgtgctttgatttgtttgattttgagcatctgccaggaatgcagggtctttcaatttcttttctttttttggatacgatattatggatctatcatttcacttgttacgagcattaaaagaatagtatctcttgcttcttagaagccagggttttctttgtgatgcttgtctatttatcctgacaatgctattgaaaaaacacaacgctgttggtgagaatgaccgagtagaagaacccccaaccactccaagatcttgaatatagattcttgactgtatctatacatggactttatacccatccagattcttgaaaccagtaaaagactcccatgtctttggataattggatttagactctacataccaggcttcctgttacacatacaggggaatctctagcaataaaggatgccatagaatttaatgttttgaatttttgtatttaatttttgttttatacaaatgggtgatacaatcctgttatatttttgatagatttcaggtgttcatgaagaaaaataatttcatttggattaatcttctgtctttagatggacatatctgcctgtaaatatttcatgctgcatttgtaatttttaactatatagctgacaatcttagcttgtggattgttaattgccaaggaaagagtagtttatggttctcacacatggatacatgcatgaacatttattatatccatactgtgttgtagtttttgaatggaaacctctttgctgagactcctagcttgtaatccaggtgtgttcacggaacttatacaacaa

SEQ ID NO: 57204 - DNA, 363 bp, Populus trichocarpa
  Intron number 2 from transcript POPTR_0004s16850.1 (locus POPTR_0004s16850) derived from phytozome v7.0 (chr-ID scaf fold_4; pos 17211462 to 17211824)
agcttcttgctgatattgttggaaggttttatttctggctctttataatcttcatttccattttttttaatctgttgattttaccttaaaaacgcccagttttgctattacttttaccttaaacacgttcagtttttatctttcttggtatatatgttcttagggatatcgaatgattttgtatgccttaggcttctttgattttgctttatgcaatttcagatgcatgaaatgtgtttttcactgtttttagctctggatgcatttatttgtgaggtttgattaagcagtaaagagaaattagcatcttgtggaatggttttgacagcaaagacgctgcaaaggaatcgattttgtacagct

SEQ ID NO: 57205 - DNA, 324 bp, Populus trichocarpa
  Intron number 1 from transcript POPTR_0004s05870.1 (locus POPTR_0004s05870) derived from phytozome v7.0 (chr-ID scaf fold_4; pos 4599277 to 4599600)
tgaagaaaaaacagagcgcatatttaaatcttgaggtagaaaaaactgaccattttgtcagacggattaagtggtcgtcaaaggtggtcacccgtggtgtttttttatttatttaattttttttttgtgtggtggaggcaacagccagggatgatcagtcagggaccatgaaaccataaacgggaaagctagagagaagtacctttctacaggaattgttctggcatatcctgtatcttttcttcggcatatccaaattctggtgcgaatcatgcatgatacataaaaggcctctttgagctgtttacctagacaactcgagca

SEQ ID NO: 57206 - DNA, 672 bp, Populus trichocarpa
  Intron number 3 from transcript POPTR_0004s09140.1 (locus POPTR_0004s09140) derived from phytozome v7.0 (chr-ID scaf fold_4; pos 7640278 to 7640949 reverse strand)
tgttagcctctggaggctctggtggtagcaaagaggttctaaactgtcttttttgtgtttttgatattaagtgatctgttgaagtggttcagttagcatgtgaaggaatgcggcaatttagcatgtcagcatgcttattacatggtggttgttttaacagttgttttttctagtgttgtttttgtagaatttacttttaggaacaggctggaacactttacaccatgttgcttggagttgggttgtgtctataaatcaattatatttaacaaaaaatgatcaggaatttgataattggctgcatttttgaaatggttacggaaattatcttaactattttatatatttatctgaaaatagcgtgttgttggggatagcgtagtaaatttcaacttttaccatccgaagatgtggatctttttgttggcgaatagaaaagtaaatcttgtattcgacttttaccatcattaggtatataagatcaaggtattcaggagctggtttgtaactttagttggattagtcacatctcttcatgcttgttcattttagtctctcttacattcttccatttttagttccaattgtttctctttatgataatggtttctgagaacaactttctgctcttttccagtttcttaaacagtctgctgcaaattacatcaaagt

SEQ ID NO: 57207 - DNA, 957 bp, Populus trichocarpa
  Intron number 1 from transcript POPTR_0015s13610.1 (locus POPTR_0015s13610) derived from phytozome v7.0 (chr-ID scaf fold_15; pos 13480917 to 13481873)
agaagcagatctctgctccaacttgttaagagaaggtaaagaaccaaacccatcattttctttaacttttaatgagttttgtcttgaatgctcaattcaagaacccattttttcatttcagattttcaagattttaagttacaaaatgtagaaaagatttgatattgatgtttatgatcacgatttagtgatatttatttttgttttccatgcttataatctgtagtatttcaatcatgagcacatgtggtgtatttattgtatgctttaaagctcagtaattatatctatccatgaacatcttcatgctttatgggtttgattcaggtaaagatttttttgttttacatgtctaagataattaatttatgatttattagtaaccattaatttatttcattattagctttggcataacctggaaatattgtaaagtattgaactttcgtagttaactttgagaaagactagtacttttaataatgaaagtgagaattaagagggtattttgatgcgatatagtgttgatttgatcacaaatgattcttgttaatgtgtagttaataataataaatggtttttttcatgagagtaatgaatttcacgtctatataagttcaaggagaagtttgatgtgaaaggtaaagtaagagaagggatcttcaattttcggagctaaatagtattgcttccaatctgttgggtggtagtcatgaagggaaaccgatctggaaatgattcaaattcaaattcttgggatacactagaatctagactttataattgtttctttggcgatgctgaccgaattacagactcttttctgcactatgtacttcaaatttttagttcagcatttctttttgcttaattatgtagacaattgtgttcttgatgattgtaaatttaaggtttcacttctttggctaaatatgttgcagggaagatactcccagt

SEQ ID NO: 57208 - DNA, 762 bp, Populus trichocarpa
  Intron number 3 from transcript POPTR_0004s08050.1 (locus POPTR_0004s08050) derived from phytozome v7.0 (chr-ID scaf fold_4; pos 6577341 to 6578102)
gaagattggggtaagagattttttttggtttctacttttgttgtgatctgctttcaatttgagttgattggtcaaagtgttttttttccttaaataccgtgatgatttatagctgcttgataaaaaatagtatgcttggattaatttgtttagttgtgcttggcagaatattcaactgtgtacaatgttgccacttgggtcatcactatactgctgctccatgttgtggctgtatttgccccaacttgaaggcagactgttgtttatttattttgaaagcacaaggcactgcgaaatatgggttttgcgaggcttttaattaacttcatcaaccatagcccctgacttaatgtttgtgtaccatttccttatcctacacaagtaagaaacataaggcttttagactaattaaaggagcttgtgtaaacgtaagaattgacctgatgtgccaggcttgctgtaactcaccctacctatgtaattgtaagaatcaggtgacatccaaatatttcaccaaggttggtaattgtaatagtaattcacttgatgcactgccagggtattttatttaagatattgaaaagaaaatgacagagagtgttgtcaattctatattcttgaagcttacagaaagaatctaatatttttctctttttcaatgtaaatcttttgcctcttacattgttagatgaagttttctccatgttcatgcttttgattctggtatctaattttagttaacatgtgttattttttcagagg

SEQ ID NO: 57209 - DNA, 521 bp, Populus trichocarpa
  Intron number 2 from transcript POPTR_0004s08960.1 (locus POPTR_0004s08960) derived from phytozome v7.0 (chr-ID scaf fold_4; pos 7519096 to 7519616)
ctgtacgttttcgaccttgcatcgatatacacaaggtacttgattcagtatgttgttgatgcgggtccccacctgttgtaattctcatcatggttctaacagccatcttcacaattattggattttcttacctttctttctttgtttaatcctgtaagatttaccaatttgaatgcttgtagaaattgtttaaaagtgtgtaaactgtgacagataagtttacgagtgagagtgatttgattgctattttaagtacccttttttaatttatacgtcaattgtccaattggtgatttggttgcttgtgttttaacaaatagaatcgagttgcattttagcaacattcagtttttattggctattctattcttgaagtgaattttgaaattgggttcttaatctcaattgtcgcgctacttctgtgttaggttgtccttgagtgaaaatgggtttaggtttgtgtttaaattatgatttgtttttcagggtaaagtgaaacaaattgttgggtctacccttcg

SEQ ID NO: 57210 - DNA, 857 bp, Populus trichocarpa
  Intron number 1 from transcript POPTR_0011s12780.1 (locus POPTR_0011s12780) derived from phytozome v7.0 (chr-ID scaf fold_11; pos 15465847 to 15466703)
aggtacagaaagggtacccactttttttgatgtgtttgcttgctctgttttgatggtcaatctcttacacttatatgatgtgaagtaacttaagtgaatttccatctcggaggatttctaggttgattttatgttgttctttgaaaaaatacatcagtgggtgtttgtaagttattcagcaaccaaaaaaagagggaatagcaggtttctagaaatgcatgtcccattgttattcaggaaaaaaaaccaaaagaaaaaaaggaaggagtcccttttgcagggcagtaaatggaactgagaagtttattaacagccctcgcttggctcagcttgttcatttaaaaggggaccaatttcaagccttattttaggatcatttagcccacatattttatgccttattgattggcttgtgaacaggtttgatcaggacactgaagatagagttttatatgccattctatctgtttaatctctacactcacctttttcctttccctttagctactttaattcatagtaattttgtttatgtaaaactatttgctttggtaattaatgttatttttaattaaatgaccaaacttgaacttgcatacttaaagaagtcgaatcaagctgaggtcatgtaggatcctaagcttgagctgagttgaagtttgaccattgctattctaattccagctggggttgcatgcacttaaacttggttgactgtgtactgccttttataagctgttgcccatgaccgcatctgctattctcacactgcactgggttattggagtgttgcaaaatcatgctggtttataataactacagttttacagatcttggaggccttactgccacgggat

SEQ ID NO: 57211 - DNA, 527 bp, Populus trichocarpa
  Intron number 1 from transcript POPTR_0011s12760.1 (locus POPTR_0011s12760) derived from phytozome v7.0 (chr-ID scaf fold_11; pos 15455695 to 15456221 reverse strand)
agtgctgcgtctccttcgaaactccggtattcttttcatctgctcttcgcttgttttccgagaaactgcaatttttcagcgaaaagaccacaaatttgcttaatgtagatgataactcactgagtcccagtacttgcttactgtgacgttgttgtggttcactcaaatgtacttacaccccgtcaatagcttttgtttttggatgatttttaaaagtgtgttttccttggaaaatcatattttttaagctttttgatgattttgatgattttgatgtgttaatgtgaaaaatgataaaaaattctgaaaacaattattttaatgtattttcaagaaaaaaacactctgcatcacaatgccaaacgaacattcattatttggttcccgagaaagtgagagaaataaattttcattttattctgtattattttttaattttatgttatttcgttgcaattttagaattctatatatatatattttgttttgatgaatttcagaggtctgaaggcgggttgtttgtcgac

SEQ ID NO: 57212 - DNA, 322 bp, Populus trichocarpa
  Intron number 1 from transcript POPTR_0012s09350.1 (locus POPTR_0012s09350) derived from phytozome v7.0 (chr-ID scaf fold_12; pos 10395508 to 10395829)
tatattttatcttctttctcttcaagtgtacaaaggttcaatctctctccctctctgattttgtcagttcttgttttctttgagtggtgtttggttactgagaaaaggagggaaagtgtaagaaactgagcattttgaatcttaagtttccatcatttttttatattaataaaatataaaaaaactgattttttttattcaatgattttttaaaatcatttagaagaagataagattgtttaccagatttacttactatttatttatttatttttgttgatttgtagtttagatttgaggattgtatagaattgaacaagtg

SEQ ID NO: 57213 - DNA, 885 bp, Populus trichocarpa
  Intron number 2 from transcript POPTR_0004s17730.1 (locus POPTR_0004s17730) derived from phytozome v7.0 (chr-ID scaf fold_4; pos 17802713 to 17803597 reverse strand)
gaagactggagaattgtcgagctcccacattggtgtagttctgtctgtggtcaattttgtattatgttcaaattaggtttccaggcagaaaaagtgcatgctctgataaacttgagtcagtagctgtaaaaatatggttaccatttgttttgttatgattcctggtgacagggcataaaaggactgcttgaaagaatgaaattagatatgttcaatctttttgctgcaagtacagaactccttttactggttatcgcaggcctttgcttgtttccactgctctacatcgtcaacttaccgttacgctagattattgctgcagcgaaagaagggagagagcttcgtgtagaaatagcctgaagacttgaatagtcccaaatcgacccaatacaaccgacatccaaaaacaagatacagaggagcagaaacagtcaggagccaagcaagaagttcgggctctctggacaatccttgttttgccaaagaatctgccacattgttagctttgcgaggaacgtgagcaaaagagactgtctcaaagctttgagacatgcctaaagattgccgggaacaagttattaaactttcaaggtcatctttctggactattcaatccaattagttacaagttttagtctctaagctgtttctggttctgagtagtgcagtagcaagatttgatcatgatcatcacaagttgaatatttttctggacagtattagcaatcctttcttaacctgttaaattatattgatggccatgcttttgtttaaatcacatgacgaggcagcaagtaaagcagcattaatttacttccactgctctaaaaactaccattaataagaacagcagtaacgccaatcaacagcttgccatacactttt

SEQ ID NO: 57214 - DNA, 481 bp, Populus trichocarpa
  Intron number 1 from transcript POPTR_0009s16970.1 (locus POPTR_0009s16970) derived from phytozome v7.0 (chr-ID scaf fold_9; pos 12810201 to 12810681)
tattgattttggactctctgtgttcttcaaaccaggtatacaacacatcgtttgcattttgttgaattatcagcatatcaagatactaaagatgtttgtaaaaaaaaaacatcaagatattaaaatatgaatgttacttcatccatctatttttttatgaaatgtttttaccaattagattacatgttttactgattaataactcttcacatctaaaattctgtaccttctcttgtgcttgatggtattcattttgttagaatgaatttaaataattaaagctttttgtatgcatacctataattgcttgaatagtatagcgaacttatgaaacacttttcttctctaaagacctcaaatcaaactctggagatacagtaatgtgtagcattcacgaaacctttcaatacatgatttaacaatgtaatcttgagtattgatgcttatatgtggttggctattacaggtcaaattttcactg

SEQ ID NO: 57215 - DNA, 520 bp, Populus trichocarpa
  Intron number 1 from transcript POPTR_0011s17120.1 (locus POPTR_0011s17120) derived from phytozome v7.0 (chr-ID scaf fold_11; pos 18727379 to 18727898)
cgattcaaaccccgaaccctaactcaactcaggaggtcattaatttcttttttattaaatttgtctgaatctttttttattttttatttaattattccctttacggggtcaataaaaatcgttttttttttttttttttttgtattttaagggtttttcctgttaacagatcttcttgtttcctggggtatgattattattattattttaatgtttttttgtttggttaccgagaagatttaaggaattttaactctgaagggttttagttttcatggcagtgaatttggcccactgtttggttactcagaatttatttttttagaccatttggaggggggaacgtttcaggatctttttaaaaaattatgggtttgctattatttatatgaagtttaaaattaaaccttttttttttttttgttagtattttgattggatgattggatgtggatggcttatatcgctggcactaatatgtagtaaaaatatatgtttttgaaggttcagagaatttgtg

SEQ ID NO: 57216 - DNA, 642 bp, Populus trichocarpa
  Intron number 2 from transcript POPTR_0009s15790.1 (locus POPTR_0009s15790) derived from phytozome v7.0 (chr-ID scaf fold_9; pos 12144110 to 12144751 reverse strand)
gaacttgtatcatatagtttctggtaataggggaaaacttccatcccttcactttttccttagcttttacggtacattggatatgtcagcatgtacacacattattgtaatcattttatcctttttagggtagttcaaagcttcgttctataatcagtttcatttagtatttttagcttttgagttgtaggaagaacatgttttagggtagggattgtgtatattaaattaattcctttcttccccagtgttttatggcaatgattgcgtgcatctttgttaaccaaccagaattaaaatggtcagggttgcatacattcacttgaatgcttgacttttctgggattctgaatctctgtcgtgttcatttgtataccaacatatccccaaaatctgtgaggcaagaactttattgtaacgacgtaacccagttcaaagcaatatcagcagcatcaactgagccaccagaagcagcttgacagaactcagaataacccaaaaaaaacagtagacatcgccaacatgaagcctctcaaactgcatgccaagctctggatcagccaataattctggggacactaaggacaagaattccaccaggtcgtttgagtgaaactttcgtatctttgggaacagctggga

SEQ ID NO: 57217 - DNA, 365 bp, Populus trichocarpa
  Intron number 2 from transcript POPTR_0004s11250.1 (locus POPTR_0004s11250) derived from phytozome v7.0 (chr-ID scaf fold_4; pos 9872653 to 9873017 reverse strand)
gtgtgaagggcccactggcagcaaagaagaaacctgtgcgtgatctccctctctccctcattctctcttctgtggttgtcgtcgtttatttccattttgaatttgtagccagctagagccaaccattttttcctgcaactatccccttaatctcatgcaatcatatacttctaaaagtcgagaatacaaatgctaagagattatgatttatactcaattcatagaacttgcatgtgattattataattctgcttcattattgacagttggggtttatactttgctcctttgcaactaaaggtttagtgcaccgatgttgattaattacaggaaaaggtagtgaaccctttgtttgaaaaacgtcc

SEQ ID NO: 57218 - DNA, 733 bp, Populus trichocarpa
  Intron number 1 from transcript POPTR_0015s01560.1 (locus POPTR_0015s01560) derived from phytozome v7.0 (chr-ID scaf fold_15; pos 976517 to 977249 reverse strand)
tgtgtgttcccttgttaaaaggatgtaagagttcaactcaagtggtaagtcctaagaccaagaacagaagcaacaaagttacagtttcttcagcaatactcaagcagcttgggcacaaagtaaaatgttaacaggcaccctgctagatctgggattgtcataggataagatcagtcttgaatgtacccttaaatctgagtttctggtgattttttctttcacattaaccccctacatgcttatctcaaattttccatcacctttgcaacagcaaaattgttttcctttcattctcttttccctggaaaacatgacatgtttggtaaaacatcaaatagaaggctgattgacaaagctatccttcctgtttgattcagacaaacctaattacagcaatcatgtatatctttacacacatcaaattaaatctcctctcctacttttcaaccaaattggttgctgaagcagctgctaagtttgtgcagctaaaattagacattgcacctaatctcattctctgaaaaccacaataaaaaccctctctatcccctccttgagacattaaacacttgaacaagtagcacttgcatagttgcatttgcatttcttttcacagctccaaggtcaacaaaaccccaaaaaaactcaagcaagatgaagcaactaatttccttctcattttctcttgtccttctcttcctccactgcacccaaacactatcccagccaccaa

SEQ ID NO: 57219 - DNA, 677 bp, Populus trichocarpa
  Intron number 1 from transcript POPTR_0012s10260.1 (locus POPTR_0012s10260) derived from phytozome v7.0 (chr-ID scaf fold_12; pos 11073207 to 11073883 reverse strand)
gtggaaagatcaaaccaggtcttcttcaagtgaacgtgtctctgtaatactctcccacctctttcgttctttactgattttgtactatttatttatttgtagttagtacttggtagctttcatttttgaagcttccattcttcttggaagcatatctctgcaaactgtattgctgcactcgttaaacaaaaaggaaatcccccttttttttttatttaacttggttgagcagagaataccattttgagatgctcattgtttcatttcttgcctttttcctgaacttttctgatttacataataaattaaagcttataattttgttttcttgaaatctgacagtttttttaaagctaccaacgcaaatacgaggattaaattgttatctgtggtatgtaaaatggggttatgacagaagggcttagttacattcaactatgttgttctttgcttgtcaggtttaaattgctggtctttacttgtggctgaggtttacttgattaaaccctgtgtaattttgtatctgtctgtggcttgatttgtttccttggcttaaaaaaactctgtatatatgcaagggtggtgaacagtgaaagagaaatttcactaactggggacggggcggtgtggagcaatagaaagataactctgtggaactcccttaagtggcagatttt

SEQ ID NO: 57220 - DNA, 872 bp, Populus trichocarpa
  Intron number 1 from transcript POPTR_0004s00360.1 (locus POPTR_0004s00360) derived from phytozome v7.0 (chr-ID scaf fold_4; pos 104867 to 105738 reverse strand)
tgctttcgcgtctctttcatcccaatatagtgcaggtatgtgtggtattgcattccaatttaattaaaagcgaaagaatttcttttttaattattaatggcttagttgatgtgattagcatgctaataaataattaaacgtaataattgaatcctgcagcatttccttgttctctaaactatgaaatagctacttgttcttaaattgatggaactgtttcttgcgtctaacatgcttggttttgtgctccaatgtgaaaactttgttaagattgttttgcattcttttcaattagatattagttttttttcatgtatgtattatttgataaatgtaatcagtggttcctggcactggctagatacttcttctttttttgctgtacaagtgcttgttcttaattttataaaacaattttgtctaacatgcttaattttgtaatttgattttgagcaggaaatcttttccaatgtgaaagctttgttaatttactgtactttctttctcatcctttgttgtcttcaagctttggaagatgtcatactgggtgacctgatttttggaaacagcctcaaatttccgcgggactggcttgataaaaacctcatatttcttatccgtgtctgttcttcgtacctcaacctgaagctttactgattttgtgatctctcatgctactgatgctttagaacaaagtatagcagtgatcttgatttattcaattgccattaggtggaggaagcatgttccattaataactgatctcattgtcactttgtgatagcttatcaaaattggaacgttttatagcaagatggctaactgccttctttacagttcattgcagcttgtaaaaagccacccgtgtactg

SEQ ID NO: 57221 - DNA, 680 bp, Populus trichocarpa
  Intron number 1 from transcript POPTR_0015s13010.1 (locus POPTR_0015s13010) derived from phytozome v7.0 (chr-ID scaf fold_15; pos 13140785 to 13141464)
ggcgcagctccaagtaagttaagatcactctgctccatcttctccttttaagaattctagaatgttatcagattttggatgttctttacgttttgttttgcctaattttgacttctcattccttctttatcttcagttttcaacacttttggatgcttgttgagtctctatacactctgaaactaccatgaattggttctactctttaacttgtatgctggattatatcatgagacagacgtcatgagaattctcacaactgcacgcaaaccgatacttgttcttgcacaacttgcaaagagatcgatatatgttgttttgccaagcttcttatgttattagtctaacttgggagtttcagcattgtggcttcaaagcatctgttgcttttgttctcactagctaggcaggatcttattttagaagttgagaggtacttcattttaccaatgtgtgtttctttatctttcttttcagcatagatagtggttgatcccaccaagctaagagatgatctgcattattaccaaagcaacatggcgtggtcccattttcaggatcccaggcaccataattattaatatagcctaagacagtagtgaagaatcaggctccagttgtctcgttttctaggatcgatctcatttctgccaggtgacttttgtcccttacaaagacct

SEQ ID NO: 57222 - DNA, 676 bp, Populus trichocarpa
  Intron number 1 from transcript POPTR_0004s00280.1 (locus POPTR_0004s00280) derived from phytozome v7.0 (chr-ID scaf fold_4; pos 65564 to 66239)
tcgtcactgctgcgacctgcaactcctaattacaggtgctttcaaatccctttcctccttcatttcgtctgcatgttcttcttcttcttcttttttacgatgtatagatccctaagcttcagtttttgttcaattctttttttttctctctctctctcaattataatagtagtagcaacacttctgatatggatttaaccgagaatctctctttttttgtcttgatttttaagtttaattaatgggtaaattaacccgatttagctctaagcgagtaaaccgatagaagaatttgttttttgcgaaaatcgtcaattatatcttttaatgcgattaggttaggttatgcaaatgcaaatctgaggcgagaaagctttctctatgtactacaaattagctagttagttgccgctttttcagagtgtatttctgattagtaattgatcaataattataattttttttttttgatattctggttataactggttgttatgcttcaaaataacacttttaatgttttactcaatacaaagattgtggtgctctttgattgcacactgcatcatatgtttgattggtgcgaaaacacaacttcataattaactgcggtttctaacaattgtaatgtgcaaatttgatggatggttaggtgacggtttcttgcacaccgcat

SEQ ID NO: 57223 - DNA, 875 bp, Populus trichocarpa
  Intron number 1 from transcript POPTR_0012s02020.1 (locus POPTR_0012s02020) derived from phytozome v7.0 (chr-ID scaf fold_12; pos 1628068 to 1628942)
agggatctcttgcttggagttttacctgtacttttattttgttttctaatttgttttattttgcagttacatttcaagcctaatgatatgaaattaagtttggaattatagtaaaaatatcaaattacaagttagaggactaaaaaatagaatgaagagaaaatacatagccccacaaatacacaagaagttttatttggtaagatgctttattttgttcatgttttaatctctgatatggagagaagagagacaaactcgtaagaaaataacaaaaaaaaaagagaaaattattgatttattcattttttaacaaagaaacttgcggttcttggtgttaatatattttatttgacaaaaaacgtttaatgatagttgtttttatctttaaaaatccataaaaaaaaatagaacaaactgagtttagagaattttctttcatttgaattttaatttttgaggtggtttaggggtgttttgagattattaatgttagagttttatgaaattttgtgtttaattttatattttgatatttaattaatttttagttagtttttgttttttaccatatcataaaataaaataaaaactaattaaatctggtaaaatctataatacaaatcatacattttacaggttaacacatgttaatattaacatgcgttgtttttttttaatttgaatttttatctttagaacttaaattaaagtacacaaaagtcaagtaccactgtaccggattcaataacaaggcgaaaaaatttcatgcggcggaaataatgctagcgtagacgactagttgccatttgttgcgtataactaaagtgtaaggtgtttgtttggcttacttgaggtaaactacttgcacagtc

SEQ ID NO: 57224 - DNA, 937 bp, Populus trichocarpa
  Intron number 3 from transcript POPTR_0015s05240.1 (locus POPTR_0015s05240) derived from phytozome v7.0 (chr-ID scaf fold_15; pos 5608570 to 5609506 reverse strand)
cttgacaaagttgccgttatatcaggttcttggtgcttgaaaggatttgaatatgacaatttttagtacttttagtgttgaagcttgaaatatatactgtgcaccttcaaaactcttgatacgggtgtgtcatttggttctctgatgttgttatggtataggaagagaagtggtgaactgtaaatctatgtgcttttggaatgacaaacaagttttggtaatgggttggtagtggtactaaatgttgctatgtaattcgaaaagaaaataatggttatcatctttattgttcttttccaggctggataatatgcttatatatgtttttgccatcttttatgtgttgatgtacatatgtaatggtggttttacatgttcctggaagagttgtgactggatggtttgcaatttgaattatttggctggagtgagctgttaccccatggaacttttgttctatttttccataagattttgtatagcagctcttctacacacacacacacacagagcaaatgattctcggtcctatttttcccaatttcctataatattgtcagacacgtatatattgtgtttatttgtgttcttgtggcctgcatcatagacacagtcaacaccttgaagcccaacctacttaatatctggtcatactgttgtgttaagatatcgtcggttcctttcaaatgattcttggagtgaggcattttcttttaaaatttcctatttgaaagtttaataagcaaacaggagtgagcataaaaaagtccaattctaaagaaagctgaatgagatgtgagatgcatgacaaaaggaaaaagaaaacacttagaaatgttttgatattgcattacatgatcctaaatcatagaacttaaagactgtgagtaagatgtgaatgctatgctttcatatgatacaggaggagggagtgggc

SEQ ID NO: 57225 - DNA, 578 bp, Populus trichocarpa
  Intron number 1 from transcript POPTR_0015s05240.1 (locus POPTR_0015s05240) derived from phytozome v7.0 (chr-ID scaf fold_15; pos 5609692 to 5610269 reverse strand)
ttctcaaggaaagaaactcattaacgaccccaacggttcgctctttttcctctcattttttttttattaatttaattcttgttagtaaaattgcttctttgcgatcattattttgtgcttggttgccgatgaaccgtttttatttatttatttgaaatgtaactgttatttgtgttgcttataaaagaatcctttattgatattggaatttattgattttcctttacatttctatgttgattgtaatattggtgttatttttgagttcttgaataaatactttgtttgattgccgagaaaatccgaggaaaagaaaagaaataaagacgatagaattttgagtattattttaatttttttggtgtatttgtttttcaatttaatgacataaatgtgaaataaatttctgaaattaggtgtggtggacttttaggttggttacatgtttcgtttgactcaactaatatttttttaaaaaactgtgtttattaatcagtgaattttttccattggaagattaattgaagtaattttttattgcagctgtagtaactgagttcatcgagggtcttgtggaa

SEQ ID NO: 57226 - DNA, 804 bp, Populus trichocarpa
  Intron number 1 from transcript POPTR_0011s11390.1 (locus POPTR_0011s11390) derived from phytozome v7.0 (chr-ID scaf fold_11; pos 14145057 to 14145860 reverse strand)
acgactctagtgcacactcctgcttctcatcagaggtctgtttttctcgctttcacttctcttaacttgcttattatgttacagtactttttaagtttccacatttctttcttgtgggtcttttttatcttttaccctgtttcattttgagctcctgcttaccagcatagctatgatttttcatttcctttcatggtgctacaagatacttgtatcctattctgttaagctaatcaatatttagctgtttaattttagagatttttgtttgtctttgagtgttctaaaactttaagctgagcaaattgagatgcaatttcttctttcactgaatacttaatttaagtggtaaagtttcttggtttaggctttagaccttttttatatttactttgaggacaaaagataaaagatatgcctgttctttttctctttatctatattttatagacctatcgtgtgtggagttccacttgtaacatacacttctgttccttgtacctggacagtgcaagtctttttttcaagtccatactttgttaaaaaaaattcactttttgtttctttctgtgtttttgttctctctgtatccgtgattttagatgctctggggaagattctttcagcatgactaaagtaataataatagtacatactagttgagaccccatttcgtgtgttaatttgtgcttttttccccgtcgctgaactttgatatgacctcttgtgtttattgatcggtgatcagtgtgttggttcttaaatacagattgtgtaagaggggggatttaaccgttgatttta

SEQ ID NO: 57227 - DNA, 789 bp, Populus trichocarpa
  Intron number 1 from transcript POPTR_0004s18610.1 (locus POPTR_0004s18610) derived from phytozome v7.0 (chr-ID scaf fold_4; pos 18447746 to 18448534 reverse strand)
tcgccgccttccctactgcttgtgctcttgaagtaacaaaattgaagccccccctcccatctttgtattttgattccttttctagtatagttttaaatctggtttggttcttgaggtccgatgctgtttatttaagtataatatttgttttaggaaaataatcaagaaaagaattggatttgctgctgttaggttcatgatgatgactgattggtataatatgtaggtcctttgattgcgatcattgatttgattttgttatatttagttttcgtgatgactgttctgcttttgatgtgatatagcaagagtgaagttaagtttggtgttaattttgttttctagatggtcttttacaagctattagaggaatcgtactaagagctccaatctttagttagtaggactgatgatgttatgatgtcccattatcttgagcaacttcaagtttttaggtgttgaatattgggtgtttgatacagatatcattcggtttgtggaatcgtttcatttaaagaagattcagggtggtgcttttaaggtagaaatattttgattccagtttgtcctgcatagcagaatcagagagtaaatttggaattttgctttcaactgatggttccaatactgaggaataattatatttatagaaaggagaatgctaatgctttttaaggcacttgaagtactttcattattttggaggaaaagggaaagaacaactttgctgatatgaagtcatcttcctaacagtaactgtatccgttatggtctggttttgacaggttc

SEQ ID NO: 57228 - DNA, 1014 bp, Populus trichocarpa
  Intron number 2 from transcript POPTR_0012s10490.1 (locus POPTR_0012s10490) derived from phytozome v7.0 (chr-ID scaf fold_12; pos 11242441 to 11243454 reverse strand)
gcttaagcagcggattgtttctgattggcccagaggtttttttgttttcactttctcgctatttctttcgaaaaagaaattacttgttttaatatttatatatctgattttttttagttgaatttacctgatttgggaagatttattttattctaaaattgggttaatttgctttagttggaaacttttaggaccatgtttagtacccagtgattgaaattcaaagcgggtgctaattttcttgggttttttttggtaagtcgttgaaaaagtgaggattcaaatagtttgatgtaaatggtagtttttacttcacgattaaaaaacgggtaatctatctgttgatgttgtgaaaagttggtggtttagagatgttatttatgttgtgagattgttggtgtttgaagttgtggctgccgtaatggcatattgatttcgactttgtagagtaggttttgtttacggggtttgtttttatggctgttgttggaaataaatcgtgggaagctagcctgcttttgttagtatttggttatgatttgtattactgcttgattaaggtgagactaagtggcgtggaccggtaacatatgattgctttgctatctaaaactgttacagttgaagaatatgttgggtagtttgaaggttttggattcagtctgggttatgtgacctaatatagtaagggcggtgggagcatgtgcagaatcaagaaaggtaatagaatccgcctataatatgccaagtctttgggcatggatggtggtgttctttatgtgaacactggtcagccatgtcttcttcttttccaggaaaatgctgaattccaaatttagaaatattgacagctaagctaagaaagctaaagatctcttcttgtttgaaaaacctgtctactttcagggcaggaatgtctccaatgggtttttctttgtgctgttttggttatgtttttttctgaacgatttctttttttattttcaggcaaaacaataactcccaaggcagtga

SEQ ID NO: 57229 - DNA, 625 bp, Populus trichocarpa
  Intron number 1 from transcript POPTR_0004s09730.1 (locus POPTR_0004s09730) derived from phytozome v7.0 (chr-ID scaf fold_4; pos 8249314 to 8249938)
tttctctgaattcaagtatcaatacacttaaaagggtttgttcttttcttctttactaagcttaccttttgagtttcaaatatggattgacttatctttttcactgattctttttaacgtacgatgttgcaactctctctctgtaatgtgtgtgtcttttctgaagttaatggatatgggttttctttttggaactgtagtttgtgaaaagttcaatcctttttagtgtttaagttgctggaattatagttatttagctcacaaaattctgtgattattatgatatttgtggccattttcattggttcttgcctaacggtagatgtttcttgataatttaaagagctcattagtacttaatggtagtcgtggttgattacaatgttgggttttcaataaattttcctttaaagcttttatttgatgctgtgaaaatgttggaagaaaggaggtttaaagtttggaatttggaagcagaaacctctagttaaatctaccctagtgcaataaaacttttttttcttttatttgatagcattattctttctttgtgaatggttatttattatctatttggtttgtttatacccggtatttaagttctgcttattttatgtgtaggtca

SEQ ID NO: 57230 - DNA, 823 bp, Populus trichocarpa
  Intron number 6 from transcript POPTR_0004s09730.1 (locus POPTR_0004s09730) derived from phytozome v7.0 (chr-ID scaf fold_4; pos 8250884 to 8251706)
ggtatgttttactgttacgatgttggcattgtttgacagtacctatcatcccactaatcctccttgacccacaagttcttaaaccactttcttttttgccaagtattaacttatcttgattctaccacaactcgttattaactgagatctttatttgctaagtcataatgtaataaatttacagaagaggaaagttgtttactaatgatttgcttgttaacttttctcattctcctgtaagaagatttatgggtcacttttcctggcttaatttaaagctcaagctactgcactaggcatatctattgatcacctgccaaataggggcctgccagcctctgaacacagaattacaatttgtttcagtggaggttaaatgaatttaatgagcagcatgcatttcatacctgtataaagaagggattttctgctccttggttagcttgttttagagatgaataggaggttcatcaaacataatgtatttacatatatcttttaagagatgaggaaaccttcgttttgtaattctataggagcaaatcaattagttgatagctaatgcatggatagtcactgcatctgcatgtattatgggggttggagtagcaattggttcccattctggagtctttttcctaaatttatctatgttgtttaacctccttaaatgaaattcctgggagaacattatcaattaatcaaatattttggcctcatattaatgcacctcttgtaatttaaagaactctcttttctgaattaaaccaagaaatacaaaaaacatttatttgtgatcccttgttgcagagtaaagagtgtg

SEQ ID NO: 57231 - DNA, 290 bp, Populus trichocarpa
  Intron number 1 from transcript POPTR_0015s10650.1 (locus POPTR_0015s10650) derived from phytozome v7.0 (chr-ID scaf fold_15; pos 11525159 to 11525448 reverse strand)
tggccaccgaagaatagacagaagctgcagcggtgggtttgattaactttgcttttttcttaattttgatgaagaaaggaaaaacctttctctttcaagcaatgaagaagcgtagatctttgcattttgatttcttgtgggacaacataaagaagataatctcttagaattagtggaaaaggtttaaatctttatgggttttatgtgtttttgtttttcgatttataatgggatcccttttgttaaacgtttcaggtgaagtattcaagagaaccagataaccaaaccaa

SEQ ID NO: 57232 - DNA, 855 bp, Populus trichocarpa
  Intron number 3 from transcript POPTR_0009s06850.1 (locus POPTR_0009s06850) derived from phytozome v7.0 (chr-ID scaf fold_9; pos 6545874 to 6546728 reverse strand)
gggtgttcaagtcaagctcactggtggtagacaaggtcgatactttttacctttctgcgtctatttttatatgtagatattatggatatggatttctggattatgatttgtttttgcattgttttggagttcagtttggttgtttggggtgattaggttaaagaaaacagaaatgagaggacttgaagtgtatttactgaaagtgaatgttaggtgcaatgttgtaatcgtcaaattttctcaagttgggtgtaaagggtcgaacaaggatttccttttttttttttattttagacattagctggaaggcagatgactagtatggactatggaaggaccatgtttaaaatgtggcactggaaatcaccttacattgtagaaggtgtatttcaggggatgataattgatcgtgtaatagatggtcacttttgcaattagagatctgctagcttttatgtggtgttcctaagtgttgtgattttaggttttgattagaagatttaggatataggttcgtcatttgtcataagaatataatgcattggggcacaagccatgcttgaaattgtatagtggagatgggtgtgaaacagatatatgagaatgagattgtggatatcgaattaatggcaaatttttggtcaacaagaaatatttttgtgtaattttttttgttgtcagcatatacctggcagatttttgaaaattttctttctgccactacttaattgagatagagattccagatctttcataaataaaacattgtcactttctaactgtggcatgtaaggctaacctcttgctcttttgggttcagtgactgggactttgaagggatacgatcaattgcta

SEQ ID NO: 57233 - DNA, 575 bp, Populus trichocarpa
  Intron number 1 from transcript POPTR_0011s09970.1 (locus POPTR_0011s09970) derived from phytozome v7.0 (chr-ID scaf fold_11; pos 12415374 to 12415948)
aggtctgccatcttttctgtcattagcaatttttttatttggatgtgggttggattcaaagttgggaatatgaagtgggctggttttgtttccggatttacgtgcttgatttttctgggtttcaattatttgccttgtttttattacgatatatgatatgatgttttgttcttcatgccatttgtgtttagtttcagcaaatttttatttagtccaatttttgttgttgtaagtctggaccttttttttcataaaatttctgtgacgtcaatgattctaaagaaggtcatagattgattagagatgaaattatgatttttttttctccgctaaaataaattcaaacgtgtttcatcgggatttatcttgtttcggaactttaggcttcagaaacgatattctacgctgcaaagaaaaacactccctttccttttattttttcttccttttctttttaggagatgaattgaacttttaaaacctttttctattttgtggtagtatattttatgtttgtgattttaaatttttgagtaatgttctgcgctttaccctcttttttcaaggttacggag

SEQ ID NO: 57234 - DNA, 747 bp, Populus trichocarpa
  Intron number 1 from transcript POPTR_0009s05090.1 (locus POPTR_0009s05090) derived from phytozome v7.0 (chr-ID scaf fold_9; pos 5254329 to 5255075)
ttctttgtaagtattgaccctttcttgtctgtagccctagaggttttttttttttaattagttgaatgattggtttctgtcaagtgaactgtaaatatggatttgttggttgatgttcttgtgaaaaattgaaacgcatagtaaaatttgggataaaggagtgtgtatggatttggtatgaattctttttggtgttcaatgtacttccctaatgtgctttgattggatacgaagatagtagaagtagatggtgtaaaagttatccactgacaagtgggactggggagttttatcctggttactcgtgggagtatttttaatgtttgcccttggcgttcatatattttgattggtgactgctaaatgttaaagagtttgagggttttgggttgggattgggaggcgaaactttggagtgtactagaagctagtattcaggttgtttttagtttcactgatttaaacttagttctcaactgcagtttttaatggtttttcttacttaagactttttttgttatttatttgtaccaccgttttactcaactagagtagtctcaaatctattatataagtttgtgtgtgtatttcaatcatgttggtaacgggctatataatcatgatgtacgtgtatatacagatctcattattattattattattagttagtggaaggatttcataattaatttgttattgttggacaacacttgacttgagatcttgatttggcaggtcagtgcggat

SEQ ID NO: 57235 - DNA, 401 bp, Populus trichocarpa
  Intron number 1 from transcript POPTR_0004s13350.1 (locus POPTR_0004s13350) derived from phytozome v7.0 (chr-ID scaf fold_4; pos 13058561 to 13058961)
agcttgagaaggttcttctttttcctttttcctccctgtatgtttttgctcatgtgtgtctatgtttttgtatgtatctatggttttttttttttggtttattttaacaattccaagataatttttttttcttttgcttggttaacaatttaaagacaacttaggtgaacggataacttgatgtgctgaatttcaactgtatttggaacctgcttttcgtttttaaacgtataaatttgattgtttatctaagaaaaataagtaaaagcttccaatgccaaaatgaggatcccaaattgcatgagcaataggtcttacatgcaaacaaaaggtcctgtacccatgtttccaggaaataatatttatgaatatttgcatttgctttgatattgaacagatta

SEQ ID NO: 57236 - DNA, 820 bp, Populus trichocarpa
  Intron number 2 from transcript POPTR_0012s00690.1 (locus POPTR_0012s00690) derived from phytozome v7.0 (chr-ID scaf fold_12; pos 382749 to 383568)
ataccccaggtactcccatttatctcttctcttcttggcttcttcttcttctctttttgttatcagcttatttgatatgtgtgttttgttttgcgagcaattattacttatttgtgaatatgggttttctttatcttgaccttttgttatctgtcttaaagttgctttattgggtttagtttctcttgtgtttgttttcactgcaaatgttgtgtctttgattgagttctgttgttctgtgaatctttgttcgagaaaaaaaatgaaattttgtttctatttggtttgcgaagtaatgttgcatatgaatggtttagtgtctctagtgtttatttgtttcaattctcgcttgaactgagcttccatgttttcttttgtagcaaggtgtcacattttgaactgcccatgtggtggattagatagaggattggactgaattcgtatgggaggaaattgaatattgatatatgagagaagagatctctctggcctgatacgtaacagtaattttttttccagttattgtacttttcctgggataacagtccttgaagtctctatcatttcatgttttagtttcttttactagctgtacttcttcgcatgcactgtggtgatgaatgctttcagttcgtctgttttcttttatctagtatgcattgcagcacagttttggctgctattatgtgatggttttaagatttttttgttaagaatgtttccagatacattttggtttaggtgaatgttggtcttgtttgaaaaagacatcattgctctttaaagttaatgataggactgttgtgcggtgcaggtgcta

SEQ ID NO: 57237 - DNA, 563 bp, Populus trichocarpa
  Intron number 1 from transcript POPTR_0011s09520.1 (locus POPTR_0011s09520) derived from phytozome v7.0 (chr-ID scaf fold_11; pos 11815961 to 11816523 reverse strand)
acaaactaaaaactgtttaattcttccctgtttaggtaggcgctctttccttttcttatacacgcataaaacagctatcttttttctgttcaatttcaatggagaatgaaagattagttgaaatcactgggaattactattgctgtcggtaattgggtgtttttaatttattaaattcgattaatattgaaagattagatttcttttcagtttcaatttgggttctttttaattagaagtaatagtaataatctccagctcactgattttttattatgatgtataaatttgggtttggattagcttagcctcctttttgaaaatgaattggtggttcaatctactgtttttgttgtggatttagttaagtttcgagtcagcatgttaaagcataggccatctttgtttatttttgtgcttatggtactgcatctaggaatctagtcaatgtgctattgtggattgcattgacaatatcatttttggtttttgaatgaaaattggaaattctatcccgaaattaatgtggtatgcatgccagcacagaccctagttggactcta

SEQ ID NO: 57238 - DNA, 829 bp, Populus trichocarpa
  Intron number 1 from transcript POPTR_0004s00430.1 (locus POPTR_0004s00430) derived from phytozome v7.0 (chr-ID scaf fold_4; pos 141058 to 141886)
acaaccatatctttcctaattttttgctcaataaggtttgttctttctttcattctttctcatctttgccaaattttatttttattttgtaattttctgcttgatatgatagttttaaatgtttagaaaactaagcttttgcgtccacaattgtgaagctagcttgtttacagctttataagtattgaatgatgtagttattggagagaacttatgctcgtcaagcagccaagaatgcatcaccttacgaacaccttcgccaggcattacaacaggtctcttgttgtagttttgatggttaattgggattcaatattatctacttggataaattgttggccacgtcttcttgctcttttggttttctctttattttttaatgattttcttgggattcttagacagggttgtgaagtctcagttaaagagctagatggccttttgaccctccttgcagagaagaagagaaagatggagcaagaagaagcagaaagaaatatgcggattttacttgacttcttgtgctgcctcaggaagcaaaagcttgatgagctcaatgaggttcctgaatttttatggctttaggttaatttgtaatctgatttttcttgtagtcgagaaatttttgtaggcagtgctacatttctataattagaaacttaaaatcatatgcatttggtacaagagaatatctaactacattgattgtgtctcatatttcttgtcggcactagtttgattgcttactggtgtttgattaatctgcagttgatagtcatttgtgccctttgcagattcaaacagacctgcagtacattaaggaggacat

SEQ ID NO: 57239 - DNA, 830 bp, Populus trichocarpa
  Intron number 2 from transcript POPTR_0012s04230.1 (locus POPTR_0012s04230) derived from phytozome v7.0 (chr-ID scaf fold_12; pos 3466809 to 3467638)
gcctaggtgctcgagttcctccagagacaaaaccggtgaggcatggttccttcacttctagtttataaatttttagttttttttagcatgcttttgcttctgggttatgtaataatgcagaaatcttccggccccataggatttcgacttatattgttgtcacaggaaatgagctgtaacttcatctcttgtagtggcatattgttgaagtattttaaaggatggttttctatactaatttactgggaagatgaggagtcttttccattttcttatgatcatttcttgaaatggaaacaaatgaggaaaaaaagagaaaagttacaatttttgaacagaatatatatacaaactaatcaatgtactacagaaatttctcctaactgatgaaatattgagctgtaaatgataatatatggagttattaaaatagaggaaaaagtgaaggattctgtagttgaaacatttcattaatctcttcctttccttgcgatttttactctggaatatcacgctgtcttttatttcataaagaatgtcttcttctttagtatttttttctatactgtttgattctctggcagaaatagtgcttctgggttttggactctagccttgtggattatgagttcacgtgtccataacttacttggcacaagagagagatcagtagcactcattcttttttattatgactatcgagcttcttctttttttttaagaattttttttttatagcttgaagggtaatttgccttttacttgttcatatggaaatagttatgtgctgatagaagcatgctcttatgcaggagaaaggtgatattaac

SEQ ID NO: 57240 - DNA, 327 bp, Populus trichocarpa
  Intron number 2 from transcript POPTR_0012s10830.1 (locus POPTR_0012s10830) derived from phytozome v7.0 (chr-ID scaf fold_12; pos 11536385 to 11536711 reverse strand)
ttgagcaggtctgtcgctactttcttttactttgtttttagttcttaatggcaatgcttcaaaccttgtaaagtatttgaacctgagttaatgcctcctcttacattaatgaaactgatacaagttctgaaattttacatctcttcataggaagccatgataaaaaaacaaaaaaattatcttctttttgcctcctctctggtttctgagctgctagagagctgagttataaagttttaatttctatcttttaatttgggatttgtggaaatgcttttcctgtataatacaggccttcttccagcgttggtggagagatcagagcga

SEQ ID NO: 57241 - DNA, 368 bp, Populus trichocarpa
  Intron number 1 from transcript POPTR_0009s01350.1 (locus POPTR_0009s01350) derived from phytozome v7.0 (chr-ID scaf fold_9; pos 1608190 to 1608557)
agtcagacccaatattcttgggtctgttttcttgggtttgtcatcacatcaaaataatataaaaatatcaaaaaaatattaatttgaagtaaagaaaaaaattaaaaaaataatcatttttttaaaacgcaaaaacaaacatgctttaatatgaaaattcaacccaacctaaaataaaaaaaaatcatcatccaatttttgtaaaatataaaaaaatcacttcaatttattttccttttatagtatgaaaacaaattcaataagagaaaagaaaaaaaattaaagaggaaaaaaaataaaattagaaatatcttaaaaggaaaaaaattaaagggaaagaaattagttaccggtgtattgggcgctac

SEQ ID NO: 57242 - DNA, 401 bp, Populus trichocarpa
  Intron number 2 from transcript POPTR_0012s10400.1 (locus POPTR_0012s10400) derived from phytozome v7.0 (chr-ID scaf fold_12; pos 11182695 to 11183095 reverse strand)
tctctgatccttatcactgtggccaaacagcacaagtaaatttctcttcatttcattgaaattccttattttcgattttatttcgattttcctcttacgcaaaactgatttaggtatattacttcaatttttatcttttgaagtcgctgcgatcgtaatcacagattactatttttctaatttatgctgatttcctgttacataatccttaaatgtcttctaataatttgttttcattttgattattttttgttaagaaaaaatcacagttgaaatgattaaaaaatcctttaaatgttgtcatctagctattttatttgtattttgatttctgtttgtctggataaattcttttcctcggttcagatctccgtgtcgcctttaaatccggctcattgggc

SEQ ID NO: 57243 - DNA, 823 bp, Populus trichocarpa
  Intron number 1 from transcript POPTR_0004s14920.1 (locus POPTR_0004s14920) derived from phytozome v7.0 (chr-ID scaf fold_4; pos 15574190 to 15575012 reverse strand)
ccgatttcctctccgcgttagtctttctttctttgccactgtttggttgctgagaaaatcaatttttataagtttttttttttttgataattttatagtgtcttactgattatagtgacaaaattagttcagcgttgtagatttttagtgaaataaatacctaaataatttcattttgtttttaattgctgtgatattccaaagcttttgagtagccaaacagagcatttagggttttctaatcaacttaataatgtccaattatgtgcggattctagtgttgaatggtgaaatttgatttaatttgcgattggagaaagaaaaacgtgcatgtattttggtaattctgtgataattgcattcatgaagacttatataggaggatgaaggccaaaaagtaggttggttaagggtaagaaaggaaaaatctttgttagattgcgaaataaggtttgtattagagagaactgaatgactatatgttgttgttcttcttcttcttgttgttttcatttgaatggctatatgttattaaatggaatgagtattgtgtctggctcattctatggatctctttttgtgtaccatgattgaagggacaagctcaatcaactcttttatatgaaatcatttgctcaaactcaaatgcaaatgcagtgatgctaaatttttttgtgtttgttgggttgtgttgggagaggggctggggagttgaagatggttggattaattgttttctccataatgttgaacttgatgtgtgtttgttgctggctaatgatctacagattttatcctgaaagggctttgtcactggcatata

SEQ ID NO: 57244 - DNA, 542 bp, Populus trichocarpa
  Intron number 1 from transcript POPTR_0011s03020.1 (locus POPTR_0011s03020) derived from phytozome v7.0 (chr-ID scaf fold_11; pos 2997150 to 2997691)
atcttcactttttctactattgaggagttttggaggttgcgccttttttcctttgtgtggttcttgattttcttgccttgttctcttgatctttgatgggaaattgcctttgttttttcttaagaataatttatctttttttttgggttttacaagaaatcggtaatgcaagctatagatctgaaaattcacgtatacctagagaaagttgctatcctatgattttaatgttgattgcgtcaattatgcacgtcgttattgctttctttgtgattaatgtgaaggttttttaatgaaatgtttttctgtgtaattgtagtaaactcatgttactatagaaagttgttatcttttgttgttggcttcttacgtctttggttaaagttggcagcttgaattgtgattttttattttctttgtgaatgagtactagcagtttcttcagtgatttaatggaaattagttttgattaatgcgttgacaatatatattgtgtggttcattcagtgtttacaacaatatacatcacccgagcaagctgg

SEQ ID NO: 57245 - DNA, 620 bp, Populus trichocarpa
  Intron number 1 from transcript POPTR_0004s14710.1 (locus POPTR_0004s14710) derived from phytozome v7.0 (chr-ID scaf fold_4; pos 15360420 to 15361039)
tcttcttgcaggtcatgcactgaaacaaaccatctcgtcttcttgttattttcatttttgactggttgttgaagtttttgttctctctctctctctctctcttttaaaaaaggttgctttggtgttaaaatctttaatgaaggtgacccagaaagaaagattgaagctttatgatgttggatgcttaatttctttagttcaattgatttttagctagtgggtgatttagtggctatggtagtaccacagatatttagaaagtttcaagtttttcatgtttgatgcttcaatactccatttgtgaaggatagatatttgcttctatttttgagatgcattttcttttaaaagtagctaaattatctgtaatactgaatttttgaaagaaaaaaaaagttctgtaaagtgcttttgatcatagttcaactgataaaagttactagtattgtcagcaatcttaaattagctctaattttccatattttcttcgcggatgcgaaacattgtttgggaatttgaaagttcataaattagtagattattttctaatatagtaagcctgatatttttgctttgtttgtttgttcttgtatatttttttaaaagactcaagcaagaat

SEQ ID NO: 57246 - DNA, 273 bp, Populus trichocarpa
  Intron number 1 from transcript POPTR_0009s11630.1 (locus POPTR_0009s11630) derived from phytozome v7.0 (chr-ID scaf fold_9; pos 9619035 to 9619307 reverse strand)
gcgtttccaggagaggtaagaatccatacatcaaaacttgtttcttatctctctctactactcctgctctattctaactcctagtttttcaatacttttatcttcttaaagtaaactcgcttgagtaaaaaaattatgtttttttcttcctttaatcctgttattcatgaaatgtaaagatcttcaaattaacaacaacaacaacaaaaattaaaagtcatttttttcggttttgtaggtgggattgcaattgcttctttcaccactgaattc

SEQ ID NO: 57247 - DNA, 1035 bp, Populus trichocarpa
  Intron number 2 from transcript POPTR_0004s16110.1 (locus POPTR_0004s16110) derived from phytozome v7.0 (chr-ID scaf fold_4; pos 16551992 to 16553026 reverse strand)
tttgttgcaggactcttcaaggacacactggcaaggtgataaccactattcttgttcttttaaatttaattcttatttgttttcatcgtagatataagatagaggcaataaatggggttttgggttttgatttaactggcgaaggaagccatgtagtattttggtagttgcaattactagaaggatttttttttttttggtgggcagatgcgatatagtttatgcagaatttgttatctgccactaacttaggcgaaggaatgttatggaaaacagagggtccctatttttggcttggcttccaaaaacgaagtctagtgaagattgggtgacttattattacttttaagatcttttgctctctcttttgtaatgggggcgtgtttatgaaagggcaagaaatattcatctggatgaatttattattaaacgagaaaaagttaatgcatattatggacagagagcacccaagaaacagatagtttggtttgttagagaggccctttgaatgggagaaattagaagttgtcaattgatttatcgaaaaagctgagagttagaacatcaacattttattcaatgctctgtttgttaggaaggatgaggggggtggattgaggaggaggaatgagatgctttctaagctagtttgttggatggagacccaagaaaggaagggaagggtcccgaatttcctttctgtttcgcaatccatcctttcctctcttgttatcccaacaagtagatagacgggttaatatccctcctttctactctcaattcctcccctttaccctttccatccctcttaatgaacagagtgcaagcgaaattatgaaggtttgcataggtattttgaagcaatgaaatgaggagatgatgcgtaagatctgcagactaaagggtgattatgttgtattgatcgcatgttaattgtaatttggcatgagtgctaaacaatgggtttcaaatagagttttaatacccgtgacacttgcaggtatattcgttggattggacccctgaaaggaatag

SEQ ID NO: 57248 - DNA, 692 bp, Populus trichocarpa
  Intron number 1 from transcript POPTR_0012s02900.1 (locus POPTR_0012s02900) derived from phytozome v7.0 (chr-ID scaf fold_12; pos 2356550 to 2357241 reverse strand)
gctttgtaagctagccctactgtttttagctaagttttctgcagattaggcatgatcatgtatgtgattcactatagttttgtcatgtgtgtgcttcttaggtaactttcaaggatcctggttcagcaacaagagcttgtcaaaatccatatcctgttattgatggaaggagagccaactgcaatcttgctgcctttggtgcacaaaagaaaggtctgattaactgcatctggtccatgattgcttgccactagtaggaagttcataattctgtgtcttgattccatgttggtgatttttattgtaatccttgttttttttccctttttccttaaagctgcaggaactgataaacttggacctgcagcatcaagatccatcacaccattaaacactcatggcccttctgcgtacttcaatcaacaaatacctcaatatgcatttcctaattcagtttttgggtaaagaaactatcttatttgaaaagaattgtcgaaatacttaattgtcttctaattttcttgccccttacctttcaggtatcctatctacccacagagcacttatgcaatggttagtttttctgagatagctcactgataaatgcctgcatacacaggcagaagcgtgtacaggttttgattgcccaacaagttttttttttttttttgtcttgcagaataatttttaca

SEQ ID NO: 57249 - DNA, 646 bp, Populus trichocarpa
  Intron number 1 from transcript POPTR_0009s04560.1 (locus POPTR_0009s04560) derived from phytozome v7.0 (chr-ID scaf fold_9; pos 4882324 to 4882969 reverse strand)
tttgaaagtcccagtaagttatcttccttttctttgattcgggtttgattttgtagtggacttttttggggagggtttaattgccttttcaggtttacttttgatgggctagggttttttttttcaggggattttttttaataattatttgatattacttgattattatatgctattgttaaaaagaatatgatctgtccggttgctggaaaaatgatggtgcgtgaatagaaaactaattttgaatgtcttcagtaatttgatgtttaaattaaggtcttaattgatagatgtttgattgtgcttttgcttggtttatccgccaaggaaaggaaataaaaattaattttaaatataaaattaaattaaaattggcctagatttctaaaatatttgaagaatatagttgggttttgagcatttgtttatatatgaggtactatcaggtgcttgggctacatctgctgtagctcttgcagctttatttcattcaatttcaaaacgtgagcaactattctttgttgtgtttggacatagtataaataaaccattgtaattgttcgctgttaattttgactgatttgtttgttttttgtttctttttttgcaatgaacaatagcacaggacaaaattgctgattttgag

SEQ ID NO: 57250 - DNA, 865 bp, Populus trichocarpa
  Intron number 1 from transcript POPTR_0001s30760.1 (locus POPTR_0001s30760) derived from phytozome v7.0 (chr-ID scaf fold_1; pos 29235935 to 29236799)
gttccgcgggttctggttccggtgattttcaccaggtaatatgatcatttattttttaatttctaaattgtaagccgagaagtttttgtgtaatagttttttcagtttgcaactttctaaagtgttttgtattcgtgttatatagataagagtaaataataattgtactgcaggattaagattagggtttgatttgtttgatttgtttgatatcaggagagatcgatgctggattgtctagacgagtatattcggtagaaactgaatgtgatttggaacttggttttaggcagtatcgagttagcagtcgttgccactcgttgccactaaatgcaattaacactgattcatgctgatgaccttttccgccatgaccatagcgctttatattagagatgcatgctcatggcgttgtgacagtagtgatccttttgtataatctttgcccgtggaatgcattggctcaaacctcttctattagaaaaaggattcctctgccgtttatggtttgttggcacccactataaatctagaaaagcaggaatacagaggtctaaatgcacaggacatcttggtgatctcaagagatcaaagtaattggattgtaacagactgagggttgtattgaagttgtgtttggtgtcgttgaaagaagaatcatgccaggttaaacttatctaataataccatgttgttttgtatcatctgtgtgctcaatatttaacatgtattatatatgttcatcggtgaagcaggaagacatgagtgttgtgggtgtgtgtgtgaatatccatgtttgcatatgttcgtctcactattttgttttttggttttttatttttttgggtaacaacagtatcggcaa

SEQ ID NO: 57251 - DNA, 728 bp, Populus trichocarpa
  Intron number 1 from transcript POPTR_0004s10580.1 (locus POPTR_0004s10580) derived from phytozome v7.0 (chr-ID scaf fold_4; pos 9112620 to 9113347 reverse strand)
ccattcaagctacttcttctttttggtcttttgaggtaagggttatatgatcatgcagctattgattagcagttattgattcttttaattgttcttgtttctgttctttgtttaacatgcaattcttaatgtcttaagatttcattgaattatcattgaaagtatttttttttggttggttagaatcgaaggtattgaagcacttgatttttgcttttttcttggttgattattcctttgtgggatattctctgattgttttagcttgttttggtgtttgttactgtgttttagatatgatgaaagaaacccattttgttatttgctctcaatttgaagaaatcaggatctgtcatattgagttattgtagattttgttttggaaagcaacaagatcgaattaatatgtatattaaattgtgtgcttaaaataaacgatagttttactcattaaagtcactggctttttgagtttataattttaatctctatgtgaatttagcattgaattgcatgccaaaactgaaatgggtaaattttaaggaacaggacttagttctgatatatggaaagtgctcggtatgtataagatgtagcgttaaattgtctcctggctcagctcgtgaactctttgctttgagttagcatataattaaaattatcatttttttatggacagcaacttgtaatttaaccaggaggcggaattagacataacatatagaagt

SEQ ID NO: 57252 - DNA, 668 bp, Populus trichocarpa
  Intron number 4 from transcript POPTR_0004s04810.1 (locus POPTR_0004s04810) derived from phytozome v7.0 (chr-ID scaf fold_4; pos 3567753 to 3568420 reverse strand)
gtaacttcgcaagttcagaaggtcaatctcttaactagtatgcttttatttatttattcgagtggttgtggatgttattgtcgggcatttggagatttgagaactaattttagatattgtctgcataaaacattttttatgtttccttgaataaacagccggggaaaaaaagagctgtgttatcttgtgttttgttcaatcttcttatttgcaagtttattgtgttattcatggtgaagattgtgttgttggaaatctaatgaggcaatattccgtggaagtgaaaagggatatcaaggaactaaagtagtttgtagagtgagccttcagaagcatatatgcagaatatggctttgttttttagtcacttgtcatttgcttggtactttgaaatctgcagtttgagaggttaggggaaattgtctgtgctggaaaatagagtggaatcaattttttttttttttgggggggggggggttgaatttaataattagtcttttcttttggaaaacatatttctcttattattatgattatgtttagtaaagtattaaactccccctctccttttccaatatagcatagttgtaatctcatcatatacaagcatccaacttttgttaagtataaaaattagttgttggtttatttgtttttgttccctacag

SEQ ID NO: 57253 - DNA, 557 bp, Populus trichocarpa
  Intron number 4 from transcript POPTR_0015s00620.1 (locus POPTR_0015s00620) derived from phytozome v7.0 (chr-ID scaf fold_15; pos 374005 to 374561 reverse strand)
agaggtaattaaggaattaacttgagtgtgactgaccgaccgcatgagagaagatgacaaggggatcccatacatttgggctactgggtgcccaccccagagatgtttccacatctgctaaaggtggggtctttctggcgtaggactgcggttgtttagatggagaatcttgggacctcgcctacgtacccccaaacccatgccctgctgtaactgcgtgctaagagaagctgattgtctaaagatgtttcctagtgtagtccaacgcactgttttcaccttagaaaaacgagaaaacaaacaaataaaaaagagaaaaactgcaccgaatttgacttattagaagtcgacactgaacatggttcccatgctaattttttctctttttattttgaataggatagattttggcatgaacagattaaggtccactcaggatcgaattgaggattaatctgttcatgtttgatataaaaaaaaatatgatttttccttaattagaagtgttttgattgattacaggagtgcaaacagcagtgacagacttgagcacaagc

SEQ ID NO: 57254 - DNA, 979 bp, Populus trichocarpa
  Intron number 1 from transcript POPTR_0004s22220.1 (locus POPTR_0004s22220) derived from phytozome v7.0 (chr-ID scaf fold_4; pos 21152605 to 21153583 reverse strand)
ttaaacgcaatctctgccttgatttagttcggagagtacgtcccactcttttaggcacacccacgcttctactcaatataggtgctttgtaatctgtttctcgaactaaacatggatgatgtggttgaaaatttgtaattgcatttgtggacagaataaattatgttgcaacattttaatagacaatagaatcaattactacaataatgaaaagcagtttaattccagctatacctagtgcagaaagctgaaatgtctttatatgcttatttatgcagtgattcaagggagataagtgatatctaagtttgaagatattatgattattttgtctaaggataattagttgcagtcgaggccaatttgctattttttctgtttattttcttatttgatcatgctatataggctatttagaataggttaccatacaaggtagaattttaagtgcccaaaagtgtgttaatgatgagtaatttcgtggtttgtgattaacatgcatttgtttatgaaatacacaggttccattattcgatcaaaatgcaatatacaagaggcttaaacttgtattgtgcatggaaggcatatttattgtgttaaagaataatataaatcatattttggaacctcacctaacaactttagccttttggtttagatggttctttgacatggtattagaacactaggcagaaattacattgtgtgagcatccgcagggaccatcgcaatgttttgttttaattaaactattgggctgagatggttatttgacatggtatcagagctttgaagactaaataatcacgagttcgaatctcaccatccctatttatttgataaaaaataagtacaatatagtatgaatttgtgtaagtttcaagctcaaagagcttttatttaaaatgatgtattaaaaaataatataaatcatatcatgaaacttagatattatacctgacgtgatcatttcaatgag

SEQ ID NO: 57255 - DNA, 895 bp, Populus trichocarpa
  Intron number 1 from transcript POPTR_0015s13410.1 (locus POPTR_0015s13410) derived from phytozome v7.0 (chr-ID scaf fold_15; pos 13387316 to 13388210 reverse strand)
gcaccccaggtaaaaataacaacacccccttgtttgttaactgcacccgaggtgcatttcggcaattgccctttgtggattttaaggatcttgatcaatgttaatcatgatttgtttttcttgtttagcttaactactggtgtaatcttgactttcttgttaaggatgttttctgtgttctttgttggagttgatgatcattgatcaagcatgcttggctccatatcatgttaattttgtatgatttcatgttgtgttagaaaatgagagtttcttaattaattaggtaaatacttggattaatttatgtcttaatggtggaatgtaaacaatggggatggtcatgaaagtggtaaaagaaggacttgaacttgaatgatttcaaaagaaaatacttcatccgattaagccgataaacattgatttggttaattactaaaaaatggaaaaggtaaataacaacaacggattttccgttgctaaatctgttgttgatatatattgaaaagattctatacaaatatttcgctgctaatccgttgttaaatcaagaaatgaactgtcccgatgctaaaatcttatgctaatagccattttttagcggtggtttgtaagaaactctgaaatcaaaagaaaatgttgtttggtaggagagaaaggggggagatttttgagagatattaattgaaatggtataattagggcgtagaaaagtaattcgttagctgaaggtggaaaatgtggtttcacaaatggtccaaaacaaggaaaatgtatcgaatatgccttggaagatttttgttgggatggtagattcattgataactacttgttatgttctttttatgcacttttggtgagttgattttattgtacatgtatatattgggttcag

SEQ ID NO: 57256 - DNA, 1017 bp, Populus trichocarpa
  Intron number 1 from transcript POPTR_0014s02160.1 (locus POPTR_0014s02160) derived from phytozome v7.0 (chr-ID scaf fold_14; pos 1855455 to 1856471)
atatcatcaagggtctcgtagtggtaagcagtttttgcaggcagatttagattgattgtctttccatctgtttctgaattttggtttgcagttgacaaaattatttgctgtttatcgttggccattaagaatagcatggagaaatttattttgattatttcgtttctcccttattttttcaactgccaactgactaatgtcgcagaaaaattaccttgacagatgcttcatgcttgtgatattacttgcctgtaagagagctgacgagctgttcttgctggcttgctgtattctctttctgcacttttcttttcccccggctccaacaatttgtctgtcttcgtttggctttattatgtgctctttgtagttaatctagacgggccatgtgacaggttaaatctagttaattcgatcaagttacattcaatcgaaacctagtcgggttaattaaaaagaaacaatgattttttaactaaataattaatctgggttaactcaatgattcgtgtattgacctgataacctattaatccatgctctttttttagctagttctttacctttgagaaaaaccgaactactgattatattataatagaaatgttattatcaatatcttaaaaaattcctaatgaaaaatggatggcgcatgctaattgcagtatataacaattctgccggtcactttctcaattcatgcatctccccttgtccaattctagcttgttttcttttttgcccccacgtaacacgaacgtggctatatatgtgtttcccagctgatcacaatacatctatcaagttcttaaaatatggacaaggacggtgaattgatagatttgttcacattttttattcaattattatggagtatcctgcagtgtaaatggatgtgtatgttactaatgcttctgttcagaattgaacacaagtatcagcatttatccttggctaacttgaatttcttcttgttctacaggcaatatttgctgcagggacagatacagtagctgt

SEQ ID NO: 57257 - DNA, 982 bp, Populus trichocarpa
  Intron number 3 from transcript POPTR_0012s07480.1 (locus POPTR_0012s07480) derived from phytozome v7.0 (chr-ID scaf fold_12; pos 8394937 to 8395918 reverse strand)
cacgggaaggtatgtgtcgtacacgatatctttttacagtccaaaaaataaaccctgacttccctgtagtacagattatttatgttttttttcctttctctgattgaatgtatgacaaaaggaataattttaagccctttcttctttctgagggaaggacagggtttgagttcttattgtttatgattgtttgctttggaaatttgtacttgctccttagttagcagagaagtagaacttctgaaattttgattgctaactattgcctcctcaaatctagagaattcccttcaattagtttttgtgatttaaagaaaggaaatcagtttgccattcattcattagcatcaaatatagatgtctggtatgcagcagttaatttataaacttgtcctccatggtgagagactctatacaaaccttatcttttgcaactaggctttgtccctgccaactggcttcctttgttctttaaggagttggcaaagttggaaacaattgaaaattgtttagttcaatttagagacaaataaacaagaagccaaatgggggaggctttggaccaggcttttcttgatctctggctggtgagtgcatccgaataccctaaataagttgcttctaacatgctttttgggtttggaggatcaaagggggcaaggtgctgaggaagtatgtaatttttgctatgattcgacacatttttctgtgggcattagactacaaattttctgaacaatgtaatttttccttctatttttgggtttgaggagggatggctgtgctcaggaggaggttgagaatatcagcttcctgaaaacctcagtcataaaatctgtactcacatccatccatgtcaatgctggtgttaaattgtaggcatcgcctctagaaatatattgcagacacttattgattcataaaatcatttttgctttatatctgataactattcacattcaagatccttcttgatgcagtt

SEQ ID NO: 57258 - DNA, 881 bp, Populus trichocarpa
  Intron number 1 from transcript POPTR_0001s23750.1 (locus POPTR_0001s23750) derived from phytozome v7.0 (chr-ID scaf fold_1; pos 23130074 to 23130954)
gtagaataaattattctttagtccctatatttcaagtgtgattatatcttactacctcatatttgcaaacccataactatatttcttatgaaactaagccaaattggttaaaaaataatgtactcatagacttttatttcctctagttttttttttatagatcttcctagataacacaaatacaaaaactcttctcataaataaataaaaataatatttaataatgctatttaaatagcatatatagttaacattcagatttaataaatattatttactgggttgattaaacaattttaagagcacaagagataaattaaagaatttaagaaaaaaataaaaaataataattgattgaattaaaatacacaaagataaaaaaaataaaaataaaattgacacacaattgattaatgaagcttaggatgcccgttaaactgaaagtgtgatcaatgggggagtactagtaaatcagctgccacaatctcatgcatatgaatgcatgcaactcctaatcactctctaatttattcttttgattttttataagttgaatgattaactaagttctatatcttggttttcaatattttcctcttcctagcttgaacagatacttaacagcaaattaagccctccatggaagaagtacctgatcctcgacttggattgacgttgtcttccgatctgatacaagaccctactttgctcatctcctttcctacggagggtcaaagaagacagcaattttattgaaaatcgttccagaaaggttcttgccatgccatatcattaaatattcttgtttgaattagacttgactcgtttatttattttactatacagaaggatagagcagctgtggccggagacgctgttta

SEQ ID NO: 57259 - DNA, 582 bp, Populus trichocarpa
  Intron number 1 from transcript POPTR_0004s06320.1 (locus POPTR_0004s06320) derived from phytozome v7.0 (chr-ID scaf fold_4; pos 5029341 to 5029922 reverse strand)
ccgaaattgaccccaaggatcgttgggggagcactgtatgtatttggataatgattttgtttttctgatttgggtttcttcagattgttgaaatagttgttttgagagattagattgctggttggcttaactttttttttttaatatttttttatggggttgatgatgttgttcggcccgagatttgagtttgattcctagcaagcctatgggtagatagactctgtggattatgaagttaggaattttgctttgtgttaaataattttgttgttaatttggaggaggcatgcggtgtatgccatttgagttagcccaggcaatttgctcaagcattttgttttgagccaaagggtttcatattgccagtttggagtgggttcttttgctgatgctaggtagtaagatatggggtgctttcaaattctccagttgcacggagagcattacaaacccgagcattcctggggttttttaaatactaaaatgtatcgtttggtttgttgtttaaactgatagtcaagagttttttttcttttctttttctcagtaaactgatgttgcttaaacagcctcttgcag

SEQ ID NO: 57260 - DNA, 753 bp, Populus trichocarpa
  Intron number 4 from transcript POPTR_0012s12980.1 (locus POPTR_0012s12980) derived from phytozome v7.0 (chr-ID scaf fold_12; pos 13310984 to 13311736 reverse strand)
atcagtcagggtaacactgtaatcattcagagttgcatccatttctaattttgaaagcatgctagtcaccaagcagaagtaccagtgtccctaatttcatatgtccctgttacgtctttcaattttctgaagatcaacatatatactcttatatgctgtttaaatgatgacattaataatcttatgtcttaaagtgaagtctgaaccttcaagaacaaattaagttaatgaagtaaaagataattctcgtttgctacacatgatgaatatttgcttgtgatacttcgagtcttcgacctgtctttaagttctgaactattgtgcatgcttcgtctgattttagctgaatgcctgtcaaattcccatgatgtacatgtgattgaaattttcttggcaaacacgaatactttcatggtagagatcttatcacatgtcataacttcttaggccgttgtttgtgtctgctgatatgattcagaagagaaaattgctaaatatatgtagtatgtgcttttgttgttggaataacctccgtaacacatcttgcttcttccagcgtcttgattatattttttaaaccatgaagctctttctgtatcctctacatgcattaattggacttgatgcatgctagctattcagcatgtttaatttgttgtctgatataatcatgctatgcaatattgatcttgaatggagaaatttgatcgtgtctatgcttgctcttgtaaaggtataaaaggttcctggcat

SEQ ID NO: 57261 - DNA, 858 bp, Populus trichocarpa
  Intron number 1 from transcript POPTR_0004s22620.1 (locus POPTR_0004s22620) derived from phytozome v7.0 (chr-ID scaf fold_4; pos 21485133 to 21485990)
tgaaggcgtcgtcactttgtcccaggaagacggtttgtcactcttctctctctttaaggttttgttgtgaatgtctttgttggttgaggttggccttttcattctttgttggatgatgaagaattagagaaaagagtattgttgtttttttttgggagatgggttttcttttttgaccgataaagaatcttttttggatcaattgaagttgtttcttgatgggtgtgctaaccgcatggtgattttatccttgctgagtttatatttattttgcctgtcttttggaaaattcagattgtaactgaagttgttgactttgaaattagttagcaagtagagaaaatgaggttggaactagataatcagtgttcttgtacttgtttcagactggttgatatttgatttctcatgtttaaaatataaaatttgaaaaaaaaaattcaggatatttgtatgggaatgatttctaagtacttttctttttgtttttcacaaactttctgattgatggtttgattttgtttacctgtcttgaggtttagtttttgattctttggttttttcgaagggtagtttccaaaaggaatactgtcttgtggaaatttttgaatttcaaatctggaattaggagatggaagcattcctgagacttgaattagctgatatggtttttgttctttccatcactgagaagcttgaatagtcaaccatcccaagtcatatgaccataatggtttcagttcagtggaggttaatgtcaagagtcttaaacattggagttttgatggtcatatacatattatttgcattttgctttcgataggtcctacaacagtgagtgttcgtattactgggctt

SEQ ID NO: 57262 - DNA, 836 bp, Populus trichocarpa
  Intron number 1 from transcript POPTR_0009s09690.1 (locus POPTR_0009s09690) derived from phytozome v7.0 (chr-ID scaf fold_9; pos 8506529 to 8507364 reverse strand)
gggtggtgtttcattagaaactcttcagcttagtgagtgaccacaaaacaaaaacaatcctcattgtgcttcgttttgtttatataaaaaaaggggttgggggtttgtaataggtcaagggaagctggattgctaaatttagattggttttgtttgtgttcaatatttggcctcaaatggatatttaaaatgatcttttgttgggtgctataaaagatgttgcttttgtcaagaaaatatgagagtttctacttaatgttacgaataaaagtggacttttttttttttattactttcagtaaatgatcatgacatttgtgctttcagtgcttatcctggtttattagcttgtaaatattgcttagttcattattttgaatattacagcctctaaaatagcatttttcgatagctttatgatcatgccttttaaatgtatgtttctggttagttgataggaaatttgacaaaaagaagaggataatggcgaagtttttaggtttttatgcattatgttaattcagttttctctcacgagaagtgggatcatttgaattggaggtcttgtgtttttctttagaatattggtgctcgaagtttgaatttcttttattttcatgtttctatgaccatatagagggagtgaaatgcaatagtcttatctggatttatagatcactgctgcattgttattttctgcgttgtttgataaatgatgaatttgctccttgtcttttctcctttctcacgtgtgtttgcccgcaaaatgagtaaagctcactgcattggattcttttgtagaggatacactctggaccgggactccaggaaattat

SEQ ID NO: 57263 - DNA, 770 bp, Populus trichocarpa
  Intron number 1 from transcript POPTR_0014s00560.1 (locus POPTR_0014s00560) derived from phytozome v7.0 (chr-ID scaf fold_14; pos 513151 to 513920 reverse strand)
acagtggttttgttaagtatttacttgcgtcccccagccttttttttttttttggggtggggggttcttattttgtgttattaatttgaatttggagattttcaagaaaagtagctatgatttgtttgatttaaaaaaaaaaattctgggtttttctatttttgtgttcttgaattgattttgggttttggggtttaaaattatgggttctttgattttttgaagaaattgagtaacccggttgattctttaacaaactccgtttctgggtgtttctagttttgtgttctcggcttgattttggggttttcagccatggttctttgaaagagggaacatggttacagaaattaaggaatcagtgaagtaattcatgtgttctgcttttttgaattgatacatgcagtgacgacgagtgcaggaaggatatgccatgtgccatcaagagcctaagaaaactgtgcggttcactccacataattaatcatatttagttcaattccataattagacaattaattttttcatttgctagttggttaatcactaagtgggttttaattgcttgttatgatttagggcctcaagttgttgaaaagccagctgaagccaagaaggaataggctaagaggcactaattttgttttcctatccgattaatcaactgaatatatgttatgatttggggattgtgaattagttatttggtttgtaggaagacaacaaccttgacagaaccgaaagcgaagaaagaggagaagggcaaggat

SEQ ID NO: 57264 - DNA, 342 bp, Populus trichocarpa
  Intron number 1 from transcript POPTR_0012s08040.1 (locus POPTR_0012s08040) derived from phytozome v7.0 (chr-ID scaf fold_12; pos 9051743 to 9052084 reverse strand)
tcgccggtcagttcccctcttgttgttctacttttctttgtttgtgtcttccttttgtcttatggaaaagatgaaattttttatttgcggtaactttcgattgatcattagttttgaaggaggtgatggttaattcttttgcaatctgtgatttctacacgggtttgaattgaaattgcttatttctaaaagttcatgtgatcccacttgttggttaatgcagaggtattggaatatggatctaaccactagaagtatcagttgttcttgttttactaacaaaagttctgtctttgtgcattatcagttaaactgcttgactggggtgaagagggtcaaagg

SEQ ID NO: 57265 - DNA, 464 bp, Populus trichocarpa
  Intron number 1 from transcript POPTR_0011s12690.1 (locus POPTR_0011s12690) derived from phytozome v7.0 (chr-ID scaf fold_11; pos 15399816 to 15400279)
tgccacaaaagggtgacaaaacggtgttagtttgacaaatggtacaatttgttgatcatcaattttctgtcctcaactttgattttttttccctgaaaattgcatagtcgtctacggacatatgaggttcttcagcaattcatgaggaatttctttctcagggagtatttcttattggaattgcatgcagagcttttagtccttaagttctatttcgcaagcggtaagcgtgtctttctgtctgaaaggaatggaatgtctttaaacaagaaccgatgcaacatccctttgaagatgtctctgtttttctgtctgaagatgtctctgttggatgggtgtcatttttgtggctctcttttgattattatttttttggtactatatgcaatagttttagacaatctgatttttcaacatactatctagcagggaaaaatcagcagcccaggcaaggggaagcatcc

SEQ ID NO: 57266 - DNA, 394 bp, Populus trichocarpa
  Intron number 1 from transcript POPTR_0011s17220.1 (locus POPTR_0011s17220) derived from phytozome v7.0 (chr-ID scaf fold_11; pos 18817493 to 18817886 reverse strand)
gaggtgggaaaaacaaataatcactctcattcttttcctttttaatttaatcttactttattttctgtaaaaacaatgagtaaaagagaagaaaaatctgaaaaccgaacgccaacaatccaaaagccgcacaccatcaccagacaggcaggaagggaagggaaaggaaaggaaaggaaagaaccaaaaaagggttaaatttattcgttaagtagagttactacatagtatgtgtaaacatttccttgttagaaagaagggaaagctacaaacttgtgaattgtgatcgatttgaccttaaagttcttcccttttatttatacagtggagaaattattctactactttgaggattttattcttatatagttagtatttctctgacatggtgtag

SEQ ID NO: 57267 - DNA, 294 bp, Populus trichocarpa
  Intron number 4 from transcript POPTR_0009s02220.1 (locus POPTR_0009s02220) derived from phytozome v7.0 (chr-ID scaf fold_9; pos 2949429 to 2949722)
ttttgttattcaggtcagttgctataagctatgactactctttggtgctattattgtgttttgtagacggaaaattaaggaactgggttttaatgaagaaactgtttaattcgatttattttgtttttggtatggaaaatctcaaaatttaggattttcaaagaaaacagccaattgggattgtaagggaaaaggtttctttgttttttctccccactaattcacaacattattttaactcttgatccacgaattatttgtcccagcattccttttcacctgaaattggggtcc

SEQ ID NO: 57268 - DNA, 591 bp, Populus trichocarpa
  Intron number 1 from transcript POPTR_0015s01160.1 (locus POPTR_0015s01160) derived from phytozome v7.0 (chr-ID scaf fold_15; pos 718244 to 718834 reverse strand)
gatacttctactcagtggccacaggtaaaggcaccgatttttattttttctctacacataatcatgctgttcttttcctttcgcccccctttctgggttgggatttaatttgaaggctatttagaatataatttatcttttgtcttgttggtatatgtgtttttttcttgattactacttgctagtatatataaagtctcaccttttctctatgagatgatgctgttcaccccccactagtgtttgaatttagtgttctttctctcatttgttcttgaaagttgaaagtgatgcccttctttttatctccacctgataaagcacctagaaaagttgttatacttagtattttttttttcttccagttgcatgtaatcctcatggtgtaaagaagtctcctttggtttttctgagtcatcatgtttgtttcctttgaactctccttttctccatctttatctaccaaatttggagtgagagttctgagaggacttgttttgtgttgtgtcaatcctgaaattatggccttttcgtgtctgtgttttttcactctcaggggattggtgttgttaaaccagtggaagggcctga

SEQ ID NO: 57269 - DNA, 665 bp, Populus trichocarpa
  Intron number 1 from transcript POPTR_0001s36870.1 (locus POPTR_0001s36870) derived from phytozome v7.0 (chr-ID scaf fold_1; pos 35627034 to 35627698 reverse strand)
agacactgctgtctactttgtcttcttgagcactggtatttgattaattaaactctctttctccgagtctctctctcttgtaaaaaagttatacaaagaatcgcttcgattgtaatgttgtgactgatttatcaagttgttagaatcataccatttacgggtttctttctttctttgagtctttttaattgtgtccctttttggtggtagttctgttctttacgagcgtgtatgtggtcgttctctgttctttcttccccttaaattaatttctcgaggcaaagggatggttgccttccaaaacttgatactgtaaccttttcatttttctctgttttccaatttccttttttatttactttagtttgctcagaacaaagttttgtttacatggtggtatgcaactaaaaaaagtaaaaatctaaaataattgggtttgacaatgactactcttattagtcgtgcttgaattactgacaagcaccaaacatcataggattaagcaaatccatctgtgtacatttcttcatgatttcggacaactctcacttccattccatgtattatttctcagacaactgctctcctcacgttgtttatttttacttttttttttgttctatatgacagctctggcaatattggttttgtctggccttgttctg

SEQ ID NO: 57270 - DNA, 990 bp, Populus trichocarpa
  Intron number 1 from transcript POPTR_1288s00200.1 (locus POPTR_1288s00200) derived from phytozome v7.0 (chr-ID scaf fold_1288; pos 833 to 1822)
gataacacagctaggtaagtctgacacactcaagtgctcttcttcactatgcctactcccattgatctcttcccccttcatgtcttcaacaacatcctctactaacaattccttttcaaaaataaatgctaatttttatctcttgtaagacaccacaacatagtgtctgaagcctttacacttataacattgtggtccttcgttagaagctttggcctttcctttatggtctccacttacctcgcctctagtttggtctttcaggaatggaggcctttggactgtagacgctgggacatgtcccgaccttgaatcccacaatatcatgttcctcccaaccaaaggccccatttgtttctcaatacggagtgccaattaatacgcctcctccacgttgattaaacatgcagtccacatttctttacgtagctcactacttagtctagtgcagtatcaagctaaggtttgttgctcagtttccacaatcttgttgtggatagtcaactcatggaagcgatccgtaaattgatcaacactcaaagacccttgcctgagttgcaacatctcctcgaacatcatttgctcatagtcaatgggaaaatatttttcctttagtcgctctttcatctcttcccaattagagattgttggtcttcgtgtttggtgcaattgttcttccacacttccccaccatgctcatgcatgccccttcaatttcatccgaacataacgaaccttcctatcctctgaaacagcaaaccaatgaaaataatcctcgatagccattaaccagtcctcaaaagcattaggttttaattttataaaaaaatctggtacatcaaccttcattcttttggttagttcatcaagaggttgataacatgtgccacgatctgcatgtcctctgtgaccattccgtctatgacgtcgaactcaaggctcatgatcctcaaactcctggttttcttcttcttctttataagcatctcc

SEQ ID NO: 57271 - DNA, 447 bp, Populus trichocarpa
  Intron number 4 from transcript POPTR_0004s14120.1 (locus POPTR_0004s14120) derived from phytozome v7.0 (chr-ID scaf fold_4; pos 14608271 to 14608717)
tcaacgatcgtaagttgttgctccttaactttctgattgttattgtttatcaagattcttcctttttcttggtggtgttatttccgtttcaatttacttcttttggtcaatggttgaatcttgttatgtttttaatttgagtttatattgagggagaggattagtggttggtttttttcttagttggaatctgtaatattcaccctctccttactagtgctgataacctagaagctttgctaggttttttttttccttaatatgaaaaagataaagatgaaggtttataaagaacaccctgttgtaggagttcaactatttttactgggaatgtagtactcatttcatataatataaaggattgtagggtcattgtggggtgctgaaaaattatccttttggttttgttgttttagtaacttatggatatatatgacaggtccggca

SEQ ID NO: 57272 - DNA, 378 bp, Populus trichocarpa
  Intron number 2 from transcript POPTR_0001s14390.1 (locus POPTR_0001s14390) derived from phytozome v7.0 (chr-ID scaf fold_1; pos 11290522 to 11290899 reverse strand)
gaattgaggtatgtcaacgcgattgcagagagttttttctttcttttcttttctcgttttactatatcagaaagaaacttattcaagattacaaatttgcacgaagacctgcataagaaacatctacttgatagagtgagaaggcagcgatgtacgcatcagatattgatcatgatggaatagataggggatgaataaactcgaaagtagcctcttcatgattctgaggccattttagttttatttttgaagcacaaattgtacccacaaaaatgttaaaagtatctgcttgcttgatggaatttgagttcctctgaactaatattatgatatcgacacttgttcctcatttgttaggcaacgaagcagctattcggc

SEQ ID NO: 57273 - DNA, 691 bp, Populus trichocarpa
  Intron number 1 from transcript POPTR_0011s14680.1 (locus POPTR_0011s14680) derived from phytozome v7.0 (chr-ID scaf fold_11; pos 16998940 to 16999630 reverse strand)
cttgtagtgtatcgatttcaagtttggtgcttgcgatctttttttttatttttctttcttttctttctccttcttgattttcacgttagacctttcaaattttcaaagcatctcttaaatttgtttttccttcaaatttaatccttattcttttgattatttttttttatttgagataaattataaaataagatttttttacaatttattcctccaactttttcatgccagattttgtccccgttttttttgttgctatttgttttatttggagtaatttataaaattagattatttttttttcgattccatcctccaattttttcatcagttagatttggccatatttttttgataaacattttaaaaaaataaaaaaattaataagtgattttccggtttattttttataatatagccaaacaccaaaaaatatttttcaaattaatatttttcatgataaaaaaaaaaaaccacttttcaggaattcacgaacttctttctaacaaaaaactaattttcatcaaacttataatctttaaatgaattattgtttttaaagataacaacctgaaaaaacccttagttcacctaaaccctattttttaatctacaattaactttattcaatatgaaatcaacgctgtgtcaaacagagtccacggccggtggtggtggcaaacaggtgtaa

SEQ ID NO: 57274 - DNA, 806 bp, Populus trichocarpa
  Intron number 1 from transcript POPTR_0011s14760.1 (locus POPTR_0011s14760) derived from phytozome v7.0 (chr-ID scaf fold_11; pos 17037082 to 17037887)
taaacttaattctgctattgatcgtcttactagaggtaaattcttcttcctttttaatctcattatggtcttgtaattctatgcttttagaaaaggtgcttgagattgtaattctatgcttttagaaaaggtgcttgagataagataagtagcttcttctcctcggcttttttctacttgtaatgtttgcaagtcacctggttttgctataaaattttatttttaggccttcttgggttgctaaaatgagacccttttgatgggtttttgtttccaaagtgatttcttttcttttggagaaatgcttttgatcaatttagaaatggactcagtatcataaatggtcagtttaatctgtctctgtaatgtgattagtaaagattttgctacacatcagctgttttttttatgctactgaatacacaactgtgatttgatgctagcaacaagtggaatagttattagactttctcattttctttattaattatttgatggatttaacatgagttttttcatgcccacatacctggttatcttttggagtatgtaatatttaataaacaaatatacgacgacaacatctataattatattgaaagaatggagcagctcattgagctccagtatcaagcagttcaaatcaagacggacaaagcttcccatagtgcatgcaatttgaattggtctttattctttttctgcattgatccttaaggtgattgattattctatattatggagcatttgagtctggatcatcgataaaaaaattgtgttttcagagcttgatcagttgttggaag

SEQ ID NO: 57275 - DNA, 855 bp, Populus trichocarpa
  Intron number 2 from transcript POPTR_0001s32190.1 (locus POPTR_0001s32190) derived from phytozome v7.0 (chr-ID scaf fold_1; pos 30599154 to 30600008 reverse strand)
tcttgagagaagcattaggttcaatcaacttgaaggtattgttgatgatttgcgattgaaatcttattttttgtgatttctgatatgggattcatgaaaaattttaaatctttttttccgatgataacaattttgcaatgaaggttttttttttaattaaaaaaactgggtctggctccttatgtgtggcaatgcataaattctgctgaaacaataaattaatgaacaaactaaaatctcggttatgtttcttagacaatgcatgtgcaggaggtcgtgtcgtgtcgtgataaatgcttgggagaagtagcttgctgggtgtagattagctgcactgcaaagcaaaaaatgaatctattggcaggaaattttggctcatacagaagatgataggagtaaaatttctataaattggatttgttaggagagccaaagatcatttttcataaatgaattggtgaaaagaagtatcacccaatgaaaaattagaatttaaaagcatgacgcataaagcttattgagttaatggccttattactttcggagctgtaatggtatgctgggtatatgcttcatgatgcaccagtcatgtgttttcgtgactttgacacaagccaaatttttttgtttgagtaagttagtgcttttgattttcagactttagcattgattattcatagtctgaatttgttttgagtaccctggactatcatacttttacagactgaaatttatacttggctttaatacggcagtgagtagaaatttcagactgtcactagttcttttggagtaattttgctaaaatttgtttttgagcatctttgtttgcatgttacaggaagaaaagcttat

SEQ ID NO: 57276 - DNA, 423 bp, Populus trichocarpa; identical to SEQ ID NO: 55920
  Intron number 1 from transcript POPTR_0004s16570.1 (locus POPTR_0004s16570) derived from phytozome v7.0 (chr-ID scaf fold_4; pos 17004469 to 17004891)

SEQ ID NO: 57277 - DNA, 695 bp, Populus trichocarpa
  Intron number 1 from transcript POPTR_0011s02870.1 (locus POPTR_0011s02870) derived from phytozome v7.0 (chr-ID scaf fold_11; pos 2821212 to 2821906)
ctcaatcttcctcttgtacctgtctctctattcaggtgactggcatttcctctctttggtttccagcattgctgacatcaggaaatctcgtttcggtggctcattttcttcatatgaatgttatgtgcttttgtttatataatcttagcatatgtgtatatcccttaatatgtgtgaccaaagtggatcctagaacagaattgtctgaaaaacaaaagaaaaaccatccttctgctaagtggcaaggcttctggttaaacagtctatattgaatttcgttacttgtgatcatgctgtaaactacatcttaattcaagcagaacctggtagatttattctctttgtatctgtaacaagtagatgaaattgttatgcttttctatgattgcatgaaacccaattctgagcaagaaacactgcaatcatgcatcataagcatttgatttttaaatttaccccttttacattttctctcgggaagaaatattgcttttagcaaatcagggagttgttagcgaaaatttatgggttaagtatgctatcctgtcaccaatccactctgacaatgtagaacttcaattgcatccattaacatgaaacatacagaacttgacataaaagaaaagaaagagatttgatccttcctttcgacttgttcaggtcatccaagtgttgctggaacgcctactttggaa

SEQ ID NO: 57278 - DNA, 529 bp, Populus trichocarpa
  Intron number 1 from transcript POPTR_0014s07940.1 (locus POPTR_0014s07940) derived from phytozome v7.0 (chr-ID scaf fold_14; pos 5896081 to 5896609 reverse strand)
acgcgtgaaacgagtggaaaactgttataagaaggtgattaatgagtttgttttgtttattaatgtttaaaaagtgtttattttaattgaagttctgtagttgatttatagtgagacaactagccttcacttcttgtttggttgccaaggaaaaggtgggaaaagagaagaaattaattttttgattatttggttttttaattttattgtttcttttactttagaaataaaaatctttgtcaaaaaaaaataaaaaattgaagaaataaaatgagaaagctgacattttgatgccaaatgtagtggcaatgataatgtagcggaggcatttgtccttttgacttgtaagcagtttaaaacactataaactaataaaagtttcaattcgacggcttaaattgaaaaggagagctttctttttctgtatttgtcttttatttttacctcttatttactttttcttggtataattgtttagctcttaacggtttttcattgttgccagggaagtcgagaaagaggctatcac

SEQ ID NO: 57279 - DNA, 589 bp, Populus trichocarpa
  Intron number 1 from transcript POPTR_0009s02830.1 (locus POPTR_0009s02830) derived from phytozome v7.0 (chr-ID scaf fold_9; pos 3582440 to 3583028)
gaagaagacctgagctgatcatctgcttcatccaggttcttattcttttctttcatctctttcttttcagtttcttgattaatattaatattgtggctcaaaacgttaatgggtctctctttttttcctaaaaaagagattgaagaatgaaaaggagagaactttcaatttgttgtcttttttttttctagtaacaaaatcaatgataagggaagtttttattgagctgattttggattttattttttcattttggtttggatatttcttaattctttttaagctgattctgagtttgttttatgttttttttttgagtatgtagggagggttcagttttagtagagtttggaattccccctctaatttactgatttagagagtgataattatctcatttagttcttgtagttagtttaagatgatgggaaatttcagtttctggttagaagtttgtttctttttcttttttgctatgcaactgattcaaaagacatgaaaatgcgagtttttacctggatgagttaagagactgtttttattgttctttgcagggaagggtataggaatttttttagtgactttggtt

SEQ ID NO: 57280 - DNA, 402 bp, Populus trichocarpa
  Intron number 2 from transcript POPTR_0015s00630.1 (locus POPTR_0015s00630) derived from phytozome v7.0 (chr-ID scaf fold_15; pos 379882 to 380283 reverse strand)
ctcaaggtaagttagtttggtttttcttcgtgaaggtcttgtttttagaggagttcttgtgtttttaatccttctactggtgatgatgatgctttcctggtaatgtctggtttggtgtgcattttaatatagttgaaagaacaaccaaggttgtaatttgtttgcattaaggaacatttttctcatgtcaatgatgtcggaagcggaatggttcttgattattaattataattatgcttttgcctactttgagtggtattacaacaagaagttattgtggaaagataaaatggctcataatccactcattcagtgtttgcaaggccattgcagcaattgagtaactcccttttattccattctaaagggaactgtgagacttcttttccagccagcggagga

SEQ ID NO: 57281 - DNA, 501 bp, Populus trichocarpa
  Intron number 1 from transcript POPTR_0012s10690.1 (locus POPTR_0012s10690) derived from phytozome v7.0 (chr-ID scaf fold_12; pos 11405659 to 11406159 reverse strand)
caggtataacattaagattttttaacttctttgtctatgatcttacactttttatgatcctattaactaggatgttgtaaaaatataatgagttgaaagtactacctaaactttggcaaattgccttttaactgattttcatttatgaagcaaaacaattcttggctcttttttattctttgtttctaggatgtaaaagcttttgattaatttgtgatttttaagggttttgtcctgtttctctctctctctctctctctctctctctctctctttaaagagaagtaatttcttgcgtttcttatggttggttgttaatttgagagttttataattttttttttgagaagtttgatctccatctttggagcaaaattactattagatgtggacttgaaaatgaataccccactagccacaattttataggtcagctgcagaaattttactgtaattgatatttcagattgacccatcaaagtacaagagcattacttcagg

SEQ ID NO: 57282 - DNA, 204 bp, Populus trichocarpa
  Intron number 4 from transcript POPTR_0015s11240.1 (locus POPTR_0015s11240) derived from phytozome v7.0 (chr-ID scaf fold_15; pos 11861092 to 11861295)
aagacatcgtcaattgcatagagaaggtattcaattttttgcttcttctctattcaccatgcaatcaaattggttttgaaaattaccaaattatttcggttttctttggctcggtttttcactactaagttctcaatttggccggttttgtatgagaataatctttacaactattttgcttgattttgcaggctcttgagactg

SEQ ID NO: 57283 - DNA, 557 bp, Populus trichocarpa
  Intron number 5 from transcript POPTR_0009s01170.1 (locus POPTR_0009s01170) derived from phytozome v7.0 (chr-ID scaf fold_9; pos 1304450 to 1305006 reverse strand)
aagccttacttaaagtaaagaatctaggaccacaggttagtttcagttttcattctataatccattataagagctggatacccagaaggaaagcacacaaactgtggatattatgtttcataccaatcagattagcgagtgatatagagagtagaaacaagtagaatactgttttaggactttatttaattcagaataaaccaaatttcattgataaattctgtaaatgattgcaatccaagagttgactggaaactatatatctcaagtatgggtttagaaatgcctccccttgttaatttctgccatatgtttcttctctttggctgtatagtaaaatgacttacttccgctgatcatagttgcattgagcgactttaagcaacatgaacgtatatatatggagcaaatttgactccaattcagtgataatctcaaacaaataggaaagggatcaaggaaacatattttagtgccagacattcgttttgattcaaagaaagtgtcccataaggtcattggtaatgaatcttgttgttatgcagggaaaagcagat

SEQ ID NO: 57284 - DNA, 438 bp, Populus trichocarpa
  Intron number 2 from transcript POPTR_0015s10480.1 (locus POPTR_0015s10480) derived from phytozome v7.0 (chr-ID scaf fold_15; pos 11392361 to 11392798)
cactctaccatccttgctttcgctattggtaaaaagtatgtttcttcttcttcttcttcttcttctttatttatttattatttttaatcacagaaaaataattattttgtagctgataggttaagctcctttatttggttgtttacaaattatataagactaaaaagtcaactttttttaatttatattttttatttaaaaaaaaaagaggtttgtttttacttttgagcaataaaaagtatgtcatcttttagattttagattttttcagattatcgatggctaaagcaaggtcctttgttttgcttcgttttagttgtttatgaattattgttgttgttgttatcgtgacaggaaatggattgcatttactttttatttatttatttattagttatttattgctgatatttttttcattattttgattttttagat

SEQ ID NO: 57285 - DNA, 365 bp, Populus trichocarpa
  Intron number 1 from transcript POPTR_0009s16420.1 (locus POPTR_0009s16420) derived from phytozome v7.0 (chr-ID scaf fold_9; pos 12477009 to 12477373)
gaagaagctgcttctaagcaaaaacagagaataaagtgaaagaaggaagagaagtggtggtctctgccctccaattcgcttgtaccgatgactctccaccatgccaccgctgaaaggccccttctttttttctatttgttctatgtaggattttaaaggaggccaagttctaatctttttgggaactgacaaggaattttttcatgcatcaaatgggttttgtcaattggtatctagaaaaacttttatgttttgttttttttccgaaattaataaccccattttgctttctgttgaatttcatattctaatggattctcttttgttcaggttggttagagctgctcacaagaagggagcaaaca

SEQ ID NO: 57286 - DNA, 623 bp, Populus trichocarpa
  Intron number 2 from transcript POPTR_0009s16420.1 (locus POPTR_0009s16420) derived from phytozome v7.0 (chr-ID scaf fold_9; pos 12477353 to 12477975)
ctcacaagaagggagcaaacattattctcattcaggtagggcggttatgctgatatctctttgctaaatatgaagacaacttagaagatcaaatgaaatgaaatattggcatcactgcttaaatgaaatatgagttttttttctagcagctttgagtgattgccaagatactagtctcttgttgcagcatgctatagaaaatgaaagtgaaattgttgcctagctgtgaaatttgaatctaagatttcagggttggttgttggatattctctatctgaattttgtactttctggaacccagtaaatttgaagtcattttgcattaactagattacttatttcccagttgaactggttttctaagctaaatttgcaaagactggagaaggtacgaaacattcacctttttgggccttttcttctggacacgccgcgcgcacacacactggtttcttttttatttgctatggtatccagaaacgagtaggagcactatttctattttgtcatttttcctataaagtaattacatgatggaaagtttgaagcagctggtgattttgtttattttttaaacattagcaatattctgggatcagtggtttccagaggaagcccgggct

SEQ ID NO: 57287 - DNA, 957 bp, Populus trichocarpa
  Intron number 1 from transcript POPTR_0011s15720.1 (locus POPTR_0011s15720) derived from phytozome v7.0 (chr-ID scaf fold_11; pos 17809528 to 17810484 reverse strand)
aggccttcgttcttctattgaagaactgcgggatgaattagtaggagagctcagtggtcaagattgctggacttgagatcgtgcgagcagctagaaagggttcctgtgaacttgattgagagattggagaacttagaagagctatactctggggaaaagcttcaaacaatggcgtgttgcggagacaagctcgcaaagaatcaatgctagccttacaaaactaaattcattgtctcagttggctgtattattcttgaaagtacctgacatcaatatcaagatttactaagtgtaatctgtggatcttctggtttacaaacacctgaactggttcaggatttaagctgttgctgctgtcaaccaactggcacagaagaactcaagatgatgaacagaaaacactatctagaaaagaacaagtagtagaagaagaagaaacaaaatgttcctcatgtttatttggtcagtgccaaattgagcaagatattcctcaagatagtgctcaagatgggaaagagcacctagatcaggatactgacaatagggaaaactcgggagaggttattcaagaaagtcattacaatgaacctgaaaaccttcaaaaggcttcagaagaaattgtggaagaaacttctctttctctctctacccaagtaatgcactcaggcaatcagcaggaaatgccaaaggaaattgtccttgagcctgaagttatgactgaaacaactacaagttgcaagaccccaacaatagagactgagcccggatcatcagttccaaattgtacaaattctttgacaaggttaactttcattcctgcttaaaccttacttgcatttgattaacttttaaagtaacatacttaatttgaattttttgcagcctccagcttttgctgaagcaatgcgaatatatgaagtagcaaagtccaagagaagctccggcagagcatcaggt

SEQ ID NO: 57288 - DNA, 865 bp, Populus trichocarpa
  Intron number 1 from transcript POPTR_0011s04550.1 (locus POPTR_0011s04550) derived from phytozome v7.0 (chr-ID scaf fold_11; pos 4525976 to 4526840)
acacggatcccaggtttgacaggtaacctggtttgacgggttagcccggttaattctgggttaacccgtcaattttttttttctatttagttatcaaactttcacaacacgaattcaaggtttgacaggttaacccagttaattcagattttttttctttttcttcattagtttttttctttctattagtttttttctttttaattaatttatttaattatcatacttttatgacatgaccttacaaccagatccacatccaagactattgggtttggtattagagcgagacctactgagtcatgcaagtttaatattaatattattattataaatattacttttgggtcagacgttatagccaaacccaagattcttggatatagctttgcagaaaaacctaacacttttagatctttttttttgtattttttaacaatccaaaaggttaacaaaaaagagagaaatattttgattttaaatattacgactaaagtgtgtgaatgatatagcattttaattagagtttttaaatattttgattttttttattttaaattaatttttttaatatgttttatgaaaataaaatttaaaattttaaaaataaaaaatattaatttaatatatttttaaataaaaaatattttacaaaacaacgattaccattaccatgttagaaacaaccgtatgaaaccggtcccagctgtcgaaaggatcttccaagaaaatattattgctagattagcttgcattgaccatactacaccctcgcaggggatttttattacacacattcacagtttcacactcctttaactgcctccaagttctccccttgtttgtctttgtcccctcttgtcca

SEQ ID NO: 57289 - DNA, 783 bp, Populus trichocarpa
  Intron number 2 from transcript POPTR_0015s05430.1 (locus POPTR_0015s05430) derived from phytozome v7.0 (chr-ID scaf fold_15; pos 5784256 to 5785038)
gctgctgctgctaaggtacttactttcttttttcttttatgcatgtttacttgaatttaagatgttaagtttttttgtgatcacttatggattcttttttttttctttttttcttttttaagagttaattttaaaaaaggttggggatgtggtgtcatccattttttgttcactcgctgtgttttctatttccttccaatgggaatttatgaataattttatgccctttttacatttattaactgggctattttaaacttgaaatgggtttctttatgatgctgtgaatggcaaatgaataattacacctgtcctttttattttttttaattactgattagtgtatgactccatcagaagctttgtgttaagccatgtttttgcattgagtttagaagatggtaatttaagattttgagtagttaaaaaaaaaaaaaagaatgtagctgtgcggttttggtagagtcctatgagaaaattatggatacatttgatgtatagcgtctgtaagttgactggcaatggttacagtgattcagtcattcaggttctgggtgtgaggaagtagaaactcagagcggcgcataatttatttacttacataatgctattaccattttgaataaaaggttggggatgtggtgtcatccattttttgttcactcgctgtgttttctatttccttccaatcggaatttatgaataatttcttgagaactatttggctaatacttgtgattggatacaggagcgaattgaaggcacaaagcgaaactcctttgg

SEQ ID NO: 57290 - DNA, 913 bp, Populus trichocarpa
  Intron number 1 from transcript POPTR_0004s22690.1 (locus POPTR_0004s22690) derived from phytozome v7.0 (chr-ID scaf fold_4; pos 21548852 to 21549764 reverse strand)
cggtgactcgaaacctagagttgatatccaaccaggtacctcagctcacttgacccgtaatgcgtattttactcatgttagttagggttatttggctttctttccttcttttcccccccccataagtaatgagccctaagaagtagaaaagaatttgcaaaattatgttgtggggttgattttttttgtgaattaaaacgatggaatgacaattttggattggtggatgactgttacctgtgttattatcagctagtcagtctccctgctattaatccttgtaatcttctgatgttggttgtgttaattgaattattactagttatttcatgattgattattcaaggtgctctggttttccatttctgctctgtattgagcttatgtgagttggttagcattttaagtacaagggccaatccttttatttttcttttctttcatatatatatatagagagagacagagagttcattgggaggctgttgggtcttggactacacaacgcataataaccaaataaactggattcaaacctgcttcagaatacacaactgctaggctgtgtttgcttgtgtgtgtacattggacttgacaaaaaagaaaaagaaaaaatagtgcattgtattgctaaaaatatgaaacgtggagattgcaaattcattttaggttatttaccaaaaaagaaaatcatttagcttggacttttgctgtaagttttttaggatatgatgtaagcttgaaaaagttacatacgttcctggcatggatgctgctagtggtttgaatgtgcaaccatattgcatatatagacatgttactgtattttcgaactgatgaagagggactgacatttttttgtttcatctttgtgtcttcatttagatcactttaacctgagttgctgagccca

SEQ ID NO: 57291 - DNA, 842 bp, Populus trichocarpa
  Intron number 1 from transcript POPTR_0004s23210.1 (locus POPTR_0004s23210) derived from phytozome v7.0 (chr-ID scaf fold_4; pos 21999403 to 22000244 reverse strand)
agaaattgttgaaggtagataacaataataataatattaaggaagtgaaaacagctgctactgccactcaagttttggtgactcagtctagtgtcaacagaagcaggggactcaaatcttctttcatctattatttggtactaattactgcctttttttttctttctttctgtatagtagttattgtggtttctcaaaatggaaatgagtggaaaagtttctggttaattttttttttcaggcaaccaaatagctagagagcacttatatttcaacttgatttcttgctatttctggcttatatgttgaattgcattcctttctgggtttagtttgctttgttttgatattgcattgctgataatttcgttgctaatcttctattgcagcttaatttcacttgtatagtatctgtttcttgttcaatttacttgtggaatgaagtcgcgaaactagaggtatgttttatgtacatctcttgacaagttgagttatgggttctttctgttgaaatctgttgttgtcttaaacaatttggaatatgcttgctcaattgctgaaatagaaaaggaaaggtgaaattctagaagacttgggtattctggttctcgaaaagggatggtttaggaaatggggaaaaaagtaaacaaattctcgtaaaatgttcatggtgactgaaaacaggactgtgtgatttctgctcatatgttcgtaattatggctcttttacttgcaggaagagaatattgacctccgtacagtgtgttgcaataaagttggtgttggtaatgacagcatggaagttttgcaggctgaagacaacagttcgttttctttcggaa

SEQ ID NO: 57292 - DNA, 816 bp, Populus trichocarpa
  Intron number 3 from transcript POPTR_0004s01130.1 (locus POPTR_0004s01130) derived from phytozome v7.0 (chr-ID scaf fold_4; pos 568076 to 568891 reverse strand)
tgtcgtcattgatagtggtggattagagaggttatgttaagtaataattttattgtgttgctggttttgttcacaatgttcagtttgattgctctgatatgttaggttcatgtgtgttgcttattatgcttttttgtccttcattttactagggagatgggattgcattaaaaagatttcagtaatttttacttaataaagtacttcctgataaatatttatatatttagagatgaaaaatgtgaaaatgaatgccattgcctgttgtcagtcacatgttaagcttgttgtgttgtcctcaataatcatctagccagcttttctttatgtttgttcataaaggttagttcttatttgcttgttagtcttctagattttgttgttgaatgttttagtatatgcagatgaaagtgatggggctagtgtgaaattggatgtgtttcaaggagctagggcatcaaacaagggagtggctgttttgacaggtaacgaagatttttatagtccaagctgttttcattttatttatttatttacatatttcagttgttaagcatgttaagcattggttttgttgagttgctgctttttgctttttagcattcgtgttaccatcatgaaatttgactgcttgctatgtatatttggttgaacattgtaccttttgggcctcggttatagtactacggagatgggaatttattaaaaggtttcagttatgtatgttcattgcatgtgattgaaagcttctttaatttgtggcacaggatacaaattcagtagcagtgtttggttccttaaagattttgagctaca

SEQ ID NO: 57293 - DNA, 662 bp, Populus trichocarpa
  Intron number 1 from transcript POPTR_0009s10090.1 (locus POPTR_0009s10090) derived from phytozome v7.0 (chr-ID scaf fold_9; pos 8773283 to 8773944 reverse strand)
agctgttgcccctgttaaagatcaaggccagtgtggtatgtttttgtttcttctttacctttttttttatcagttgttggacagcaaatcgagattaacccccttttttcttcctgggaaataactcgctcccagattctccttggattttaaccttatttttgttttttgtgtttgttttatttcgggggcttagatttgatagcgagcgtgggaccaggggcatgttttcctcttaaggatgttcttagttgggattttcctcgtttgaccgtgataactaccgctatcatttgatattgttatgtgtctgtttgttatatcttagaatagatgttttgtggggtattttctctctcgtcagattaaaagggatttggttaatatgatttgaagtttttgatgtgattcctaggttttaaaataagatcagacaagaattgcataatccaattctggtctttggtagctaaatttcgtttatacgggatttttgatgtcctatacaggttaaactgtttggtatattgtttttgtagctacaaagtttgtgaaggcattacagtggctctagctattttttaatgttaagtttttatttttattttttatatatatatattaaagggagttgctgggcattctcaactgttggtgctgtg

SEQ ID NO: 57294 - DNA, 715 bp, Populus trichocarpa
  Intron number 3 from transcript POPTR_0001s15420.2 (locus POPTR_0001s15420) derived from phytozome v7.0 (chr-ID scaf fold_1; pos 12261804 to 12262518)
agttagacatcttccagatcatccaacgttttctggtaagtttgttccattaatcatgtttctgctcttttaattcaagatttttgctgtaagagaaattttcttactgggtgtccaaagttgatgaaggctctgtataaaattgtattcctctacaaagagatttactgtgtattcttgattacttcttttttttataagaaatggggtcaaagcccaagaagcaaactaacagtcacatgtgacgcagaggtagagccacccaacaacatcctggtacaataaattagaaaaaacctcaggagcatttctttgttgatttttttgataatgtagaaaatggatcgtgatagcaatgattgggcgacatacttgaacaatggaaatctgtggcctaaactgcctgctggctgcagattgtcctagctgtctcactgtttgggacttaaatggtgatgcatggctctcataattattctacctgcataggtggtcattcaggtttagaacagtgcatatatagttagggaaaccatctccattcaaatgattgagctctaggtctcattgtaatgactgctttgattgtaaagaaggggtgttgctcttctacattggtgtgtgcatgtaaaggccaggagacttctgcatgtggttgtttggtattttgatgaatattatgttttcttaccttgatctaataccgatgtagacg

SEQ ID NO: 57295 - DNA, 1026 bp, Populus trichocarpa
  Intron number 1 from transcript POPTR_0144s00210.1 (locus POPTR_0144s00210) derived from phytozome v7.0 (chr-ID scaf fold_144; pos 17588 to 18613 reverse strand)
tgtgcgctggggtgagccaagcccccaagtagcctaagcatcacgtgtatgcaggggtataccaagcacagaggcaagatgcaagtgccacgtgtgtgcttcaagtaggagcccaagcgccatgtgggcgcagggggtgcgtccagcccccaggcagcagcccaagcgtcatgtgcccccacgtggtttttcttcaatagtaataacagttttttcaaatttattaatgataataataataattataatttttaggtttacttttcaaatcaaatctatgggtgtttttcaatattaagaataattgttttttaatttatttattattttattaataatattaattattataaaaataataacatttataacacaaaagataatatttttaatattaatacttttgattatagtaaaaataataatattcataacacaaataatactatttttaattccaagaatatttagaacacaaataataatattttttctactaaaaatttgaattcttataaaaataataatattataacacaaataataatatatttgatatgaatatgttgaattataagaaaaataatagtattttgatatgaatactttgaataacaagaaaaataataatatgttttatatgaatactttgtattagaagaaaaataataatattcacaacgcaaattataataattttatattaatgcctcgaattgttgaatatttttaataatactatgtcgcgggctcactttttatttttataaaaaataccataaaaatttataatataaataataatatgttttcaatatgaatactaatattttctttgaaatttattaattattttattaataatattaattataaataataatattttaaaacaaataacaatatgtagaatcctaggactcaagaaccttgggtcttgatggaggacccaataataattgggtcctaatgctagacccattgatcgtaggtcttgacgcggcccattcccctttggtccagcgg

SEQ ID NO: 57296 - DNA, 960 bp, Populus trichocarpa
  Intron number 1 from transcript POPTR_0009s00940.1 (locus POPTR_0009s00940) derived from phytozome v7.0 (chr-ID scaf fold_9; pos 1079101 to 1080060)
ccaaacttctccctaagaatcgcctcctctctgaagtaagtttttccaattcttagggtttttttattattagggtttgattttgtaattattttcttttttgttaactgtaaaacagtatttaaaaattcggaaataattgaaatactttttttttaattgatgacgtgagttagttgaaagaattaatgaaaggtttacgggtgaaatttgaaaatatttttttttgtagaatgagtggcgtgcgattggagttcaacaaagccgtgggtgggtccattacgcgatccatcgcccggagccacacattatgctgtttaggaggcctttgaactttcagcagcaacaggagaatcaagttcttgctaagtgattaggttttacgccgaatacttatatcttatcatcataatcatcattattattataatagctgaagaaataccaaaaatggaaatactttggtttatgctctgcgtaaacgatttgggattttctagtatcgtgttgtgattctcttgtggagaattttgtcgtcagggtttgtttgtttgtttgtttcttttatgtgttgtttgatgacgttgtgggcactggttaattagatgttgatggaagtctaatgatgggttgttgtagatattcttctctgtttttgtggttgctactgcaagtctcagtttagataattgtctttgttggtgtgtggatggatattttttataatgtgatgtgtgattgaactgtagtttcttgacaacggtatgcattatcattaggggtggaggaaatactagcctgaaaaatctagttgaaggttggcatgagaagtaaacaatttaaggcatggcttgttctgagtatgtttcttactgagattaaggtatccagtgtttctgtggtgcccttcattttgttactgcagattgtttctggtgttctgtagttgttgttgtggtg

SEQ ID NO: 57297 - DNA, 870 bp, Populus trichocarpa
  Intron number 1 from transcript POPTR_0011s07730.1 (locus POPTR_0011s07730) derived from phytozome v7.0 (chr-ID scaf fold_11; pos 8542665 to 8543534 reverse strand)
gactaagagatcctccagattgtctactcattcaggtttgtggattttctttcttatgagaattggagtttttgaatgctgtttgcttgctgattttttttaatttttctttagctctggggatttgttgtcaattcagttgaatggttatcgtggctggctgacttgtggatgctctttatttggtgggatgcgtgtgccaagattttcatttcttttttaattcatgataagaaatagagtttaagggcaattcacttagataatttttcaatgttgtagtttttgcataatgtagttaatagtaactgctcttaaatgatacttctcaacttgagtggttagactggatagagataggagtaagactgtggaagataaaatgtattgaatctgattgctatcttttgagcttttctcccaagttcaaattatttgaactcatctcggctgagttattatatacttaaacaaatgctaaaacccagaaaggtttaaaatttgaatcattttgtctctttcatgcaacgttgaaggaatcaaatagagcaaaagttgttgaactcaattgaacaacatctcgattatttgataaaacttagagataaaatttcaaaaacttaatgattcactagagaggttaaggtagtgggacaatacgagtcttgtattatgcaaagctattggttatcatttgctaataaagacttgagattgaaaattgcttttcttttctcatatttgtgactgagtagtgaaaatgtaatagcggcactgatgagaggtatgggtgatagttgttggttggtcattccactaagtgggtatttttggttgcaggtgaagtttcattacccggggggaaagtag

SEQ ID NO: 57298 - DNA, 648 bp, Populus trichocarpa
  Intron number 1 from transcript POPTR_0011s13015.1 (locus POPTR_0011s13015) derived from phytozome v7.0 (chr-ID scaf fold_11; pos 15730098 to 15730745)
gccatctttgtctgtggtaggtattgactagcttaatatcttcacatgttctttcatttggcttcttaatcagtcgatgttaagatatgacagtcttagttgcagtagcaaacctgttctttagtttcctttgttttgcattctgattttaactgattctttacgtgcccattctcaatggatttaaaaatccatgtgtgctggagccatgatatttgacctatgaatactgtttgcttattggagaacttatattttgacagcatttaattataacattgttatggagatcaaatgatagaaaaagattttctgaattgcctataattaatttgtggtctcagctaaaatagaggaaattttctgatggccaagaaatagttgactctaatacagcttgtggagagcacaagtagctctctctctctctttcctttgaactctctcttttgcttggcttgatggtttaaagagaattgtcctcattacaaaatgaagttttccctttaagctcgatggtctttgatttggttctgagtatattttataccttttatgatgatttaactttgcttatttgtttcagcagccaaatatcccgaaccttttgatgagcaataatgtagtgtgcgggaacatgtacagaat

SEQ ID NO: 57299 - DNA, 761 bp, Populus trichocarpa
  Intron number 2 from transcript POPTR_0001s17720.1 (locus POPTR_0001s17720) derived from phytozome v7.0 (chr-ID scaf fold_1; pos 14571670 to 14572430 reverse strand)
ctgtgtccttggcccaggtctgagtttccctttcctcatgtttctttatgctgctttttttacagtgtaaaggtattgaaatacgagaagaaatggtcaaattttggtttttgatgctagattgccacattgtttttgtttctgtctcttaagtgttgtataaatggaggtatcgagaatcgggaccagtgaattttcttcttcaagaaagagcttgtttagtgcagattttaaggacttttctgtattttaaacagtagagcgaaaattatgcataaatttgtttgacaatgcatctaggaagacttttctcctacaaaatataggacaaaaaaatccgatctcatactatgaagtgaaatcatgactattggaataccactttgtaaaagttctcaatcacatgcagcattatcggatagtcaaactcaaagcctttgatatgcgatgtgctctgtattcttcatgtgctcagcatagattgcatagtcaaattctttttgccaaattgctaggaaggcagtttcacatttagaaatgtgtatcaatgatgtatatttaactttaatttaaatctatttgttcatcaactaaattgtgctacttttacttgtttgtgccttcatcattaataaggactaaatataaatgttttttcttcccctcattgcattagacacagaaaaagttctttggtgatcaattcatttgtttcatgtggtacagggagtagtttattggcaaccacccaaacaagcatt

SEQ ID NO: 57300 - DNA, 816 bp, Populus trichocarpa
  Intron number 1 from transcript POPTR_0011s11990.1 (locus POPTR_0011s11990) derived from phytozome v7.0 (chr-ID scaf fold_11; pos 14773195 to 14774010 reverse strand)
agttttcatctggggttcctttacagtcactaaaggtatggttccaaacatgtctctttttcctatatagtaaaatgttttagtgatttaggtaattgtttgttcaagctgtaagtatgttttggtactgattctattaagttaatcacaagaggatgaaatatttataattacaagggaatgacggagtaattaggcacctatttattagttccagttgtctatactgtactcactagaaaagataaattgtagtagttcttaattggaatgtttaactttatgagcatctttttattcttcctgttgtttgaattggaatgtttattcattgttcatggcttgagagcagctgtgccatgcagaaaagaaagggaaaaaaaagaaagaaacaagaaataaagaggaggtactgcacgaattctgttccccatataggtgcagccttaagtgagtaatgaccttgttgctattagttctcattctatgctaaaccattgatagtaaagctgacagccaaataatatctcttcttcttcttgttttttttgtctctattttcaatcttgagaggaaagcatacaaagacaaagtcatcgtcttgatgtaaaaacaggagataatcaattgactataaacattgatcagattgaaagattctgttatttagttattttctgcatctgagcaatgatgtcaaagtcctgaaacacttgggatttttactgctatttgtttttagatttggttgaggcaataactgatgttttgtgtgcaccagaaaccacaagtccaactgttagaccaacgggtagt

SEQ ID NO: 57301 - DNA, 454 bp, Populus trichocarpa
  Intron number 1 from transcript POPTR_0004s10280.1 (locus POPTR_0004s10280) derived from phytozome v7.0 (chr-ID scaf fold_4; pos 8818500 to 8818953)
gtggcagggaggtgagtaactaataatagtagagtgaaaggaacaatttcgctgacaaattaactcatcttgataagctatgggcagggaacaaaacgttcttggtttttgtgctaaatgctacgcgcggtgccggagagatggtgatgaacagtaatattataaggcactaggtcatatgcaatatgcagtcagaagacatgacaagggaaaacatcatagtttcttcaccgaattgtaaaaatggaaacacccacggaatgcagcaatatcccaaatatccaaatacaagacttggggttcaatttttgcttcttttttttaatcaagaaggtatcaaaattgccgaccaaatgtctaggtggttgataacccacataaatgttggtacagagaatgatgtggcagaaagatagaggaatcaaagtttggtcgtgtgtgggggcctaggtgc

SEQ ID NO: 57302 - DNA, 848 bp, Populus trichocarpa
  Intron number 1 from transcript POPTR_0004s03930.1 (locus POPTR_0004s03930) derived from phytozome v7.0 (chr-ID scaf fold_4; pos 2790375 to 2791222)
ctttgcatctctcaattctgtacttttgggatgttagtgtgttgatctttttttgttttaacttgatctgttggtcttgtgtttgatctgcttgaattttggatacccaatttagcatttttcgtgtatatttttctctctaatttatttgtgttttcatagcttttgtgtctttctctgatttgtttattagttgaaagcatatgcaaaatcaaattctgaacttcatttgttgtaaattcaatgcggctcttaggtttgtctgattttttatacgagcactgtaaaacacaggatattttgtgtaagtgaacatagtaattttactgaactaataggaaaatgtctggtgagaagctcaagctagaaatttgtaggttggaatgcacatttgtggaaaaaaaattcttaccagagggatgtaagtaaactattaagatggttaattcttatgtgcagattacttatctagtttatggatgcaatttgttatacttgaagatgatcgatgtgagtaaaataatcctaggctgtctaaagggattctattggcaaaataccatcttgcaaaatttgttgatatttgtggttaattacttaagagatttgaaaataacttactttgctgaaagcctggaacatctaatattgttatccaaatgaaggatgatggttttaggccgtgaacatatgcacaagcgaggtttttttaatctttgtatttatttattcacttgagacaagatttacaaccgacatgcatgaggcatgttgttacttgttatagaagagaatctgtttgactatagtccaaagttctaatttgtaatccatcattgtgactgcag

SEQ ID NO: 57303 - DNA, 422 bp, Populus trichocarpa
  Intron number 1 from transcript POPTR_0015s04830.1 (locus POPTR_0015s04830) derived from phytozome v7.0 (chr-ID scaf fold_15; pos 5023398 to 5023819)
atactctggagaagattgtttgtcacaattctactgtgagtcttttttttttttttttaatttttgaattggtttttgtgatcttttttgacgtattcaatctgtttattgttaaaatttaagctctgaaaaacataaaaaggaataaattaatcacgattttctatactaataatggcattgattaaaggagatacttgtttaattgaaggattgaatgaagggattggcatggcaattttagttagagaagttatagtataattaagcaaagaaacaacttattgattttctttatttctctgtgctgattaattttagttagtaattagggtgtggttctttgtagctgccttctgtttttgaaatggataattgttagtgaattatttattttattctattgtttttgtgttattagg

SEQ ID NO: 57304 - DNA, 671 bp, Populus trichocarpa
  Intron number 3 from transcript POPTR_0011s03670.1 (locus POPTR_0011s03670) derived from phytozome v7.0 (chr-ID scaf fold_11; pos 3762652 to 3763322 reverse strand)
gactgtgtggtgcttatagtacgtgtgaagtttgggtaccttttggtttaaccgcaagcctaaaaatatctctcaaaaatttattttctaatgattcaattaatcctatttcattttatttttcaactaacccattttatcaatggtttaaattattaatatttttattaatattataaaatttgatctagaatttacaatttaccaatatttttattatatttctcactatttaattaatcatggtaaagttttctaccggaggattacaatgtctttcttcaaggcatgaagccatgccaaattcattttgataaggttgacttctcaaattaattctcccatagcaatccagcactcacattgagttaacatgtacacctcttcttctttaacttcatcacccaccgaaatgacctttatatcatccttcaaatattaattggtccatcttgctaacgtgtcaagctgattgatcactaactagacatctgtcgtggaatgatgatgtcatgcttacatcattctttagtttgggtcagtccatatggattgggtcggattgatggctggtttctggttcaataggtgaagaagattaatccagccaatttactgttgaacatgactgccaacaacccaccgaatggtggcggtcttcttgtactaga

SEQ ID NO: 57305 - DNA, 433 bp, Populus trichocarpa
  Intron number 1 from transcript POPTR_0009s09350.1 (locus POPTR_0009s09350) derived from phytozome v7.0 (chr-ID scaf fold_9; pos 8311707 to 8312139)
cttccatctatatttgcttcaaggtcagtcaatctgtctcaatttttttcttcactgatttgaattccaataattgctgcttttctttctgattggaaattaatctattatgaagcaacacaagcaaaatatccgccatgatctatttcaattatttccgagacaatgttatcagggtgatgctaaggcataaatgctgcgcatcaatttatttttcagtattcgaaattcaagttttgttatattggccaaataagccctattagtgcaccttaaggatgcgggttcctaatcaaattgatcgaaccatttatgctttccaggtccaaacttcaaacataatcaactagaccataaatattgtgtaaagtttgttcaaaatggaaaaatttacatcatttgagtgctttaatgtgtttctgcaggtccaaat

SEQ ID NO: 57306 - DNA, 747 bp, Populus trichocarpa
  Intron number 3 from transcript POPTR_0004s20960.1 (locus POPTR_0004s20960) derived from phytozome v7.0 (chr-ID scaf fold_4; pos 20304578 to 20305324)
ttccccacccctcctccgctcacttctcagttttggtaggtccaccatgatccatctagcctcattaagatatattttctaattaattgagaagcatagattataattatcacagagggtttgttaggagcctagttataagagcatctcgtccggtcaactcagttatttgtctactcggaacgaaacctggcttggacgagatcaacggaaaaacttgtttatataaaaaaaaaaatcaaagcttatatttactgaactcttcaacatggaccttagaccagatggatctctgatttgttcttacatctatgattaggagtaataaattaaaaattggatataaggatgttctaaaataaaaaaaagaaattgacaaaaaggtcccaccgagatttgaactcgggttactggattcagagtccaatgtcctgaccactagaccatgggaccgctgttgacaaggtcatcgaaacaatatttttatacaactttatacactgttttaatcagtctagatgggcttttcatataatcattcagggtttgaattctaaaacgattgcgaggagttttttttttgtgtgaatacattctacttaaaatatgattagtgaatactggttttgatgcaagaaagcttgtttaaagatatatttaaaaagaattaactcatcaattttgtcccataaagagttctaaaattgtgatgcaatgggttaatttgaacctctaattgagcaggtt

SEQ ID NO: 57307 - DNA, 684 bp, Populus trichocarpa
  Intron number 1 from transcript POPTR_0015s06330.1 (locus POPTR_0015s06330) derived from phytozome v7.0 (chr-ID scaf fold_15; pos 6991584 to 6992267)
ggtatgactcaatttccccccgttattgaatacttttcatatggcattgtttatgtagatgactcttcgggtttttgattttgcatatatagcaattctgagctttattcctggtcacacagagtaggagtgatcgtgcaatctgactttcattgagcttattgctagttatatatagctgatgcatgtcaaggtagaattttaggggactatgactatgtggattgttgttttgcatagaggtagaaatttcgagcctcatcgtggagagtgatagtgctttttgggttccatttagcttattgctcgctataagttattcgtgaagctagattagagaagaagaaaatcttgttttagttggatccaatataaataacttcgtattttcttctctatcaatcttgttttcatttttttttaagaagcaggacctttaatagctcttttttaggttcttttgaggaaaatatgggaaataaagggatgccttgcacatagctaactgctaatataacaagctttatcatttcttttttaaattactgctatcatctttcatgccctaaagtaaattcgacgctgttcagtttctaaccaaatattggatttcatacagattatatttcacatatatgcttgttgggagtcctccacaaccttactatcttgattttgatactg

SEQ ID NO: 57308 - DNA, 588 bp, Populus trichocarpa
  Intron number 1 from transcript POPTR_0014s04730.1 (locus POPTR_0014s04730) derived from phytozome v7.0 (chr-ID scaf fold_14; pos 3658307 to 3658894 reverse strand)
gcaaacccagaaccgttgatatctcctctcaacaggtccaccactctctttccccttcttttacttttggggtctgcttattttttggttttgaagaacaaaattcgagaaaacattttctgggaaataaaaacgattcttatcaaggaagctggttgttaaaagttgatagtgctgattcctttgagcaaacccatttatttagaataatgattctaatgtgtttattgtatttttgtagaatatttttgtgtaaggatataagtgaggtattgggactattggcactatgaattggaagggaaaattgcactagttttattgcatatcaattctcatagctaaaaatcagcttaagggttcttgatttcgcatccagctgtagcagtgtgaattatactatcttttgcctttctttttctaacactcttatgactgtttttgtagtatttatttttaccagcggttggatgctccatgtgtgctgtagattgtttgtgaaatcttgaatacctttgtatcgatactatattttgtccatattccatggtagtatccaagcgaacctctacatattgatctcataga

SEQ ID NO: 57309 - DNA, 497 bp, Populus trichocarpa
  Intron number 1 from transcript POPTR_0009s14560.1 (locus POPTR_0009s14560) derived from phytozome v7.0 (chr-ID scaf fold_9; pos 11383560 to 11384056)
gcgacgttgatacacctcgtaagttgttaaggatgtcttctcttgtttttatctcttaaaaagaaccctgaaaaccctaactaggaaaggtaaagccttttctctcatctgtttttcttttcttgttattctatccgactatcattttccataacttcctcccttatccgtttggtcgaaaccaaagaaaaatttctccaaaatttcacttctttgaatcaaattccctttctttatgtaattctatggagaaaagttagtttctttgtgcccttttgtatataatctcatttccttgatcattttgttttttgtactccatctttgtttttctgtactctatttttgttttcataaacccagttagaatcttgttattttttgataaacttcagaataatattacttttgaatggaaaataagagctacgtgtttaatttttaaaatttgggagtcatttttgtcttcttgctgttgcagtgatatagaggagcta

SEQ ID NO: 57310 - DNA, 447 bp, Populus trichocarpa
  Intron number 2 from transcript POPTR_0009s14560.1 (locus POPTR_0009s14560) derived from phytozome v7.0 (chr-ID scaf fold_9; pos 11384447 to 11384893)
aagaaatgtaagatcaaaattccatcttttcattagtttgattattgtttttgtgctgaatatgaagagattctttaatgtagtagttgtttgtggggtttcatgaatgaagatgttgtaaaagtctgcaaattggctggttttagaatgtcattattgtaaaattcatgaactttttgaagcaagatattttgtactgtccttttcttttgtattggagacaaattagttataatcatgcatcgtaggttacaaatatcatcaaaattgaagaagcattgagatttacaatttttttccgtgaaataaaactaagtaacatgctttctgccttctaggattggtaatgttcctttggaaattttaggattattcatatgtgctggtacttgttttcttgattttgttgcagtgagtcaaccggggttccaatcaatctaccacatt

SEQ ID NO: 57311 - DNA, 720 bp, Populus trichocarpa
  Intron number 1 from transcript POPTR_0014s15860.1 (locus POPTR_0014s15860) derived from phytozome v7.0 (chr-ID scaf fold_14; pos 11951421 to 11952140)
gagaaaacccaccacctaacaacacacaccaagaggtaaagattgaatcttttactaaattctcaatctgggttttgttcaatacctgctaattgtctcattttcttcaagaatcaccaaggttttatcaactttggaaatgatgttgaagtcattttgaccgctcttcaactttcttgcacgccagccctggttaaattttatttgaagtttgtagcttctttttttttctgtgttaatcttttagtaattagatcttgtggagcagtcttaattgttttgaagttggagattttgatgtgggcttctctgatttttttaggcagagctttctgtgtttttgtgtctttgttggtttcttacagaaaatccaaaatctcagatattagttcctgattttgtttatgttatttcttatacacgtatttgattattgaccatttgataatcactaggttcgaatatgtttatgtttctgtttctgtcgaagcagttatgttatgaattctgcaacatgttatcttcttttttagatggttactgaacttagtttaggtctggttgaggtttttaatgaactcttggttaagaattaatgtcacttatggatgttcgcaactcgtaaacaagtatgtcactgtacgtgaaaatttgttggcaatgcatggttaagaagatgctgtcttacataaaattttctttctgcagcacaacactaga

SEQ ID NO: 57312 - DNA, 414 bp, Populus trichocarpa
  Intron number 2 from transcript POPTR_0012s07610.1 (locus POPTR_0012s07610) derived from phytozome v7.0 (chr-ID scaf fold_12; pos 8514964 to 8515377 reverse strand)
atctccgcctcctcgatcactggcttcttccagaggtaataaggagtgattattttcttttctttttcaagatttgatcttttgtagttgtggccattttttggagaatctgttatttgttttggttttgttgattagtatatgggaccataagaatgcatttgaattggaagtttcttttgatttcaagccacatctttaatttctgctgattaatttgcttatttagacttgaatattggaatttgccctgttttggtcgttttgtggtctttagatttatggttaaatgaatttgaaagttttaatcgtcggcatggcattatttggatcctcgtgttgcaaattatgggattttgttcttgtttgtatgtgtaacccttttctaaatttggtcttttatgatcacagaag

SEQ ID NO: 57313 - DNA, 713 bp, Populus trichocarpa
  Intron number 4 from transcript POPTR_0009s14920.1 (locus POPTR_0009s14920) derived from phytozome v7.0 (chr-ID scaf fold_9; pos 11593535 to 11594247)
gtggaccgcagggttttgagaaggtaatgcatgagcattttaagttaaatggtcagagctcgttttgaaaatttgtgaaatcttgataaagtattcaataccaggacttaagttgcttgagtttttcttcattaaactgcatttagaacaatatgtcatgtgattgaattagtttattttaaagacatgaactgagatttacttcaatatagatgctgccgcttaaagagagagctaaggtgtacaggctttcttgggttacatttttttttctttacttattacctatattatttcaaatcagaagctgcctcttcatcggactgctgatgtgcttgctgatccttcaatgcacgttggattatagatcatacttatggcttccggtatttgttacaggattgcttttcttaaccccctacttcaacttccctcaccttgtgacccatggtgttgcattcatgtagaaagtaggccgaactgcttgtacctgatctaagttttaaactcttaacttgcctgctttgattttcatatgatagaagctttgaccattctgcacaatagaaattgtacgcttgtatagacacagaagttatctaaacttcttaattgattactgtccatatcagaaaagaaactcaagtgcattttgtttgtcaataacctcatgatatttcttttttcatcacaggttttggatctacttgaag

SEQ ID NO: 57314 - DNA, 868 bp, Populus trichocarpa
  Intron number 2 from transcript POPTR_0009s07920.1 (locus POPTR_0009s07920) derived from phytozome v7.0 (chr-ID scaf fold_9; pos 7333643 to 7334510 reverse strand)
gcaaagttgtgatcttgtaagtaattcatcctcttgtttctgttggataaaaaaaataaaaataataacaagaggtcgtcaaatagtaagtaatcaaacattcttcttctacaggagtttatctttatcttttgtgtctgtcagttaattaaatctgtgatcttggatagcccatttagttgaatcaaagatccaatgtgtttagagatggtagattattaccagtacagatttctttctctgtctctgttgaatagtaagtttgcaaaagctttctgtaagctagaatataatgtgaatattactggaaatgtaaaatgctcgtgaagaacattaaagttaaccaactaactctgaagtcacttgttgacttttattagatcaagatccaaacttgagctttcatattcaatttaaaggttagatggacttaaagtgaaggaataaacagtgtatgttgttgccggcctttgtacttgtcggtgcagaatctaagcagcccttagaagtgatcagatgacaaactatttaatgcagcatgtgtgatgtccctacagtagatagttcataataatgtgggcctccatggagcaatcccagcatttttccccttctttttgctattttatcatgtcatctttatttttccttttcacttgttcatatgttatatgttacctgttttatccgatgattatttgatgtaatcatgtagtttatctatcttctagcatgtatcaaacattccgttatttatctttttagttgcaataaaagatttgtttttatttattttttctattttcttaaagtcataagtgttcaacttgtaggcatctgacaaatctgtgtcttggaggaacactga

SEQ ID NO: 57315 - DNA, 300 bp, Populus trichocarpa
  Intron number 2 from transcript POPTR_0004s23430.2 (locus POPTR_0004s23430) derived from phytozome v7.0 (chr-ID scaf fold_4; pos 22152495 to 22152794 reverse strand)
acgaggacagagtaagttgccatgttgtagaagattctgttttaaattattctgagttgtcccttttctgttgttgttagatatcaaatgactggcttcttcctttgagtatcttctgtaattgaaacactggcaaattgtttgcgtggtgatttgatctatgtgggaggttcactcattctagaaaccaatgctcaatttccataatcgattgagcttacctggcttcactaatgttttctgtatctactgaagtcctcctttctcttccattgcaggatagtgaacccgatataattg

SEQ ID NO: 57316 - DNA, 718 bp, Populus trichocarpa
  Intron number 1 from transcript POPTR_0004s23430.2 (locus POPTR_0004s23430) derived from phytozome v7.0 (chr-ID scaf fold_4; pos 22152989 to 22153706 reverse strand)
tgcaagaagtttcctctctcctgaagcatttccaggttagtatgatcattatttgttgagtctttgatttattatatcatgatctgtgttgaatctgttgaagagttggtgtaattatggtttaatcaaatgttttttttttcgggttttttgaggtacaattttgggtctagatctgagtattcttgtccaagtttgtttcagtgtttgatgtttttccttttcatcttcttagcgtcgtttaaattgtgggttttgttttttattgctagatcacgacaagaaacattgatttccagttaaagttacaatctttgagtttttgttggttcatagttttgatagaagcagagtaatttcaagcaactgggctgtttttatttgtggtgctgcatataattctgggttgattttatcgtttaagtagttgtagcatggatattgagcatttatttgatgggatttatgcagtttcaagcttacataaagaaccctcgattgcttttattggttatgttaacttttcaagttgtttgtagattatatgatgtgaaatttagcgtgaataattatttgagttgattgataaattatgttgtgaaattaactctcctctagcatctttttttttttttttaatgtttagtttccgtgtctgacttgtaattttgtaattctattaggaagataagtgcttggattgggtggattgcagacc

SEQ ID NO: 57317 - DNA, 869 bp, Populus trichocarpa
  Intron number 1 from transcript POPTR_0388s00210.1 (locus POPTR_0388s00210) derived from phytozome v7.0 (chr-ID scaf fold_388; pos 15400 to 16268 reverse strand)
aagtctatacaagctgatcaattggctgggcagtgagcacaaataatcgagtttctactttgtgcatcaaaaattcaaagtagttgatagcatattagggaaactgacttatattaactggaaaggccaactgttcatatataactaagattttaatgtcttctttctatactatcttcatttcctctacatgctttatggctaattgctttcttcactttcccttgtcagcaaattatacaatctctcttttgttttttattcttgtgatattttacaagcagtggggtatctttgggcagcatattacccaatctagttcactttcttctgcgtcagcattaccagggctccatctcagtcttctttgctagctattctgtcttttatttccttagctttgctgttattcaattaataacgttcatatttggtctataagctatcctgcgtgctaacactttatgctattattgagttgatcgttatctcgcataagggttcttataatttacttttaccaaaacttccttgcttgttttatgatttctcttgtttggtacttagcaaaagtatgttgtggaaatactattctggttctccttctgatcttgcattttaatcttgaacacctacgcaaaacatgcaaattgaaaataattgacaagaatgtgaagtgacttgcaatcaaactagtatcgctttctaagcatcgcaagaacgtcaaagtctggattttttcaatgaagttatgtgatctgagctacaatcagaaatgatacgaggttaatggtgcataactttgaagtggcacacgatcttgtttcactggaccatttacgtaactaatgcttggttatgtcacaggt

SEQ ID NO: 57318 - DNA, 972 bp, Populus trichocarpa
  Intron number 3 from transcript POPTR_1455s00200.1 (locus POPTR_1455s00200) derived from phytozome v7.0 (chr-ID scaf fold_1455; pos 767 to 1738 reverse strand)
ctgcttcaggactctcaagttaacaactcctagctgtaagagcactctggcatttatctacgatattttttattcccttttgtccgatgaaaacattgttttgtggtttgctgataacttctactcaaattcagtaccatgcttgtcgaggaaacttgcatatttagattgctgtaaagtatctagtaattgaatttttcaggtctgttggggtggggttttattatatgattatgattgtgattatgtgaaatgtatatgttattgaaggaatgacaaataagaaagtgaatagaagctcctgctctgattatttgttttctgtttttctttgcttacatacccttggtccagcatgtcttgaggaatgagcaatttatcattttttgttgttgcttggttgtattctatacgttttgtcaacgtgccttggtcaggtgtcagttgtatttatgttttgtagcggttcattgcttccctcatttatgttagatacttaatttatatcttttggctggcaagccctatcttacaattcatgtctgcttgaatgagtgatgagggctccatgttgctagatctcacacgattcttctcagatgtcaatctctagcagctaggtgtttgtttgggttgataagctgtggaaataccaaaagtttggcggcagcttttatgatattactgagtttgggataatttgatttaaggcaatatgacactgtgatgtaaccatgaaaagagaagttttaggttttgtatgcatggaaatttgtttgtttgttccccactggctctgtttttttttcccgaggcatagatccgggcttttgacatggggattgtttgtgtttttccattgctggtctttgcatcttgtctgcaccataacaaggatttaaatgctggattaaaattgaattattgttttttgtgacagttggcgacctgaaccacctgatctctgcaaca

SEQ ID NO: 57319 - DNA, 431 bp, Populus trichocarpa
  Intron number 1 from transcript POPTR_1455s00200.1 (locus POPTR_1455s00200) derived from phytozome v7.0 (chr-ID scaf fold_1455; pos 2439 to 2869 reverse strand)
ctgcatcaacaacgcctgttgccgatttcttaacggtgagtgtgtgatttctagacctgatctctcttttttcgagtccgtttggatgttgagaaagctgaggaaactgagagaattagtgaatatttttgttgtttttgttttgagtgaatgactttgtttatgcagtcttatcgcactttgttttctctcttcagccaaacaggctggatctgtaactatactgtctgttaatcttctatttaaagctttatttattgacttaattgttatcttaatatttatcataggttaaaatataactatctagtgaattcgaactaaatccttgcaaaagtagaacttcttctctctttgttgtaaaataattttaattagttttcctcttaccactaatttcaatcatttattcatttgcagcgaaacaaaaa

SEQ ID NO: 57320 - DNA, 547 bp, Populus trichocarpa
  Intron number 1 from transcript POPTR_0009s10810.1 (locus POPTR_0009s10810) derived from phytozome v7.0 (chr-ID scaf fold_9; pos 9175998 to 9176544)
gctgacgatcccttcttcttctgctccaaggtttgttctatgttactttcttctgcatcgcttgatattatttaactaatgagtttaccatgtgttttgcgattttttttaatctgggttttatttatataacattataatctttataatcttccaatctttgtgggttttgcttctttttttatttgcattcacattgaagcaaagcaaggcccagcctttctttaattttttaatcaatttgttgaatgggaaaaaagggttattgtcttttaacagtaataatagctttcttagctcaactagatcaaaaaataaaaaaaaatctctctcaagcttttactttgatgtatccattaatactcatttcttgtttttttctctatttacagttttacccatgttggccttagttatggaactaaattgcagttggttattaattttttgatgtattctaattgtggtttcttagtgaatcttttaatgtgtgggtgatttatgaatgacaggattcttttcttataaaggctcctaagaaatcacc

SEQ ID NO: 57321 - DNA, 603 bp, Populus trichocarpa
  Intron number 2 from transcript POPTR_0012s09900.1 (locus POPTR_0012s09900) derived from phytozome v7.0 (chr-ID scaf fold_12; pos 10791511 to 10792113)
agtttgctgggattatagtgtggattttacatcaggttaggtagctggcaagctcgctagccaattttgtttttctgttttgactaatgaaagtgattccagcatcctttttatgttttctttctattatttttgatgaatatgttctgtttattattagaaattggataggaaaaataatgaaggcaggctcgtttatttgatctgtcaacagtttgtaatgtttgacaatacaatcaatccttaacaagaagatttagagaggtatcaggatatgttgtatctgagacagaatgggatacgcatttttttttctttatttattgatgttgcttgtgatcctgtttgttcgttgattttctcaatttattgatgctgcctgtgatcctgtcaatgcttgtatataaggtgatagcaactgaaattttcatttcttcttaaaaaagttattttagtctgtcgaactatgagaatgagatctatggtgttctttgtctattattcttgtgctctggagatcttttctgaatggtaattgaaaatgggatatttatatttttttctccagtcggaacctccatcacccagaagtccaacctcggg

SEQ ID NO: 57322 - DNA, 540 bp, Populus trichocarpa
  Intron number 1 from transcript POPTR_0004s11680.1 (locus POPTR_0004s11680) derived from phytozome v7.0 (chr-ID scaf fold_4; pos 10524464 to 10525003)
aaaaatcagagcgcaaggtgatgattgtttgcatgactttcaattcgatatgttgatgatgttgttgttgttgtttcttgctgatgtcggaaggagttctgttcctagctctagttcatttggtgtgtcaactgttgatatattactttcaagtgattttttcttggttgaagctgttcacctcttttgtttgcatccctgcttgtttatggttagctgacaattgcttctaaagttatcttcctttttttctttttccatttcaatcaaaacataagaacaaggacttgtaccttcgttttccttttgggtggggattggtccctgctaacccacaaaagatacctatatagctaaagccaatctcttaatgaagcctggaacagttgcgtgagggttttcttgtaaatttaacttggtttgtaataatactagccactagacatcacattcttgaaatctatctatcttcagtgtacttttaagataagatggttttttgtttgttttttattaaccttgtctcgtaaaactgcaggt

SEQ ID NO: 57323 - DNA, 676 bp, Populus trichocarpa
  Intron number 2 from transcript POPTR_0012s07730.1 (locus POPTR_0012s07730) derived from phytozome v7.0 (chr-ID scaf fold_12; pos 8647210 to 8647885 reverse strand)
atcgtgccaggtatttgcgtgctattgctgctaaggtacagtttaatttgcagttttgctgattttttttgtcactcgcaactcccaagatatattacttcttaataatcttggattttttttcctaccttgcagtttgcttggattcataagtttattttgcagttagttatctgttggcgtgcaattaatttctaaattgtttaattttctctgtgattgtgcacattcattgttttgaatttcttctcttatatagctatttgttttgcttatgtgtctacgctttacttctgatcactatatatgttcttaagaaattttcgtcatttatcaggttaatgttgtgtggaattacaaaggttatgttctgtcatttagtagtgtttggagtcaaaatctgagagggatggtttcttggattactaaataagaagctcgcattttttatattcaaaactttaatgacaaatgatgtgtgtcaaatatggaacccgtttttctttctaatggagtatgagataatcatttgttattgaagtttttttctgcaattatatcaataattttcttaatgttggccattgaacttccctgcttgtcccgggttccaactcctatttatctttgtttgtgtgcagataacagagaggaaatcagaactaggaaaacttga

SEQ ID NO: 57324 - DNA, 1008 bp, Populus trichocarpa
  Intron number 2 from transcript POPTR_0004s14300.1 (locus POPTR_0004s14300) derived from phytozome v7.0 (chr-ID scaf fold_4; pos 14752602 to 14753609)
tgaaaggtataaggacgacaacgaaaaagaaaacttggaaaacttgattagtgaaaattaaggattgcagatataaattctaaatttacaatttatttctttgaaaatatggctaatgaagtcttcctccctaaaagcttacaagacttttaaaaaggttataaaaccctacctctaacaagaaacaaataagaatcttaaagcatgaagaaaataaaaacaaaatttaaattaaaacaatattaaaaaaaaaactatgaaaaataacaaaattaatccaaataacaacttatgagtctaactttaagacctccaaacatattgtaaaattatatatagaatcacttgaaaaaaataaagtttgatccaatagttggattttatattatcatcattttaagatgttatcctagtttgacacgaacaaaccttttcttgaagctaaacatgttttattgatccataaaaacatctactacatcatgcacatagtttgcctggagcatatcatcacctagttgtgatggatcatcatcgtaatactcaaaacctttagtttttacaacctggctgcatcattttccttcaataaaaaacatcttgagatttggactttgacagcaaattgttcatgattacctgcagcacactatgagagaacatcatcatgttacagaactgtttcatctaagagattacttcatgagtggtgactagcatcgaaaatacgagttttagtcctgttctgaacaatgaaatctattagggtgtcttgtagctgttatctaatagggggtttaagaactgtaattggtagaccacttcaagatgactaaggtggtactgattactgaataacatttcaaagcagtcatgagaattgatgctgctgtttttcctcaaattctttgttctccagagcatcacaaggatgtataattttgtttgcccgcacattcttatgaccttctcttcgtattcttctttgctttttaatgtgctcaggac

SEQ ID NO: 57325 - DNA, 409 bp, Populus trichocarpa
  Intron number 1 from transcript POPTR_0012s02200.1 (locus POPTR_0012s02200) derived from phytozome v7.0 (chr-ID scaf fold_12; pos 1846569 to 1846977 reverse strand)
ttgatagtggaccaatcagtggagcttcttagcaggtaatggtgatttggactattgatttttttatttgtttctttcaattattttatttttcttctctctgttcagtagaaaatgataaaaagactggaactttgaccaattctgcctaattctaaagtggttttgcttatgtttcatttgagtgacgagaaaatgggggtaaaaatttagaagtactaaagtctcttactttgtatccagtgttggtttgtttcagtaaaagtttcggttttaatcgaagctgatttgtttcagaagcttaaattatgttaatcagttccatttttcatagattttgaagtagcaaaaataatatttgattggtttcctgctctttttcctttttttttttttgtggtttaggttc

SEQ ID NO: 57326 - DNA, 686 bp, Populus trichocarpa
  Intron number 3 from transcript POPTR_0004s12740.1 (locus POPTR_0004s12740) derived from phytozome v7.0 (chr-ID scaf fold_4; pos 11996910 to 11997595 reverse strand)
tacttctctcttggtatatctgcactttctgcatgaactttatctttaatgtacttaattttgaggtttagtttattttgatgaggttgtgctatgtgctatgccatattatgaagcttttgctctaattctctttgcttatctgaatggcaggtgatgtgcaaattggctttcaaattaattcttttatccttcttactagaactaattgattacatattactgtgtgacttttggttgttttgaatgatttttgcacaataatattttattaaaattggaagttacctcggacaaactacttctgctaggtcttattctaatttatcattattggtgtcatgactcatcttttccattcttttctttctggggccactcttgtattcagccatgaacaaactgggtttttgcattgtattgtcagtgtcgttgtgattaatttctttcattggttggacttttaggtttaaagtgaacatgcttaagggtttttctttgtgtgaactctctctcatttggaagcattttattgctcttgatcatgttgaggtgcatttagtgatgatagtaataatgaagttatgattaactgaagttttgtttttccttctccttttcaccatcttatttcttcatgttatctgacaggagagttgaagaaactcaagacccttgttataaat

SEQ ID NO: 57327 - DNA, 716 bp, Populus trichocarpa
  Intron number 1 from transcript POPTR_0009s09470.1 (locus POPTR_0009s09470) derived from phytozome v7.0 (chr-ID scaf fold_9; pos 8368633 to 8369348)
catagtgagaattctctcctctctctctctctctctctctcccctcttgtttatttttttttcttttgtttgttttgttttttgtcttaattagttgttttcttgattgtaatgatcatgatcacggtgattatcttaaaccctgaatttatttgtggttttgatgtcttaatctattggtcctgtggttaaggactcaaggtccagtctttgtgtgtttgagtttgaattcccaaaccccatatcacaaattatagaaaggaaagagagttttattattattattattattattattattaatcatacgttatctaattcttcattttttactatcttttctttggtcacctttcccttgttcgtgctagtgcaatagtatgtattaatatcttttccatttcaatagaatgaatctcgatgtgagaggctggagtttgcttttgtgggtttagttatgttagtgttagggtgacaagttgtagaaaaccttgaaagtttctagctttattgaattggagctttgtttgtttgtgtttttattgtgtttttatttgtgggccgattggaaaagaaactagataatatgtgataaaaataaaaaatttggctgcctaagacgtggactaaactggcctctatgcaacagacttcttcgtaattgtgtcattctctatctaagatgttagttttgattgcagaatttgctacagagc

SEQ ID NO: 57328 - DNA, 807 bp, Populus trichocarpa
  Intron number 3 from transcript POPTR_0014s11220.1 (locus POPTR_0014s11220) derived from phytozome v7.0 (chr-ID scaf fold_14; pos 8337102 to 8337908)
tgcatgtgagtaaataaaaattcgatggctgttgcgtataacccataacatactcatggttcttcttagaatgacgggtgaagttatttttgttgccagtaaaaatcctaggagcataccaaaattcttagatatctgaattgctataaaatagagtagagatacttgttgtcttatgctctgattttatgcatctcatttaagtataaaactttggtgatgttttgcctaataccaggtgcgcaagaaataaaaaaatgttgggatcttttgttattatgttgagatgttggtgtagatgagtggtaagatatgcttatattttgcattacatgaaaacttgaaggctgcaagagagggtgaagaacaaagaatttgaatttgtcaatagtacggagcaatatggtttcaacatgctgtatatgatgagggcgatcaacggcaaaaaaactgttgattgatatggtgagaaatgaagtaatgttgtgctatttcttgaagggcacaatatatagaggcatcctagtatttggacagaaacttagttgattgtttatcccatgactaccttgggagaggaaataaaaatgaaaaaatatctggttaatttcgtgtaagcgtcaagcatggtgccctgctgcttgtactgggtcctgtttgcattaagttcatgaaaatagataaattacctgtggctggaaacctcatatgcatttctcttagattctcttcactcttagtctggcacgttacatgattcttattattataggctgctgcttgggtcatcattggaatattttccgt

SEQ ID NO: 57329 - DNA, 660 bp, Populus trichocarpa
  Intron number 3 from transcript POPTR_0004s14460.1 (locus POPTR_0004s14460) derived from phytozome v7.0 (chr-ID scaf fold_4; pos 15030649 to 15031308 reverse strand)
acgtactacactggtaaactctattcttcaatgcttgcattcaattttaggattcagttgttaattttccatactgtttcgctgtgacagggccattgtcagttgcagttttaagatctagttagtagctttggattggaacattttctatttaccacacagttaatttacttttgacacatcagaggttccatgaagaattgtgcgcccgcgtgcatgccagtgttgtgtttctaggaaattttatgcaactctcattaaattttatgtatagacgatggatcatttaatttaaagaagagactaaatattagcgaaaatagtctcaattggatgtctgatccttccaaagagagggaatttcatttatgccatatccttgattttgatcagtcaatcaatcaatgcctcgccacatttgttttgtcatttttttcatggtttttgcttgtttatctggctttggagatgcaaaggacaatagcaaattaaactgattagatgcagaagtatagagatgacaagatcaaagatagaaagacgactactggtgaagaataacaaagaagtccagagtttttggagagatttgctagtaggtttatatgttagtttttgcatgcaggccaggctccaagcttctctccttgagtgcgttta

SEQ ID NO: 57330 - DNA, 729 bp, Populus trichocarpa
  Intron number 1 from transcript POPTR_0012s02150.1 (locus POPTR_0012s02150) derived from phytozome v7.0 (chr-ID scaf fold_12; pos 1787310 to 1788038 reverse strand)
aagcatcctcgtttctccaaaaagctagtaagatttatataccatgtcgtttcatgtgctacttgcagtcttttctgtggtttgatcttcttcttggttattcttgttctactcttaaagttgttgtttcctgtgtttgcttgattcatctgcaacatggatttgaaatttatctgtgtttctgccctttttttcccttttgggatgcaaattcttcatttcaaataatttgacccgccgttacgactcgttcgctggtggctaattcgcaatccatatacttacgaaattgtcaactgactaagagaaaaattcaaagaattgcaagaaagtcatatttcccatagcgtattcaattttttttatagcccatcaacataggatatgggatatcatagatagatcatccatgctcacgccaaaaagaagttgatgagagtagaattgatggtttaactgcactagattcaaatgtcttctggtcaagaattactacgacaaattgccctccaacttaggttaggctcttttttagttcctttccagctatttttttttttccatgacataacgtcttctcatctttcagatagtttcagctaagttaacgttgactatttgtgctactctgttcaaaacttcaaatattgatctttgtgttgatatttcttcttctttcaatgtgaaactaaaggtgattgatgataacaagtgtggctcgaaatcgaa

SEQ ID NO: 57331 - DNA, 314 bp, Populus trichocarpa
  Intron number 1 from transcript POPTR_0009s10570.1 (locus POPTR_0009s10570) derived from phytozome v7.0 (chr-ID scaf fold_9; pos 9048807 to 9049120 reverse strand)
aaaaggtaaaacatttaattcaagttttgttaagctgcaaaatttgctttttaaagtttgtttcagttacatgtttcttatcatgcttttttattaatttcagcggcataaacagttggtcatgtttattagttgcttcaaattagataacattttagggtcctttgtttaataattttttatatttgtttatgatatatatataatttttggtttttgaattgtttttaattgaggtttgaaggttgttttctcactggagcaattttatttgtttggattgagttttctagtttggggcagcggcatccgtg

SEQ ID NO: 57332 - DNA, 607 bp, Populus trichocarpa
  Intron number 1 from transcript POPTR_0004s24240.1 (locus POPTR_0004s24240) derived from phytozome v7.0 (chr-ID scaf fold_4; pos 22954823 to 22955429 reverse strand)
gctgcctcactcaattactttgatttcatttctgagtaagtctctccccctctccctctttcttcattactttgatttcatttctgagtaagtctctctctctctctcccccctctctcttcatgtacttgtgggttcttttgaatgtttttacctttcctttattgcttcttgaatactggtgctgcaacttgagaaactgcatgcacctacattttccaattatctcaatttcccttttgaaagagctgggcagatgtgtttttggtttcagctgttttttcctccaaaaagttgctatcttgaagccaaatttagttgctttcttgcttgcttcagatttcccaacttttaagatcaagctatttcgagaatcgttcattatctgtcaatactcaatgctaattcctgaatatgttcagtgcagagcaggattttgactttgtttttctctcttcattattgcctaaaatgttcctgaatggagtaactgattacagcatttcttggactgatcttgaatcatatcgtagctaagaataattagttaatattttgctttaaacctctacgcagcgctcgtggacgtgtcgtaattgagcaacaa

SEQ ID NO: 57333 - DNA, 425 bp, Populus trichocarpa
  Intron number 2 from transcript POPTR_0001s01000.1 (locus POPTR_0001s01000) derived from phytozome v7.0 (chr-ID scaf fold_1; pos 796858 to 797282)
tgctcattcgcttttcaccgatttagtaacagcaggtttaagttgcgttgaaatgctataacacaggaaggaaattaattttgaccggatgctacaacatcgatccgatccagtgcacagtttttatattttaattataaatgattaatgcactgagtaatttgatttaccataatgttttacatttttaacaaatctatatgatcttatatatatataagagcataacagtggaagcatggagtttgattaaatatattttcaaaacaccattttactcttcaagaatattgatgaaggctttctttcctttacgagtgtgacgaccagttcacttactcataagaaactctttgacttgtttttcctatgtgtgttttataaatttaggtcgaagcgaaaaagtctagcaagattattgctac

SEQ ID NO: 57334 - DNA, 541 bp, Populus trichocarpa
  Intron number 1 from transcript POPTR_0011s16980.1 (locus POPTR_0011s16980) derived from phytozome v7.0 (chr-ID scaf fold_11; pos 18665982 to 18666522)
aatcagaagagcctctcaaaagaactggtattcatctccttcacttacctttccatgtctagtcttcatgtcatctcttcttcttacagaacataatgagaaagataatattttgctttaaggtttagactcttttgttaacaacgactttcctccataatcttagatcccagaaaagggtttcctgtaaattttcatgttcttcatctaattaaggctggtgggttgtgtggtaggtttgaatggtagttgcatttctgcatgaaatttctgtaatgggcagaaaaaatacgccggtgccggggatcgaacccgggccaccctcgtgacaggcgggaatactcaccagtcaccactaatatgacaactcattttaaattaaatacttggaaagatggggacaagaacctcctgattgttccgaaatttcatgccacatttacttcccaatccaggtccattaagctatgatgaccctaaaaccatcttccttccatattggactgattttattttgttttttaatacttgaagggaccat

SEQ ID NO: 57335 - DNA, 870 bp, Populus trichocarpa
  Intron number 2 from transcript POPTR_0011s16980.1 (locus POPTR_0011s16980) derived from phytozome v7.0 (chr-ID scaf fold_11; pos 18666731 to 18667600)
gaagctgtcaagttttatttgggtgagtagtatatatacacatcttcttattgttccatgcacaagggtataactgttgggagtgttggtccccgtaaatgaacgagagcatgattcaagcacggttattaaacctcgtttcgctttggcgggttgaagttattaattcaaaatttaatttatattgggtttcaaattaaacaaagtgagaattaatattgtcaaatctgatcgatctaatagatcaatccaccgataacttaataaaaacttgatttaactttgttttcaattcttttttaaaacaactttgttaaacttttatttttaaaataaaaatcttgaaataatgctattttggattgattgagtcaatctagctaacatgtaatcgagatcctgacctttcttgggttcctttttaattaataatcatgccaaaatgattacacatctatctaggttttatctaacctgatcagccaacgagtctccgagttttttcgacttaaaaaagagagaatatatatggagtgcaaaccgtagaaccggaccatcctaattattagtagtaacaaacaataaatatatgttccatttttaaatttcagttgcattatgttgactatgatgcaaaaaacgtatccctttcaccaacttctgttacgtatgacacacaatcattgactaaggcattgaattatagtctagcagttgttgtcttactgattccttaaataatcagtggcctctagtgcacttaaactgctcactgtttattttataatgaagtagtgagttcagaattctgacaacatagacaattcaatttcaggagagaaaagccaagtagtgtgtggaatatttgcc

SEQ ID NO: 57336 - DNA, 894 bp, Populus trichocarpa
  Intron number 1 from transcript POPTR_0009s01430.2 (locus POPTR_0009s01430) derived from phytozome v7.0 (chr-ID scaf fold_9; pos 1686420 to 1687313 reverse strand)
atcggagattgattctcatcatcagctttttcaaggtagccagccatcttcttctttcttttcggctacaaatttccttctttctttctggcttcaaattttgcttattcaatttttgagtattttttcttggcccagaatggaattatagttggatattctgattcttgatcaaagtcaagattttttgagctgaaagattgtgcccgtttgagaattttttactgtagttctttgatgggtttttagggaatcaatgctttatttaccttatgttattttgtttttggtttattttgtgttacttttgtgaagaaaagagtaacatttctttatgacatggatcaggatgatgaaggttatggtaatgaaatttatggccattcacaatggttattaggtagattctttattaattgaattgtcggctatagttttggttcacaagatgaattgcgtgccattggagaaattgggttttgtgttgtgtcaagctatgtttttgtttttgggtcatattttggtgcacaatgcaaatagaaggtggttttgtagctgtatgtattggcacctgtgttaaagaatgtgattcggtgtgtctgtggaatgcttagagcctctcctttgtgggaaagttttgaagtgaatgggttgggaggttagctgaaaggtcattactgagatccccaatcgaacttcatgagcatgaatgctaagaaagaatggcaatgatttcgtgcttaacaaatttgagattgttaaaataaaataaagctctgcttcgttgaatcttactggtgacaaatagttaaatatttgggtgctgcaattacagttttaagatgcttatgtggggatttttatgttttcaggtttaagagcattgcagacttg

SEQ ID NO: 57337 - DNA, 327 bp, Populus trichocarpa
  Intron number 2 from transcript POPTR_0004s17530.1 (locus POPTR_0004s17530) derived from phytozome v7.0 (chr-ID scaf fold_4; pos 17694812 to 17695138 reverse strand)
tgtgagtaccttgtttaatttcttaccgatttcttgtttttatttatttttctcaacttttagcattaattcttcttatagtcactgtttagattggaaatatgtaagtacctagccttgcttataaaaaaaaggaaaggaaaaaaaaagggtgggggggagggtggggggcagtgttcaggctctcatgcctttgtctgtagtttgacaatggttctacaatcttttatgcctaattttagatgagatagataggtactggatttccctttttaggttttgatttttattctgatccagtttctcatctttgtttctgtatttaga

SEQ ID NO: 57338 - DNA, 932 bp, Populus trichocarpa
  Intron number 1 from transcript POPTR_0004s04200.1 (locus POPTR_0004s04200) derived from phytozome v7.0 (chr-ID scaf fold_4; pos 3016307 to 3017238)
gagaggttaaaagatagtggagattgctcggagaggtatgattggctttcggatctcatttttcattattgttaaataacacttaactcgaaagcttaggtctaagggcagtggcttaactgtgctaaatctaagccgtgtgctattcatgcgcgtgtgaggtccactgcaaatgaaggacatggacggctttgattagtggccctgtggttgtgatgttttggagtatgaaaaggattgcgatgcgtgtttttgataatggttgtggtttggtatatgatcaatgcggatggaataaatgcatgaaggtctataattttggaataattcttgttggttgttttgttgatatattgacaacatgctcatgtttgcttatatgtagaagttggtgcactcaagtagtactttattgttagaccaccttttggtttgtgcttttggaggaagatgcaagtcttctaaagtatttggaaaggatatgtagaagacattgagtaggttttggataaacatggatcactaatttagaagaatggtttagggaaaaacttatgacgatgatttactttcagataatgtcgttcaaccttttcaggatgatacataggatcatgtattcttttcaaggcatctaaagctttgaaggtcttaatgtgaacttgttctatgtgtaagaaatatctggtgcatctttcgataggtcacaatttggagagagtggcataaatcatatactattgctggattctcatatttcagtaagggccaaaaaagaatatttatttcaaggtactgttgcaataagggtccatgttacatttttttaatctttaatggaacttgaaaaggaaccttcaagcattgaattccactgtatgacaaagttttcttggacaggatctcatcgatcttgttgtatttgaataggt

SEQ ID NO: 57339 - DNA, 682 bp, Populus trichocarpa
  Intron number 1 from transcript POPTR_0009s15500.1 (locus POPTR_0009s15500) derived from phytozome v7.0 (chr-ID scaf fold_9; pos 11974136 to 11974817)
ggccttccttcacttcacttctcccccacctccaagtaatgcacttaacactcattcactcacacataattgtagaatttaatattgttctctgaactgatgaattcttggaaatcaatcaatctcacggcattctcttctctgctcgaaaggaagtttggatttgcatttcaggctttcgataccttttgtacttgttgtttctgtccttgttctgtttgttttgagagagaaatttcattacgtgagatttatgagtttcttacagaatagtttcatgaaaatacttttgagaaggaacacggaaggaaggaaatcaaattcagtgtctaatttttcctgtctacacagttccttagagctgtaagcttgcagcaaatttttgctatggttaatttcttggattatacagtatcttgttagttgacgaaggtttacttttgtggaaactacattaccgtggattatcttcattcataaatgtgatctttgcttcaaaatttctttagtctttacatattggcaatagtaatggatgattgattcatagttcaagaaatatacagtgcaaaaatattcaattgttccactaatttggctgattttaaccatgttattaaacttactaattactatgcatattgcagcaaaatttagtctgtcattatctctgactccttta

SEQ ID NO: 57340 - DNA, 981 bp, Populus trichocarpa
  Intron number 1 from transcript POPTR_0009s12600.1 (locus POPTR_0009s12600) derived from phytozome v7.0 (chr-ID scaf fold_9; pos 10257195 to 10258175 reverse strand)
cgaaacttagggaacaggtcgctaagcaacaacaggtatccctctaaatcaaaccctgaaattctagatccaagtttaaaattccattttttttcagctcaatatcaatttatttatttatctagacttcgatttatcatttcttattgtttttttggtaaacatgttgtctatgggattaggaacgagaaagatcgtgtcaaatcttttgcgaatttgattgatttggttaaatccgtttagtgttatcatgcaccggagctggaaattgcagtcttggattattatctgaagttttttcgtgggtttttgagaatgttcaatgtaatgtaggtgttagtaaaaatgaaagcttctagggaatattgtttgtgttaattgatttcttgcttcatgaggattatgctaaggtttaggattttaattttataagtttaaaggagtttgatttggtggagtgaaaatgaagagagaataaagtgattgtttttatgcatggaaggtgaaattacttcaaatttacaatgtacgattcagtaaggaaatgttttacgccacttccaatggtgcttgtaatctagttctttcgatcgaaatgcttgttttagtgtgtcacactgtaatttgatactaacccatcaagttgaagctccatttcatttacccttttgattttgatttgagattttttttctttgtgggtctttcaataagattcatgcatgtaacggaccttttttattgcaatgcaagtttcaatttctacgtgctttggtatgggaacatcaatctgaagctccactgggttttatacatttgatggtgtttcctcagcttgacataattagggtgcatgtctggcttcacggagcactgcattttattttctccacgttgtagtagtttgctcctcaaaaccagtgttctgattatgctgggtgttatttcaggctgttctcaagcagtttgggggtggtggat

SEQ ID NO: 57341 - DNA, 721 bp, Populus trichocarpa
  Intron number 2 from transcript POPTR_0011s02370.1 (locus POPTR_0011s02370) derived from phytozome v7.0 (chr-ID scaf fold_11; pos 2275134 to 2275854 reverse strand)
actattgtccggttaactcctccactttccattaggtaaggaagatgtttgatgagtgctaaatgttataatgtcaccgaaagtataaatatcttgagaatgatctggtgtgatgctatctctttccatacaatccaagtaataaacaagattgatctgatatgggttaaagagagaaggtgcctggatgaacagtcactatccaagattattatcctgtactaggcctttatgcttttcacaaaaaactaggaccttattgaaacctgatactatccattcacatttgcttggccctttgattcgtagtggaaactttgtttctttcttcggattcaatgtagtgaatgatgcctcaaaaatcttttagttatactggaacattttcagaaatgtatctgaaaagattctgtcacaagactagtcatgccaattaaggatggcatttgtttttgttgcaaaaatgaaacaaataaaatctgcaccacatgcaattatgtattcaaagacccaccttacatagttgaacaagatttatgtggtatgctgtaaatcatcatcctgctattgcattattgttgactcgtgaacaagatactgagatgctatttacctggcagtaaaagttggaatgcacgtttaatcaggaaacaattttgtcacgaaattttcttatgggaaaattgtataacctggaataattttttctttttcagttcgg

SEQ ID NO: 57342 - DNA, 632 bp, Populus trichocarpa
  Intron number 2 from transcript POPTR_0012s11780.1 (locus POPTR_0012s11780) derived from phytozome v7.0 (chr-ID scaf fold_12; pos 12116764 to 12117395 reverse strand)
caaccctgttgtttgttctacgtgaccaaacaccggtaggatttaatttgtgctctatccctaaacatagattgtaaacataaattttatattttccaacacaaacagatttagtctagctaacgatttaatatataataaatttaattattatatattaataagcatgtttgattgattgtagttttttagtattgattaattgtagttttttagttacttatcattgaatgtcataaaggaagattctcaatataagtttcattgtcttctttttaattatatatggctattgcttaaataaccatgtttttaataaaatcatggttatttaagcaatatacatctaataaaccaatccctgaataaaataaaataaaaattcataatccgcatgaattgtgataaatctgtcatttatatattaatatatacgggtgaatctgtctcttctgagtgttcatgtagactccacttgaacgtctaaaacatattctgaggcgagatattgatcaggtgcgatattgttcatctactctcccttaatcattgtgagataattgttgttatcgagtttgtaaaatgattcctcttaattatgaatgttctttactctactgaattatacagat

SEQ ID NO: 57343 - DNA, 614 bp, Populus trichocarpa
  Intron number 2 from transcript POPTR_0009s12300.1 (locus POPTR_0009s12300) derived from phytozome v7.0 (chr-ID scaf fold_9; pos 10060804 to 10061417)
ctcttgctctttctggctttcaagatattcatattgtgagtatatctttatttttgttctttttaaatttttgcggggagtttcttagggatcagttttggttgtttttcaagccaggttctagttttctagggtttgaatggactaagtacctgttactagtcttcatttttgtgttttggggttatgatatgattttatttttgtcaattggagttcctttttgaagggtttagagcgcggttagggtttgacaaaaagggtttttttttttttttttgaatttcagtgtgtatctgtttgaacttgtattgatttaaaaaatctaggagggaatcaacttgtggaattatttattattccgaaacatatgaaaatacacatgcctgaatatgaatcattactggttaagaaagtagtggtttttatgtcatgagactgagaatattattgacctggttaattataaggttgcaaatgctttccaagtaatgagtagttggtggtaatagaatgcagcagctgtgataagagtgaacatagcattgatggatataaatgaagcggtggttgcagtagttgtctggggctttggaagtgaagggtttggctca

SEQ ID NO: 57344 - DNA, 530 bp, Populus trichocarpa
  Intron number 3 from transcript POPTR_0009s12300.1 (locus POPTR_0009s12300) derived from phytozome v7.0 (chr-ID scaf fold_9; pos 10061469 to 10061998)
taggtacaaggtgttgggattgtttttatgtttggtgttctttgttcttaggagcgaaacatggtggtgactgggtgcttatggtgaaaggttgtctaaggaggtggtgatggtatgaactaaaggctgcccttgtgaagctgtagtggtggttggtgagataaggggcacccaagaagatatgctgcccttatttgttaggtatgtcatgatcatcaacaaactagcttttgtaatgggaaactgctgaaaagcaaggggatgggttgccctaccaggaagttgcaactttagctgaaacttacatattgggtttttttggctaggcatttattgtttcacaaaatggttaaaaaatcttaatcaaattaatggcgtaccaaattaaggagatagtgtagtttgaggcaaagacatgttggatttgaactttcattttattgggcatttgcatagagagttcatgttaaggccctcatctttatgcagcactcctttatacatttgcttgcatttgtctgcagattgac

SEQ ID NO: 57345 - DNA, 797 bp, Populus trichocarpa
  Intron number 1 from transcript POPTR_0001s18040.1 (locus POPTR_0001s18040) derived from phytozome v7.0 (chr-ID scaf fold_1; pos 15021342 to 15022138 reverse strand)
gtcgctccgtatttccatctcctcttgttttacaggtaagttcctatctatctctaaccctagcttagatttgatttacatcattctaaacagcttttattaattagctaccaaatcaccgatttggtgtttcctttcctcctgtctctagagctttttatagatctgtgagttcttatttctagatttgcctctaaagatttacaatttttttcattgattgtagttttgttgttgatcgtgcctttctctgttagattcagctgattatcatttttttcttaattgtttcctgttatattttaggttaatagtaataatagtagcaagaagctattatggtgattagattgttgattcaataattacatattgaagtttgtattttttacagattttttgctgtataatcgcctgcattagtaattgaattttgtttttatatatatatatatatatatatatggatttgtgggtttaaggtttttggcggtagtgactcatacactgcagaatttgtacctttcttcttttttttgtctctttaggctgtgcttccataaggaaaagtatgaatccgttttgattgtgtgccttttctggttcttgtcttgggtttgttgtggctttatattatttactctgatgctatgattgcttggatttttattcctgtttcatgcattgccttttgatctgtgatgattatgttactgttttcgttagtggcaattagatttgatctctggttgttttgtgcagcttgccacataacttatagggctataaccgattta

SEQ ID NO: 57346 - DNA, 331 bp, Populus trichocarpa
  Intron number 2 from transcript POPTR_0004s24200.1 (locus POPTR_0004s24200) derived from phytozome v7.0 (chr-ID scaf fold_4; pos 22909076 to 22909406)
cccttcaccccaggtttgactttaactctctcggatcaccgtgtgacggctgtaattattcaacaacagtgggcatatttctagtagattggcttttatgtgaagaaaaaaactttttaattttgagggagagcacaaacggggaatgtcttaaaattagaatcttggtatatggtttgtttaggatattttctccatcagtttttgctagagtttttgacactatgaaggtatacatgcatcttcatctattttcctttataccagccaatgttgggctattgaagtcccatctcctgaaggtatttgagaatttttctctattgaaggt

SEQ ID NO: 57347 - DNA, 666 bp, Populus trichocarpa
  Intron number 2 from transcript POPTR_0001s14450.1 (locus POPTR_0001s14450) derived from phytozome v7.0 (chr-ID scaf fold_1; pos 11321818 to 11322483)
gagcaagaagcttttaccaaggtatggacattacacggtacatggttgtttaagcatgattgaagtgtcaaaaaatattgagaatttgaaatatcatgttgattttgctcagcaaagaatcaatgtattgtaattatgcaatcatgattttgaaacattgcttcaatctgtgttttcggttcagtgggtcaatgcccactacacacgtcataagaaagtcttccttttagtttttaaagaataaaccaaaaggccaagtgacgcagatgtggtgcatgttaatctagatttgtattcatccataactcatcaaagcaagttattttgattctagttgtttgatatcaggagaatgcctcctttgaaatgtggtctgaaaactgaagaaattaacctcacgagccactgtaatttctctatcattatggttttccttgatattttcaatctggcatctgcttataatttctgtcaataatggtatagcagatgatttgttagtggtcggagccctatgaatttagcttaggtggtagaggggtgcagggattattagtgcctgttcgtaggatataatcttaacggcaacaataaatctcctgtgagattcctcacacattattcttgtggtgctgaaggccttgcaagctagttctgaagatcaga

SEQ ID NO: 57348 - DNA, 692 bp, Populus trichocarpa
  Intron number 1 from transcript POPTR_0011s11690.1 (locus POPTR_0011s11690) derived from phytozome v7.0 (chr-ID scaf fold_11; pos 14463796 to 14464487)
gcctttcttttcgttctcttcttcgtttgtactttgtaagtgtttcctgtgtttctttacgtttatctgttgtgtgttttcggtttgggttgttttctctggttttgtttctgaaaagatcagaaagattgactcttttttttgtgtgggtgcgtttggttgctgggaaatttcgaggggagtgaaaagaaaaagggaaatagtgatttttttggttgtgctttttttggctgtgatttttatgtcagtgttttgtgtttcaagtatgtaaattgtgttgcttgtagactactatagcattgcttaaggtttaaattatatgtttttttggcttatattaggactgtaggcagatgataattatctaaattcaccctaatgatagtttgatattttaacaatgtttttgagtttaagtttttgtttgatgttcctatggacgtctagtgatttattgagttgctatagaacttcgaatgctttagaaatcgttcttcagtaggtatggaagacaaacattgaacctgcatcatccacgatccgacctttatgtgattgtgttttccaaacgataatgagagggattgttatgacataagcaatattcttacgattgttatttagggtttctttttttaattttcttatctggtaattaactctttatatgtctttggggttgcaggtatcaa

SEQ ID NO: 57349 - DNA, 921 bp, Populus trichocarpa
  Intron number 1 from transcript POPTR_0004s23290.1 (locus POPTR_0004s23290) derived from phytozome v7.0 (chr-ID scaf fold_4; pos 22073931 to 22074851)
caagaccactacacaaacttggcaaccctcaaacggtaagtcctcactaagcatttaagttgtgtttcactttttgataaaaaaaagaaaaccatgtactattgtagcgattggttgttgtcccgagacaaaagagatggagatattagagataaagaagatatgtctcctgtacttcttattttgaaaggacagaaattcattttaaaaatatcctagaaacatttattttatatctttgtcttgatccctctaactaaacacgtatttgttctttttgtatctgtttttttttttaattctgaaacactaaccaaactcaatcatatatttttcttcggcctagtgtgtaagaagcctgctggttatatgcttctatggattgatgaaaataagttcttggctttgtgacaggtcccagcagcttatgcatcagattttgcagtagtgatgcctggacagcagcttccaacttatattgcccaaccagcacccttaccttgtccaagggaaaagatttattggcccaaccatgagcaaaaccttgtatttccttgaaaacatagtgtaatacttgcatttgatcatgcagcggaagttatgttatactatctatctatatcaaaatgattcatcactattatgcactactcatttctttggcttttgttaccagatgagactaattaatgaaaatctggccatttttacttgaaaaatcgaccattcctgataaaaaaagaagaagaagaagaaagagaaagaaatagccctccgttgaccaatcatgccaccttgagtgggcaattcatgggttttgcctttctttaggataagatgctctgtcagaaagacttcgctgtatttctactgtttgaatcatcacaaggatttccagtgttggaaatttttttcatcaaa

SEQ ID NO: 57350 - DNA, 774 bp, Populus trichocarpa
  Intron number 1 from transcript POPTR_0012s06410.1 (locus POPTR_0012s06410) derived from phytozome v7.0 (chr-ID scaf fold_12; pos 6783725 to 6784498 reverse strand)
ctattgtttggcttgcttacgatactcgatcctctgtatgtttggatctgtttctttttctttcttcttttcttcttaaatttaaatcatatgatattttcaagtttaatgaaaaattgattaattattgatcagtaaagcttactggatcatcattaattaattatagttattgcaccttttcttttgatgaagaaatgtttaattattgatcatcaatagttaatgatagttatcgcaattttttattttgatgaagaaatgtttaattgatgaatttacagtaagaaatgtttatttatccctttttttgctttttttcttcttttaggaaatgtttgtttttctatatgtcgtaactttttttttttaattaaatactggttttggatgtgttttgttttatgagatcaatgaggccgttatttgttgttttgatgctagttatttcttgatacgaagggtcgttgtagtttaatctagtttttgaaaaatacgatacaatgtaatacatattttaggaggtgggtttatgcggcaatcatggaggaattaacctagtgaaacggtgtttctggttgaagtctcggtttgtctaggttagccatttgtgcgcgcccgcgcccgcccttgtgtgcgtgcataagtatgcgcaatagttggaatagttcttcaaccttttctcttattttacctgtcttagcttgatttgagattctgttgatttttccttcttattttgttctatcttatttaattcttttttccagaaat

SEQ ID NO: 57351 - DNA, 756 bp, Populus trichocarpa
  Intron number 2 from transcript POPTR_0015s04220.1 (locus POPTR_0015s04220) derived from phytozome v7.0 (chr-ID scaf fold_15; pos 4280376 to 4281131 reverse strand)
cgtgcccaacgcttgctgcagcatcaagtaatcaggttaattgttgtattactgttcagtgttcatccgttatttgtttgctatggaaataattgttggtgacaagtttattgtgtttgagagtggaagttaatttgagagatgtggttgagattacttttagtgttttgattgtgtttagttgttttgaaaaggttaaacaacttattaaatgaaatgtattctcagagtagtaggcatcataccactgtcatggggaggggctctgatggtgatatggaatgtcttgatttacccagttcgtgagttcaactcatgtccttggatagctcggatggttgctgcccttgatagtatcaggacatgggaggcccttcgaataagactgagcctcaaactggtgtgccagtcccgagcagtgtttggattagctaaggccatgcacatacccctctgctttcaaaaaaaaaacctgtaataggtgtcatgattattactatgggtagtagtcattgttaattctttatcaatgttgcttctatttgggcaggaaattgctaatggctgaagagctgcattgtaaattttctttcttaatcttgtttattatccctgataaaatcctcttaatgctgcaactcctagtgatatttctatctatcaattagtttctgcatatgaaattttttaatgaccttgtgtgaagtattgatggcactgtgattgtgatttttcaggctggaaaacttggaactc

SEQ ID NO: 57352 - DNA, 707 bp, Populus trichocarpa
  Intron number 2 from transcript POPTR_0012s13670.1 (locus POPTR_0012s13670) derived from phytozome v7.0 (chr-ID scaf fold_12; pos 13721366 to 13722072)
agatattggaatcatatttcatctgaggaatccaggttaaatatttatatattcttttttttttctttttggagtttctctatatatattaagtaagattcatgatctatcgaaggcttcatgatgcgcatcagtaagatttatgggattttggatttaaattactacatcaaaatcgagtaaattcaaaagtgaaaagagatctatgcaagtttgtggttatctagctatgaacatataaatttataatttaaaaataaaataaaaatggaccacagttttccctgatcgagagagtattaaaatatacatctggccagtggcaggccatttcttatgtctacaattaatccccagaaaatagtgcaaacagttgactaaaaataatgactttcaagtactaatttgcaagatggaaaaatatttataatattgaagactttatgccaattatttattggatttcttgccccttgactgctgtgagaaattaaatacttctttggatgccttgtgtgcatgactaaaataatcaatgaatagggaaaatgtcttccaaagtcttggggttttcagccataaaaaaaaaattctattattattatagtaagaattaattcaaagttacaaaaatgcaagaactaatttagaactaattaaatattgttgccgtgtaggttcaacacaattgcgtatcttcaacaaat

SEQ ID NO: 57353 - DNA, 707 bp, Populus trichocarpa
  Intron number 4 from transcript POPTR_0015s06310.1 (locus POPTR_0015s06310) derived from phytozome v7.0 (chr-ID scaf fold_15; pos 6905835 to 6906541)
gaaccttcatccaacagtcaacaacagagagaaaggtaagctggcaatgcatgatattctctactttaatgccagctgcatctgttatctctgtacattagctggaagtaaccctcttgatccaataaatgatttcttgcttgttgagattctatgagaatgacgactactaatgccattgattagttgaatactactaatcttgtggtatggactatgaagttttatcaaggtcattctctggaaattagaaataattaaatagtgtgatttattcacaaaggaaggaaggaggaaaaagctcctagttttgcaatatgttcttcacttatggttgccatggtaatcatatgatttattccttgtttctaagtgatgcaagttacttcctgtcctgcaaggctttgttcgtcagttgtttagattgacattatttctttgcttgaagttaactttttttgtgatcttgaccttaaataattattctttagcttgtttttgtgcgggtaatgaatcttcataaaaatattctttgtttgtgttattgaaattactttttgcttgaagttaatttcagtttgtgttattgaaatttaactaaacttcttggtttcagcttatttcatcatgctgctttgatgtttgctgattatggttgggttgttgcataattgacaggacagcagagcttatttttgaaaagtaca

SEQ ID NO: 57354 - DNA, 973 bp, Populus trichocarpa
  Intron number 1 from transcript POPTR_0009s04020.1 (locus POPTR_0009s04020) derived from phytozome v7.0 (chr-ID scaf fold_9; pos 4581273 to 4582245)
tcatttcttgtaaaggaattcaccaaacccgacaggtgactgtttgtagtatccttagtaatcagggatgacatcagactaaatattatcttaagcatgtcattgaatttataattgggacttgaaggggaggagcaactgtcaatattatgtggtcattactactttatttatttatttttttctatgtggacaagtcaaagaattttaaaaaaatcaccttaattcttctactattatttgtcatgaaaattcaaagcagacaacattggacttcagatgcctgcatttgtagaaacttgaccaaaatgggaggaacatcagtttaaattattggcatcaagcttagagcaaccaaaactctcattttttcttcaagttgccaaaatgtatttcttaccataactcatcttccaagacaacatatatgttgttctacttgttttaaaaaacgaaccgcctatgattgacaaattgcaatttcatactgaaacttctgtcccttaattcgttagaacaagctcaagccctgaatgtcaactatatgtagttgaagttgaagtgttataattcatgtagttaaaatattcttgttcttcctccttgaataataatttttttgttctagaattgtctttgtgtgggacctatagagccatttagcagtcgcaagctgtttctaacttcactcgcacaatgttttatattgtcattacttttctcaagtccaagttgttgacgttgcatctgcgcaaagcatgttgatgttttggctgaaggattcgaatgtaaatgcagcaaggttacagcttcgtatcacagaagttcttaaaaggctgaatacgcaagcatcacctcctgtctttaattttctcaatggaagccttacttagatcactccattttcttctagctcttttcatatccttaaaacacttggctttggctcaagaggtaaaccaattcatctacc

SEQ ID NO: 57355 - DNA, 505 bp, Populus trichocarpa
  Intron number 1 from transcript POPTR_0004s13640.1 (locus POPTR_0004s13640) derived from phytozome v7.0 (chr-ID scaf fold_4; pos 13995446 to 13995950)
cggatcttggaggggataatctatctaaggtttctttcattttttttgttagtttgaatattttttatgtttctatttctgggttttctggggtttgttgttttgcttgttattttggatctgatggttgtttttattgttaatttcaagaaaaagggaacttgcattggcaattttgtttctatatattgtagttggtattttgatataataagccgtgtcactacgaaaatggtgaagatgctggacaaaatcaattaatcttgaatgcttcattatgcttttttttttttttttgtagagaaaaaatattttaaagtaattttgaattgaatggtatgtcgggccaggttggatttggtatttggctcgttgtttgtttgtttgtttcattggtattgaagaaagtatgtgtactttcgtttgctcaagccacatacttgctggttgttgtaatgtatgttttgcagattgacaaggagaaagctggggtgcttgttggtac

SEQ ID NO: 57356 - DNA, 945 bp, Populus trichocarpa
  Intron number 1 from transcript POPTR_0004s09260.1 (locus POPTR_0004s09260) derived from phytozome v7.0 (chr-ID scaf fold_4; pos 7785055 to 7785999 reverse strand)
tctacgaacaagcgtagatatcgtaagcagctagggtttgctcgattcttagttctatttaaattttgttctttttatttatttattttgattatttatcgtctattgtttgtttttgttattggatttaatcggttgtttttttctgttttaatccgctatcaagcaatttatttttatgtcagatcttatagaatcgaagttagattaataaaaaaaaacatcgataattatttgagatttttgctaattactttttttaagttggttattaatgttatgtttagattaagcatctatttttgctcattattattaataaaaaaaccgatgattaatttgaaagttttcctaattttttgttattaatgttgaaaaacaaacatgggcaattgtttattgtgtagattaagtgaatctttggtgatgttagatgatggatgagctgcaaccgttgtaaggatttttgtttcttaagctctagatgcgcatgagctctatttgttggttttgaaatagtgatggctttgatgttagggaatcgttttttcatgtgtgttatgataatgttgaaaaggaagcaagatcaatttgattggaactaggatacgggtttggactacagttcgaagacttttattgcagtgatgtctgatgctagatttaggctttttgtgcgtgtgtgtgtgtgtgtgtgtgtgtgtctgtgtttggccttttctgctcagtgttatttcagcacaagatgatggtatagtggacaccaactattttggtattgaggcttgctagactggtagttgttgtaatttaattttttcttttgttattggcgttgttaattgtgtttgcccgtgtttttcttggctataattctgtttttgttgttgttcttttcaggaacctgcaggtggtggtggtgctgtctgcagattttcagggtga

SEQ ID NO: 57357 - DNA, 578 bp, Populus trichocarpa
  Intron number 3 from transcript POPTR_0015s06030.1 (locus POPTR_0015s06030) derived from phytozome v7.0 (chr-ID scaf fold_15; pos 6329491 to 6330068 reverse strand)
aggctgcttggtttagaaaattcgcctcccaaaccgttacagtcgacctcttcaatagtaagtcttctatatatattttacgtggagttgattgagagaatttggttgtttttggaaacatgatgagtaatttgttaatgctgttgttttttattagtaattttcatgttggatgaagtaggagaaatttgtataatttcctggtacagtggacttcactgtttattattgtttagagggagtctggataatttgattgatttgtgtgatgattacctgtgaaataggtaagatagaattgttgttgtttaacttgaaatcggaaaattatggagctgtaaaaacaaagagtggtgattgagaattttatataaatttgattaggtattggtataagaaaatcaggaggatgagaaatggagggagtaacgcgtactaggagatggctaatttgaagcctctctttgtcacaatccatgctactttcctccttggaattgtattctcttccttttatgttttctctgcacatactctgccaagtcctccaattcttggttcctctctcattgttggaa

SEQ ID NO: 57358 - DNA, 901 bp, Populus trichocarpa
  Intron number 1 from transcript POPTR_0009s17130.1 (locus POPTR_0009s17130) derived from phytozome v7.0 (chr-ID scaf fold_9; pos 12893910 to 12894810)
ataattgctgcagtcgttgggggtttcatatccaagtaataattgatatccatatatatatatatatatatatatatatatatatgaaagtagtattgctaatgactagctagtggtttatacttgatattaatcaatgttccttgttataatagcactataatttatactttaccgtgtttgatttgttacccttaattacatgtattattatgtgtgtgtcattacttgaaagatatttatgatatgggaaatccattcattttgtgtgtgaaatctcttgaaaagttattaccaaaaaatctcttgaaaagtgcagtgcccttggtccaaataataaaaataaaatttcttttcttccaagtactgaatacctttaaaaggttattattgtggttctctatacctaaatgggagatagataaataaaaaacacgtaataggccaggttttaacgacaagttacagcaaaaaaattccccatcataatttcctagtgttttctctatattcatttctaaatctggcttgtatatatatatatatatatatatatatatgagggagagaagatagtaaaactctcatttgaaccccctgctcccatattctgcatgatctcctcgtctttctttctactcaatactacgtacagctgaaacatataggtgcatgcccagaatccaaattagatcatgactgtcgtcctcgttattgtgctgttcaaccttgcacatctctagctttcactgacgtatcattgacatttgagagatttgttgatgaagatcacgagaagttactgactctcagtggcaattcatccataagcactttaacttgctcctgaaactcccatgatgctcatacttcgaaacagaaaaaagcatctggccgcatc

SEQ ID NO: 57359 - DNA, 907 bp, Populus trichocarpa
  Intron number 1 from transcript POPTR_0009s05790.1 (locus POPTR_0009s05790) derived from phytozome v7.0 (chr-ID scaf fold_9; pos 5794367 to 5795273)
ttaaagtaagttgttattgttctttgatgcaattattagctccatattagcatttcccccctattaaggcccgtggatgacgagatccagatatcaacaatcatgaattcatgtggatgttccgaatatgcttctgttacattgtcttaaagcctcctggtgaaaaaaattcatcagttaaatttggagaccatggttacataaattatcagctaaccatcgcgtcataaacgttttcctattgctagtagttgctatgacacgaatcataaagctatactcttggctattaactgtttttttttcctaattcattttaatttatgggaagttggaagatgataactagatcaccagaaaatagagaaacagcaggatacaacttgtagagatcatgttggcttccaaattgtggtttttgaaattaacagatcaatcttgtggtccttctgtactctacaaatcattaaatctcccatatcaaccataggtgtacactgatgcattttccatgaagtatattacttatctgaattccttctttgattcgcttctggaagtatgagatgtatatgtacagttactgtcgcattgtttgatgtaaattttaactattggtgatggtaatacaagaaataacgaaggtatatacaaatgtggttcctagatacctcgtatacctttaatcaatccaagttgtttctttggaacagaacatctacatatactgtaatttgttgtttttgttttcttcatagtaaaagttatctggccatgaatttcaagataattaacgatttttagcaaatctgtatttatggcggtgctttataattttctttttatgctgatcaagatggtccttcctgcagcaattaatcaactatttcacatacaaagcagtaag

SEQ ID NO: 57360 - DNA, 424 bp, Populus trichocarpa
  Intron number 2 from transcript POPTR_0012s11000.1 (locus POPTR_0012s11000) derived from phytozome v7.0 (chr-ID scaf fold_12; pos 11630216 to 11630639)
tgctttcaaaggtttgtggttttttgtttttttatgcaatttgattaagaattaatagttgaagagtggcaacttattgaagtcatgtgttaatcttgtataagttggccatgtagcttccaacttgttatatgtggtataagcaaatttcctcatttttttctgattaaaataacttcgttaaagatgattttgattgccttgagttctcaaatgactcgcctaaagctgggggttgactgactataaggacactgctagaaaacagtgattgaacttccaatcatgggatcagaggggcatgtttagtggctttagatatttttaggctcttgttcaatagcctgatatttttaatcatttcagatttgtttgtatgttctgtttcttaccatttgagttttatctgctttagagtgaccct

SEQ ID NO: 57361 - DNA, 863 bp, Populus trichocarpa
  Intron number 1 from transcript POPTR_0012s13850.1 (locus POPTR_0012s13850) derived from phytozome v7.0 (chr-ID scaf fold_12; pos 13818719 to 13819581)
ctgatccgatttacaagtaaaagcttctgtctttgtttcagtttcatttcaatttgatcttgattgagtaattttagagttgattagactttaatatctgttttattgaatggattcagtaacaagtagtagttgctgttgagttttgactgtgaatgtgaatttgagaggtaaaaaatgttggcttttttattctgaaatgatggattaggcattgaaattgtagccttttttttttgtatcggttttttttttcatgttggaagtttgcttctctttgtgtcgttatgattcgtcgatgaatagctgttgagtgttagagtagaatgtcttgtttcttggcgattgttgagttgtttgtgttcatgagaagccttacttctgatgaattacgtattgaaaaggtattttataactaggatgttaatttgtggtggttggaatttaaaacttgagcttctctcatggatttcggaacgacagtttgcggtgatgtttggagagtaacaaggaaaggaaaccagggtgtcttagagttttgcttagaggattggttaatttgagggcatcaatattcaggagatgaaataatccttggaggctgtagttggtaccggtcatcctcatattgttcataatcactgtttaaaaattttggatggccctgcagcttccccagtcccataaaaattttggatggccctgcagcttccccagtcccagctatggtctgcctatgcatgtttgtgctattttctatttttgtttcaatttgattttgttagaattggaattaactatagttgttattatgtctgttactcatttaccagggcttgtgtggagcagtgtgagaaaactgg

SEQ ID NO: 57362 - DNA, 343 bp, Populus trichocarpa
  Intron number 1 from transcript POPTR_0009s08680.1 (locus POPTR_0009s08680) derived from phytozome v7.0 (chr-ID scaf fold_9; pos 7868243 to 7868585)
tggcatactgccaggcccaatcacggttgagtctggttagtgctaaatctactgtgcccgagacttcacacactaccaagtccaatcgtgactgggcctagctagcgctagacctaaaatgtcttcactggagcatgtttgtgttatagaaaatttatacttgtaagttttttttaatctcgtgtttttttataaagatatactgataaaatcatgattcatcacaatatctattgagaaaacaaagctacatgaaaattgtcaagaattcattagcaattgctgttctcgttgccttagctgtaataatcccctgctcaaaactctccacaagactacctcg

SEQ ID NO: 57363 - DNA, 456 bp, Populus trichocarpa
  Intron number 3 from transcript POPTR_0014s07490.1 (locus POPTR_0014s07490) derived from phytozome v7.0 (chr-ID scaf fold_14; pos 5632727 to 5633182 reverse strand)
taagcatctgttacctctctgcagcaaaactaaatgtgagtttctcttttggtgccatttcgtgcttgcctcatttgtaatagagaaaagcctctacactaatgttgcggttcttcaatcttaggttgcaccagtcttccagattttaaattctttgattatgcaagtgtgtgctcaagaaaatttgatgcaatgaaattcaatcaatttgttatgttcagaaaattgtccaccactcagttgcctgcctttgcatttgttttgttgtttagttttttaatttgaaactcgttcacttgccattgcaacttctgtgtattagtttcttagagtaacttttttacttgtgataattagattggtttcacatgcttcaggatttctatctaatttgctactatcaaacaatttatcttggcaggaggtgttgctggttgaagggtccgtactgaagag

SEQ ID NO: 57364 - DNA, 736 bp, Populus trichocarpa
  Intron number 1 from transcript POPTR_0012s14430.1 (locus POPTR_0012s14430) derived from phytozome v7.0 (chr-ID scaf fold_12; pos 14325655 to 14326390 reverse strand)
gccaatttgcaaggttggtttgcttatttttgaggaaaaatttgagctttatcatgtatgcagctagtttgattttctttgaaaagccttctttgaaaaattttgaaagttatttgctatgatctgttcctaattgtcattatctccttacaatgatctgtttcattactatctgtctctttctatgatatggattttctttgcctttcactgaaaataggtagttcataaggcttttaaggtgtttcaagaaacataaaaaaaaaagaagatagattgatagacaataatgcctcttaatttttcctcatacagctatgtgtgaaatgctcttttattttttggaaatcaaaaccttgtgaacttaggattcaaatgtgtgtgttcaaatttctaaatttctgatttagagattatttacttgaaaagttccattttttatttccctttttctataacttccaaaactggaactcctcccttacattaatgctcttctgcaagttcactcatgtgggttcctgaacagtttgaacatattccttgattatgtgctggattcagcagctatgctttaacaagtttctcttagcaaagaatcaaaacttgctgatcgtttttatactgtcttgtattggataatgatcttttgtcttatcaattgtgttgtgcttatccatgcttttgtgttgtctttgtagttttgcagctttgttataaccagttcactggaagt

SEQ ID NO: 57365 - DNA, 629 bp, Populus trichocarpa
  Intron number 2 from transcript POPTR_0009s05020.1 (locus POPTR_0009s05020) derived from phytozome v7.0 (chr-ID scaf fold_9; pos 5217457 to 5218085)
ttaggctcggtattctgggatattggttcagaaaggtaaattcccgtccttatagtgtaatctttttctgtcgttttcatatggatatgcgttgttgtgatccactcagttatgtgtttatcttatttgttttattattatgaataccttcctctacccttctagtccttttgatcactgctttgccatattgaatgaaaatgttaagtcagctcgaactacagaaaattttcttggctaatgccaatctttcttgtgctaaaatttaaacccctgacacatgacatatcagctcattttttaatatttttagcatgctttttggcaaaaataactttggtttttggatacaaaaccgtagctgtaattctagataactcggacaatggttaatacttctatctcgataccataagagagaattggaaagaaaagagaaggccgaaaaaaagagaagactgccgttcttttacttgtttagttatttgacatctgctggtgttcgttatgcaagtaatcatagcgcttaagatgtctcatttcccttctgttgagactctcagaatgttattaaatcacacgatgctgatacttttgatagggactcagctcaagctttgtttctggtt

SEQ ID NO: 57366 - DNA, 1043 bp, Populus trichocarpa
  Intron number 4 from transcript POPTR_0004s23250.1 (locus POPTR_0004s23250) derived from phytozome v7.0 (chr-ID scaf fold_4; pos 22031976 to 22033018 reverse strand)
cccccctactagtagttataattatcaatacccaggttagtagtcaaaatgttttttttgttcttaagatgtgcattcatggaaatttataatctccattgcaaatatactatggtaataggttttcagctaaacgaagtagtgtacttggtactctttcaggaatttaatgaaactgaaagttaatggatttttgtgatctctattgttgatatgatactttgttgccataaggtcggaatgttttacgctacactgtgcaattatgtggaaaagggaacttcttcaccttaggatgttgtcaaccatgagaacatcaaaagatgttgtctaattaagccaagctactgttggatagaaaaaaaatgattgctggtcagactaaaaatcaatcctcagtttccattctgggctgggtagcatgtggaatagtaacagattgctggtcagactttggtttagcgtaggagtacttgtacagtactaatttaatgggatcgcctggggtttggtcaatgagtataagcaggtcaggatttggagcatctagtggtggcttatatgctactcttgcttactcaaaaggtttagcgagcaaatcacatttgctgctctttctagttgtcaaggtggtagcaggtggctagtggggttgtcctaattgatacctggtacatactgactgatttaacgtcaaaagcactttcaacaagatcactgctgtgacctgggtataagttgggtagtaatttgagatagccccaggcctctttgctttatatgatagacatcatagaagcattcctttttgtgttaatgctttgcctaaaataatactacaataaatttttataaccatgaagtttcttcttttactatttggagctgtctgcatttactgggaaattttcattgggtttattcacctttgatttccaatttccaatttataatttgagcattttgtttgtcatcactgtacttgtttttttagaagaattaactctattttgcaggctatagtgggtccttcacgccattgg

SEQ ID NO: 57367 - DNA, 591 bp, Populus trichocarpa
  Intron number 1 from transcript POPTR_0004s23250.1 (locus POPTR_0004s23250) derived from phytozome v7.0 (chr-ID scaf fold_4; pos 22033501 to 22034091 reverse strand)
atttcgggtcggcctcgatccggtttttctttaaggtccgtttcttttttttttctctcctaagaattcattcacagttctgaaaatttgaaacttcagtgctctctcgttttctttttgaattttgaagtttctgtggttactggtgccccctttctttttctcaggaaacaaacaaaatttttaaaatatctttaaaaaaaatcgaatcttttggcgaaaaatatctcaaaaagaaaaaaattaaaactgtttttgagagaaatcactaatcaatcaaggggttaggaaaatattgaattttttccctttgattttactaataataacgatggttgtggtgatgaaagaaaagaaagaatcagagaaactctttttttatccagtttcgtgcattatgctaacatgcgcttggatgcataacgtgactcagttcatgttttttttaaaaaaattaatttaatatttcccaagatatttccagtcctaaaagaaatattttttgttttatatctataaataaatatatgggtgtctcagcttgttgttcttgttgtttttgtagggttaattgagttttgaagatcgaca

SEQ ID NO: 57368 - DNA, 417 bp, Populus trichocarpa
  Intron number 1 from transcript POPTR_0004s16950.1 (locus POPTR_0004s16950) derived from phytozome v7.0 (chr-ID scaf fold_4; pos 17325526 to 17325942 reverse strand)
aagccgcgctttgccgctcctgcgacgagaaggtaaatcaatcactttctcctttttccattttttttctgttaattgtgtttatttctctgcttgagaattatattaattgtattgtttaagtgaacaatttaagcgctaaggtaataatatagctctgtatgtgataaatcgagacgggcttcattggatttgtaaaaaaaatatttcttttcttttctttttttgatattggaagtgtgaaaattgttatttccttgttaagcctataaagtgacgatcttttactgtgaaatatcaagcttgatagtttttttgatgatggttcaagtattggtctttttaagcaagcatgatcgaatttgtcatgtttaagcaaatgggtttatgttttttgtgctggaattgcaggttcat

SEQ ID NO: 57369 - DNA, 883 bp, Populus trichocarpa
  Intron number 1 from transcript POPTR_0004s02200.1 (locus POPTR_0004s02200) derived from phytozome v7.0 (chr-ID scaf fold_4; pos 1366103 to 1366985)
gtttcagtactgctctcaggtaattgcaaatttatttctttaaatttctataatttgtttttcttgaagtggaatttatactttatttagtatatctcttttaaaaaaaaaaattatactcaatatttgaaattaacttttattttttaccctttaaaattgaatccagatgattatctgtagctattgaaggtgatgaactatccaaaaatcagattttgatggatcacatggttttatttagatgctgatccaaattgaataagcaagtgaaagcatggaatcaaatttatttttttatgcttacaaaatagggaaaattgtgcactgcttactgctcacaatcacatacgaaaaaatcataagccatggcatcaaaccttttaggttcagctttcacgtgatagagtaggacttcttctttatctttagccttatcactgtgaaatgtcttagaaactttcctgcaatgcttaggcaatacacacaccataaaactactagtacataattagactagcaaagtcagcatctgcttcacatatatagcacatcaaaatcatatagtgtctgtgtgtgtgtattgcatgcatggcctggtatttgatcaacacaaagtccacacttcctaacgtgaaagaaatgtcaaaagttgaataatgagctataaatgatcagaccatcccatctgcaactagctagatgatattgttttctggaatttgatcaaatggacgcatgcatgtgcattcattttttttatataattttcacttctttccttgaaatatatgaattgataggtgcttttttgtgattgtccattttgttaacaattttcttctttctgtttttctttttcaaatatacttccagctcgaca

SEQ ID NO: 57370 - DNA, 636 bp, Populus trichocarpa
  Intron number 1 from transcript POPTR_0015s11570.1 (locus POPTR_0015s11570) derived from phytozome v7.0 (chr-ID scaf fold_15; pos 12143077 to 12143712 reverse strand)
caggtataatactaaagcttttctctctttttttccttttctccttttgttttctatttgatgattcttttttaactaactctttgcccatgatcttacactctttttatggatattgtaaaaaaaattatgaattgaaagtactacttaatttcttgcatttttataaatgattttaatttattattgagttttaagggtttttgctgttacacacacacacacactcaaagagatcataaaaatggaatttcttacttttcctaatggttggctatttgagagttgataagttggaccctcaacctgtgaggcaaaattaattttagttgtggacttcaaactgtttgattctttcttccatgaactttctaaaggcgcgcatgatcttgtttcttgtatggtcaattattttaaatctgcagaaattaggacccttgatgtttttgtggattaattacttatttcattgataagaaattattgttatggattttatattgtctccaacttttgatagccacatactgttgtagttattaatgaataccccacaattagtacgtcatctgcggaaattttactgtaatttatatctcagattgacccatcaaagtacaagagcatttcatcagg

SEQ ID NO: 57371 - DNA, 896 bp, Populus trichocarpa
  Intron number 2 from transcript POPTR_0011s05880.1 (locus POPTR_0011s05880) derived from phytozome v7.0 (chr-ID scaf fold_11; pos 5906370 to 5907265)
ctgttgatcttattggggaagtcttcgttttcacggtattgttttttaatccctagtcgctcttcttgatgtttgaagaatttgttttgagtcccttagttttgcttttcttaatgtctgaattttttgatacccagaaactctacttatcccgtacaatttgcaatttcttttgtgctgtgtaaattgtgggcttgtgtgcttatgctggtttttgtccttgcatttacagaaagagagagaatagtgtagctaatttggtgtctttttagttggcaaagctaacttaactgactaaagctgtgtgtcaaattgtcaagaattcaattttctgtataagtgtagagacttgcctatccggaaatgttactgtatatttgaggtttcattagaaaaatgttacgtaataagaaatattattagttttagattgtggcgtcgaattctgttataaaggaaaattgtttatccctggtgaatgtaaatgaaactcttatgcataaattgaatcttgatggatttctgagcttttcactccttctgcaagactaaatagatgggagggtgatcatatttacatatgtacacaatttacatctggctgaatttcttattccatcaatatgattgtagaaatgggaaccagtaacactaatttaatgcactctaattgattacgacaaaatttggtctggatttaggagatggtggagttctttgctttgacactatgctatatgtactaatatgcatgaaaaaaaaatgactgatatattttacgtgcttatttcactatgagacaactatgaagattatttgggtttacaattacttaggtgctccatttttcaacatgaataggtggcaggagctgctgtgatttttgaggtgcagag

SEQ ID NO: 57372 - DNA, 829 bp, Populus trichocarpa
  Intron number 1 from transcript POPTR_0004s05230.1 (locus POPTR_0004s05230) derived from phytozome v7.0 (chr-ID scaf fold_4; pos 3978493 to 3979321)
tgactgcccatttccttacaggtctcacctctctggtatgtctacttgccaagattttgttgttctgtttttttctttgtgaaagaaaactttttgggctttaagttttgttttgctttcacctttagattgaccagtttgacttgaggacacccatttgttgactaagaaagatggggtgagatctggatgttattgttgctgttgaattaatttgtctcaatcagatttgttttgaatctggttgttgcttaatgtgatcaagtataaaaaaatggtttcttgaatgttaaaagaaaaaaaaaatccccctgttgtgggtgctgcagttcagtttcttttgaaagttaatgtgtttttattgatggatagagagattgtttgtgggattctatcttgttggttgggagacaagaggaatgaatgttagttgcaaggtaatgagatggactatgatagaatattttggaactctgctgttagtttcatgatcaaatgattgtgtaaccatatgaaatcaaaattcctttgagaggtataacactcagatactaacattttcaatactgcagtatttggtacaattttgttttttgtttttttgtttttttccactgcttatgattttttcccctagattgcctacggttatgtatgtctcccagttcaatttcacacatgactgtctgtttggttgaccacataatggaagaaaaggatgtttttgaatgctttgtaacattaccagtatgttgcttgtagaaaagaaaaacaaaaactttgcaaaatgtacataatgctggtgctgctgtattttactgccaggttc

SEQ ID NO: 57373 - DNA, 833 bp, Populus trichocarpa
  Intron number 3 from transcript POPTR_0012s15190.1 (locus POPTR_0012s15190) derived from phytozome v7.0 (chr-ID scaf fold_12; pos 14834328 to 14835160)
gaagaattggattgccattgctgcaccattccggggtaagcaattctatagaatgtgtgattcacaacacaaggcatttgtacctcccatgatttgtatctcctagtgctatgcaaaagtctgcactcagaagaaactgtaatttgtttagatgctgtcaaaaagttttatttttgcaggaagaaagtgtgatttttattcagatttcatagcatagcattgatgctgttagtagttagaagtaaatttccaaaattgttacatataccctgatataagaatcatttctctgttcgaatatgaacaaacagaatagtagaaaaatgtggcttaaataccacaatttaacaattatcaaattttctggtggtataatttcatatactgaaatagaactcctaattctattaacataataaaaatttcattacttcctttcttaagcaatgttaccattggaatcactgatgtaccctgaaataggtgtcatttccttgttccatatgaaagaggagaaatatagaaaaactgtggttcatatcagacaatcttgtattgtgtttatatatggaccaattgccaagtgtatatttgaatacaccaaaatagaacttcgaattgtgttaggatagctacttacattcattaattaatctcacagttcaaatctcatcaatgttatttgtacagttgcattgtgcttttagttccattgttactgtttcagctattcagaaggttactcagataggattttggaacagtgttcaaatgttgtatgtgttatttgtccaacaggtgcacctgggtttgttacatctacctttctgaat

SEQ ID NO: 57374 - DNA, 661 bp, Populus trichocarpa
  Intron number 1 from transcript POPTR_0004s12290.1 (locus POPTR_0004s12290) derived from phytozome v7.0 (chr-ID scaf fold_4; pos 11384261 to 11384921)
tcaataatatctttctcggaggccgtggaggcactgtaattaccttctttctctcttaaatttattacttttactcttcgattttgaaaccataccttgtttgaaccctaattccttttcttttctttttttgtatttcaattctgctttttgagaccctaattttattctaattcctactttgtctgtgttttgggttggaaaatcatgttcttagattgttgttcatgaaaccctaatcagttggctaattcgtttttggagtattgaacaaattatgaataattggcaaacaatctcaaaagattattaaaaaaaaagcgatttaaggtttaggtttgacgggttgctgagaaaagttagtatggatacatgaaatagtggttttataataaccgtttcttaagtttaaactctactatagtcaatatgatacctttggtatcgatacactaattttttagatttgaggctttagttatatgtgatttcttagtgagttcatggtattgttaccctaatttgttgaaatgccttgtaaaatttggagtctatttttcgaatggagagcaagaaagagaattgaaaattggaatctcatatatgttcatattgtcacatttcagaaccctggacaccttaagatatctccaggggggat

SEQ ID NO: 57375 - DNA, 599 bp, Populus trichocarpa
  Intron number 1 from transcript POPTR_0011s09460.1 (locus POPTR_0011s09460) derived from phytozome v7.0 (chr-ID scaf fold_11; pos 11729738 to 11730336 reverse strand)
taaatcttcaagaacatctccttccaagcttgagggtactgaatttttcaacgacaacttatttgcttccaatagtggagatttcagggaaaaaggttggtataactctctttcatcttgtcttccaaagaaaaatctagtatggctatttttttaacatgggatggaatgcactaaattgatatttatatatatttggagcttttaaaagcaagcttttacacttctgttgcactaaacgattcttttgtgtatcttatatgtttatttatattgagttatgctatccagttgcagctcccaagagctctgtttgtttttgcgtttcaaaagtgtttttaaaaaaatttaattttttttatttttttatttacttcaaattaatatttttttggtatttttagatcattttgatgcgctaatatcaaaaatgatttaaaaaaacattattctaatatatttctaaatgaaaaacacttcaaaaaacactttagaagttgcatctgttaacttacagagtgaggcaatgttggacctctgccaagttggttagatatctggccagctgatggagatagtgcgcaaggaaattgttgata

SEQ ID NO: 57376 - DNA, 391 bp, Populus trichocarpa
  Intron number 1 from transcript POPTR_0012s12900.1 (locus POPTR_0012s12900) derived from phytozome v7.0 (chr-ID scaf fold_12; pos 13268416 to 13268806)
cttccttcccttctccccactaatcatcagatcaggtttcctattaactcttatttctcgaattttcttctttaatttgaatttagttgaacgcaatgctcctaaatttcttttctttgtccaattgcaataaaaatagtttcttttctttttccttctctcagttaggtcattaaacttcgaagcaatcccaaagttttgatttttttttattattcaactggacccccttgaatggacttgacctcgcttgcctgctcctttcttactattttattacctctagaaattttctgttttatagagtttgtttaatttgtaaatttcaactcttttaatctcgttgtcagtgttttttattgatccttgaatagttcttttattgattgcc

SEQ ID NO: 57377 - DNA, 928 bp, Populus trichocarpa
  Intron number 3 from transcript POPTR_0178s00200.1 (locus POPTR_0178s00200) derived from phytozome v7.0 (chr-ID scaf fold_178; pos 1434 to 2361)
gttgctgcaaaagaggaaaccagcagtcaaagaaggttggttaaggcaatgcatttctcatgcttctgttttcaaatttaatctatcctctcttttttcttaacattttttctctatggaaatgttaaattaggatcttttaatgccatcaccatcttctgttttcctttctcgttctagaaatgaatattgaaagtggtatcttctatttacaatggaggaatagtgactgaaacaattcaattaaggccgtgcttgttcttagaagttgaagaaaatctgaacagaaaattttaggttcctctttcactggatttccttaaaaacttgactgaatttgaccttgttgatcaactatgtagtagttcgcttccattggttctgttatgattgtgagtgctggtcatcatttcttgatttagttgagagaagctttggtattgtatgtaggccaacctaggtagaagcagatactaaactgacatttgtaggagagaagctttggtattgtaggccgacctaggtagaggcagatattaaactgacatttgtagctagagcatgtttggttccctcaaaattcaatttttttttgcataaaataaatttttttatgttttcatatcgttttgatatgatggtgttaaaaataattttaaaaaaataaaaaatattattttaatgcatttctaaattgttttgatctgaaactcgattttttgttgtctacgacaatgtgattgtttcttattccaacgggtttgttcctttacacctcgtccttcccaattcaaattattcaatttgcttgcacaaaattaatcaagtgtttatcaatttgtttatcaatttgtttagagtatggcaatctcaaacttgcctgtcattttcctcatggattttatgagtatactgcagggtggttaag

SEQ ID NO: 57378 - DNA, 395 bp, Populus trichocarpa
  Intron number 1 from transcript POPTR_0014s01010.1 (locus POPTR_0014s01010) derived from phytozome v7.0 (chr-ID scaf fold_14; pos 960430 to 960824)
tctgtctcctgctcttccttgcttcctctcatcaggtaatataaatcaatcaataaacaaactcatttttttttaaaatattattcaaaataagcgatgatcagattgttcgtgtcgatttcaatttctcattcccgagctgatttaatgctttttttcttgtgatccgtgcttaattttcttcgattttaattgtttcgaattttattgaaattagaagaattaatattgaatttgcaatatatttaaatttgaattttttgattttgattttgatgctgtagttgatgcttatattctcttgataatatttaaaaaataaaattagttatgtttatttggtgtttgataatatttaaggttgaaaaaaggggtgaagattttatagctactgt

SEQ ID NO: 57379 - DNA, 1014 bp, Populus trichocarpa
  Intron number 1 from transcript POPTR_0015s14730.1 (locus POPTR_0015s14730) derived from phytozome v7.0 (chr-ID scaf fold_15; pos 14221942 to 14222955)
aggtggctatacgacttatagttctgcaactgctggtaagaaaatcaatctttccatcttcgaaacatccattatcattgctatatttgctagccttctaattggatacatgttaatttgtcaatatcgaattagttaatcaaatatatttacgacgtcgattaatttcttattgaatttgagatgaatagaaaggtagaagatgaagtttcttttggttagaaagaagaagaatgagtttaataattaaatacgtaattgttgaattgcccatataagttcttttaatgttttgatcacttcacttaaaagttacgatttcataataaaaaagggctatgataattagacgtaaagagtattttaactagagatgtcttgattctcaaataatattccatgatttttattcttttttttttttttatctatacaatatttaaattgtgaaactttcctcagctttagagcgattgttcaattgttatatttaattaaaatattatgtcaacacaaaaataaaattaagaagatacctttttttcctgaaacgttccgatccacgaaaaggttatgtttgtttaattttaattaatatattgtttcatagagtaatcaattatgtttaattaaaatatcatgtaaaaataaaatttagagtaatcaattaaaatatcatgtcagaataaaaataaaattaattaagaagatatcttttatattgtttttatgaatcattgtgctcctccgaatagttatgttgtttcatctttgtcacaagtgttattatattagattgaataattaaaaaatatttaatcctgcgagcaaagcgtagtacatgcaattttctatagttttgaagattatttttgtttgaaatgatattgcgcgtgataataattatcatctgatcaagattttccagtactttaatttgtgttcctttacttgtccagtaagctgaaagaaattatatgcctactttacctaaaattttatttgtaggtattg

SEQ ID NO: 57380 - DNA, 837 bp, Populus trichocarpa
  Intron number 3 from transcript POPTR_0012s14470.1 (locus POPTR_0012s14470) derived from phytozome v7.0 (chr-ID scaf fold_12; pos 14342738 to 14343574 reverse strand)
taacattaccaccaggaaatccccttgtggtgaaggtattcatctcaaaaaactgcttgaataatcatggttagattaatatgcagtgtctgccattttgttttattatttacatcatgcgctatctacaagtccatgtagtattcttctttctttaatttcatttgtgctttcttctaacacacatcacttcatgggttccacgtgtttgttattgttttttttccttcctctttgggtaatgtttgaatggctgatttgtttgatttagtagttcgagggagaaattgagaagggttagcaacatttcagttctttatagatatgttcttatgtttgttaccctttacaaccactgcaataatcaaatgttggttcgcgcaccatatgcagtcttattcagtagtataattggttggtgcatgtgaaataacttcctattgattaaagtgctacttatttaactttctaggtgttctagtctgagcataggacctagggtggatcaattagaccatgttagttggtcttgtaatgagaaaacaagtcataatttgctctactgttttcctagtggtgtttgcacacgagtttgcaaagttgatatttgcttcagaatgatttttttaggcacatatgatataaatgattgtccctgtaaaggcacttaatatatgagctgttgacaccatgaaagattggaatttgttgtgtggagtttttttttactttatctgtcatttctctcaagggcttgttctcctcttttgccaatacatctgttaagctactaaagggtttttcatgtatatcttgtcatcttgcaggaaccaacac

SEQ ID NO: 57381 - DNA, 575 bp, Populus trichocarpa
  Intron number 1 from transcript POPTR_0012s14470.1 (locus POPTR_0012s14470) derived from phytozome v7.0 (chr-ID scaf fold_12; pos 14343887 to 14344461 reverse strand)
gccttagcatctttacttcccaagctcgctttctggtctctctctctctctctccacctttatagctttcgctcccttgatattcccttgataacttcgaagctattaactctaacgtagatccacggcaataagctgttaactaatagtcactttgattagtttatttgtttcgtgttcaatgcatagttggttttagctaaaacccattttgatttatgcatgatatgttcaaaatctgctggtttatgggagaaaatgaatcatttttattttagagactaatagctgaagaactagaaagtgtaggttggggtacatttaaaaaaaaaagaaaggttgtcgattttgtgtttggtgcatgattacttgagtttgtgtgaaacacatttttgctttatgtttgggaaatttaatattttgttagtttgtatgagaaaatttaaaaagatagaggaatggtagtaaatggaagtgttgttgttgttggtttgttttaatgaatatgaagtggacatgtggttttgaatggttttgtgcattttgattgtgtaatagaaaagtgaaaggagaaa

SEQ ID NO: 57382 - DNA, 846 bp, Populus trichocarpa
  Intron number 1 from transcript POPTR_0009s07650.1 (locus POPTR_0009s07650) derived from phytozome v7.0 (chr-ID scaf fold_9; pos 7104071 to 7104916 reverse strand)
aaagagaagcaacagtctcaaatcgattccagcaggtacgtacatgtctttctgctcatctatattttacacttgatttttttttgttttatatcagacttggtgtttcgatatttggtgtgcttggtttctttgctttgtagtgtgggttggttgtcacaggttctaattataagcttaggtttttatctgggtggggttttcataggagcacttgtcttaataaaagaggactttgctgtctattagaagcacgaaatagcacttgtcatctcaagcttcttttctgaaaagctgacattttcagtcttagaagtccccaatcaaacacgagcttcttcaatttaattaaaaggataatttagttaagtttgaccctcaaaatcggcactaggttcattagcctgatagttcctgctaaggaaaagcatggatctgctgttctatttccaggtcatataatgtattccattgcttctgcttgtagctgatcatagaaagttggcatgaatgtgtgagtatacttatggagtctattgttttaggatgaccggtatgaaatttgattcattttgtgtcattgttttatttaatttgcatcatatatgctaaatatgaggcattggaattgtatcggtttctcagaaagaggaaagaagaagatgtttgcgctggtgctgatagttgttgctatgtgcatataaagtgcgcgaattgtagttatgaatatgagggcgagatgtttttttttttttaccaaaatgtaatctaccccatgctttgacatatgtttacagttgtggttgtctcaggtgcaagtagcaacactaagatcttgaagaaatc

SEQ ID NO: 57383 - DNA, 1000 bp, Populus trichocarpa
  Intron number 1 from transcript POPTR_0011s13580.1 (locus POPTR_0011s13580) derived from phytozome v7.0 (chr-ID scaf fold_11; pos 16299916 to 16300915)
gctcctgttgttactgcttcgtctcctaatttcgggtaggattttcgttaaatttcccaatttcccttgaattttcgttgcttttagatcatattaatataaaaaagcagggatttatttttgttttggctgatttaggggttttagtgattagggtttgttaagaatagtgagattcaatgttttttggttgttttgtgcttgttaatgctagtagttaagtgagtttcaaatgagttatgtaattgttcaaggcatgattgacttttggattattcctttgagaatttggtggctgatgcatgatttgatttaactagtaggttgattacaagatgaattgtggtgggtcttggcggaaatttgaagggtggttacgttggggcgtatttaccttgaataatcttgtagttagaggccaatttgcttttactcttttttttgtaatgtgacatgagcttcagttttaagtagtggaagtttgatttgcatcatttgcacacagacgaatagtatagctatattgtataaagtgagcagtactcactgtataagcaagtggacaagagggtagtacttattgagaccttgtgtaagttgcaagtatggcacatggattttctttatgaagtaggaacttgcaaacagcgagggtttactttctttctgttataatagtttgaaatgggcagcttttgactttttcttcgtaattagtgtttcatatttccattaatgagagtgagagataacaactcttttcacttgaagggcctttttgtattttccgttctaagttccttagttttttttttcccgctcacctccttttttatcttttgtgacatttacaattcttgttttggatatataaattacatacttgtaacaggtacttaaattggatttgaatgtcatctttcttgttgttttgtggttattcacttgatcttctaactccattagtgcatgtgtgattacatgtatagtgaggaaattg

SEQ ID NO: 57384 - DNA, 520 bp, Populus trichocarpa
  Intron number 1 from transcript POPTR_0004s08730.1 (locus POPTR_0004s08730) derived from phytozome v7.0 (chr-ID scaf fold_4; pos 7309487 to 7310006 reverse strand)
tcgtcaagcctggtaatttctactatcactactcgatcattcttcttgttgtgattgtgcttattgatcgttgacttcttttcgcttttcttcatttttggttaataagaaaaacgcgggaaaaagggtaagattggtattatgcgaatgattgaagtggatttactttattgcccttgatatttgtgttatttttctttttggttaaaaatctgtggctttgtgattgcaattttctctcgtcgattattcattgatgaggttggttgttttgggaacgtgacataatgcttaacgaggaaaacattttgcattatgacttacatttttgccttttcaatttttgttttgagtttattttcttaaatatacttttgataatctatatgaattacttgtttaattatttgcttttggaatgtaaatcctaattattattattattttttaatttttttttaattatgatggttgtggtgttgtaggccctgtagttgcccaggctatatttgtcaacaat

SEQ ID NO: 57385 - DNA, 421 bp, Populus trichocarpa
  Intron number 4 from transcript POPTR_0014s07480.1 (locus POPTR_0014s07480) derived from phytozome v7.0 (chr-ID scaf fold_14; pos 5629972 to 5630392 reverse strand)
gtggtgggaagacgacatctcttggtaagtcaagaattgagcttctaatttttggttttgaattgaattttggaaatgagggtgaactttttaaggagttatcagaatatttacctaagccaatccgatgaatgccaacattttaatggtttctggtaatgtacacgttgagataagtgtggctctgataaggaagttggtgaagtattaggtggtaaattttggggtggtttgagttgtagattttacttggaagcttgaagaggctttattacacttttgagaaatttaaggtctgcctaaatacgctctcgtgaacatgtgttcttgagttttttctattatattgtttctagttgttgctaaagaaatatgatctcatttactgttgctgcaggaaagctagcatatagattgaaga

SEQ ID NO: 57386 - DNA, 829 bp, Populus trichocarpa
  Intron number 2 from transcript POPTR_0009s06900.1 (locus POPTR_0009s06900) derived from phytozome v7.0 (chr-ID scaf fold_9; pos 6566119 to 6566947)
ttggtaattactactaatatagatattctctgagctggttgagttgcaatgaaagcttcttgtgatttatttggtgttttaacttcttgattgatagatgatactttagaagatatttatcatttatgaatgcggctttacattctgacaagatatctgctgctgtagtgtcagatatgaccttagttatcacacttgcacacacagctgctagaatgcttctgcttatacctatttcttgctagattttcatactctattctctattggcttttgatttttatggtttgaatttatattaaggtattcatgtatgtcacaagtctatgtttcctttgatctactcacttgcaaaacagatgactagagttaaagtttttgtaaaatgattttcttctcaccccttccttcacacacagttggactgtcagtagttgtcaatcttcattatttcctatggtcttcatgtttttaaagctttacatggacgcatctctttcaaaaaggagtctttagctgtggaataaagtttctccccccagttaagtatagtgcgattgaaaccatcatctgggtaatgcctactctgatcttgaccagcaaatgaggagaacaaatcgttcttgaatgtttcttgtctcatgaatgcagcttatatcttaagtgccaatcaacattggtggaaagagatgttcaatgaaagatttgccatatgtggcacgcctgctacaagagtaatttgcattcccttgttcatgctcttggtattaatcagttttataagtgatgtgcagcaccacctcccccaagtgatcccacagtgaagaat

SEQ ID NO: 57387 - DNA, 445 bp, Populus trichocarpa
  Intron number 2 from transcript POPTR_0004s06380.1 (locus POPTR_0004s06380) derived from phytozome v7.0 (chr-ID scaf fold_4; pos 5110027 to 5110471)
ccttgcaggtctgtttactttgtgtttttattcttttctcgtaagtatgtttttttacttgtaattatcaccgtgtccgtgttttgtattgatgggatctccctggacacaccctctctctctctctctctccacgtccagctacggccatttggttttccttttttttttttttttccttaaatcgaatctggcaaattaccaagtaagttcaaaatatgcctttaaaactcaattctattcttgtggtcccacctaacttactagctcttttcttcttctttttttttttgagaaaaaaaagaagaaagaattcagctgtggacacaactctcacgtatttttctgtccttaaacgtcatgccatttatactctcaagcacatgttcacttcaaaagttcttaatttctttgttgactagttttttgggcttggacgcaggtg

SEQ ID NO: 57388 - DNA, 898 bp, Populus trichocarpa
  Intron number 2 from transcript POPTR_0004s23970.1 (locus POPTR_0004s23970) derived from phytozome v7.0 (chr-ID scaf fold_4; pos 22596244 to 22597141 reverse strand)
aaactgagcgataccaaaaggtacttgattttactatatcatcttcggttgcaattcaacgcgcccgtagcatctagcctaggcttcctcctgttttgatcttctagctacgaatctttcccttgtttcttgattgtgatcaagaatcctatgaatacaatattcttcttatttgttttctcatcatcgtttttgctttcttgatctcaaatcataaaaaatgaaacccacgaattaaactacatatttccatgaatttcaatcccttttctttcccttcagtaattaaccctagctagttcctagagctctagttgatacatcctaacttgagcagcttgctagtaatcttcttcttctaagcaatcgtgcagagtgaattgttcaatttaagcaattgagcagcttgctagtaatcttctcttaagctatagatcgatccatagctagcacaccatagatatatatgctagctttctagccagctaagagaagtaccaaaggtgcataaatattgtaagccagccggaagaaataaaggcacaaggagaagaagattgctaggaataatactgacatttaagttccaatctctttaatggatccttcacaaaatttataatggtaccatcagcatgcatgaactttaattcaattgcccacaaagcttccctatgtattgaattctactccattaatgctccctcataactgcaatcaatgctcattgtcgagagtggggtaaattttcattgcctacaatttattttggtgttcgaagtttcttcctttggttatttccttcttttagtcattgattctttcacaagtttccttgttgttttttaaaaaacaaatttcaggctgagatatcactttgttgcgtctacaagagagc

SEQ ID NO: 57389 - DNA, 415 bp, Populus trichocarpa
  Intron number 2 from transcript POPTR_0012s05750.1 (locus POPTR_0012s05750) derived from phytozome v7.0 (chr-ID scaf fold_12; pos 5559023 to 5559437 reverse strand)
gagaagtaagcatttactctgtttctgcagaattaattatcatatttcttgatcatttgagtgagtgacttgctgttgttgttgtttttaaacatcatatgtgcataaaacctgttgtccaacccagatgtctcgagtgtcaatactctgtcttgttaatccacactgataacctcttttatttgaggcccgtcctagctttgatgtttactgattgagggagttccctttttaccatcttagctgaccctcctagttagtccgtgcttttaataaaaccaactcctccaccgttaattatatccatgtgcattcttagttgatctcttcctcttcctcttactctgtttttcttttctttttttcctcctttctgatgacggtagtggcgtgtcctctttcaacaaattcattc

SEQ ID NO: 57390 - DNA, 897 bp, Populus trichocarpa
  Intron number 1 from transcript POPTR_0012s10880.1 (locus POPTR_0012s10880) derived from phytozome v7.0 (chr-ID scaf fold_12; pos 11553223 to 11554119)
attaccaagtgtaaggggaacggaacaagtggtcagtaagaaaaggcatagctttgtgaatgacgcccttaagcaccaactcctatttctatcatttcacaacctcctgcctcatctttttcttgataagcaaccctttctcataaagaatcatgagcaatcaaggcacaacaagattcaaactggatgattagaaggcaattcacaccactaattgactgcctaacttgaatgaaagcatgagttattggagcctcttttttaatgcaattaaacttggccaattaagtgggctggctccgctccttttccttttccttttctttctttgttttatgatcttatgaattaagcagttttattattaatattaaaagaattaaagaataccagtgaggatgattggcaaacacccaatcagtcaaaaaccccataactgaactgacttaatatagtaaaaacacccaacccaaccaagacagaacttgtcagcacctaaaaagcacagaacctttaaaacaggctctctaagagagctcgtgatatcacttgaagcaaactcaccatctacagccaagctaatgcattagtcactcttaacaactcatgccagatgaggaatttggagaaacacacacaccaggctgttagcacacagatagaaggagacattaattcagtagcagcgttgtcaaaaactccaaagaagccacagattgggtgaatagttaaatcttcccacaaaagactctagcatatgccacgtttaaccttatagcagcagcagaagatgaaacacaaaattcaatgagaatttttggacactgttaaatgtcacaatcctcatcatcatgcatccaagctcacacaaaagacgcaaaaggccagtacctgtta

SEQ ID NO: 57391 - DNA, 693 bp, Populus trichocarpa
  Intron number 4 from transcript POPTR_0015s08560.1 (locus POPTR_0015s08560) derived from phytozome v7.0 (chr-ID scaf fold_15; pos 9861397 to 9862089)
tactcgtcaccattgacagtcgtatgtgcttcatccatggagttcataatttcttacatttgattttgttaactgttatgatagcatgcaataatggctcacctggtacaatgacttcagcgatttacttttatgatcttgtgttcatgactgatgaatattctataaattaacaagcataatcaccatgctcgtgaaggatatatacatgcactcacctcacctccaataccatttgattagtaaaatacaaaatagccaggtcagagcttgaggagtagcagtaattattaactctgacttatgggtttgtatatacatcgattatatctcatcaataacttttcttttcttaattgtatcatctcatacttctcaaaaacatgttttaaatttcattattaatttctgaatttaattatttaaattagtaagagaaataaaacattctgtttatataaattaacgtatccttttggagtgcatgttaagaaatccataagaaaaataagttaaatgctttttcttttttataatatgctaaatcatgcttattctacttgaattcaatgacttcaatttaagacagtcatgttatttctcaatccatttaatttatatgcttatccatgcatgttctttcttgggtttttttttttttttttgtatatatacacacccccttgacagaga

SEQ ID NO: 57392 - DNA, 983 bp, Populus trichocarpa
  Intron number 1 from transcript POPTR_0015s14260.1 (locus POPTR_0015s14260) derived from phytozome v7.0 (chr-ID scaf fold_15; pos 13936746 to 13937728)
attcggtatttcaacttttcttaattattaacttttgttttttgtttttgcagttgatacaatttgggatttatgatttatagatttaattgcgataatgtgatagctttttgtgttttgttcgattcctcgtgtaaagggaaaaaaattgatgtttttagagaaatataggacaagggagttgctatcatctgttcttaaggtggttgatttaatgtgcaagagaggattgggtagaaagttaagtacttttttcatgatttaagtcaaaaagctgacaaatttcgttattctatccgcacggcatggtttgattaaagatcatgatgattgttaagagcgctgaatcttgtcagtgtggtatagggaagagtactgatcttgtcagagtggtatagggtatcttagatacctaaaatgttcctcgtttacaatcattgtctttgatgtttctcaagcacagctccaccaggaagaaaattttcatgcttttaacagatgtgaaaagatgatagtaaattcaattgttacttaataaaaatgcaggataaggatgtcatattgaatccagggcaacagttcttcaaaatatattaacgtgttcaatgtgctacatattatagggttattaaatgcttagattcaaataatggctattgtgtaatggaatccaaaggtccctgtcccaacagtgagataatggattttatccatttattgtgcagcttcatgcatttctttttcagtttctgccttacgttttgtagaaatttgtattttgatagtcttggactttggtagtacatatgtttttctattatatcttgtgcaaggttatcttatttgattacagaaggaaaaaatttctgaatatagtgtgcgtttgtgtattatactgattaaccttttccttgcttgctttgatgcggtttcactgcatgtgcggatatgcattgacagggggtaagtcagagttttttctt

SEQ ID NO: 57393 - DNA, 296 bp, Populus trichocarpa
  Intron number 1 from transcript POPTR_0009s07200.1 (locus POPTR_0009s07200) derived from phytozome v7.0 (chr-ID scaf fold_9; pos 6783166 to 6783461 reverse strand)
tcactcattctccttcaaattcacaatccaaccaggtaattcataccactactaatttatcatctttgaatttccttatttgcttcacttgatgattggtttctaagtaaatttgagttgactttctgtttggacgccgagaaagtgaaaaacgctattcaactttttcttcttttttatactgactaatcaatcaatcaatcaatcaagataaagtattattacttgcaaagagaaaaggatttgaaaattttggtttatttttttttcacagttctgcgaagctgggattggat

SEQ ID NO: 57394 - DNA, 828 bp, Populus trichocarpa
  Intron number 4 from transcript POPTR_0015s13230.1 (locus POPTR_0015s13230) derived from phytozome v7.0 (chr-ID scaf fold_15; pos 13273949 to 13274776)
caaggttagtgtaggcatttgttcttctccttcttgttttcttaatcaaatatccctttttcacatgtgtgcaatataaaaatttcattgctttaggttcctattatccatatttatgtcctttcaggtttattatggtactgttgagatcaaatacccttaagtcgcatgttatgcatgcatgtatctatattcatttactgcttaaattagtacttgctttcacgcatctctcaaagagagagggaggaaacaggaaatggatgaaaaatctgggttggctgtgtttttttcccatgtgctaatggggagttaattctcatgaaaatatatggaattgggactctcaaggtataagtgatctttcatttagtgtgaccaggccaaaaaaatcttgctgtccatttacaagaacatgtctatcaaaagcaattggttatatttcatgttttaccttggatgaatgttagaaaagttgctattgtcacaacatcatggtatgttatctttgtatttgatgaattgctgctgtgcttattggtgatagacaagtcacactgctgcaagcaaaaatagttgcattagggcaatgttggaacatggttgttgtcaatggccaacctcttctagtttgggattgggttcagattgatcgagtttaatcaacttttttgtctgcatccttctgttttcctcttctccatgtatgaatcataggaatgttaggaaatattgacctgctatttgttaagcaaacatctttgatttttttttctttattattaaatcagttgagtttttgttttcagaagagaagacgaccttaga

SEQ ID NO: 57395 - DNA, 946 bp, Populus trichocarpa
  Intron number 1 from transcript POPTR_0004s12420.1 (locus POPTR_0004s12420) derived from phytozome v7.0 (chr-ID scaf fold_4; pos 11518999 to 11519944 reverse strand)
agaatctctcttaaaattcccttcttcataaactggtaaggtgcgtaccgaacttctttctttctttcttttcctgattggtgttcaaagttgttctttttttttaattatagaattacatcaagcttggattttcatggatcagttgtttattttattttattttacttctttgaatgccaggaatgtttctttaaggataaaaaagaagtgggctttgtttgttttctctcaatctactattagttgttgaattttcttgctccttgttgtttgttgaatctactaaaggttaaagaactaagaatttagagttgtttttttttaatgtttttggggttaacgttagctgaaaattcgttacggtttttgttaggagtggatttagtctggcactgttgaatcgaaggcttaggaagcatttattcgagttttaatttgtgttatatgggtgattttgaggttgagtctgaagggagggtagtatttgatttatttcagattgttggtcagattgttggtctattatttcattctaaatatcatcgtttgaagggattgttctcttggcaaagatgaacaaacataaatgcatggttctgggaaacaaaaaatgtccccacacgccagctcgtgcgcgagtaagcacatatgcgttcaagttaacattcataagcaaacttggatgcaaaatgaggactggtgtggtagaaagttgttgcaattattgaatcagctctctctacattcacatcccttgcagcgctgaagttggtggaagataagaatttgtatttgttagatacactagaaaacaagttttatggttcaatcttcgcaactgcataactgtgatctttgtttgcaagtttgacttaataccttaattggtttcatgatccatcatgcagagattgaaagtatagggctcagttagggtagcaaa

SEQ ID NO: 57396 - DNA, 825 bp, Populus trichocarpa
  Intron number 1 from transcript POPTR_0009s07280.2 (locus POPTR_0009s07280) derived from phytozome v7.0 (chr-ID scaf fold_9; pos 6834656 to 6835480)
gcttttttcctttccaatttctctctgtaattcaggtctgctttccttctttctctgttttattgtttggttccgcataccttctgtttggtttccaagaaactcgaggaaaggaattgtaaacaaaagaaaaaaattgaagctttgataggaattcaattctgtcttgtttggtcaatttgactccattttggtttattttcctcaccgaaggaactaaaacagaagcaaacgtgaatttttaatggtatctgttttttttttaaagaaaataaacactgttcgtggtttcttgctaagaaattttggatttttacggaagagttgatgttcaatttgttttcaagcttttgattgattgaattcttttggtttatcaagcatagtttgcttttaattaagatgatgttttcttgaagttttgaatgctttgcttaatcttttgaaccagtgttatttgtattgcttgtcaagaatttgaagtttttctggtgcattttactgaggcagttgtgaattattcacatcgacatagaagaacaatttaactaactgtttggaattttctattgcattaacaatatacaacttttttatggtttttgatgaacttatctgaagataattttataactgtatgttggtgaatccagcactaaaacattgtgttagctgtgttggatttcaatggtgatgtcctgtctgttcttcctgcctttgattattccaaaatttaactatccagttaataaggttttattgaagagtactgagctgttctgtgcctgaattgcagctcctcctccatttgcatctatttcagca

SEQ ID NO: 57397 - DNA, 551 bp, Populus trichocarpa
  Intron number 1 from transcript POPTR_0001s08130.1 (locus POPTR_0001s08130) derived from phytozome v7.0 (chr-ID scaf fold_1; pos 6191559 to 6192109 reverse strand)
accactcccaggtttgtttctcttaaaaccttcatgagtttgctgcgttttcttctccttttgactttcacaagtttttcttgagtttctttgttgttcttgcctacttgtttgagtttcattgtctgtactgccacatttttgtgattttctcttttgatttgttacttgttcccaatttagtgatcaactgtacaaaatcattgacaattttttttgtttggttaagctgaaatttctgagactgaaatctttactttccattttcctgaaaccggttaccgaacccacatcacacacggtctgatttcaaatctcctctttgaaatcattccctttcttataccaattcaatttacttttcagttttcttgttttttttttaaataataatctgactttgtctcctgattttcttctctctagaactttaaaacctctgttatgagactttttcaatattaattccttaactttaaaatttaaactctcgtgtaaacgcaatccctctctgacttgacctttctttgttttcagggtcgtcatcgaca

SEQ ID NO: 57398 - DNA, 603 bp, Populus trichocarpa
  Intron number 2 from transcript POPTR_0009s01460.1 (locus POPTR_0009s01460) derived from phytozome v7.0 (chr-ID scaf fold_9; pos 1794714 to 1795316 reverse strand)
cttttaaggtataacacaaaccttttctttttcgtgaattttttttgttggaaattcttattatcttttttgaatctttctatgtttttgaaagaattgtgattagttgtagattgtaattgatcgcgggaaagagcggttgatagatctggattcttgactacaatatgttctatgaatgtcctgtcctgcattattttgaataaaatttgcactttttttcttacatttttgtatatgaaatggaaatgtaattcttttctcggatcatgtaattttcattgattatatatttttgactttgcttgaagttgatcatttatgttcatgaaaacatgaaatctttttacagaaacattcaatcatgcataaaaaatcttggcaatttaaggatttgaagtgttttaatcatagtcttttctgcgtattgcattgacaattctgagttattcttagtttgctaattggattgtgcacataattatgaaattagttatagctgttgaccagtgacttgatattttgttttttcctaaagagagtggacaaaccttgctgagtgtgcccttctcttttcagattagcaaaagggtttttgaggtc

SEQ ID NO: 57399 - DNA, 764 bp, Populus trichocarpa
  Intron number 2 from transcript POPTR_0015s11100.1 (locus POPTR_0015s11100) derived from phytozome v7.0 (chr-ID scaf fold_15; pos 11770030 to 11770793 reverse strand)
tagcaggtatgaattgtggtatcgtgttcttaatttctcaaactctaatagtgcttaggttattttgatttaaatcttgttctgattataattttccatctttttccatagctgctttcatgttcttacaggggtgtgctaatttcatcttcttattgcacttctgcattgctttttctgagttggacagatattttctcttaattttaggaaacaatgtaattgtactgatagaatcatttcctgttcatctttcatgaggctcgtactatatgaaaatcaaaatcaaatttctttaccattatgctgcatttattttgagacatggttttagcacgtctcacagtgtgatttctgtaaagaactgccatgtggtttgagcatgtatgcggaggaacatggaaaggtcattattctgaacagaaatggtaataccttgaagagattttgttaattctatgcagaatttattttgcagcctactacagtcttatgaactctacctatgcccctgaaatcatgtataacagcattcttttgaattggttctcttaattctttgtggaataagtgttgatgacttccacttagactggctccttccttgcttcattcttgtcctgtaaataaaacaggcttcatgtctataacatgcattttattcgttttttcttctgcatccaaacctctgtccacctgtggtttcatagcagtcttatacttttactactaccttactaggttccattccctggaggaatttg

SEQ ID NO: 57400 - DNA, 549 bp, Populus trichocarpa
  Intron number 1 from transcript POPTR_0012s08160.1 (locus POPTR_0012s08160) derived from phytozome v7.0 (chr-ID scaf fold_12; pos 9208457 to 9209005)
actggtttttaaggtactgaatttatcaatgtcttctctttttttttgccttttatgttctgtctgttattggatcagtttgagaggttaactgtcagaaaaaattaaagtttgcatttttgttcattgattttttgttgtgtcagttatataatttgtgggactgtattgttttgtactgatgagtttataatctaagggttcattttactgagttttggaaacattttttttcgaaagatctaattaagaaacgttagattttttattgctgttgcaaacatggaaagtttaaagggctgtttaaagcacaagttaaaggattgagcttttgatgttatcattggtgtttttgctatggttttagttgactttgtcatgttttagctacatgtgtcgaggttggtgcatcttgtatataattagatagtttaaatatatgatttttttatctacagtgccaattgtttgatatagcatgcccttttccttatttatggaaactttgttgcagttagtttattggaactcagtgttttcattgatttg

SEQ ID NO: 57401 - DNA, 455 bp, Populus trichocarpa
  Intron number 1 from transcript POPTR_0012s04910.1 (locus POPTR_0012s04910) derived from phytozome v7.0 (chr-ID scaf fold_12; pos 4373105 to 4373559)
ttcttcgtcaggaaccaattctcttaaactgttacgtcaggatccaatgctaatggatcttgtgccaggacccaattcttttgagtccagcgtcaggaccgaggcatggttgtcaaactcgcgagttaatttataaaatcgtatgattttacgagtcaatatagatataacatgtaaaatcagataaaaaactgaaaaaccagcaaattaaatcaaaatcaatcaaactcgataaactcgtattgaatttaccgagtttgacaaaattaacaaaaaaaaattattgactcttcttagtcctctcctctccataccgtttgtctcataaaaattcccctttcccctttccccaaatctcacattctctgattctcaaatctcaaccctagcagtagcagactatcacttgcaacgcctgagattgcatcttcatctgcaaagtctctgagtgcagc

SEQ ID NO: 57402 - DNA, 803 bp, Populus trichocarpa
  Intron number 1 from transcript POPTR_0004s08270.1 (locus POPTR_0004s08270) derived from phytozome v7.0 (chr-ID scaf fold_4; pos 6810552 to 6811354)
tggcagcagccttgctgccattgcagcagctgcaagtgcagcagttaagagctgggagttgagagagtgaagtgatcctcctcctctatatatgttgtaatcctttctctatatatctcaataatatagactctcccgtggatgtaggcggttttgccgaaccacgttaaatattgtgtccccgtgtgctttaccctccgtttgagcacttatccgtacatccccgatcggaatccccaacatatatatatatatatatatatatatatatatatatatatatatatatatatatatatatatcttaacaattacagctaccaaaatttatgtttttcttacttttctacaaagatgcttttatcacaagcctattatccttagctatggagaaacttccatgtagcaaaattttatgtagcctattttgaattcgtagctgccttcggccttaattcatgatttgatattaacatgacttgattctttctaattgattacttgcatctaaaatcatcaaattgggtttgtagaatttttggactacgtagaaaatcccgaatttcataaggacttgaagtctataaatacctccacatcccctttggagactccaagtttcaacacttaactagatttcagtactagcttgtcgacctcccaaactcttagaaagtttaagctaaattacttctctaataactcttcgatttctaggtctcctaattttcttattatattttcagcatttctttctcaatattgctcatatggaaactccaagatcactcaacctccaactt

SEQ ID NO: 57403 - DNA, 713 bp, Populus trichocarpa
  Intron number 2 from transcript POPTR_0011s07140.1 (locus POPTR_0011s07140) derived from phytozome v7.0 (chr-ID scaf fold_11; pos 7897520 to 7898232 reverse strand)
caaggagctatatcttggtaaaaacaacttgaccggtacgtaccattccactacattccttatgcgcgttcagttcatgttaaattacaagtgtttctcttgctacaagaattcaaatactttagtagcgttctagtactgtagtttcctgttctagactgtataaaataaagagagggacgaactttttcatcttttccggtattttgataagttatttaggccagtaatttccctcagaccgttttataattagatcaagtgtcactgatgctaacactgacattgcaggtcaaattcctggtgagattgcgcgtcttgttagcctggaaaagttgggcttagaagtcaacggattaaatggtatcttccacatctttgttttgacattctaacactagagaaatgcctgtactaattgatagtgaaagtacaggaaacataccgcgggagattggcaattgtacttatctcatggaaatacacgtggaaaataacaatttaacaggtaccatactatgcgtttttacttgtagcgttagattcttgttactcatctttatctccccgagtgtattttgttgcggccagaggcatacttttcctgcactgcatcattttttttttctggtaggaagctctctaaatgaattatgttgatgttataggggtctgatagggaagagttattcttatggcaggtgtaataccga

SEQ ID NO: 57404 - DNA, 221 bp, Populus trichocarpa; identical to SEQ ID NO: 56906
  Intron number 2 from transcript POPTR_0009s14400.1 (locus POPTR_0009s14400) derived from phytozome v7.0 (chr-ID scaf fold_9; pos 11286432 to 11286652 reverse strand)

SEQ ID NO: 57405 - DNA, 350 bp, Populus trichocarpa
  Intron number 1 from transcript POPTR_0001s38730.1 (locus POPTR_0001s38730) derived from phytozome v7.0 (chr-ID scaf fold_1; pos 37902277 to 37902626 reverse strand)
tctctctttcatttcacgttggagatctcgaacaggttagttcttaatgtgaattcttcttgtttctttcgatttctgtttcttgtttgaattttggagataaactgctagcgtttttcttttattttttatttttttatggtgaacttttgattttcgtagtatctagggctttggagatgtttcgaaatatagcaaatagcaaattgtgctgtgaattggttatagtggatgcttttatgtgatgaagggttagggttttgaatgttgtgattatttgtttctttctttcaaatagtaatttttgttgcttctttgtgtttattcaattcttgcaggtttttgtggtg

SEQ ID NO: 57406 - DNA, 445 bp, Populus trichocarpa
  Intron number 1 from transcript POPTR_0009s01600.1 (locus POPTR_0009s01600) derived from phytozome v7.0 (chr-ID scaf fold_9; pos 2121108 to 2121552)
ctgctattgagcttggaaaagaattggtaataaacaaaaacaaaatctgtctctctgttttggcccctgtttcttttttacaattcaatctcttcttcttctctctactttccgatgctttcttctcaggttttcttggttttgtttcttgactattgccactacatacatacaacttgcctcttgttttggttttccattctaaatcctgtgactgtgttagattattgatcatagcttctgccttgcattgtttttatgggtttttaagaattcttaattcatcactcatgaacgtttatcatcatttcctccgctttatattccataaaactcagtttgtttctctgagctacattatacatccacgatgatatatgatttgttgaaccaagaatttgacttcatttcttttcaaaggtatcaagaaatattgacctggttt

SEQ ID NO: 57407 - DNA, 691 bp, Populus trichocarpa
  Intron number 3 from transcript POPTR_0009s01600.1 (locus POPTR_0009s01600) derived from phytozome v7.0 (chr-ID scaf fold_9; pos 2121787 to 2122477)
cctagagaggtatttcttctcttactgtaatagggcttgaacctttgagacctgctctgtgtgtgtgtgtgtgagagagaagggaaagagggagtggaaacagaatcatcttttttctaatttttcttcaatgattttcttctttctcttgctttagttctttctttaaaaatcttttgtggtacctactttcacttgaatttctacctctcttttgttatctccttttcttctctttttttctccatacagttcttttgagcctcatgcatgttctaactataaggtaaaggctttcacatttagggtttttttttgggatgaacttgcctatcaatccacctggtggactgtggggcttcaccattttgtccctttctaaaacgttttatttggcaacttggtagagttttatgaggactttctcttcttcttcggtgtcatcttgatataaatacgagactttacagtatgacatgttttttttccccttgcatttccctcctctttaattcttctgctttatgcctttgattttgagcccaccacctctgccactcatcattgcttctctgtggataactctttgtcttgaaaaagacttggtgtcttttgtgcattgttttatgttgacttggacactggatattgtgcagatcactggagaaacagtaggtgaagtgaaggctgt

SEQ ID NO: 57408 - DNA, 533 bp, Populus trichocarpa
  Intron number 3 from transcript POPTR_0015s05480.1 (locus POPTR_0015s05480) derived from phytozome v7.0 (chr-ID scaf fold_15; pos 5822438 to 5822970)
gagaagctttaagattagctcctcgatatcttgaggtgagtcacaatacttgttaacatatcaaatttgattttactgatggagaaatcgaagcagaattatactgaagaagaagcatgggaaagcaaaatttaaaaaatcacatcagtatggcttttaattaaagaagccattctaaaatccatgatgcactagagcacaaagatgcccggataaaaaaaaaacccacaaggaatcattttctactctctaagttataatccaattcttcatatttaatatgaaaataagctatactggaggtctcttgccacggggccttgtttcctgcagtttgctctgtgtgcactatgcagatgcaggctgcaaaactctgtgactgcgcttgcgcttgcgggtgtaattattgctgtttgaatagctttcatgattggtatagtaaaaaaaaaggctcttcaactatgtattttcagggattggtatttttagttgtcattgggatgtatttatgaattcttattaagcaggcttac

SEQ ID NO: 57409 - DNA, 952 bp, Populus trichocarpa
  Intron number 2 from transcript POPTR_0012s04000.1 (locus POPTR_0012s04000) derived from phytozome v7.0 (chr-ID scaf fold_12; pos 3218519 to 3219470 reverse strand)
cttatattatccgtcctgacagctggtaggcactaagaacctattttctttgagttctaggcctctcatcttctaggttgggccgtacaatctttaatctttgattaaataaaagtatagggtttagggcaagtctagtttttcctctggaggtttagattgaatcaatgtcgccactgtgtttttattaccccccatttcatctggaaatgttacctgttctaatggaaaaactagttttggtctctaatcgttctaaatttgatgaaattgagccttattaaaaatgtttttttttatgaaattaaatcctttaattaaaaaatgaaagtggaaccatatgtgttatttacatttacaaatataatcataaaacttcgtatgagtgagagaatataaagaacaatagggaaattaattcaatatacttgaagttgtgcctcctctttggcataaaaaaaaatagaagttgttttttaaaaatatttttttatttaaaaatatattaaaataatatttttttattttttttaatatcaaaacattaaaataatataaatacaataaaaaattaaattttagccgatctatgtttgtgcccaatcccaaacaagggcaaatattatattcatggataattctttttggagggtctcatttttagtccttggatattttggtatgttttcatataggtcccttaaaaagatgttacttgcccccccagattttgaaaatatgtcataacattcctcaagtctcgtaatgtttcaaacttccctcccaacaatttagtccatgctcccccacttcatccattcatgattcagagttgctgctatagaatgctgctaatacaaggctttccatgactggctgctagtgggtgtataaagggtttctaaaatcaaaattctgttgtgtgtgattgtgaaagcaggaggtacacagt

SEQ ID NO: 57410 - DNA, 532 bp, Populus trichocarpa
  Intron number 2 from transcript POPTR_0009s16600.1 (locus POPTR_0009s16600) derived from phytozome v7.0 (chr-ID scaf fold_9; pos 12587366 to 12587897 reverse strand)
aaacaaagtgtgcaagatacttctagaaaggccaagtatgttgttcatcagatttcaacttcctgctgcatgttatggttatttgggattttactcgtataagtcattatgtgattgtttttgcaattgaagtgtaatggctgtgcatcgctattgacatggcaatgccatgggataatgctgttatggaaaaattagttgcttgtatttcatgttataaacaagatgatgaaatatcttcgtagtccttaacaagttttctgtcccctgatattttatttgcctgtatattttggaaaacttttgtcaacccctgcatattattgcaattcaaaattcttcctttgatgctgtttctgtctttatgcatgtatagtatccttgttttgctttagattttcgtgttgaagatgtagttcaatttaatgatttatttacatgtttctggagagctcaaaccttgagtagttattaaagatgtcatgtatttataacagggacagagcaaaactgttgcgcgaatccttatcta

SEQ ID NO: 57411 - DNA, 618 bp, Populus trichocarpa
  Intron number 1 from transcript POPTR_0015s11740.1 (locus POPTR_0015s11740) derived from phytozome v7.0 (chr-ID scaf fold_15; pos 12292692 to 12293309 reverse strand)
attattactattatagtttttaaaaactaattgagtttatttgcagtaagatttaagtcagatttaagtcagggttaaaaaggattaacctaaatctaaacaggttaaccttgatttttttttttttttaaatatcaacacagtatgctttaatcagaaaataaatatatgtttttcaagaaaaaagccactaggttttttatctgaatttttccttggatcaacctgagtttttgatcaatttaaaccgggtcaattgttcttttattttttttaaaacctgaactgatccagacttaagtcaattagatcttacgttgatttatctgaccgatctaaattttacagataagattattatataattatataattttaaaacttaatataaattaaattaatatatctaataattattatttttaatatgcaagtttgacacatatatattaataaaatagattgttttattttgtcttcttcataatcatttatacctatatcaaatataattttgtctccacgtcatctatcacgaacaatgatgtgtttagtccttttctttcttgcaatgtttgatcttttgacaatctatttttgaaaatttttctggccaga

SEQ ID NO: 57412 - DNA, 527 bp, Populus trichocarpa
  Intron number 1 from transcript POPTR_0004s11510.1 (locus POPTR_0004s11510) derived from phytozome v7.0 (chr-ID scaf fold_4; pos 10288077 to 10288603)
accttggtgcagacttcattacctttcttcacactgtaagtgcggcaactaatcccaaacttatgtgcatgcctagctatgattactaaaacccttcccttcctttaaaaatacttcttttcttgatttattcatgcaatactagctagttacttgttttcagcttcggattacctcgtcgatgagcacaatattgtaagagaatatgatattgaatattgttgtcttctcttcacaactgaaaccttccagaacaaaaaaaaaatggctagttgagaattcttgcgaaggaattcttaaaatgtttctgatatatattgactatatatgcttttgttgactgtttttctagagattcccttctacttgtgcagagatagcttgttttgattattttttttttaatgttttttcgatcttctttccacttactctttctttaagggaaactgcagtttggaccgatcttgtgctgtgttatgttaatctgactgctcattttcttccttttatggatctgaatcagc

SEQ ID NO: 57413 - DNA, 285 bp, Populus trichocarpa
  Intron number 1 from transcript POPTR_0012s00720.1 (locus POPTR_0012s00720) derived from phytozome v7.0 (chr-ID scaf fold_12; pos 403472 to 403756 reverse strand)
ttccctgactctcttggcagcagtctgcttctctggtaacatcttttttctttgtttgtttgtttgtttttttaatcttcatcagttttccatctgttgattctcatcatttttatcatatattgactgtttttgtgcataattcttgtttttgataatcatagctatttcttttgattattagtcttgattatcactctaaggattcttattgagatgaatttatgtggtttttaatcattttatacagttatttgttaccacaacataaagatatagagttga

SEQ ID NO: 57414 - DNA, 452 bp, Populus trichocarpa
  Intron number 2 from transcript POPTR_0012s14440.1 (locus POPTR_0012s14440) derived from phytozome v7.0 (chr-ID scaf fold_12; pos 14335879 to 14336330)
cctcaccgagctggctgaaaatttcagcacaagatgtgagtttctttaacctcatttgttgttttctctttcttcttattgaatcattcagttttggagattaaaggtttaagctttatcctcaagtcacttgtttttgcttggtttcgtagttcgtaattattgtaaaaacattttctgattaatctaagctttcgtatctgtattttttagcgcattgtagggatatgtttttaatcataagcattttgtttatttttatattgtttacgggtagcaaaagaattattactttaacgaatcaaagatatggtactcgtactgttttagttcattttgttggtaggttcttaactagttttggttatacaaggcagttatttcaaattcttaggattttcatagtgggttttgaaggagaggaattattggtgtgatatggtttcaggttg

SEQ ID NO: 57415 - DNA, 497 bp, Populus trichocarpa
  Intron number 1 from transcript POPTR_0004s05400.1 (locus POPTR_0004s05400) derived from phytozome v7.0 (chr-ID scaf fold_4; pos 4154946 to 4155442)
gctcaccatacaacaagaatagtgctagagaccaggtaatatagtattcaaagtattttgtgctctcaatctaagaattttctgtagtaaggcatgcatgaaggaaattgatgatctaaaaaacatcttgtgacaatgtcctgaatttattaataaaatacagtaattctctaacaagaaatttaattaatgcgcgtacccgtaagtaaagaaaattcatgtatctaatttttattggtcggaaattatggtgatgtgcctattttacagtgcttctctttaccagagattttatgtatgtaactcccaggtaaagaacattctagttttatgtatttatgaaataaatttctgcaaagaaaagattttgattatttactggtaatatatatatatatatataaactctccatatgaatatatgtgttgaacaaattatatatagcaatattattaatgtttggtaattctgattgtttttatttgttaggttctta

SEQ ID NO: 57416 - DNA, 554 bp, Populus trichocarpa
  Intron number 1 from transcript POPTR_0011s01540.3 (locus POPTR_0011s01540) derived from phytozome v7.0 (chr-ID scaf fold_11; pos 1084177 to 1084730)
ctagtaaagtttgcatttttttgaaatattttttaatggggttttggttttttgactgatcgattgttttttgttagtttgatggtgattggtgcggttaaagttattgaattttggttgtttctttttctttggttggagtgagctagagtcaagaaatgaacttttactacgataatctttttgttttttttttctttggaagatcagtttattttgtgtttgtttcctaggaaaatgtgccggcaatggtgttctaccttttgtgttttgctcatgaaagtatgatagtttttttatggctaaagtaggctaataatgattgaaatgctctctcatttcatttagattgcaatttttgttatttatttgctttcatttcccagtgaaataatcaagggtttatgtcggcggcttttttttaggggttaaattagttggttttgaggattgaaggtattttctgttgttgcagttcaagctctacaatctatgtactcttcactgaatagtccttcacagctgaccagttggaaaagtattggtggtgatcc

SEQ ID NO: 57417 - DNA, 417 bp, Populus trichocarpa
  Intron number 1 from transcript POPTR_0014s18840.1 (locus POPTR_0014s18840) derived from phytozome v7.0 (chr-ID scaf fold_14; pos 16345351 to 16345767)
acaataaagaaagtaagaagacattaaggactaaagaaaactgacccagaataaaaacatggatagaaacaagtagatttaacgtgaaataagagaaaaaaatgaatttaacataaggatataacttgattaatggagccaatctttgataccaaatgatgtgaagctcttgatcacgtggtcaaacaacccataatgaagatgatacaactcctagaaagccaataaatcaggtatgatagaagtgcgacacaatagaaacctgtccaaaagcatcagcactattggaataaaaaaaacccctacccaacgaataccaattcatgaacgagaagtataaggaagatgtcacaaggtcagttacaccttgataagtcaaatttgttcttttttccaacaaagaaaacgtgttgcatc

SEQ ID NO: 57418 - DNA, 509 bp, Populus trichocarpa
  Intron number 4 from transcript POPTR_0001s23220.1 (locus POPTR_0001s23220) derived from phytozome v7.0 (chr-ID scaf fold_1; pos 22503949 to 22504457 reverse strand)
tgtgaattgggttcaggtggtgtgtcattggtaagtacagtctaggattgaaattaatttctgcagtttaatgttttgtatctctatgagaaatttatgataaaattaggattagatcagtaactgctgtttgtgggctctctctttaaatttggctcgatcgaaactcttcctgtcttctgtgctgaaatgagattagaacacttcgattatattaaaaccatctttggatgttagactgacaaagaaaaatgtaatcgaagtttgaatatttgcaagccatggtgtaagaatgaaaatctgtgcttgtatgtccatgatcaaatgcttattcagtatggttgatggaaacttgatctgattagctccataatcagcgtcatatactagagcagagttttcttcaaaaagaagggagtataatattatttactttgtatcttaattttgctgatattctctatttagcttatagtttctgtttttctggtggctgatttaaggtgtca

SEQ ID NO: 57419 - DNA, 591 bp, Populus trichocarpa
  Intron number 1 from transcript POPTR_0012s07270.1 (locus POPTR_0012s07270) derived from phytozome v7.0 (chr-ID scaf fold_12; pos 8104941 to 8105531)
ttttttcctttctggctcttctccttcttttcttggtattctttctaattatctatttgctttacttcctgtattaaaaaaactgttccttgtttcttttctttttctttttaattttgttaattcctggtgtttcaaacttatgatttcatggataaataaaaaattcaggtcttttgaacctcaattacctctatatcatcctctctttactttttaatttggttatttgtttttttttaatcttttgatgaatatagggaggatttttttttatgattattattttaactcgttgatgctcaaaatatcaaattagatttctctaatttgtctcctataagatttttatatatgattgcagtaaatattctatcttttattaaacgtttgctcaatggatgccttcttattcggctatagtgtttttttttccgctttttcttgaattcttgataaaaaaaaaatttaagaattcaagatggaaatcaattgaaccaaaatgattgctgatttctgcatgtagctcttgtgattgattgaaacatggcctttgacttgtggtgtatcaataatataggttcaagatcc

SEQ ID NO: 57420 - DNA, 533 bp, Populus trichocarpa
  Intron number 2 from transcript POPTR_0015s13720.1 (locus POPTR_0015s13720) derived from phytozome v7.0 (chr-ID scaf fold_15; pos 13543567 to 13544099)
gtgtctggtcctatatcaaaaccaacaacctccaggtacttttttttaatctcatcttttgtttatgtttttatgctaattggaagtaatgttctcaattacatgaattgctaatacccatcaataaaagaaagatttttttttctttttttcttaaaaagaagaaatattcttaatcttgttcatctaattcttcaaactttgcgttgtcatagataaatatacatgtaattcactgttgcggtgtttcagctaaaatgggacctatcatttgattgcgtgtaaaaggtgcctcattttgttatttattaaccttaacgggataacttaaattctgcaattttcttgtcattttgagaacaaaatatgaggatatgtaggagctgcatcgtaacatgtctcaaccgattctaattgtgcaaattgtatgtatctttgttattattttactttctgttttattaatgttattcttttaactaactcttgccaaaactgcgtggtgtatgtcatttaggatccaaacaacaaga

SEQ ID NO: 57421 - DNA, 1004 bp, Populus trichocarpa
  Intron number 1 from transcript POPTR_0012s04460.1 (locus POPTR_0012s04460) derived from phytozome v7.0 (chr-ID scaf fold_12; pos 3672707 to 3673710)
ggcaatcaggttggtttctccttttttttcttttttctcatctctcttgcagttttgtgttctttcttcttatttttccttcgtttgttctttgctttcttttggtgctgtttcttctccgagatcggaaaatttcgaaataagaaagaacttgttaatcttgggttgtattttttaatctagattctcaattcttttaaggaaaaccccaagaacttcaagtctcaagtatttcttagatgctttgatctgatatgtttaaatgtttctcttgttgagaaagtatcgttttaggtctatgatgttcttatgctctcaaccaaattacaacttattgtggtaataaattgaagattgatgagttatgatgtattggatgaattgataatcagaagccagaaattctgtaagagaacatattatttttggatgttagtcttaaattttagtaagggaaaacccagaattagcaaggttagcataaaaaaaagggtataaagctagttggctactgcctagttgttttggtaagaaaatctggatgccaatcttttctcattttgtgctgtaatcctagtccaaaataatttcttcgatgtctccaatttctgtatgagcgatgtctgtacaattcctcctgcaacataggatggtacaatttcttcgacatcttctcattaatcttgacagttcagcatgctgtgctagcaagtttaacttaggatgagaaccacattcaagtgcatagattataactttctatcgcttttcacgcttttttcttcttttttacatttatttaatttgtccccatctaatttcctgtcaagattttattgcttatagtacggtaggatgcaaatgttgtagtatttcatatttacttggagtatatgtttttcttcttttaggcctttttagtcactacattacgtctgctaattttatgattgtaaacatttgctgcagaaactgaaaactcgtgtgatcaagaaggacgttaa

SEQ ID NO: 57422 - DNA, 197 bp, Populus trichocarpa
  Intron number 1 from transcript POPTR_0012s04390.1 (locus POPTR_0012s04390) derived from phytozome v7.0 (chr-ID scaf fold_12; pos 3624356 to 3624552 reverse strand)
ttctcaagtaagctaccttttttctccagttggatttgaaatttgattagtggtatgaaatgaagggaagattaaaagattgagaatttaggttctcagatatttgagaatcaagaaatgtttattgggtcttgaatttttattttttttacacttatgcagatcattgtctatacctgatattcaaacagttgtgg

SEQ ID NO: 57423 - DNA, 738 bp, Populus trichocarpa
  Intron number 1 from transcript POPTR_0015s13180.1 (locus POPTR_0015s13180) derived from phytozome v7.0 (chr-ID scaf fold_15; pos 13238363 to 13239100 reverse strand)
ttttggtagctggcatagcctccctaagaaagcaggttttactttcgtttttgtttcccatcttttggtatattctgcttcaaagttcaaaatttattgaacctactacgttgaaatttgaagaaaggaaaatgtgtaatggctttggcttggatttaggaaggcaagtggcctttgatgctatatgattgcaaaggccatgttgtttatttcttatttcctggttgattggaatctgtgcttggtgtttctgctattttaacttgttaaaaagagaatttgagaccaccctttacatgatttcgggtttgccatcttttatatgggttcttgttcttcttccttttcttttcatgcccaatgtgttgctctctaattttctaacccttgctgttttgctgagcacttgtgtagttgtttagctgcatctgctcgagaactttcaagtatgttggctagagaaacacaattgtacaaaatccaatagctagccttcaacacaatacaattttgattaattaaagttgaatatttgaggagacacttccccaacttggataagttaatatatttgaaccttaattaggtgaaaactaaatctaatgacaatcaaattccagttggctttgctgccaggagttccttattaaactctgattttgagttcctagaagtttctgaacagtgatgtcctgaaatgttaaacatgaacaaaatattatgatcaggcctctttcg

SEQ ID NO: 57424 - DNA, 518 bp, Populus trichocarpa
  Intron number 2 from transcript POPTR_0012s01940.1 (locus POPTR_0012s01940) derived from phytozome v7.0 (chr-ID scaf fold_12; pos 1541402 to 1541919 reverse strand)
tagctctacctctactttcggttgtgccctcaaaggtttgggtcctgtcactaaaatcatttaatatgttagtcttcctgatttgtgtgatatcaaccgctcaaatcctttttgtcttactaaaattatttttaccctggagtccagccggcaatgaaatggtctgatttcttttttctttaatgatgctagctagctattccaaaaaggaaaaaaaaatgacttgaagctagcagatgcactagaaaaaacaaaccagccaagaaaaccaaataagagacaaaataaatgggtcccaaataagaaaggcatccgggaaaatgaacatcaaacaaaattaggagtaattcctagcaataattaggatgggtcaggttgggggcaagttttcaacccgaaagattctattgtggagttcaaatacttaaaaatagggagtagggttttgtttttttttaaattgattcccttgggtaatgacagacatttattgtcatttgagcagtgaaattagacag

SEQ ID NO: 57425 - DNA, 488 bp, Populus trichocarpa
  Intron number 1 from transcript POPTR_0012s01940.1 (locus POPTR_0012s01940) derived from phytozome v7.0 (chr-ID scaf fold_12; pos 1541995 to 1542482 reverse strand)
tcctctctgtcttctttcaccctaagacctccaaggtttatttctcctctctatcttcttcaccttctaaaatgtcttcattcaatatgttgcaatctatttgatgtcagttcaaattttaattcttttaactgaatccatttatggcccaatatcccttttcttcctttgtttatataccgtataacgcataagctcatacctatgctgagaaaaaacaagaacaattttcgagttgcagcatggttaagattaaactccaaatgacttggccggttcggaattaagtatcatgacctcattgccatacagacaaaattcaaatcactgcgtttgattggaaaaccatggattattcatacaataatgaattttttgctctattttctgctcggtatttccttttgttttctacatgcatggatattccttgattaagccatatatgcacaggttcctgtggagagctcttaattctggacaaacag

SEQ ID NO: 57426 - DNA, 607 bp, Populus trichocarpa
  Intron number 1 from transcript POPTR_0004s06960.1 (locus POPTR_0004s06960) derived from phytozome v7.0 (chr-ID scaf fold_4; pos 5778616 to 5779222)
aataaaggaattcttacgagaaactttggaaaaatgtaagagaaattcactacctgcgatagtaggagagccagaaggaagttttcttactgggtgaaagaagccaaccagcaagtcagtagctttgtaatgcgttgatctctccctacatttttaatttcaattttcttttgtgcatttttgacaacatttcttgtctttgattccgagcaaaatatgcaaaatcattactaattttcctgaaagacgtgtgtcatctcataatttaagaaattatttctgagaaattctataggtaaaagcagcattgtttttattgtgtttaatatgtctcaatgatccaatttttccaaaaaaactctcacttctaagttgtcccactctacttttaaaaaactgaagtttaggtggtcacttttgctggtaattattcgttatttgactcataacgaatcttggttgtctttagctgcctactacatcactagctctccagttaacatgctatattgctatcaggagatcaccagtcagcttagcatctcacaggagtcgactgaacaacataatagcagaacatttactacttatcaataaatattccatc

SEQ ID NO: 57427 - DNA, 885 bp, Populus trichocarpa
  Intron number 2 from transcript POPTR_0012s11020.1 (locus POPTR_0012s11020) derived from phytozome v7.0 (chr-ID scaf fold_12; pos 11639359 to 11640243 reverse strand)
ccaagtgcccagttactggcaagaggattcaaggggtaatttttttcttaatctgtaatgttcttgttgtgcatctaactgggatgttatttgttgaaactgaatccatcattcttacaacattggactcctaaggttcttttttatttttctagtatggaaacctgtgtacctttgatttgcttgtcttaagcttttgttaaggattctggatgaaattatacacatggttgaagttgatgcgtcaagttttttggttaagagttggaaacttgacaatctgtatcatgtcgaattacgtttactttttacatgccgtaggtccattaatgcctgtataagggtaggtcgattagtgcctgtataaggggaggagtgatgggctgagagtttaggatgtacagataacattttttttgtaatgctgattggtttcgcccagaaatctggtcaagcaggttgctgcgatctcatctcacatgtgttaaaccatagaagggtgaattcgatcaatattttgtagttttgatgctggtttgaagtcagccctgcataaatgcacctctgtgatgtttgttgtttgcatgataatctacaacacttgtgtagttgtctaataagaattttttctttaatcttgttaatggttttaacttctacatattgttgcttatttgacacaagtttttttgatttatatgtggctggttgatgatttcttacttatttttaaagatttaagcgagtgagctctcgatgattgcaggccacagtgttttcaactctgcttttcttaacaaagagtgatctgatagtactggttatgattgagttttctcattctttgcagatccctcacttgagacctgctgaatacaagaggtc

SEQ ID NO: 57428 - DNA, 445 bp, Populus trichocarpa
  Intron number 2 from transcript POPTR_0015s04120.1 (locus POPTR_0015s04120) derived from phytozome v7.0 (chr-ID scaf fold_15; pos 4139526 to 4139970)
aaaacgttgtctcttctggcttaccacgtgagttggtgtgtttttagtttatattttgtttattgcttctttttttttttttttttctcctgggttatcataatcagtgtggaaattcatgagaactttttttaatgggaaattataatgatttcagactcttgtattgcattgtttaatcatgactagagagtagcttttgaatcaaatattcatttgtttttgctgtttgatattttcatttcctttcaattctaatatcttcttcattgtttgtgcctgcttatgaaccatcgtttctttttctatttttttctattttttatttatttacctgttgcctttgtaatctgatgatttttcttgttgcctgattttctgtggttaaaatattttccttttgcatttaaaaatgatggtgtatgttttccggtgctgcagttgg

SEQ ID NO: 57429 - DNA, 769 bp, Populus trichocarpa
  Intron number 1 from transcript POPTR_0001s14000.1 (locus POPTR_0001s14000) derived from phytozome v7.0 (chr-ID scaf fold_1; pos 11031039 to 11031807)
agaactaattacatcttcagctagaaagcagaaatgtaatatgttgctaccttttcatatttccagttaatgcatgcttgcacagaacacaataggttgactttttcatggagattgtaataaagtgtcagatttagatattttcttttgcagcagtggcgaggagtggggcagcgagtctcttgcaattaaacatgtgcataaaaaagtgaaatgttgactactgttttgaacttaacactccaaatcaacaaaacacattactcaatacctgacatcacctgtgcggtacttagcagtgtcaagcaatttgatctaaccaagcaaaatgtaattcaactcaatgttagcagattctagattgaatttaggtccctgaattaagcttaattcccaagtttctctcttttttaagttatcataatttagcattttaacttgctgttgctaacacctcttacgttttaaggatattgaatttagtgataaaggatatgaatttgtttaagaagatgtaactgtattattattattattattattattatttttgcataatttacttgactgtgttcctaatagcatcaagtttcatcctcattgtatctgctgcaaagtcaggatctgaggaaattctaatattagggaaatcagcatcacacattgtgctattaagaattaaatttctcatttattattttagtaagaaccattgatctttttaattgtgtttctccaacctcaaacactctttgcaggcacccttcca

SEQ ID NO: 57430 - DNA, 535 bp, Populus trichocarpa
  Intron number 1 from transcript POPTR_0011s03380.1 (locus POPTR_0011s03380) derived from phytozome v7.0 (chr-ID scaf fold_11; pos 3515227 to 3515761 reverse strand)
ggaaccagaatcggcctcctcgtagtccttcttctgtaagtagtcctgctttttttttttcctctttcttgttgctttttttttgtaaaggggctgtttggttgctgagaaaataagaaattttggatctaggaaaaattgaagaaatttcggtgattgtagttgtgtttgaagaataatattgatgggtttttatgggttttgtgttttatactgtaggtaactatgcgaagcgatttttattttattttattttaattttatgcaataaatcttacgattttgccttaattcctgttctaattagaatttatacttgatgcttaattttttggtaatctcattgtttttaactggtttagtttagtctgtaatttttccttctgggtttcgaatttgggttctgctaagttgatatttctgttttaattgacatttactgtgtttaattgaaaaattatggcgctgtttgattgagtttttttattgggtttttgtagaagaaggaaggggtggaaggtattcctttagataa

SEQ ID NO: 57431 - DNA, 884 bp, Populus trichocarpa
  Intron number 2 from transcript POPTR_0009s15990.1 (locus POPTR_0009s15990) derived from phytozome v7.0 (chr-ID scaf fold_9; pos 12251656 to 12252539)
ttatcaaggatagatttggaaggcttgacatcctggtaagggttcattttcaagaacgattatattaattgatctactgatgtttcttccaagtattttggtgagctttgggagctcactgttaagtccagcaatggatggtatggtttagcatccatagaaaaagaagaagaagaagaagacgacgacgagagagagagagagagatcaattcttctatttcattttctgcataaatccttctctttcaaggttgttatatctaaaccaaaaaaaacaataacaaccagctacatgtggctgtattttaattcttctggaattcaactaaataaaacgtgcgtttttaatccaaatgagtagtcctcttttttttctgacttcttcctgctcaaattgcttcttctccagccatcccctccttagaattaaggacctgtaacaacaattctaattccagaaatgcttgtgacagattaactcccatgatagatgaacaagtgaatgaaagaagttagattttcaagagcaatttgggttgtcattaatgtatttaacaatttttctcaaccaaaatcatttaaattatactgccagttactgatttatgatagcagttttgtatccaatgacagcctagctggtgaagtataagcttaattcatttaaaaaataagtctagatgttctgttcttgctggctcgataggaatcttcaaatggtgtttggttcaatgttaatcataagtgatttagagcaaaaacaaagttttattgaagagttatggatagcaaatgtataatttttcacgggtttggaattttgagtgttcttttcttgtttttcccgcattttgtgatgcatttattttgtccaggttaaca

SEQ ID NO: 57432 - DNA, 1008 bp, Populus trichocarpa
  Intron number 1 from transcript POPTR_0004s10345.1 (locus POPTR_0004s10345) derived from phytozome v7.0 (chr-ID scaf fold_4; pos 8888056 to 8889063 reverse strand)
ataaaactggaattgatttgccagagctttaatctgtaagttgatctgatcattccttttgttttgctccacccattgttcttgccatttgtttcgttgattaaccattgattcttagatttctcggtgaatattttgcagctgttcatcaagccttctacattagtctcgtataaccttcattttgttattttctactatttttgcaccagatagaatcaattcgagcttggatttggctctggtactaattgttaggcttatttcctaacaagaaaatagaaggagtgaacaaaaaaaagaaagacgagagaagaagagaagaatgaattctgttctgttattgcttgcctcaaatgaaaatgcccttacatcttttatacacttcaatcttattcaactaacttgctaactgattttcccgcccactaactacttgcaactaacttaactaactgctactaacagcttagccacatgcttcatatttcatcattgtaacttctgcagctaacaattcttcttcgttcttattccgcatatgctctttgtttattaacacgtgcagaatgtaacataaacactgtctcttctctccctttcagtttggtttgcgttcaaccaggtgagctgtttctcctgttctcatttcattttcttggtttggttatgtttgagttgggtttggtattggttgccgtggaatgtgtgttgatttcccattattttagctggatttattgggttgtctgttagctgtgcttctcaagagtttcagtctctctcagttgcctgctctcttagtgtttttttttttttttgctcttaccattatcgttacttgtccttcgcttctgtgggctctgctttctttgcttttactcctttgctctctttcttaatagcttttgatcattgacccaattctttcctggtgatgttcatagttgggttttggtttttttcctcgcaggtttctttggccttgggagttttggaaccgcttgg

SEQ ID NO: 57433 - DNA, 470 bp, Populus trichocarpa
  Intron number 2 from transcript POPTR_0009s10390.1 (locus POPTR_0009s10390) derived from phytozome v7.0 (chr-ID scaf fold_9; pos 8921551 to 8922020)
aagttttcgatcttgttgctttgccggtttgttgttttttactttgaatcattcatggtttgcaaattaattcatgattgttacatttatttctcattgataatgtagccggggcaaatattatgacatagcttttttttttttttaattttttcaataaatggttggttagtgactgacactcattgagaaattaataaaaagtatggtttagttgatttatgatcgtgccggtaaagatagttatacatacaagcgtgaatgttaagtataggaaaaagatatactcaacgacaggatttaattggaaaatcgagaagattgtgttttctttggggttgtaacagggagtttggttgcttgttagtacagtaaattttatttggaaaacaactgtagcttttgtagtttgatctggccatgtaatttgtaacaaaggcttgcgtgttctgaatggcttcaagggagga

SEQ ID NO: 57434 - DNA, 370 bp, Populus trichocarpa
  Intron number 1 from transcript POPTR_0009s09370.1 (locus POPTR_0009s09370) derived from phytozome v7.0 (chr-ID scaf fold_9; pos 8319380 to 8319749)
caagcacaaacattggaaaccctagtcccaattcggtacgtatctcattctacctttttttaattcaaaattcaccatttggggtttcgattttcatttaaatgggtttcttttatttttcaattgggttcttaaatttccctaattgtctttctatttctggaacttctgtttatgtagttcttaaattcaagtaatttatttgtttattatatcaactgtttttgtttgtgagcatctttataatagaattagaagctgtggtttttaagctgaatctgtacctagggtttgctaatgcttgattagaactagaagaaaaaaagtgtgagctttgtttaattttgatgtatttctggttactatgcag

SEQ ID NO: 57435 - DNA, 574 bp, Populus trichocarpa
  Intron number 1 from transcript POPTR_0004s15610.1 (locus POPTR_0004s15610) derived from phytozome v7.0 (chr-ID scaf fold_4; pos 16226026 to 16226599)
gatcgcttcttttgctgcaatgtaagcatacttactttgaagtttgatccttctttctcttctttatttaacattgctgttgttgcagagatcttactgatttagtggcaaattaagacttttgttgtttcaaatttaaaggtgaacatgttagcttgaatttgattgcttaggctcgagaattatttttgatatctgtgtgaattagcttatcttaagccttacaatgaagtaggtgctgtttcttaactcatcatgtataggtggtatggtatcaatttgcttgtgtctaaaaacaattcttgataattggaaactgcagagattaagttattgtgcgataactacatgggtttgtagcagttgctctgccaaaatctttgaagaacatggtcagttcagcaatgactgctatgtagatgattagtttttcttcaatcttgctactagttaaccatcttatacttcgtttttctagcccacttcgtctcttttactttgctactggattaatataacttgaattgtgctcgctgcagttatctattgatcttggatcgaacgaactggaaaa

SEQ ID NO: 57436 - DNA, 740 bp, Populus trichocarpa
  Intron number 1 from transcript POPTR_0009s04130.1 (locus POPTR_0009s04130) derived from phytozome v7.0 (chr-ID scaf fold_9; pos 4653932 to 4654671)
ccatctcagtgtgtgcttgatgaggaaaataagaacttgaccatgaaaaaattgaaattagctatgcccttggtagtgaatattgaatatttagatagtgtttaaaacgtgatttttgaatttagttaaaattattttttatattttgaattattttaatatgttctggtgcaatgctctttttattcttcgattagaccaaagagatacacatccaattaacctggatcataatttcattagaataatttataataatggtggtataaaaaaaatagattataattataaattgttttataaatgagaaaaaacttacattcaaaaaagatattatgaaatattttttgaaagaaataacaattaaaggtagttttttaaatatataaagcacaattaaatttgaactttcttggaagataagctataaaaataaatttactgatcttaagaaaaagcacacgaagatttatagaaaatttatcttttaaagattaaatttatagatacttcttccaacttcctctttctctttcgcgacgcattctcaagaaccaaaacctcaaatcgaacgacaagttgcaaagccgaagaggaaaagaaaagcaaaagcagggagtctttaagtttcaaacaaaagaagagattttgagtcgtgggcttttcacttcatgatccaaggttttacctttatttttgtttcaggtcatttgggttgccattgtcgaaaccacaggtag

SEQ ID NO: 57437 - DNA, 575 bp, Populus trichocarpa
  Intron number 1 from transcript POPTR_0011s08330.1 (locus POPTR_0011s08330) derived from phytozome v7.0 (chr-ID scaf fold_11; pos 9625361 to 9625935 reverse strand)
ttcttaagaatttccaggtgagtagggaataagactctcgtgcatatttcttaccataaacaattactagagtttttcttagttttctcttcttcttcttcttcttcttctcttctttcctggtaataacattgcatttgtttaaggaagaggtttggaatcacagtcccatcctctttctttgcaagagggactagggaaacacaagatcgttattgatatgactacggtgtaactcaaaaagccttctcttaaaattgaggattttgcaagtaaacgaactataaatgggcttgtagtttagtcttcttggttctcttgtggtgaagtcttgtttttcatgttaaataaataaacaaattcagtggttaataataattaatattcagaaactagtcaactagtggcttatccttaaatatcattgggtaaataaatccaggctttgattgaatgaggtgactgatcacgagttgtcataaaaagttagccgaaggaatttttttaaaactttttttttgttttttttttttgagatagcttatccaagaaaaccaaattgatctaagcattcc

SEQ ID NO: 57438 - DNA, 662 bp, Populus trichocarpa
  Intron number 3 from transcript POPTR_0011s02760.1 (locus POPTR_0011s02760) derived from phytozome v7.0 (chr-ID scaf fold_11; pos 2694124 to 2694785)
gaaggtgatcagtcggttctagatttttaattattctgttctggccttaataaaaaaacatgtcaaaagctaataatgctttctgtgcttcagctgattattgattaattattcaaatgaaggttgtttgccattgttatttatcattaaaaaatatagaaaggtgtcatgtttgattcatcttttatcacctataggaaaaaagcaaatatgggcttgcttatgtgaagcatttgttccaagtacaaatatcaatcactttaatcctcaagtcattaggtcatctgttgggatggttatgtctatattgcagatgttttgagaagatgaaggattgcaaattttcctgcttgaaacagaattctatcatgaacttatttacaatctaagttcttggatcagttctctgttaagtgcatctttatctgattttaggcagaaatatctgggtgcggatttttgaatgttagtcattatcctggatgtggcattgaaaggcaacatcaattatgttaacatgtaatctggaaattggagctctgcatgtgctgtcaatatttaatagtttagtgttgcagttttccgatgtcattgtttgtcaatcttatgaagagtacgttgttgcaggttgataatttaggcactgtgaaccttgttgaagc

SEQ ID NO: 57439 - DNA, 1058 bp, Populus trichocarpa
  Intron number 1 from transcript POPTR_0014s02410.1 (locus POPTR_0014s02410) derived from phytozome v7.0 (chr-ID scaf fold_14; pos 2009951 to 2011008 reverse strand)
tgccgtagctgaggtcaaagatcagggaggctgtggtaagtttcctttaactaccaggattgctctttgctaatatatttatttttattaaaaatataaatctattttcagtgaagcaaatatctagacctgctcccttttaattcttattaaagattttagaggccgatccgaaattacagtaaatcataaaagaaaaggaagagtaaagttcaaactagagggttaaaattttttgtcaaactttttctggcatcgaatcaattttatttggtaggtatttgtttttgatttccttggaattatctaatcgtgttccaaatattttgattaacctttgatttgtctttgttggtcaacgaattctttctctatgatagcatttaagaggagatcaagggggaaaaaattcacttacacacatcacaatatatatatatatatatatatatatatccggatgtggatgattaaaaaactaaacgtgatcgtcaaagttactactgttttaatatatttttttggtttgagggatcgctagacgcttttgcctatagatttgatgcagtacttaggaaattggttcctcgtgtgtggagttttcttcatgtttttctacgactgtaatatcgctttacccgataaattattcagtataccaggaactgtatttcttcatctcagccgtgtcttgaatttagtttcggtttcgtcatgtgcgagaaggctccaaactaatagtcataattgcggctggtatagataatttttggatccactgattccagcacaagggcaaactgctagccaatgtcgaatgatacattttactcgttgattaatccagaaaagcaaaataggagcgcgattataggcaaagaatccaatttttttatttgattaaagatttgtgtattgatatgttagtaaatgagcttgccggcatcaaactgagtcttgaaacgttttgattttatatacaccgtgaaaggataaattactgacgtttcttttgatataaagggagttgctgggcgttctcaacgattgctgctgtg

SEQ ID NO: 57440 - DNA, 784 bp, Populus trichocarpa
  Intron number 1 from transcript POPTR_0004s00330.1 (locus POPTR_0004s00330) derived from phytozome v7.0 (chr-ID scaf fold_4; pos 88875 to 89658)
gtggtggtattattcctaggagatgaggggagcttgaatggtgcaatctggtgccttgcccaacttatctctcatctttccaatgttgatggagaactattcatcaaacccaatcaagttgataggaggagtatcttcttccttctttttagtattttaatggctataaataccaaggttattttcaataagaacaagcttaaaaatccaaaacagaattctcctctgctacgtttcttctttgttaaaaaatccattgcatttcactgaataataaataccacatcttccatttaatttctggaggttccccattttatattaaccagcaactgatagattcacagaaaggtacgtattcctcctatccaatcataatcacgaatagaattcaagattttccaatgaaggctcattcgcaattcataattcagttgttgtggtagtatgaatatccaatgccatccctcctggattcattttgtaaatcaaaacccacagaatcctgttctatatttcaaattatttggtggaccgaagaaagaaatatattgccgcattgcttgccttccctgttcaatggccaacccatacctgccggccgacttcatctcgtctagagtagatagcagtcatcagcgcttcctccttttccttttccttcccttggcccaaccaattaaacaacattcacaaaataccctcagccgacgtcgtttatgagttccctataaatacaaataaagcaggctattttatcaatctgcgggcccctccttctaga

SEQ ID NO: 57441 - DNA, 737 bp, Populus trichocarpa
  Intron number 1 from transcript POPTR_0011s09670.1 (locus POPTR_0011s09670) derived from phytozome v7.0 (chr-ID scaf fold_11; pos 12064968 to 12065704 reverse strand)
gttcacgtcaatttttacagaaactgtataccctctttctctatgtcgctacctccctaatctgttttaggcgtttgtaatgcttagttcgatatctgggtgaatcttgaatattttttcttccatacatcctcttggctctaattatttttgtggataccattagtcgccgtcttcgcacataatatcgttttgtaagattgaattttatctcattccgtgcgtttttctaaaaaaaaaattatcagatgagaatgaatatccaagcccgcaagattataatttttacctgataatggttgcaaggcaatggtcttagatcgcgtgattttttgtgagacaggcattttgtctgctaattattcaggacagacaaaacactagatttgaaaattgattatgaatgccaagtagtaaatatgattttgtttattagaaattgattatgaatgccaagttgtaaatatgtcaaattgttgtctcctcgacattgcgttgcaagatattttctcttcgttagcaataaatcgaaacccaagtaatcgacctcttatttttaatagatttgagtttgggtcagcagcccatttaattttctgatccaggaaaaatcttagaaactcataccttttatttttatccccttttattcttcatcaaaagcttaaaatagcttctaaatttggtgatcttatttttctgtcattaatttgaatgtgcattttgggtggttctag

SEQ ID NO: 57442 - DNA, 804 bp, Populus trichocarpa
  Intron number 1 from transcript POPTR_0009s06970.1 (locus POPTR_0009s06970) derived from phytozome v7.0 (chr-ID scaf fold_9; pos 6625763 to 6626566 reverse strand)
ctggagggaattcaggttctgtgtctgttgcaagggatcctgcttccatgttgctgcatgttcttgtaatgttttgcattttctttgtgttaataatgtattaggtttaattgcttaacctcttcaaataacttgtatacatatatatatatgaccagaaatattggttttatattaaataaataattgagaggttaattaatgatttctttgctagtttgaaccgtgttcttattatgatttgttatcatgttgtccgaaaattgagcctaatgcgtttgcagtcacgagttttgaatttgccaactgtatccattttcgagtaattttatggtgtccatctgtttcttttttttgcaaagtcgtcacggtaaaatatctaaaagggtatcacgagctattttatttccctgcacacgataaaattttccagctcaaatcttatcaatggaatcccggcttttttcatagtcgctcccgttggcatgatttctcaacatttgcaaaacaatgctgctaaaaaaattattttctttgagctggcctagttagtgatttagcaattgggattagtcaagcttaattctttgctaatcttttccaatcacttccggcaaattaagccaccatgacttcttccattgttaaatgtaactcagagacttgtagctgcgaaagaatgtgttgaatgccaaacaatcagctttgaaatttgcagtacaacatattttacttaactattttatggtgtttctgatgaatactacagacatccctagcctacattatttgcaagcagcggtg

SEQ ID NO: 57443 - DNA, 301 bp, Populus trichocarpa
  Intron number 1 from transcript POPTR_0001s33410.1 (locus POPTR_0001s33410) derived from phytozome v7.0 (chr-ID scaf fold_1; pos 31593663 to 31593963)
aacgcctctcctccttcaaaggttctaatctcgattttccattctttgttttttcccaatcgatctcttcttactttttattgctttgtctatttccatttgggcttcaactttagggttttgaccattttttatatttttgcaattgaatgcaagttgcatgacttcctttgatgttaatttctgtatatttttttcatgccgaatggtgatagattactcagcttaataatacttatgaattgtttttttattggaaatggtagatcgtggaggaattggtgaggacaaggctctgttg

SEQ ID NO: 57444 - DNA, 547 bp, Populus trichocarpa
  Intron number 1 from transcript POPTR_0012s00900.1 (locus POPTR_0012s00900) derived from phytozome v7.0 (chr-ID scaf fold_12; pos 584655 to 585201 reverse strand)
caggtttgatgcttaaatcttttctcttactacttactaattgctgtaatgattttggatttgtgtagtttgccttaattgcttgtattatgttgggtttcttgtagataaggatgaggccaagtaacagaaggtttttctaaatgcagtactatgaattaacagtccttgaattgatattgttgttatcttgagcttaagaacgagattttgttactagtgttaaactactgaaattcgaatgtgttttttgttttgatgtcttcacagtttaaacatgtcatttgttttgctttagtctctcaatctaatcaatttgcttgatttttccggatactcacaaaaatgtgaagtttgatgcttgtggtatcttcaactctatttcttagatttttgtaactgtatatgatatttgtgtagcttatattgtcattataggctttaactatgctagtcagagcaaaaacgctaattttcttcggatatgcactaacactgaactattttttcaggtgttttatttcttagattgggttaagtatctgct

SEQ ID NO: 57445 - DNA, 840 bp, Populus trichocarpa
  Intron number 2 from transcript POPTR_0012s00810.1 (locus POPTR_0012s00810) derived from phytozome v7.0 (chr-ID scaf fold_12; pos 470924 to 471763 reverse strand)
ggtttactacagatcgtgagttcttactcttgaaacaagtgctgcatttgtgtagtctttttatgcagtgacttgctagaatgtgtttttatgtaaggctatgtttgtttcctgaaaaataatttttaaaaaatcacttttcaaatttttatgtgtttgtttattattaggaaagttgatcaatggaaaacactttacagttaaaggaaaatttagcttggtttccagaaaagtgttttcctgaaaaatttgggcagaaaacactttccggaaattgtgaaaaatttagaaatgtcatattatttactgattatatcaaatttggtcctcaaacttttgatttctatatatattttgttttgaatatttatttttcaatttcatctcttaaaatttaatttttatattaactttggtccttatttttataattgttatttgtttttctcttatcatttttttattgaaattttttatgtatcaaatttgatcttcattcttttgattattacttattttatttgaaataatttatgaaatattaattattattattttaatttcttcatcttttatttttttattttttagattttatctttattattttgattattatttattttatggtgatactattcttaagagaacgcacaagagatgttacttgctgcaaccaactgaccttaagaaatcgatgaagcaatcctctggcggcttcctcaggcctttgaaatttggatacctgatcaaagagagagggctgagatcttgaaggctgttttgaagagaacgcacaagagatgttacttgctgcaaccaactgaccttaagaactcg

SEQ ID NO: 57446 - DNA, 626 bp, Populus trichocarpa
  Intron number 2 from transcript POPTR_0009s08310.1 (locus POPTR_0009s08310) derived from phytozome v7.0 (chr-ID scaf fold_9; pos 7645022 to 7645647)
ggagcttgactctgtggagcttgaattagacaaaggtaaaattcctatgtaatgacaacttatggtccctgttacaaaatcaaggctgccttaagtgttcttattgttgtacacttactatttagatttcttttgggtgaaacactgttagttttgttgccttttttctggtcatggagataattacaagtgttgagttcattcttctttaatgctaatatatttgctccacatttctagcaaccctacaatggtaacttttttaattgatctggaaggattattggtatatgcactctctgccatatgtttatttagtaatttctcatcctattttgggcatgttagttctgttatagttttggaaaatggcaacctcttatactcggtcctcgtcgtttgtcaacaagcagcaaaacaaatgacaattggagatgtcaaaacttgttgaaaaaccaaatgttgaaatgaaatttgataggattaaccttgtatttgcaaccttgatggcttttcactctcagtattgaaattaaatttgataggatatatcatggatcaaacagtgaatcctggtagctgcagcttacaacttggaatgcatgttgtaatgtttttccagtgtc

SEQ ID NO: 57447 - DNA, 669 bp, Populus trichocarpa
  Intron number 1 from transcript POPTR_0015s07460.1 (locus POPTR_0015s07460) derived from phytozome v7.0 (chr-ID scaf fold_15; pos 8696824 to 8697492 reverse strand)
ttcttcccgagactcgaaatcggcgttctgaaaaggtaatatagtaggagtcataataatatataaaaaacacttttctacttatctctagctatgtatcaagtctattttataactagtcgtcgtatactatatttaccactaaacgattgttacaaattgtagccaggagctggatgatgacgttcctattaatttgtctggtctcaaacaaaaattaaaccaagaaaaaataaagggatcggatgtgcatggtttacgagcgaaaaacaattctaataattggtagaattattgaagattgatcgattccatcatatatatatatatattcatcattttcctttaagatacataagcgtgagtggagtttctagcgcatgtgcttgctttaacttcttcctctacttatccatggaatacccacaaagacacatgaactttaaggataaacttccatgtaacacttctgatattcaagtactgcaatttcttggagtactgagctgcttacagatcttctgtatatgctagctatgacgttcactctactttctaactaatgttaagaccttctgtgtatgcttgtgcttaatttcctagatttcaacttaaaattggattttgtttttcttcgtaggtctcagctgccaaggccttgcaggagac

SEQ ID NO: 57448 - DNA, 694 bp, Populus trichocarpa
  Intron number 2 from transcript POPTR_0009s07840.1 (locus POPTR_0009s07840) derived from phytozome v7.0 (chr-ID scaf fold_9; pos 7276178 to 7276871 reverse strand)
tctcctcatacccaggtattcattttcttggaaaatttatacgattttgttaccattctgttatcagtagttttataatgtctaagtaatctaccattgataatatttatgatttcttgttaaatataaaatattgttgtcaaaggttgtgtgttattattgatgggattcgatcattgcgtgtttttttttttttttgaagagaaattctgcgcagtctctgctgatagagatgttttattgttaccacatgcgatcgggtatcaatgttagaccgtagaggcatatgtaatacattcactatcatactctgcatagcattactcttttttggaaaaaaatgatttcaagttaaaacctatttaaggaaaggaaaggaaggaaggaagaaacttatggtgtaagttgaatctctgccattctccatggagaactagttaggtaaataaagagctgcagatttattacctaaagttgcttctgctctatttcctctttgcttatgagccatgactcatttgttccccttcggaattgaaccctccatgacctgtcactcaagctcttattttgctcttctcatgtatgctcttttgatgtgcttgctcatatacaattctagtatgtgtttttcatggttgtaaatgttttgattacagctttcatcccatttttttggggagctccttgattc

SEQ ID NO: 57449 - DNA, 617 bp, Populus trichocarpa; identical to SEQ ID NO: 56590
  Intron number 2 from transcript POPTR_0004s10110.1 (locus POPTR_0004s10110) derived from phytozome v7.0 (chr-ID scaf fold_4; pos 8678771 to 8679387)

SEQ ID NO: 57450 - DNA, 399 bp, Populus trichocarpa
  Intron number 3 from transcript POPTR_0011s04980.1 (locus POPTR_0011s04980) derived from phytozome v7.0 (chr-ID scaf fold_11; pos 4945064 to 4945462 reverse strand)
tggtgaagacgtaattattggaaatcttgacactggtaatcttacttgtgtttgacttggaaaactgtattttattagtttcataattactacttctttgtttcatctttggacaagcgagcttcagctttgaatggtccataaagactgcctttaatgtattttattagctctagaacgttactatttaaatcctcgttgcggctgcccttaatgtattatggatgatgacacatcttcgaaatgtttcattaagctatccactgttcggcaactggttttgaatggtcctcctttcttttttaagcttcttattacttgtgtaacattttaattttctctcttgattaattcgtggttgattgataggtgtctggccggaatcagagagcttcgacg

SEQ ID NO: 57451 - DNA, 469 bp, Populus trichocarpa
  Intron number 3 from transcript POPTR_0011s07120.1 (locus POPTR_0011s07120) derived from phytozome v7.0 (chr-ID scaf fold_11; pos 7860430 to 7860898 reverse strand)
cctagcattgggaatttgattcacctaaggacaatgtgagctgctacttctttctttctcagagttcttcactcgattggttcatggatttttctgctattaattgtttgtttctgggtataagctaataattggatagtcttatggctattaaaaaattgctgttatgacgattattattaactggtttgactcaatttgccaggtaggaaatccaaataggaaatccaaataggaaatttgaaaatcttttctgtttgtaataatttatgagccttggtattgtaaaaccatgctattcgtttgagttcgttgatagtttatccagaatgatgttcttttttgttccggttacttgacataaatgcaaccgattgaagtcttgatattgtattttgcattagctatctaatgttcatgatctgtacttgcaggctattgcagaacaatcatttatctggtcccattc

SEQ ID NO: 57452 - DNA, 933 bp, Populus trichocarpa
  Intron number 2 from transcript POPTR_0012s12750.1 (locus POPTR_0012s12750) derived from phytozome v7.0 (chr-ID scaf fold_12; pos 13171596 to 13172528)
gtcccccatcatcacctctaggggactttgtgcaggtatctattccagaagagttgacattccctcaaagaaagatttgcccaaggaaaagcctgtatagtctcgaagtggaggtcattgaattcaccataaaggatgtaagggaatttcaaggaaaaattcaccataaaacataccctgtgattcttataaccccatcacttatctttctcaattttgattttttcattgtagactccggtaccgatatcgatgattacacttcgagtattccccgatgtaatacttttaatggcaccggtcaaggttttgtaatcaccacttccattttgtctaaccgttcttggtttagcctcgacagtttcaagggcaggttctattgtaaataataaatactatttcaaaaggttaatctagtctgacgaacatatcagatccaaaatacttgggtttggtgatcaacctaactcaaggtaatattagtttggcgaacgtgatagataataaataattggcttactaattcaatccagtgacttgtcaacttgaaatacaattgaagtcggtttattctgaaccaatttttttttttttttacaaaacaaacttttttcaggtacttgacattgttctaggggtttttttattaaaaaacaaatcatagttttttttaactcgttcaatctacaacttagatcttagatcttggaccgggttagatattttaactatgattatatatatatatatatatatatatatatatatatatatatataacttcaggcatgcttggagagacaccactttcaacggctatgatatccccaaaggatggcaggtatggcgataaccctattctttatatattagcaatggcattgcgtctgaagcttagttttaagaactactagcacacatttggacaataaa

SEQ ID NO: 57453 - DNA, 955 bp, Populus trichocarpa
  Intron number 3 from transcript POPTR_0009s13260.1 (locus POPTR_0009s13260) derived from phytozome v7.0 (chr-ID scaf fold_9; pos 10595805 to 10596759)
aggaccttttatcttccagtcatcctgagcaagtatatttgataaaaagttgatgtcttttgagttgtgcctgttatgattgtaatgttgtttgttttagtctatttcatgacaatatggcttcatcaacttattcacatggtggatgttgcttcattcttcacatcctactaaatttcaaatattatgttatgcgtttggccacatagaattgctgggctgatagggttgagttgcagtcagttgttttgcatcctttgatttgtgggaatacatacagacatgctaggaaatgagattaccgtggagtaggccaatagttctccctttatctaatttaaatgctatggtgcctgtttctgcagcgttgtgcctgattcttatatatatagtagttaccaggaactttacatagacgtggggcagttaattagcaagttgaaagtgggttatccctttactcaagcaaaagcaactagattgatttgcaatgcattcataccacgagcatggagaaaatgaaataagtttccagtatcagtatcagtattagtactatagaacatgatagggttgtcccttaggccactcttgaagctgttttcaatttaattaataaaatatggctatttacaaagaagattagtattgaattagttgtatatacatgtagatgtgagggtgtttagttttgggttattaccaaattgtttattctttagaaataatttcttggttctgtttcttaaacttgttatatttaactgaccagagtttctgattgataatatttttttgttagtcatcatatatacattcttttttaatgtgtacttttcagtgtctgcaaagggctttactggtgataaaatggatatctgcttctcttcttccaatcagctattgcatttatgacccttaacattagatgctgatttttggaatactttatagg

SEQ ID NO: 57454 - DNA, 953 bp, Populus trichocarpa
  Intron number 1 from transcript POPTR_0009s13810.1 (locus POPTR_0009s13810) derived from phytozome v7.0 (chr-ID scaf fold_9; pos 10935165 to 10936117)
aagttgacaaaaacaccctctttgacctcatcttggtaagactttctgtttccttttttcaagattttttttcttaaccttttgtttgtgaatatttatgattttgccattgtttgggtttctatttgttttttattggttaaagatcgtatctttttgctttttagggtttcattgtttagttttgtcaggggagctggtttgcaatattactagagactggtctttaggtttgttgtagttatatgatgttgtcatttgtggtatctgtttttttattggatccttgtggtatctgttagtgctaaatacgagtttgtaagttggggattatggttttttgacgggggggttgttttgttttggggttagggttttttttctgtattgtttttctggggattgtgctacgttgtgagagatttgttttaactcactgatttgtacccacactttggatttcttctcttgtctatttgcttcaactattatcttatgatgctcttacgcagggaaacatggaaagattatacggatcaagaaaatgatttgtagttttttttagttcttttagatgaacagtggaaacaaagtgaactgatgcattgatcgatagataactggcgcgttgtttgcaactgtaatgtggcaattttgcctgcttttggtagattgatttgtttgtgaaatatgatggatagtgagcttcttgtttgcttcctgttttatgttcatgcttcaacactttagtttgtgaaattctctgtatttgattaacgaacccagtagtgatcctattcagtgcttctcatattggattattatttgttaagctactttattttttgttttttgttcgtgactttgttatttagacactttatctgaattaacatggcaaagttatgttgatttcaggcagcgaactatctgaacatcaaggatttgctaga

SEQ ID NO: 57455 - DNA, 463 bp, Populus trichocarpa
  Intron number 1 from transcript POPTR_0011s01940.1 (locus POPTR_0011s01940) derived from phytozome v7.0 (chr-ID scaf fold_11; pos 1516803 to 1517265 reverse strand)
ggcttgtggaattcacagtcttggaaagttagtagcaacaaggggatgatgatcagctggagagaacagcaaatggggatggtaatgtcctcattgataattttcattaatttgcagagctctgattctggatattactttagttgtcttgaggtagtgtcatcttgcagaacatctgttgacttcgtactttttgatgctttatgtaatacttcctctgttcctcctttcgctttctttactctgactggttctttccttttgctttctctctgggttttctgctcaggatgaagacgatggtgatgaaggcgtgaggtgctgctggttgaatggaagctccctcctctgtgttttctcgttttcgtctctgtgttaggctcgtttgtcttccctggttctgtttctcatcactcgttccttctcaccccctgtattttttagtcttctccttcgttccccc

SEQ ID NO: 57456 - DNA, 752 bp, Populus trichocarpa
  Intron number 1 from transcript POPTR_0015s15090.1 (locus POPTR_0015s15090) derived from phytozome v7.0 (chr-ID scaf fold_15; pos 14456547 to 14457298)
ggggacagtggattgctatctttggtgttcatttttcttcagattttgcttgtgccgtaagtatattgcaggttagggtttgatgtaaattttttcccctcacaaatcatacaatttatgttgatattgcacttaaagctggttagtgttttgattctttctcattagtggagtaaagaagcaaaccatcccaaccccatagtgatataaatgatcttacaagctactttgttgtgactaagatggtaaaaatgtcttacaaagctagtatgcgaaaaaaatgtttaaaattgaatgagtgtgaagtttgataattatttaaaatagcagatggaccttttaaccttttaaaactgaaaggttaggttttcagaggttctatcatgactttagaacctggtgttgttgtcttatgttttcttattgttgttaatccatctgcatttattatacagattgttttttggtggcttttatataaattagcagagaactcactcagtttgtagttccaatgtgagaaaccatgaaatgctgaacagatattgtagtgctaggcaagggtcaattttatgaagacaggttcttattcaaccatgaggcattgtgatcattcatattacctgaaatgcctttatacctcagtgtggagcaactagttttatggcatgcagttatcttactccacaggtctcaagtatggacaaacaagtctttaaacactctcatatttaatgcagctatccgaggct

SEQ ID NO: 57457 - DNA, 692 bp, Populus trichocarpa
  Intron number 1 from transcript POPTR_0015s15890.1 (locus POPTR_0015s15890) derived from phytozome v7.0 (chr-ID scaf fold_15; pos 15066808 to 15067499)
ctactcaacgatcgactttacaatcatttttttatgttttctgatttctattttttgaataagaaaaggttgcgtagattaatcaaatatatatctgccaattattcatgctgagttccaaaattaaaactattttgaaggaggtgaaagaactgaaaaggatggtagcatataaagacgaagagcttgagcgtaaagagcgagagcttgagcagttgaggtcttgtttagttgcatcaactccatagcataggattcatgctctttaaggaggttcaccagcatgcacaaactgatgatcaagggattattcaatctttatcaaattaataataagatgagtttagtcttcaaataagagtactatgttgtatccgtagtcagaaaaaccatgagcaaaacatttgtgttcatcaattgaagaataaaaatactaatttattaatattataattgcttctgaaaatgagaattcttttaatatggtgtggcccacgatgggctgaccattactctagtgttattaaaattagaatcagaatattatatttatatatataaaaaaaaatcaatacaaactgagcctgatctggttgtatgcttttttatgccttgttttctctaactggacattgatctggttgactgatgaaggagggaacgccctgactagtgctctttattctctgata

SEQ ID NO: 57458 - DNA, 581 bp, Populus trichocarpa
  Intron number 3 from transcript POPTR_0011s07510.1 (locus POPTR_0011s07510) derived from phytozome v7.0 (chr-ID scaf fold_11; pos 8347869 to 8348449)
ttacctcttgatccccaagattccaaatcccagtaataatatgtcttgtgaattttgttgatttcttaatttaaatatatagcattaaatgcatttcaatttaaagcacttctgcttttaagtcataatattcatcatactaatcgcttccaaaatgtgtttcttcgcataacttggatttacactaatttatccctatgtgtttgtgcatttcaacgttttcttggttggttttcatatttgacttttcccctcatgaaatcagtgtaaacaattgtaggaaatttgagaaaaaaggaaaagagaaaggtgttaaaagtgctggaccggttgtctttgaacataaaatattagagaaaaagtttgatgtgcaaaaacttgatggtccagtaatgttgtattttttgcttaggtatattttgttaatgtaaaaagtgtcttgaaattccttaaattactgtgttgtttactattaaattcagttttataggttctatcctgaatttctattgttttacttgctaggtatatatatggtgcaggtattgaataacagtgtgctgagttggaatttggcaggt

SEQ ID NO: 57459 - DNA, 353 bp, Populus trichocarpa
  Intron number 1 from transcript POPTR_0014s02890.1 (locus POPTR_0014s02890) derived from phytozome v7.0 (chr-ID scaf fold_14; pos 2375712 to 2376064)
aattacttgcaaggattgcaagatcgtaaggacaggtatggagtgtggattcaatcctttgattttctttttctttttctctgctcagatttgccaagaatttttaaagagatccaaaatttaatgcatgtggtcgtgtattaatgcagggtgcgatttaattattgttttaattacttgttgaatattattttttagcaattaattgcttctatttatcctttgagttttagtaagtatttgattaattgctaagtaaatggatacttttttttttttgaggtgtgtaaagtgttacagttatttctgtttgtttaggcgacgagctcttcaaaggagagcacaagaagctc

SEQ ID NO: 57460 - DNA, 364 bp, Populus trichocarpa
  Intron number 1 from transcript POPTR_0014s09640.2 (locus POPTR_0014s09640) derived from phytozome v7.0 (chr-ID scaf fold_14; pos 7194905 to 7195268)
gaaaggttgttctttgaaccatgcatgaaaccactgaactttttctttctacttttttgcttatgcgagaacatataaaggaaagggaaaaggcatcatttgttattatcgtttgttcttttaaggcttttttcttttcttttatggagtatattaatttcctgtttcatgtaattctgcagacaaaaaccctagctattctctccttttctttttctttttgatctactgattgttatctcatcgaccatcttttaattaggttccaagatttcatggcccttatttctttgtactctatagttatagatctccttttgttgtctgactctagggtttgcaggattttaaaccggtaaagccc

SEQ ID NO: 57461 - DNA, 403 bp, Populus trichocarpa
  Intron number 1 from transcript POPTR_0004s15266.1 (locus POPTR_0004s15266) derived from phytozome v7.0 (chr-ID scaf fold_4; pos 15933039 to 15933441 reverse strand)
ttcgtggttattacttggcaaaaacaattgataaagtcaagatttgaaagaagactggttgcacattaatggctgatggatggacagatcaaaagaggaggactttaattaacttcttagtatattgtcctaaaggaacagttttttcgaaatctgtggatgtatcagatgtctcaaagactgctagattgttgcattgattatttaaagaggttgttttgtatattggggtagaaaacattgtgcatgtgctgattaataatgcttctaattatgttgctgctggccaagttattgatggaaaaatttccttcaatattttggtctctttgtgctgctcattgcatcaacctcatactctaggacattggtaaattgtagtcagtttgttctattattgagc

SEQ ID NO: 57462 - DNA, 957 bp, Populus trichocarpa
  Intron number 1 from transcript POPTR_0011s09910.1 (locus POPTR_0011s09910) derived from phytozome v7.0 (chr-ID scaf fold_11; pos 12344575 to 12345531)
aagtactgcttcgcctttatatctatagggtaagcactatttatggagttaatgttctctagttgtaactgggtggtttttctttgtatatgcaagttatgtttaatgagataggaaatgaatttctttttggaactgataagttatatactttgatggctttaaatctgcataataagaaattatagttttgtgcccaacatagctaatttagtattatcttatactactaagtcaacatgccatatttctgaagccatttcatagcaagtaaatgaagcctgcaaaaccagctgatttcggaaaatgacattaaagaagaaaacaatttcaataaaaagaaaagaaacagagagaaaattggaaagtttaaaatcccattaataaacaatttctcctattgcaaactttatataattgagtgtgttgttagctcattcctcttttttatttatccgtggtttcttttttcaagttgtggatattgactgcttgggacagaggtttaatcaagttgtgtatgaatacaaatgcaagttgtctggattctgatactagaaatcataccaattatgttttttttttttatatatatatatatatatatatatcttgttccattcttttaaaaacaacatttttcctttgcaaggaagttttctcgagtctcagataatttggtgcttgaaggatatctacagtggctgttcctacttaaatatttgccaattgtgggtcacctatattatttagataggtagtttatgtctttaaacatgatagaacaagctgggctgaactttgtgtgaccaagttaagatttaaatttttcttccaaaagattggacctacattttattttggaagcaaaactggactttgcttttcagctgaagttattaaatttttaatttgttggcatttgattacttcttcgtagtgtgaaaaatactggat

SEQ ID NO: 57463 - DNA, 1016 bp, Populus trichocarpa
  Intron number 1 from transcript POPTR_0015s01530.1 (locus POPTR_0015s01530) derived from phytozome v7.0 (chr-ID scaf fold_15; pos 956069 to 957084)
tacccaccaatccatcaggtttgttctttgacgtgtttaatttgttatgaaaatgtaaactttgcggtttgagttcatctggtcttgtttgcttgctttcttttttgatgtttttgttaattttgattggtgtatgatggatttcggtggatttgcataattgagtttaaggacattggtgatttcacgtggatggtgatgatgtgttgttttagagttgatggttattgaattgaatatgtttttggactgttttagtgagaaaacaattttggaatttttggtgaggtgatttggatggattagtgctgaatttgagtgcatgtgaggaggtttgtctagactaaaactgtgtgatggctttgtgaggtttgctaggcgatgatcttctcatggttattttcgagcattcctgaagctgagtcattacaatccatgagatccttgatccatttttcagaagataatgcttttgcctggagtgacatcttaattttcctatgttaggattgttgctttcttacgtcaattaattgttcgtatcaatggcaacataagctgtcaagtactatatctgctttggaattgatgagaatttcgtatttggttatattgtctggagatcacacgacacttcttttttgacttcatatgtgattctttcttgttgagggtttcttttcttgaattagacattgatttgttgaagcagtgatggctcacctgtgcttctgttgctaaactgcaagttaagggcgtgatagatctatttcgctgttatatagtttaagtatccagctttatctttccctgctgcattttcatgatgacctgtcatcttcttatttagttcagcctgttcacttcttagccttgttcagttttcttgcctctatactgaactttctcttgttaatcttggaggggaatgctaatatagctgtgtttgctaaactgtgcttacaaacccacattaggaaatggattttgaatgtcacttcccttgcagtgtcaca

SEQ ID NO: 57464 - DNA, 720 bp, Populus trichocarpa
  Intron number 3 from transcript POPTR_0015s01650.2 (locus POPTR_0015s01650) derived from phytozome v7.0 (chr-ID scaf fold_15; pos 1059546 to 1060265)
aggagagcatacagcgaaggagacataaaggttagatcaaatccattatggtacttctgtgtgtatttgattataggcctttattgcacttttgaacgattttctcttctgcttagatcctccttgtatgtggcagaaaacatagacctttacctgaaaagaatcatatcttggcagttaactctgcacaaggattctctgtgtgcttgtggtgcttttttattgtttctgaaaaaatgtagtcataagttctgatattgttgcaagtcaagccactgacatgaatcacttggaactcccagcttttctttattagtattgttccataatgttgctgctcctgttagcccttccagttggacagataactgacacctttctcttggtgcctttatcaagaattcaatcaatttttttcccacgtaaaatggaactgtagatgaagaacgacaatatccactacttccaaagcagaatctgttgcttttattttcagttttaattctattttcctttatcatttctctcggataatccaccagattcgagtggaacatttctatgcaattcagcaccaagcatgaatatgctctataatgaagtctacggactgagaattgtttagatgcttctggtcatttgcacaggatggggctgagtcattgatactgagtttttatgacagacacttggtaacggtaatccgagcctcatacattc

SEQ ID NO: 57465 - DNA, 659 bp, Populus trichocarpa
  Intron number 1 from transcript POPTR_0015s04210.1 (locus POPTR_0015s04210) derived from phytozome v7.0 (chr-ID scaf fold_15; pos 4244739 to 4245397 reverse strand)
actgtgggcctgtggctggtctacgtgtcaagtgcattatttagtttgaatctttctccttattgaaaaataaaaaataaataaataaacattaaaatataaacaacagaaagggtggtgggcctggtggccaatgggctttgaggaagctagctaacagaagtcagctgacaccttcataggccgaaaaacgaaaacacaataaaaaaaatcgttcggcattattactaaacatggcaagaacctctatataagtgatagaattcgtagagtactccacactcggagatcttttaaccagaaagataataagaataagcaatcaataatggcttccactgcttctccaatggccagccaactcaggagcagctttgcctcttcgtcaactaagaggcttgctgttcctaaacacataaatattggagctacatttagaatctcacccgctaagagaagcttcattatcaaagctgttcaggtaaagattctttttcttgtgagttctttacattaatgtataggcttcttagattttgttattattattattatattcaaacaaatagtctgatgattcaactaatctgcatgttatatgaagccttgttcctaaagcaagatatatatataaatgtttgtgatagataccgagagag

SEQ ID NO: 57466 - DNA, 352 bp, Populus trichocarpa
  Intron number 3 from transcript POPTR_0011s02000.1 (locus POPTR_0011s02000) derived from phytozome v7.0 (chr-ID scaf fold_11; pos 1672712 to 1673063 reverse strand)
ctgattatatctatccttacagaaaccaggtacagttgtggttttttatgtttttatttgaatgtgggattgttttgagttagtaagtaaggttgttgatttttgtggtcgaatttctttgggtgtgtgcatggataattgttatatgaagaggagtagttggtttagatgttgaattcttaactaggttgtaatgtttggtagattaaatgatcaatgcaatttgaagggtgtactatgtgaaagttatcttaaacattgttttctttagttattgaatgtgcatatgtttcttaagcggaacgtgatttctgatttggttgttacttctttttgttagggtggtttcgat

SEQ ID NO: 57467 - DNA, 839 bp, Populus trichocarpa
  Intron number 2 from transcript POPTR_0004s21610.1 (locus POPTR_0004s21610) derived from phytozome v7.0 (chr-ID scaf fold_4; pos 20649794 to 20650632 reverse strand)
gcaggtattcaacccaacttgagaaagaactagtcattggtagactgttttatagaaaatcatcatttaattttcacacgattgtgcaataacttgaaatgtcaggatttctgatcatttggagagtaggagacttttgatggttaataatggtatttcaggaagtgaaattggatcagctcaaatgttctttatgatttttctcttatagttgctgggaagaggctaggctctagaggattttctctgtttgttaggcatatatattatgcttgacctatagctttgaaacaatgcttctgtggatccaaatgtttttgtggttctactctagatgcacatttatggatatagcacttgaaaattgagtggccatttttgagaagtcaacctcaggttggtgtgcaaatttcaattggataggtttcttccattgagcttcaattttacaggtggtggtggaggttcctcttattttacaatcagagtaccttctcttttcttggaggagaaagcatgaaaactaatgaaaaaatcaattagtaactgtgtacaatcaaactgcagagtacattgagatagttctcatgtaatcattgtcttttcatctgatttttgacaatttcattaaatcaaagatcacaccttcaacctcatgctctttaggttatagagaatggggtgatggtaataactggtaaaaaagcaaacactatgttgtctcctattttctgatcaacttagtttatcgctagtgcattattctaaaaatgtacttcctaatttcttcatttgttggtgcaggcagaggtaaatttcttaggaaggctttctcatcc

SEQ ID NO: 57468 - DNA, 579 bp, Populus trichocarpa
  Intron number 1 from transcript POPTR_0004s21610.1 (locus POPTR_0004s21610) derived from phytozome v7.0 (chr-ID scaf fold_4; pos 20650944 to 20651522 reverse strand)
tactacaccatcaaccactggtcaactaagctcaggtaaaacaaaaccctcttacctttatgtattttttttttcttttcattaaatgtttaatctagttaatccaatttgtaatctgggttttgctgtttttgttctaacttttaaggaatagaatttgatgtgattcagtgtcaagtttgtttagtaccaagacaactggttttctctttccccttttgcttttgagctagtttgatatgtcaatcctttcgctaggagattgccctgatgctctacagtttcggtgtggagtccttttgtattgtatttggaatttgtttctttcattccgaaacaaggctggactttatctcgacttctgtctgatcaatagtgcaaattcttttttccttaaagttgctaacttttttcttttggatttccacaaatttgttcattttaattgaaatagaaaatcatttgatgtgtttctaactttcctaaaacttgttgttttttacttccttaaatatgttacctaacttcaattttgtaactgcagctgggatatctcatacaactagcaataccacttct

SEQ ID NO: 57469 - DNA, 360 bp, Populus trichocarpa
  Intron number 1 from transcript POPTR_0015s00280.1 (locus POPTR_0015s00280) derived from phytozome v7.0 (chr-ID scaf fold_15; pos 133336 to 133695)
cccaagcccacaatcttctccatctaaccaattaataccatcatcatcgtcaacatccccttttctcttcttctttttcttgtcttcttggctcctcaacaagcatatatgtatctgggagcgggtagatatgtttcttgcctgtacctttgtatgttgattaggtctctctctagatgattgaagactccctccctttcccaattccaggagagtcaataattttgtacattgttttctctttttcctttttttctttgttctagaaaagagtgaatgaaatttgagtattcgccctgccttgattagtttcttctttttctagttttatttcagcagtgttttctcctgtatcgccgt

SEQ ID NO: 57470 - DNA, 264 bp, Populus trichocarpa
  Intron number 1 from transcript POPTR_0004s23430.1 (locus POPTR_0004s23430) derived from phytozome v7.0 (chr-ID scaf fold_4; pos 22153666 to 22153929 reverse strand)
atcagaagggagaagaggctgttgaacattgtcaggtaactgtcaaacaatcaatatttttttttttaaaaggaaatcgaaaatcgaaaacccataaacccaaaatcactaattaatatactttgagtaaaaagcactacttattatattaataaatatttgtttcatcaatcaatcgaagaacatttttttttttgtttttacttccacttggagtctgaaatgcaagaagtttcctctctcctgaagcatttccaggttagt

SEQ ID NO: 57471 - DNA, 511 bp, Populus trichocarpa
  Intron number 1 from transcript POPTR_0004s20190.1 (locus POPTR_0004s20190) derived from phytozome v7.0 (chr-ID scaf fold_4; pos 19818432 to 19818942 reverse strand)
tgacgcccgcggatttcgccaggatccaacaacaggttcgtttgtttttgttgttctaaggataattttgatgtgggtttgtttttatttgaatggattgacgtgtagtttagttcaattttgaggggaactgctttttctttatgaattttgttttggtgattgttttagcatggaaagcatgaatcttggctgttaattttgtgtttgtgattttttgttgattttaaattatgggttttatttgtttttctttgctttctttgaatcagtgaagattttagtctttggatactgcaagtttaattctttgattcggggcattgacttagatggaaaacaactgttcattaatgggtcattaagcactcaagatgaatagattgtagtgctgcggttctgtttaaacatataacctgaactgagtttgtgtaatagatcactagaaactggttgccagtttatctggtgttgtttacatctctggtcgtattggttttgattgcaggta

SEQ ID NO: 57472 - DNA, 520 bp, Populus trichocarpa; identical to SEQ ID NO: 57215
  Intron number 1 from transcript POPTR_0011s17120.2 (locus POPTR_0011s17120) derived from phytozome v7.0 (chr-ID scaf fold_11; pos 18727379 to 18727898)

SEQ ID NO: 57473 - DNA, 695 bp, Populus trichocarpa
  Intron number 1 from transcript POPTR_0015s04890.1 (locus POPTR_0015s04890) derived from phytozome v7.0 (chr-ID scaf fold_15; pos 5122490 to 5123184 reverse strand)
tctagctaggaagtaataggagctaaagatttcaggttattatgaaaactgctggataatagtttctctcgcttttcctgttatatcttgctgggtgtcttgtgtttacttgtcttcaatcaccgattcttgtagggcttgtaactctttgtactgtgatttctcaaattgactcctgcaagttctatgctcgtattggagaatgaagttatgttatgctgagtatcatcttgtttgtttttgtcccaaaagtacagaattgaattgataatttaaggtttttattgataactgcatgaatagtggcggggttatggatacccaatggatgtccgaaacctgatcgggttcaggtttgggtatcaaaaatccatacccgtcgggtttccggttgggtatggatagtaattttgggttcggattcgggtatggatggtaacaaaaccgatgcatggctacccattgccatccctaacaatttattacattgaagttctgttggtgtgagttttcagctgagttggggagtttgtcactgttttctgaatgttggttgcgacatttatgatgttctaagaccaaaattttgtcttatcaacagaacccctgacaaaaactttctgctttgttttctctgcaaccaaactgactatttgtactgagttcttgttcactgtcacagttctcaaacagag

SEQ ID NO: 57474 - DNA, 688 bp, Populus trichocarpa
  Intron number 1 from transcript POPTR_0014s18590.1 (locus POPTR_0014s18590) derived from phytozome v7.0 (chr-ID scaf fold_14; pos 15924878 to 15925565)
gaatctccttacctttcttttctggcccattcctggtcagctctcttgtctcgtctctctgtctcttctcctcgcatcatttcctatttctcccttttttaactgtctgcgcttaaaagttctcgtgccatctttttctttcgctgtactttccaattagtaggtttggtgttagtgttttttaaggtttgtgtgtatgttatttcgtcgaataatcaatttgaactttcgcttattggtaatgaaaccctggtgctgatttttagtacgaggtaaaggtatctcggggttgttttttttatttttttctagtaacaggacatgtgggtgcatggaaccagcttgaaggtttttatttatttttaatccaattcaagattttgagtttctgggaaccaataaatgtttcagtttttctctctttctttaccttctctgttttttttcttaaaaaaataaaattaaagcttctgatttttggggactgacgattatttcctttaagtttctggacttttggagtatttggtaaatgaaatctttggttgcttgtgttaaggtcgtcaaggatagttggattgcaacagctagcgtataattaattagctgtttttatgaagctgaacactcacggatacccactcgtttctcagggaagtaggattattcgatcactatctgaccacat

SEQ ID NO: 57475 - DNA, 673 bp, Populus trichocarpa
  Intron number 1 from transcript POPTR_0012s05300.1 (locus POPTR_0012s05300) derived from phytozome v7.0 (chr-ID scaf fold_12; pos 4890143 to 4890815 reverse strand)
cctcaacccaatatccaaattaaaaacattacctagtacatagatggaaaagtcaaattatctttccatcgacactctacaagttccagattctcagaaggatcttcctcttccagtacaatagatctaggaagaatttccaaaatcccttctgttatcaatatcctttatcacgcaaaccctcctagaaaatctacatctgatatcccttctactagtttctaaaatgcagactacactacaaatataccaaaacctgtttatacagaccttgagcaaccatctcctccaacttcaccaaccttttcagctgttactgaaaacatccaaaacgagctgaatgttttgacttcagaaaagcattttgtcataaacaaaactcttttcataagagatttttatggtgatcataatattgaaaaacgaacttggttttttcaacatttcctccaacaaagaactgatatccaaaaacaattttatgcttacattgaaacccatgaagtataaattctgttctttaattggtttgaatttcattatgtaccagtacaacatattacatatccatttgcatccattaaacatgcatgtcctattacaacctgttccaaaactcctacatggaccctcaccagtggaccttcagttgagtctgaccatccacctttac

SEQ ID NO: 57476 - DNA, 781 bp, Populus trichocarpa
  Intron number 1 from transcript POPTR_0004s05890.1 (locus POPTR_0004s05890) derived from phytozome v7.0 (chr-ID scaf fold_4; pos 4624640 to 4625420 reverse strand)
cggagctcaacactttactcgctactcttaatacggtacgccatcattgcatgtaaaacttgtaatcaatggggattaatgtaagcatatgcaaggaataatttgtgagggatgcgttcgtggtatttagccatggttgattttgatttttttttttaagatttgataattaatttgtaagcatatgcaaggaataattcttgtaatcaatagattttaccttcttttttagcaagaagggcatccaggttgaattttgctttagaagttaatatgtggttgtaggcgtaggtagcttaactgtggatataattgcagtggattgcgggtatagttttgaaatccgatccagtcattgatccggttaagtgattggatcacaggtcagataggttgacccggataaaaaaaaaaacctataaaaaaacagatggtgttgtcctggtgggctagttctctaacgtctttctcaatgaaaatgccagcctgtgagtggctttcatcacttcaagaactcgtcatgtcaacctaggtgaagttaccataagggcctaaggctcctcctcttgttccagtccttccctcttttgttaaattgttattagctacatagttgggggctattattaagatttagccagcaatatcattcactcttgtcagaagtagagttctttggaattctttcttcgttcttgaggccaacaaacaaactccaaagacaaaccagaacctacctaaaaaattcacttaaaagataaccacaagaccctacaagata

SEQ ID NO: 57477 - DNA, 968 bp, Populus trichocarpa
  Intron number 1 from transcript POPTR_0011s15320.1 (locus POPTR_0011s15320) derived from phytozome v7.0 (chr-ID scaf fold_11; pos 17432410 to 17433377)
tcccaagctcttatcactgggccaccacctaagtaaacacacttgtagtacatacacgatttgggttttaatttattgtattgctaattaaattgagaaatatttttccaattggaaaatatttctggctccaacttggatatagagcaagctgcttcaaaatcatcaatgctgaaattctgtattatgttaagagcgaatggtcaaatcatgaaggatgctggcaagtcattctagaatggcacagtactaaagcagcatttaaagatcctgagaatgtggacaacataatttatttacgtgttgcttctagatgaatgggcatgctttatctttttcaaaaagatgctcaaaacttttcttttctttttcttttttgatggtgatgatcttcaaaacgaatcccaagtaatagttagactgtttactgagtacttggacgagcaccaccactgattatgaacataattgagactggattctatttaaataatttaagtctagtgatagattatttatttttaattttatatattaattttgtatcatttatttattttatataagatcttggtggtttctacccctctctcacttgtaatgtaattattatttttttgagatttatcaagtgatttcagcttccaattcttcattgaaattttaaaattttatttaattttgattttaattagctaggtaaactgtttttttttccctcctgccccttttctgcaattagacattgattcttcgttctgccttcctttttttttttcttaacgatttaccttctgttttgggaaaaaagaattaggactgtttactgggtcctttcaccggcagacaacgccactgattgtgaccattgacaagtttaactttccaccacacagctacataattttttcatataaatagggaatcatacagctgcaaaccaacagactcagatcatcaaatataca

SEQ ID NO: 57478 - DNA, 856 bp, Populus trichocarpa
  Intron number 3 from transcript POPTR_0001s34770.1 (locus POPTR_0001s34770) derived from phytozome v7.0 (chr-ID scaf fold_1; pos 33011202 to 33012057)
aggctaattcgcattactttgccataatcgagcaggtatatacttcgcagcgctcctcctttacttttatgcatttgtgtggttacattaatgaattatgtgttcagaatttgttaaacaactatgattgaactttggattcttatctctgtattcaactgctgtttaagcatgtctttgtttttttgttgaagttgacaagttgaaagcgatgtgtacagtttacaatccatcttcccacagcgtatagtgggaaaatgtagagggtttgttttggtcctacgctcgatctttttcaggagaaaaataaatcatttttctatctctagaatggaaaaataatgcatcagttgtgtcttgtatttgctaatatggcgaggtagtgtgatgtggaggaactcaaaattggcttgtattttccaagtgacatgctacaaatggaagatcaatgctaaactgaagagtattttcaagcttaccatttctaggagttcctgtatgcaaaaatttggtttttatttttaagtcacacacacagacaaatgggagatcaatgctgaactagtgagtagattcaagcttgccttttttagttgttcctggtgtgcagttaattttccttgatgcaatctcttagattgttttgtttttgttcactataagatataatatttggcatggtataatctattttctcagttagtgacctggtgcatttggttttactcacaatctgatattggtaaacagaagcattgttgtgtgatgaaaattatgcctaggattttattttttccagtggtaattatctgaatgaagctttttggaatttatgtttcagattacagaagggaat

SEQ ID NO: 57479 - DNA, 410 bp, Populus trichocarpa
  Intron number 2 from transcript POPTR_0004s08320.1 (locus POPTR_0004s08320) derived from phytozome v7.0 (chr-ID scaf fold_4; pos 6838061 to 6838470)
agtgagtatatgtttttttcttttgccaatctcttgccttcactgcgtttacgtgtgaatatctggtttactattggattcactgcctaacaagagtatattgtttctttttttttctgagatcgactatcagtgcgccatagtataggctcaaatgtgtctgagttttagcaaaattatgtagcagttatatacaaaaagaagatgcatgcttataatacactaattttgtaaatgtagaatgatatatgcttcttttctgtttgagatctgtaattttcagatatgaaagtgaaatagttgactaaatttatgtgtgtcccataagttgtcatttttttcaattttctgattatcttttatccttttttctgtgaaaatcgatgggaacttggatcttttagtaattt

SEQ ID NO: 57480 - DNA, 959 bp, Populus trichocarpa
  Intron number 2 from transcript POPTR_0014s04650.1 (locus POPTR_0014s04650) derived from phytozome v7.0 (chr-ID scaf fold_14; pos 3549605 to 3550563 reverse strand)
gaacctggagtgactacaaaagtaagcattcaagccccttttccctctcccctctttcttagtttcgctttgagttggttttagttttatttttttgaattatgtatgtgaattcatgttggggtttcaatcacagcagaaaataattttggtattttccccttaatatcagaacttgatgattggatgttgagagtttgagtttaagttgcttaagaattggagtattattgcatggaaaaagcatgttgaatgattttagccacttaattttttctttttatcactgatatatgaaccaatgggctttactggaagatggattttgaattttgctggctcggacgaaccaaaagcaaggtgaccctgcagttttgtttccagactcgtgggtgacaaccgaatgatagttattttcttttttaataaatttatgagttttcactattggaattagcttggaacttgttatactaatgataaatggctatttacagtcttccttggagcaactggaaaccaaatattttattctcttctaacttgtttttgccctgagtttactgaattagtgttgtacttgggatagttttatttattgcgcttctcctcctccttttgctagttcttgcttttgttatgcctcgtgataggcatctccatggacatttacatgagaaatctagttcttaactctaattaggcaccttgaaatttgattcttgaagaaccctgacctcactcagctgccgtggagtttttctaatagagtgcatgaatggaatagaaattctgtgttatcattactactatatatgatggcactgttagggactgcgcttttcttgtattctggctgtattgtgttaataacacagttggttgtccttgattttactttttcccctctttacttttgagactattttgaaatgggaaaaattgtttatttacaggta

SEQ ID NO: 57481 - DNA, 825 bp, Populus trichocarpa
  Intron number 4 from transcript POPTR_0004s16820.1 (locus POPTR_0004s16820) derived from phytozome v7.0 (chr-ID scaf fold_4; pos 17163004 to 17163828 reverse strand)
catgtaagattagttcctccctgtaactttaccttggtgcagtttttgttaggagatttactccaaatctcccaggatagtaaaagctgattatgattgtagttatgaatcattgaaattgtcaagattacccttatttaaattcacaagttattaattaagctatagtgattgtttatggtagtacatgctaagtgctttgctgatattttgttgcatcagaagagcatttattgttggagaagtatatggcgatccattttattgatgactacttttttgtatcctgcaactcctcactctactagatcttactttgttatttgcaaaagctataaccatatagaactctcaaagtgcaatgatttgatgatctgctgaggagtatgactgaggaaactgaaaggtgttggtcattttaaagttccctttgtatggaatacaaatactctcagttgttgcttccgcaagttctcccatggtttccctctttctcttatagccatatctataacttcatttgatgctcaaacatgtttatccatcttgttatatctaggaattaggatcacattactgaagtattttcagagacatggcagtttcatcctgcactgtaatttatcactgaagttgattcttatgttatgtattatttggcacatgtgtaaacatgtctatctttatgttttccttttcttctggctagctttacttgttttagttcgttattgctaacaagttttcagctctgttgtttttgacttgtttttcataatcataaatgcagggagaccaaaattctcctggtattataccacttgc

SEQ ID NO: 57482 - DNA, 1021 bp, Populus trichocarpa
  Intron number 1 from transcript POPTR_0001s17540.1 (locus POPTR_0001s17540) derived from phytozome v7.0 (chr-ID scaf fold_1; pos 14326984 to 14328004)
gtctataccgtgccgttgatacttatctcaaagtaagtagtcaaaagtagtaattaatattgagtgaaattttcatttttttctccaattaacgcaaatgtgcactctgcttgtactcttagcaaggtcagtagtggttggataaaaaaaaggtaactctgtttcactagttccaattggtaaacggataatctcagttggtaagcaggctgaggtcttggtagagtttcgtggttcatgctgctgaggggcgccgtagccaggattaaattttagggtgcgaagactagtataatttcttttgtacaatttacttaaaaacaaaaaatcttcgcagtatgaattttaaggtcaaggtatttagaatgattagttgtgatatgaatgtacattggaagcattaattcaaatgttaaaatgtttagtttattacatgcaaacgagtgtaaaaaagtagtaaataaagaaatgcttgaaaatagtaaacttaaatcataacaattagaaaataaaaagttcatatgagtaccgatcgatctggtggccttatatgtggctgcttttgtgtggggcttcatcagaataattaggtggtggggtggggtggctgcagggtaggagccacttgacattatcacttcccttcacttagtagtctagattttacctgatactggcctttctccgatgtggtctgcagcacgtgaaaaggtaatgtcagtgttgaattatgtagggttttgttttgtattggcaatttggcacctttctttaagcatcacgagatcaatatgaacagcaccaatcaatacagtaacccctcgattcactgttataaatgatgaattagttatcgcatacagttttagtctagaccaataaccttagcatagtttttccttggatcttcaatgttctgtggctcatgaaatattgctttagtatttttgaagacgatagataaattaatgctctcttctgatcaggcacaccctggactgccaaagcaagaaagaaaggc

SEQ ID NO: 57483 - DNA, 847 bp, Populus trichocarpa
  Intron number 2 from transcript POPTR_0015s04870.2 (locus POPTR_0015s04870) derived from phytozome v7.0 (chr-ID scaf fold_15; pos 5084330 to 5085176 reverse strand)
ggtgctcgatttcctccagagacaaaatcggtgaggcatggtttcttgactacacttttcacttcttatttatgcagttttggttttttgcctgctgttgcttctgggtttgtaaagaacgcacaaatttgtgtacgagtgattgtctcattggatttgaacttaccttgttgtcactggaaatgagctataacttcatttcttgcagttgtatattgctgaaatactttaaagaatggttttcgatactaatttacatttccttatgatcatttcttgaaatggaaacaaatgaggaaaaagagagagaaaagagtcaaccttgaaccgaatttatacaattaattagtgttattacataaaactctctttgttgataaaagtttgagctctatttgataatatatggagttattaattttttttccattaaaatccttcaaagaggaaaagatgaaggattttgtaatcgaaacatttgatttatctcgttcttatgatttttactctaaaatatcacgctgtttttcatttcaaaaaagaatgttttcttctctagtaattttttctatactgtttattttactggcagaaatattgctctcgagttttggactctgacctagtggattagaaagttataacttgcttggaacaagagagagatcgagtccctcatttttccatgtcaagaattcttttcaataacgaccattgagcctaactggttctctttaaaaaaaaacaaattataaaatggtttgtagcatgggaggtaattggctttatgacaattgttaggtgatgacgacagggtgctcatatgcaggagaaaggtgatattgac

SEQ ID NO: 57484 - DNA, 565 bp, Populus trichocarpa
  Intron number 2 from transcript POPTR_0014s02940.1 (locus POPTR_0014s02940) derived from phytozome v7.0 (chr-ID scaf fold_14; pos 2420936 to 2421500)
tcctccatcctctcagtccgttgcaccacaaggtagtttataaatatttttttcattttaaccgtcacttcttcgttaatctgttctcatatgtttttttttcattttaaccgtcacttcttcgttaatctgttctcatatgttcttactataaggtacaaaatttatctctaacacattctagttacctaaattctagccgctagataggcttattaggctcgaactgtcaggtcaattcggtaactcgccgatcaagacctgcccaagtcgggttagtgaaataaccctttttttccccaataaaacaaaaccttgagccgtgaaccaagtcttaagtcgcgcgtcgaccctaagtcagttcttataactatgacctgaagagtaatattcgatgacaagagaaatttagttgttgcatttaatttgaaacatttgagctgtgcttaaaaacaagaaaacttgagaaaaagtgacaatttggttttcttattttgatcattgaattccttttcaggagacaaaacatctaacatacactttatttaaatttcttctaggatat

SEQ ID NO: 57485 - DNA, 798 bp, Populus trichocarpa
  Intron number 1 from transcript POPTR_0014s10280.1 (locus POPTR_0014s10280) derived from phytozome v7.0 (chr-ID scaf fold_14; pos 7700672 to 7701469)
ttttcaatatttctgtgccttcttcgtcgaccaaggtatgctcttttttcttctttccttgcaaagaaggtttcttttctttattttttcttttccctttttctgattctttgcaaatactcaccgatcaaactttttgatactctttgtttttgtagatatcaccgtacatttcataatgttatgtctttttctgggttcttgtgcacaggcacaaatcccaaatctttttttcttcttttttgggtgggagaaactttggttctaacttttgcttagatactaagattttgagctaaggtcaagatcagatatatattcatcttgaactccactgaagagaaaagttgtttaattaaatttgtggtcctgaattcctgagaatgatacaataattggagatccatttaaatgcaaacacaaactaatcttcacgataaatcacctccgcgccattgaaattgatgatattgattcattgtattaggtcttggtaacttggcactgcaagaactggtttggattgtcaatctcctgtgtggatgttattgataagtctttgatgacactagatcagtgttaagtcatttagctatttataccaacgaaatgtaaatgaatcctaaattgtatgaataatattgatccatggtctgcattctcttggtccctcctgggctgtatgtttatacaatatttagacttgccttgaattgagctttatctagctgagaataatttgctgcaagttcaacaatcatcatcagacattgaagtaacttcttcttctggttacag

SEQ ID NO: 57486 - DNA, 381 bp, Populus trichocarpa
  Intron number 1 from transcript POPTR_0011s13300.1 (locus POPTR_0011s13300) derived from phytozome v7.0 (chr-ID scaf fold_11; pos 16007651 to 16008031)
tttcgaaaggccttgtacagctgttcaggtttgtaaaaatagctcacaaaagttatttgagatttgaaaagaaaaaatcataaaaaaaaatcttgagatttttagtgaacactttcttcctcttatgtacatctattgactataacactaaccaaatgaaatgctgggccattagaaagaaatgacctaagaaacaaggtaacctgctgctatctatcaacactcaacagtaacccaactttctgggcatcattttcctattcaaaactcatgtttccccgagtctatactgcaatcattcatatagataggtgtattattcatatgaccttaatgatcgatctgtaatcacgagtgaagatactaaaagttggattcttt

SEQ ID NO: 57487 - DNA, 307 bp, Populus trichocarpa
  Intron number 1 from transcript POPTR_0004s18010.1 (locus POPTR_0004s18010) derived from phytozome v7.0 (chr-ID scaf fold_4; pos 18029702 to 18030008 reverse strand)
gatagtaaggtatagtgggccagtcaatcctagaggtggaatgcaacaaatctgaggttgttttcattattggaaggtttctcttcccgatgtaaacaacatgtctcgtttgagcttagacgaggagaaaacatatgctgcactagcctcaactttgactaagtataaagtcaataggatggccaaaagatattattaagccattttgcaaaatatgcagcttccttattcttgtctttttattgctaagtttattactaaaatcttttttttttgtgcaggactaacaactgaaggagaaacttta

SEQ ID NO: 57488 - DNA, 745 bp, Populus trichocarpa
  Intron number 2 from transcript POPTR_0012s14150.1 (locus POPTR_0012s14150) derived from phytozome v7.0 (chr-ID scaf fold_12; pos 14144745 to 14145489)
gaagcatcgtcgagtaagtagtaattctaattttcaggcaaacacacacacacagagcccttaatttgcttatcttagaaactcttcgatgttatggtttgtttttcgtaagagaataaagcttctagaattattgcttctgttagaatgtctgtctgcatctgaaataattttagaataaatttttattattttaaaacagaaaatacaaggaatatatcttctatcttctgcctcatctgtataaatataatattcaaaagaaagttaatctaattgtatcattcaaccgtgggcccaaaagagaaactttgaattattaatgtggggagaaaacatttattaatgggtcccgaatcatttattgtttgaaaatcatgtattgttatgtaggatacccatctagaacttttttctattcaatcacgtccctgcaaatcatcaggtcttgattattcctttttcccttcgttgtaagtaacgaaaataatgagcccttttaatgaagtaaaaagagcgaacgcttgaagttgacaaggagcactactgcaactaaagggagaattaaagtaaaagcaaaagtggtaaacttctcggatcaattattagctgtgctcagtgcttagtttcacatgtgagtcacacaagcaactttgcgtaatgagaacatttgaaatctcccagctaacagctttatttccatggagcagctatctcaacactggtgattcgaaagggacagatt

SEQ ID NO: 57489 - DNA, 414 bp, Populus trichocarpa
  Intron number 2 from transcript POPTR_0014s00970.1 (locus POPTR_0014s00970) derived from phytozome v7.0 (chr-ID scaf fold_14; pos 934380 to 934793 reverse strand)
tctgctttcaagagtgtgtttggcttgaagatgtgactttttatcaaaaatacaataatttttaaacacaaaccatatttttaaaagctataaaaacatgcgttttactaaaaaaaaaaaacaggacttacctcacccttcaagttgaatgcatctccccatcacaaaacgcacttcatttcgtctctatttcactactttcagaccattctgctctctcttttcctcaatctttcttctttgatttcccaaagcaaacaagaggacatggagggttttcttacgtttgccatggaggagactttgacaagggtcatctctatagcttctgaagggatcagacttgcctggggattggagggacagctacaaaagctcaagcagtccgtgaccatgatcaaagctgtgctcaag

SEQ ID NO: 57490 - DNA, 799 bp, Populus trichocarpa
  Intron number 1 from transcript POPTR_0009s02010.1 (locus POPTR_0009s02010) derived from phytozome v7.0 (chr-ID scaf fold_9; pos 2585296 to 2586094)
tctggaagctcaccactctctctacctcttctcctgtaagttctttcttatcatccctaattttatatagggtttgtaacaattggtggatttagagctttgcaatcgctgttaattggatctataaaccctaggaatatatgaattctcaattgaaatggattattttattgttttaattgggactcggtttggactgattgagttgagatggatgttgtttttcatagtgtagatttgtgtgattctctgccatttatttattaatcagtgaccccgtgcataaaaaattttagggaaatgtaagtgttttaatatatatacagtttagaatgttttgggtttgcatttgaaccttatttgtttgtcacatttattagaagaattaattaataaataaatgggttttttttaatggtattgacacttaatttaattgacatacagagggtgcgtggcggcttctttggaaattaaagaaatgatattgaatttttttttaaagttttactatatcactactatatttggatttgaattttgaatgggagggcagccttgttaaaaattcttaccaggctttttactctccgaaccatgttaattccatgatttactagatttcaatagaagttttgctaataatattagtttctgtgtgctcggtaaaatttttctaataagcaaacatttttaaatgctgcaataatatttgctaattttctttctagttgactgatgtcaacctgctattgcttttgtaggtggagtctgtattagacaaagaaaatttcacttt

SEQ ID NO: 57491 - DNA, 927 bp, Populus trichocarpa
  Intron number 3 from transcript POPTR_0012s07830.1 (locus POPTR_0012s07830) derived from phytozome v7.0 (chr-ID scaf fold_12; pos 8778439 to 8779365 reverse strand)
cgttacaagctccttggaggccttgctgttcgcaggtgcgtccaactctattgattgtttgcttatttggtgttctctgcatgtctacctgtttcttttgcatctgtatgaattttgatgtttctgttgaacaagtcatctttacagcgagttggttatataaaaatgtccatctcgtgtctgagggtgacaatatttgttgatgccatcaattttctataatacaaggaatgcaactgttgttccttgcacagaaattgtgatggtagatacaacctttttatgacttagtattattcagagtgatccttgcagattaggaaaataatttctcggcatgtatacctctatacctacactagtacggtttatgacgcatgatttagtgcatcgttatgatgtttattttttctgagtaatatctctcatgcctgctactttttgtgaatttttggatgttgttgatcattacagttgttaacactgtactaatatcatattttgtatggagagcttggaagtttcatgattggatgcttgttcattacataaacagaatggacagtagtactcatcaccaccaaattatatatacctcttcgattgacttgagagctttgggtttcaaactatgatgaaacaatgttcacataaattctttatagggagtttgtctggctttagaatattgtctctcattcttggtagtttattcgtattaattgtatgcgcagacaattgcatgaatgacagcttcacacactgctgtttgatttagaaatttgtgatttatgttttttgtgttgttttttattgcctgctattcttctgcttttgttgatatttggtggttgctgcactttttgaatcccttatctctgtagttggattttgaacacaactttcctgttggtcccttcaggtacc

SEQ ID NO: 57492 - DNA, 492 bp, Populus trichocarpa
  Intron number 2 from transcript POPTR_0009s07120.1 (locus POPTR_0009s07120) derived from phytozome v7.0 (chr-ID scaf fold_9; pos 6740492 to 6740983 reverse strand)
agggattggctgctgctgccaagttgtcagaagaggttaagtttcttttaagttgtatttaacatttgttttgtttctggaagcttgatttgttttgctttagatggattgtctaatttttgaataacttgacctcctcaattgtctgttactttacccttttggttgcagagaaatttaagtttggttagggaaatagttttcaaacttattcttcatgttatttttcaaccatgcgaattggaagtaataaattcagctgaccaattacatggttttgtctacttctttttttcttgtcaattgagtggagcatcaattaattgtggaaaaaagttggaagtcggttgtttgtttctccatttctcaagctttaagactttggagttattaatttgctaaagagaatggatgatataagaaatcaaattataagctattcaacttttgattacaggctaggctcagagaggcagcttcattagagaaaca

SEQ ID NO: 57493 - DNA, 703 bp, Populus trichocarpa
  Intron number 1 from transcript POPTR_0009s07120.1 (locus POPTR_0009s07120) derived from phytozome v7.0 (chr-ID scaf fold_9; pos 6741231 to 6741933 reverse strand)
atctgtaagtccccaagtttctcccttcttgtctccattttagcttttctttaaccccaaaagatatagagagctagggtttcattttcatgtttctctagctctttactttgacttattagcagtactattgtgtatgctttgttgtttcagtctttgccttttgcttatgtgtgttttctctgattatgatgtgattaaccttttttaggaacttttttggtatttgtttatagttgtttctgctgtttttgatcgccgtcaaagcttataatagttaaaggttttccttttgatttcgtggatgattgtagaaaataattttttgatctttagcttcttgccattttttatgttatctcagctctttttgttgactgtaactgcctgtttgattgctgagaaaaactcaggaaaattaggagaaaaattaacatgagaatttctttctttttttcgtttttgaagttttgattctcttactaatgaaggattaaaaatctttttttttttaagcaagtaaaaagggttactttttccccccctctgactagttacttgactggattaatttcggtaggttaacgctgacctgcatttcgcttttttttgttgagaaatccttttatattgattatctaattaatccatttctgttaatattacctatttgattgtcaaacagggtagtcatattgagaca

SEQ ID NO: 57494 - DNA, 993 bp, Populus trichocarpa
  Intron number 2 from transcript POPTR_0011s07420.2 (locus POPTR_0011s07420) derived from phytozome v7.0 (chr-ID scaf fold_11; pos 8280049 to 8281041 reverse strand)
ttgaaagtaatcactggatttttgttttgttttgttttctctttttgactttttgggtatcgattttgcttgtaattagcctcatctagcttcatgccaggattattattattatttttcctgcaagtgttcttgcgctagcgttataaatactgcacaaaaatggaatggtggggggagatgtagagaaggtacagacttggagagaaaagctgccagggaccaaattccattgttaggagagacaaatatcgcccacaaacagctttttgtttcgtcttaagtattacatgccttccatctacactgaactagtttatcaaagtgtgttgagcggtcccctattgaatttgaaaataaattacatagcaactctactgtagagaggacagtcacagaaaagatttaaaagagtcaaacttaggtgtgggtgtttgatctaggcatgctgtcccatccaaaataaatcccattggtcttaaatgtcttggtaacatcaccagattcgacctctcaatagctcagcatactgtcgtctcaagagaaatctaccagctgtaatttaggtatcctaagcacaagctcaggatacgggattattatgtccttctggaaaaattatgcatgattaacttccaaaaacaattttgtttttcataataagcgatcacacattatattggcaatttataaaaagctgctattatttttccaagcctctgtttgttgaaacgttgttgaatatctctgttagtataacctggcctgcttaacttatctcttgcttgcacaaacaggtttgttgcgtctgcgtgcattttctttgtgtgtgtgtgtgtgtgtaataagcaaatatgctctggttttcttctgttttttttttgcaattctatatgcaagattatatgtattcatgtatgttcaactgtccttgaggatattagataatcttttgcaggtgtaaataataactggaaaccccaaggcattaaa

SEQ ID NO: 57495 - DNA, 583 bp, Populus trichocarpa
  Intron number 1 from transcript POPTR_0004s09100.1 (locus POPTR_0004s09100) derived from phytozome v7.0 (chr-ID scaf fold_4; pos 7622602 to 7623184 reverse strand)
tctgttttaaacccttcaccattcctgtctttccggtttttcttctgttcttacattattgttgatgatgttttgttgtttgttttctttatgtttcttgtttgctttttagtgctcgttttttaaataggaaatcagggacggttatatgtgagctattcgtaatttattaacatggtttcttgaatttttacctgggattttgctgtttttggctttagctttgagaagagttgaggctcaggttggtttctttaagttgcgttttttggctatagtgataattatgcttttatttttgtcttaaatgaagattggtattgtggcatgtaatttgtgtaaattgagtcttgttgagagaaattaacaccgactcgaaaaaattgtcagacatgttttctgtaatgtgctcctactttgttattttgatttgaagaaaatgctattcttgcagcttgtgtagaaatttctgatagatactttagaaacacaagttctacagtccattgtttacatgagaaatggattgagtggtttattttctgtagttacggaacagagctggaggtaaagaagttggtga

SEQ ID NO: 57496 - DNA, 803 bp, Populus trichocarpa
  Intron number 2 from transcript POPTR_0012s03730.1 (locus POPTR_0012s03730) derived from phytozome v7.0 (chr-ID scaf fold_12; pos 2944565 to 2945367)
ggacattcttgtgattgcggccgtgttttttccaggttaactgataaatctctctctctctctctctctcatatatatatatatatatatatatatatgatcatcatggtgtttttttttatcaaatttctaaaaccatacaaaatattcgatatatttttgttcttaaattggaaatttaattgttatgaaagaaaagaaaagggacaacatgttacttgatgtagtttctgattgatggaaccttaattaatccagttcttaaggagtactactatttattgacagttgttgaacacggttcccaaagatcagttgtcgaaggtggtttttttttttttgctgtatgtttcaagttcctctcgaccgctcaaaccccgaaaacagtttacttttttgttgtttttcttttttggattttggctgttcaatcgatctcttctagctatgttgtaaatgattagcttacagatgtgataaacattgttttattccattatttaattaatatttccttccattatttccatccaagtcaattgcatttcaaagctgtgaccacttctattctttattcaattcttattgtttaatgcacttatgacttgatctcttcctttcatcaataaggacacttagatcaaaaccattttgagtatcttcttgccacaacgtacgagcatgacatctggttcaatttcattttgtattcggtagcataattattattgtgtatttctacgtgctaaagttttttttttgtctgtgtgcgtatagagttgagagttttattgagcaccaag

SEQ ID NO: 57497 - DNA, 429 bp, Populus trichocarpa
  Intron number 2 from transcript POPTR_0009s11400.1 (locus POPTR_0009s11400) derived from phytozome v7.0 (chr-ID scaf fold_9; pos 9485209 to 9485637 reverse strand)
cagaactccaaaatattccagaagtagcttcctttttcattttttccttttcccttgttatattttctttgtttttggtattcattgtatgatctggctatatacaaagatttggaaaggatgtaactgtgtaagattagaagttagtgcatttagtgaagatccagaagctctaatggtcaaatcatggaattccatgaagaagaatgctggagaattgggcctgaagtttttcttgaggtgaatattattattcttgatcatagaactaactatactcttaagaattttttgtagaagttcttctgctaacttactttaataccaagtgggtttgggatttaatcttgagtatacgttgaacgtgattgttttgatttgcagaatctttgagattgcaccactgcaaagaagctgttctcatttttg

SEQ ID NO: 57498 - DNA, 925 bp, Populus trichocarpa
  Intron number 2 from transcript POPTR_0009s02570.2 (locus POPTR_0009s02570) derived from phytozome v7.0 (chr-ID scaf fold_9; pos 3352944 to 3353868)
ggttcaaagaattgaaaatatactgaaatatattggtgggttttgagtttttattttattttttatgctactttatgttttgtgtatttgctttttgattaatattctttgatgggttctttaccactttataaatttgctaattgtggttgtttcccttttctgatggttaaaaagtttattaatggagtaggatttaagtcaaggcttggcttaattgaatcaaaatctgcagggcaccatgttttttgttcatttatgttcaagcgatgtttcttgaatatttccatatatttgctacatcaaatctccttctgggttaaatttgggtggtttagagtataaatatctggtgagcaccggtcgagatttgttgctttagattctgatatagcatgacatttaatgcagcatgggaccaattagtgcaaacaggtttgccttggtctaaaatttcatccatattctgctactacttcctgaattgttcctgaagttccgcaatgactgtcaccgtctttgaagtaataaccaagctactttggaaccacttgatattgcatgcaggttcttcgacaaaattgtaattaattctagtttttttaaaacaagaagggttatattttggcctttgttattgtactgtgctttttactgtcaaatagattctttgtttgttattaaacttctcgggtttctcaaattatggatatgcatatctatatatttatgcttctttgtttttcctcattcatcaatgacagtaatatgtgtaggctatatatatggatttgctgattgacttcatggctaggcctgtcaattttaattttagatctttttgcaatatagttttgctaagctttcttgtaaattgtctcagatactgccttgcagttggaagctctggttggagatcttgaag

SEQ ID NO: 57499 - DNA, 468 bp, Populus trichocarpa
  Intron number 2 from transcript POPTR_0009s06450.1 (locus POPTR_0009s06450) derived from phytozome v7.0 (chr-ID scaf fold_9; pos 6223599 to 6224066 reverse strand)
aagagataggtataaagcctattccaagtaaacgggtaggtattgttttccgttcctgtgttacgagtatgattaatgaggtggtttcaatcaaatgtcgaaatggtcataaccattgaaggttaaatttagatgttttaataggtttatttatgctttaaaccttttattttagctgccttccgaaaagcatattgggcatattaccaagttagacaagagaaaatatcgcagttttttcggttgctgattgatgagaaaggaaatttagggggttcttaagataactcaaaaccacaaacatgccacactactttcatgcacttgtgtcatggagtgcattgaggattctctagcttcttccacattttagtttgaagtatgatttgagttttggattagaacttctatgttctacagtcacacctttgataattgatatgttttacagtgtatatcactacttct

SEQ ID NO: 57500 - DNA, 967 bp, Populus trichocarpa
  Intron number 1 from transcript POPTR_0011s05970.1 (locus POPTR_0011s05970) derived from phytozome v7.0 (chr-ID scaf fold_11; pos 5991688 to 5992654 reverse strand)
aaggcccagatttgggacactgctggccaagaaaggttcccccacattcccttcctctttttttcttatagatctctcatccaattctttttattttttcatgtcatgattgttgtttttttttaaaaaaataaaaaaatatataacaatgtgggttgtgattttgattatttggattggaatattggcttttcttgaattctcaataactaaaaatattaaataacttggaaaattataggcaatacatgatgaattgttcaaatgtggaattcaataaaatgaattctaacgtacattaatggtcatagacttggccaattttgatgccatagaaatgctttgcgtagttgacaatgcacggctgtgcaattgtaactacttgcacttgttccatgcccatgatcaggatggaacggtggagggtttgacgttaaacatccataattaagaatgaccggtagattgtattgtaaggaactacagggtgatgtgaaggtgatttttgggatctacgaaattacagtttattaatcagaattaagactctcttggcattaccttgatgatttgggaggatttaattaatgtttgcaatccttccttgttatgatcattttacaaagtagaagggctagattaatataaccaagcaacgcctatgttgtccaatgtttctatttggttttataattctacaattcatgcaaattggagaaatcattaggtatatcaagaattgcaccctcttttctcgtataaacatgggattcatcgtgaaaattattcatggaccctaccttcttgtaagagaggagagggcaactctcctgaataatgactcccacagtatgtgatgaagatttcttgtttagatgatgatgtagcaaattcggctgtcttatttctaactctttttttttgtccaaaagataccgtgctataacaagtgcatactatcgaggag

SEQ ID NO: 57501 - DNA, 749 bp, Populus trichocarpa
  Intron number 1 from transcript POPTR_0012s11030.1 (locus POPTR_0012s11030) derived from phytozome v7.0 (chr-ID scaf fold_12; pos 11645928 to 11646676)
atcaaacccaaccagctgttcaagaccaaggtatcatgcacatatataataatttttggaaattccccaaattctttctttcctatccaaaatctccaggtaacaatatatatggatcatgatcacttgttaattaggactttgggggtaggatatattgttttctgattgcatgtctttcaaattcttcatgatttttttcttctcttaaaggtaaaaatcttcttggaatggatgaatgaaaaaactcaaagctaaattgtgacccttctatgaagctatacaaacaaacaaaaatgaattgaactatataaaattcaaattcctacacatcagacgaaaaatgagttttcgacaaggcattataattaaggtaaaaatcacttttagcatttaatgatgaacctttacaataatgcatggatcctatataatagttaagcaatgaagagatcatatacttccaatttttatgttcatcatgacatgagtgcaataatcattgtgttttcttctaagaaaaccatttgaaagtgctgttaagtataccttgtaccccactaatattttaccttttgttctatcaattttctatctatatatttccatgcttcgggctttttaacactttaaatcagtcttttagctagcaagtatggctttattttattcgaatgtaactaattatttacatgttatttcatgaatactaacctggaaacaaaaacatttttttgctggtgaaggga

SEQ ID NO: 57502 - DNA, 599 bp, Populus trichocarpa
  Intron number 1 from transcript POPTR_0011s09140.1 (locus POPTR_0011s09140) derived from phytozome v7.0 (chr-ID scaf fold_11; pos 11306876 to 11307474 reverse strand)
gtagaacgcatcctcgaagcatctcttctaggtaacttgtgaccgttcatcttgatgtgcattgctttaatttttggatttctggagaatcaaatactgtcgtgatctgcaagtaaataatcgaccattattctatacaacaaccattacttaaaattccacaacaacccctatatttttatcaaatcgacgaattagcccttcaaagaactttcaaaatttacctcgtgcttgtaagaattagtcaaccctatcaaattgggctcagttgctttaaatagaaagaaaaacacctatcaagaatttcaaaagatatttaagaaatcatttttttccaagaacttaaaaaacttttgaaaatttttcttgaataaataataaaaattcttaaaataactctaaaaatgtaaataaatgaaatttctttttgaagaaacttagtcattaaaattctaattatacccatataaaatccgtccccttttactaaatttaccactttgtaaatcctacagaggggaacaaaatacatattaagttagggttcatcatcactcttagggttgctttaatttgcaggattttctctgtttctggca

SEQ ID NO: 57503 - DNA, 468 bp, Populus trichocarpa
  Intron number 1 from transcript POPTR_0009s17180.1 (locus POPTR_0009s17180) derived from phytozome v7.0 (chr-ID scaf fold_9; pos 12925609 to 12926076 reverse strand)
ggctattcgtcaaaggaaattattggaaggaactggtgagctaccaaccactaattaattaatatattactatataaaaaatgttaaccattcgactcttcttgttaaaattctgattctcgttttttttttccctcgtaagaaaatcaataaattagaggaaaaatagtagtatataaaataaataaatataaggcatagcatgtcacaaattggaaggaaaaaaaaaccgaaacaattatcagttgagtagtagcggtagcggagtattggggaaagcgggaaaagcgaaacagaagggaaggactagggctgtagctaagctcggtattgtagattataaatagaagaaatgggttacttcaatttgatttttccaagaaattagtaattaattcaatatttgtgtggtcgtatttgtttgttggaaatgcagccggtttctgcagggagcagatacggaccgga

SEQ ID NO: 57504 - DNA, 732 bp, Populus trichocarpa
  Intron number 1 from transcript POPTR_0015s00730.1 (locus POPTR_0015s00730) derived from phytozome v7.0 (chr-ID scaf fold_15; pos 425689 to 426420 reverse strand)
acttttggttctttttcacagtggaattcattcatgttgaggtcctcaacttgtgatgcttcttgggttgtggataacaacaacaatttagtgcatcagaatctgtctcctgtgccccctacagaatatgaagattgcaggtaccttcccttatcaaagtgtctagttttcattatcaacaaaatattaagcaatctttgaatgaatttagaagtttgttagtggtatttgttttgtcgtttgctaaataagggataaagctatcaatcattttttggaattgaaattcgtaatcaatttgattaattgattcaaaagcattagacattcacaacatattgtcacatttgttctaaacgtagggttatttttaccatcatggcaacttagtgagaactttgaatctctgcagatactaaaattggatgaggcaggaaacaagaaaaaaacctaggattcaatgtgataataggttgtagtttcgtaatgatctcatgctttatgattcttttataactatcagttgttggggttgacacacaatggaaactttgtctctataggatggacaaaaaatggttttggataattggtaaagaaaaaattacatgagcctaatttgaggcgagtaaataatttcttcttattacttgtctagcagatcgcagctgaatgaagagcagtctaatgttgctagccaagtcacggaggaggatttagaacacttgtacc

SEQ ID NO: 57505 - DNA, 634 bp, Populus trichocarpa
  Intron number 1 from transcript POPTR_0011s06780.1 (locus POPTR_0011s06780) derived from phytozome v7.0 (chr-ID scaf fold_11; pos 7461529 to 7462162)
ccgtgaaggagtattttggtggtgaaggagatttggaggaacaagtggaagtctaatttgttttctcaattttctgtagttgttttctttcaatttattacaggtttcttttcctgaaattagttgcgttgaacacaaacttgttcaatcccaattgagaagataaactcgtgtgttcattagtaataataatagattcacttgtaattcagttcttcatctttgattattacaaggaaatttcatttcgaaaggtcggtgtgaagtagttaataacttactaaagttttaaaaatcttggttttgttattggaatttctgcttatctaactatgtctttccttgtaactttgtgttcgtccctcaattgcttgagggaaagaaatcaatttgcaacttttgtagcccctcgtgcaccctcccaaagggcatgattctgagttttgtagaagtgcagaaaggatggccttcaaggtgaggaattagagaaagtgtttcagattggcttcttggaatttgatgctggggaaactatttagtaaaaccatttaaatatacttacagaataataaacaaaacattaattaaaagaaaagtacagagcacttgtacaatttcatgtcaaagccaagac

SEQ ID NO: 57506 - DNA, 821 bp, Populus trichocarpa
  Intron number 1 from transcript POPTR_0015s06550.1 (locus POPTR_0015s06550) derived from phytozome v7.0 (chr-ID scaf fold_15; pos 7490368 to 7491188 reverse strand)
ctctaaaaaagtcaaggacaaatcccatctctctggtaccttctcattcccaaatcttaattaaaaaagattcgatatcttattactgacatctatttcctttctcttaaatatttccttacgtgttctcttgtggttgctgaaatatggatcttaaagcatatgggatgtcatttatatggacatcatcatttggtgtttgagtgattagtgctgtaatgttttgtaattgatccctgatctacaacatttctgttgtaaattatgccatttggatatgcattatatggtcttgattttatgagggaagctagaatgttttgttgttgaatttaatcttacggtgtttcattggtcaggttatttagctgatcctaaaattatgatgtttttgaatttgtatgaggtaagcaccttgaaaagttttcagtttacttgtatctggggcaaaaacattgaatcttgaaactcaatcagatctcttaaattagaccttgtttggcattgcagctcaatcatgcttttaaatttgttttgagtgtttttggattgttttaatgtgctaatgtcaaaaatgaattttaaaaaattaaaaaaaaacattattttgatgcgttcgagagtaaaaaaaacactttgaaaagcaacctctatcacactttcaaaatgtaccatctcagcttttttcctccttttgctgtaaaatgatgaatatgtgtatgatgaatatgtgtgcgcgcgcatataactttttttagcatttggggaaaagaaatgaattcagttacaccattggtctgactttaaatactgtgcaggtg

SEQ ID NO: 57507 - DNA, 522 bp, Populus trichocarpa
  Intron number 1 from transcript POPTR_0015s06440.1 (locus POPTR_0015s06440) derived from phytozome v7.0 (chr-ID scaf fold_15; pos 7229270 to 7229791 reverse strand)
ctttcagttatcgcctcttatccagatccaaacaggttttgcttttcttctctctattccagatcatttacctcctttccaatcatccattcttttcttgacgctggattttgattcctttttgatgtccgacatgttatcgaacaaagttaatcaaattctgaatccatttactttgatttttttgcattatttttttgctttaatggacaggaagaaatattagggatttctttgggtcaatgtgatgccttttcttttcctataattatttttctgatgaaaatggaattatatgttggttgggattatttttatgggaaattccaaatatcatgtgggtttctttagggatataattttggaattgttatcaatttttataaagagaggtgtgggggttcttcgttcgattactgggattttgtattcattaataatgattttgtgatttttgggtttatgtagttgcatggagtcaagccattttgaatcagcaacttgcttttccagttcattatt

SEQ ID NO: 57508 - DNA, 420 bp, Populus trichocarpa
  Intron number 2 from transcript POPTR_0015s04140.1 (locus POPTR_0015s04140) derived from phytozome v7.0 (chr-ID scaf fold_15; pos 4160444 to 4160863)
tgctgctgttgataagaatcgttggctttgtcctacccttgacagggctattttccggcaagaataaatctaaccccatccaattctttggattgattttcttttgcttcaattggctcaccttacctttacttgtcttcggacttcaaatctgctggttattctttatatatatatatattggtttctttctttgttgttgttgttgttgttgttgttactattttttttttttttgttaatacattcacttgggaatacagatatctgtgtgtttgagtctgctttgtcattttatggattataattatgtgaaaagagcactaaaatcaaagtgaagaaggtatctacccttttttttttcttttttctacatgcattctaggaggatttgaatctgagtattttctggggtttagt

SEQ ID NO: 57509 - DNA, 853 bp, Populus trichocarpa
  Intron number 1 from transcript POPTR_0015s07250.1 (locus POPTR_0015s07250) derived from phytozome v7.0 (chr-ID scaf fold_15; pos 8380735 to 8381587 reverse strand)
cttttgagaaattggaaaaggttgttaactaattattaagttttatttgtttatttttttcaaattaaaaaaaaaaaaaaaaaaaggagaggaggagacgtgctgtgttttttctgtcatcatagacaatgtggtgttggtttttgtttttattcttttttgttagtttgtttaaaaagatttaatctttaatgcctttgctactaattagcgcttcttgctgtatatgttcttcatttatcaaaaatccacttgtttctttcttttcttttggagaaaataaaatgttgtttgcgcaatataatcccttcaattttattttattttaaataatatacaagcaaggaagttttagaatgaacaatccagttgggggttgggtgattggcataacaactcttcttttaatctttatataatgctaaaagtctatacagtgttcagctacaatcatctctggacagcttggttccgaaacaatgccaggtcttggaaggctgctcacatcatactatgtgaatcttccagattagtacttcatgattctgataattgcacttattactcttattatttcactgtaactagaactttgtggaggaatttctttccttttttttatccgattgtcggttgcttcttttatgcaattttcatgtgtggactagaatctataatgtcaagtgtgaaggcatcttgttctcttactcacctgaacttaagccttgcctagatgactgctgctatttcattttagtttatattctctcctcttcaattggatagtcaacttattttctgtacaattgctttgatagataggacagggtacatatagcagtgtgttccgagc

SEQ ID NO: 57510 - DNA, 447 bp, Populus trichocarpa
  Intron number 1 from transcript POPTR_0011s06560.1 (locus POPTR_0011s06560) derived from phytozome v7.0 (chr-ID scaf fold_11; pos 7050493 to 7050939 reverse strand)
gttattgtcatatcacgtcactgtaagattttttttttttttttttttaattttttttgtcttctatgtttatttgaatacttgatgttaaaataaatagattggatacattgctcctatgtttaaattaattgtctgaaaatatctctaatcttaaagttgtgtttggtattggatgaaaattaattgtttaaattttaaatctgaaatgttattacgccaacccttcgagggttgtagattttaagctcttaattaagctgtttttatttgcagtttccactaataatttgcttaagtgatgaagggactatatagttttcagcacaagtagttttgagttggtttttcaatcatctaaacatttctttatatactgatggtgtttttctcttttaataacagatatctaaaacgatcagtttttcaggcgagcttccgcctgaa

SEQ ID NO: 57511 - DNA, 749 bp, Populus trichocarpa
  Intron number 2 from transcript POPTR_0004s10120.1 (locus POPTR_0004s10120) derived from phytozome v7.0 (chr-ID scaf fold_4; pos 8688364 to 8689112)
actctcctgatcgtgcttgcaatcttgccaagcaggtatttcctctcatacaatagcatttagcatgtatttgcctctatgtttataggcaagttgtgaaaagcatattcttctgttttcttttcattattattttgagtaaaaggaagtgattggtgtttttctttgcttttgggagcatatttctggctctccattcctctcgttggttttaattagtaaattttataactggcatggaattggatcctagctattaacttgtggaagctaacagtattgagtgctttaatagttgttgggtcaataatgttaagtaaattgtttgctcaaacttggtttagttagtttgtgaagcattgatgccagtacatttggtttctcccctaaatgtaactatgtattggtccatagggttgtcatgtttcattaatgttcgttcattgagatatcttttttgtcccttcttcactttactaaataatattacaatttagtgaaatcagtttgctttgtaattggttcataccagcacactcgttcttttatactcaatttgttctgtattaatataaaacctagttgataagccatgtttccttaaacataagttgatctattcagtccttagtgtcgatatctttaattgcatacgaatcactgacgaatttcttggtcctattgacatcactaaaaagtactatatttgggcaggcttttgacgaggctatttctgagctggatacatt

SEQ ID NO: 57512 - DNA, 667 bp, Populus trichocarpa
  Intron number 1 from transcript POPTR_0004s03110.1 (locus POPTR_0004s03110) derived from phytozome v7.0 (chr-ID scaf fold_4; pos 2080062 to 2080728 reverse strand)
ttgcattaaactttctttgtagatgttggtatatatgatcataaatataattgcgagaccggccaggtctcaatccattgagtcatatataggattaacttgttggaccatcgaattaatcaattaatcgaagtctcttatttttattcaaagcaattttattttaatttaaaagaatcttatttttaactcgatttgaatttgaccaggtcacaagttaattaatacatttgattaccaagatttagctaggttaattttaaaattagtttaaattaaaactcattttggattttgctttgagttatgagtttatggaattaacttgttgggaaaaatcagatttactatttgttgataaaaaaaatcttgaaaaatgaacttacatatgaccgtgcggtttcagttcctttgagtgtagaggtgattgaggatcttggcgaatttctctcgtagacttgcattctttctaggaaatgcaagaccataccatctccttcattcactattaatattccaagaagaaggttggatatatatctacgagtcattaatatccctttgctaagtccttgttttttaacaattttcctttccaagtaattagcagatataacactaatcttgcttcatagttcaagcaagttgtttacgaatccttgaatac

SEQ ID NO: 57513 - DNA, 705 bp, Populus trichocarpa
  Intron number 1 from transcript POPTR_0015s01130.1 (locus POPTR_0015s01130) derived from phytozome v7.0 (chr-ID scaf fold_15; pos 700467 to 701171 reverse strand)
ttctctcactggaaaacgccctcgctccgattacggtatgacttcaaaatcaatatttatttctttttaattctctattaaagcttctactttcctgcttgcaatccgtgttttttttttgtttctcttaacattttgtgccttgtatttgttgatttacgtgtataatttcctgcttaatcatgtatttggtaatggggctgaaagctttgtgttaattgtttttgaaaggaatgggaagctgaaaggattgatccttttcattaattttgctgttggttttagaggcctttatgatgttcgtgcgttgtaacatgggaaatttatgtttttggataatttatcgtcttttgggtttgtattcaagtaaaagaaatcttctttcttgatttttttcctcttactgagtttttttgttttaccatttcctttacatattaactggagcacttaaaaagtctcaaaattggtggatttctacgtttattttctgcctttttagtgcagccttggtcatttcagcaatttgattctctgcaatgtagtaatctacggttctaccagtttatgagccttttgttttccatagattgttttattttcactcacatgttagctctgtttttatgctttttcatgctgtatgttcctaggttgttcttctgatggtttatttcttgttggcatacattcttgatcttgtag

SEQ ID NO: 57514 - DNA, 407 bp, Populus trichocarpa
  Intron number 3 from transcript POPTR_0011s04970.1 (locus POPTR_0011s04970) derived from phytozome v7.0 (chr-ID scaf fold_11; pos 4932050 to 4932456 reverse strand)
tggtgaagacgtaattattggaaatcttgacactggtaatcttacttgtgtttgacttggaaaagtgtattttattagtttcataattactatttactactgctttgtttcatctttggacgagcgagcatcagctttgaatggtccataaagactgcccttaatgtattttattagctctagaacgttaatatttaaatcctcgttgcggctgcccttaatgtattatcgatgatgacacatcttccgaatgtttcattaagctatccactggtcggcaactgcttttgaatggtcctctttattttattttttcttcttattagttgtgtaacattttaattttttctcttgattaattcgtggttgattgataggtgtctggccggaatcagagagcttcaacg

SEQ ID NO: 57515 - DNA, 948 bp, Populus trichocarpa
  Intron number 1 from transcript POPTR_0012s13035.1 (locus POPTR_0012s13035) derived from phytozome v7.0 (chr-ID scaf fold_12; pos 13346950 to 13347897)
gaaggacaggagcacaaggaagtggtggattttatgtgagcatggcacttggatttgtagtgaccttttggtaagtatttggctccttattccaacaatacctatgtgctttctctttgtttgcctgattaacaaaacgaccacgacaaaagcattaacaaactggagcctatatatatatagtagttgtattaatttaacttatgcattggctttgatattatcggaaacaagtcaagaagattcagaaattcacatatatctctcgatgtatactaagagccacaagaagattgatcttttctgatgtctttgaacatttgatacaatatgactgaagcaaccgagtatgccgtgtgcatggcagaattaagcttcaagttgatagtcttgctcccagcaaaacttttcctttctatgtggtctcttaaccttgaagtgctatgaacaacactgcgagtatcattatcaagggatccgtacgtgcatgatgtcaaacttggacggtctagtatggatactcacgatcgacacactaacaacagcccaaagcagcagcacttgaactaatcaaacaacagccgttttcaattttatttttcgatttcttaccaattgttggttggagattggtataatttcgagtcttccatccccaaagaactctgcagtctagctaatttacgaatcttggatctttctcacaatatgctccgtggaagcataccaatatgtgctcataacttttatgataatgcattgcttgtgtcgaaaggaaacacggtagcttatggcagcattctgaatattgtaagaagcgtagacctttctagcaataatttgtcacagaagaagtggcgcgcctgatagccttgcaatcattgaatttgtcacacaatcatttcactgaaaggatccccaagaaaatcggtgctgtgggatcactgg

SEQ ID NO: 57516 - DNA, 725 bp, Populus trichocarpa
  Intron number 1 from transcript POPTR_0009s06580.1 (locus POPTR_0009s06580) derived from phytozome v7.0 (chr-ID scaf fold_9; pos 6332894 to 6333618)
tagaagctgtttctcgctccaaactttatcaatccgtgagttagtagctaataatttactatttttagtttagattagcttattcttttagataatggttgattttattctggtctgcttaatccagtagtgagattttttatcctgataaatgaaattcctcatcttgatatcaagaatatttactttttgtttgttttagattagattgtgattagatctgctatgatatgagcaaaagattctattcactctgttcctatcatcaatgttatagcttttggttagtgttaattaatagtgtggttccttttcctttctctgattttgaagctgtcgattccttttcctttaaatgtgctcaagtttgactatgttataaacaggtagatttctaatccttctaataatatacaagttgaagaagtctcaaaggtttcatcttcattttttttgtttaatttatttatggttaaacaccgtgtagttagtgagtgaagtgccgtgaaagggaaatgattagtgaaaatcaagtaacgttttatagtttacgaggagttggtgactttactccgtttaaggatttatgttttcttaaattctgttcaatactgtttttgtttttttgtctaggttctcctaatctagctcaccttatgatattttttttgtttttgaatgaatcaaagtaatgttcttttgtttcaattttaggtcattgaagc

SEQ ID NO: 57517 - DNA, 597 bp, Populus trichocarpa
  Intron number 1 from transcript POPTR_0009s16210.1 (locus POPTR_0009s16210) derived from phytozome v7.0 (chr-ID scaf fold_9; pos 12383512 to 12384108 reverse strand)
ttcagtctcggtgtcaagagctagtgctcagcctcgtaagcctctctctctctctgttttctatgcaaagtttcgttcttttttgagttctagagagtttaagcttcataaatgattatatgaaccatcaacactaatggaatttgttttattgatgaatttttgctgttaatactaatttctctagcgtaaaagtgaaggatgttctttatttctcagacccattttgctgcttttgttaactctgagaaatgagactttttgacagatattgaaatgaatttaggcttatgtcattgtgttctgtaatgctttcagtgttaaagttagattctttagtgagttcaagtgagttgtaatgaagtactgaagaattacgaccgaccttgatcgttggtatatagattttcctccccatttttccagctcccgtaagttcgaattaccggggttaagcaggaaatgtgtattattgcttcaaaattagaggttttggttttgtccctttcgattcatgggctgtcggcattttaatgctattagtcattgtgctgtcttttttgtttccttgttttatagtgagtgagcttgctgaag

SEQ ID NO: 57518 - DNA, 869 bp, Populus trichocarpa
  Intron number 2 from transcript POPTR_0001s35610.1 (locus POPTR_0001s35610) derived from phytozome v7.0 (chr-ID scaf fold_1; pos 33952426 to 33953294)
atctggacctccaggtcaacaacgaagaaggataggtgtgtgctacatactgttgagttttgcatatgagatgtgcatatagaaagtattcgtgtttgctttaatgttgtaaggaagttcttatgtgtaaatttcagtgaaggtctatcactacatgatgtattagggactcaaatcattcatttgtattgaagtgaaagtaaactctgcagcagtaaatgcatacatgtatgaacacaaggaggttggtacgggctacgtgcaattccaaaaattggaaatcagtgttcaagctgctagatatcaagtaccccaggaatgtattgagtatctattgtaacttgaatgagcatatagctatttcactgccaaggaaccacctcacaccctcaaggatgaagttcttttggaagacatcccttgtctcaagacattaattcatttatagaagctttgaatattattaactactgtccttggtgcatgtgttgtccaatggcctgactacaaaaccacttgtctcaatataagacgattctttctgaagataactttaggtctctggtactgtgcaaaagattttaccagctaactacctgggactttcaataactagagattgacatgttcattggttatgatatattgcaccaagtgagcatgagacaagaccttatacaactaaataaatactaaacacaggatagcatttagacttgcaaacatggatggctgaactgtagaatagatgacttatgcctaggaaaatgaatttcattttctctatcttgattttagttagatgctgctactgttatttgagaaactccatatatcatgagaaaatgtgaaataaattgcagaaggta

SEQ ID NO: 57519 - DNA, 449 bp, Populus trichocarpa
  Intron number 2 from transcript POPTR_0004s06940.1 (locus POPTR_0004s06940) derived from phytozome v7.0 (chr-ID scaf fold_4; pos 5766297 to 5766745 reverse strand)
gctaaagctcacttgcggaaagggttagtttgcgaattcgtttgtttattgttggatttgattttcggtttttgagttaatgaatttgtgcttggggtttagtggaattatgagcgtggagtttgtggtttctttgtgttttggtgtataattggtggtgcttttgtatgtgtgtgattgaattaaaatgtgagtttatgataattctgaagaaaagttgggtttcttgtggtagtaaaatcgagatcacaagcgagaagtgatgactctgtcttgaattctattttggttattcattatttcatggtgtaaggattctgtgtcttataagtagtgcccttggttgtacctcatgcatttgtacacctttcttctcatgaatgatctgattctgttcactggattttctgattgattttcccttgccactatctctgttgcagtattgc

SEQ ID NO: 57520 - DNA, 822 bp, Populus trichocarpa
  Intron number 1 from transcript POPTR_0001s09640.1 (locus POPTR_0001s09640) derived from phytozome v7.0 (chr-ID scaf fold_1; pos 7346968 to 7347789 reverse strand)
aacgctctgttctggtctcattttgattcactcaggtaatgaagtgcttgttttcgggtttcgaagctcaaccccacgaagcttctctcttcgtttctctaatgttctctccctcctgtgctctcaattacttctatttaattttagttatgattatttttcccccgtctttgatttttctcttataatttttgtttgacaagttttcaagcaatgaggagttgtatgcttttctagcaaagccaactgtgtttttcttcttcgtcttcttcttttattggggcttgcctgttacaaatggaggaaacataaatatcacacaaaaataaatattttttattgatttgaatgatttccaagcttgattttttttcttttattttctcaggaacaaatcaatatctttaaacggccactctacttccatattagtaatggaatttaattctagtttctttatttttgcactacgcaaaattttgttcaagtaaaaatttagattgattacatttaatttaatttagattcctctaaattagttaaatcttgattcaaactgatgtattaacttttaagtacttcaataccttcatggttgactgtgaatgtgatttcaccctggctcaaaagaagattttaatgatgagcattcttttgatctgaattcaacagtgcttcatttattgtattcaatctttgtccgtgacgcataaatattgcacttacaaatttttctctctccgtctatatattaaattatcttactagcatacttccatgtttttgctgcttcagggacttacaagattacagtttgcaagg

SEQ ID NO: 57521 - DNA, 550 bp, Populus trichocarpa
  Intron number 1 from transcript POPTR_0009s08320.1 (locus POPTR_0009s08320) derived from phytozome v7.0 (chr-ID scaf fold_9; pos 7650791 to 7651340)
acgtcgcctccgctcctctcgcggcctacagatccgtgcgtctctcatcatttctactccttcttcggttttactaatttggttgtttgttgatggagctcaaaccgagacttgaacttgattgagagatgaataaaagatttagatttttttgtggttgagtttttgatatggtagtttagaaactcgggccctttaagggttcatttgtaatgtgttttttcatttgatatattacataatcatgcatagctgtttttcttcggatattaaatactttgttttttttttttttgttgtttaattctgaatgatcagctgagagttttgataaatgtaaattttaagtacttaggcttttaggcaatgattgaatcgtttttacttattcttgtgaggataaaaaagttgtagatgacgattgaaaagtgttggtttttgtttcactccagttgtgggttgtctgactattaaaagttgtttgcaaattgaggttgagattgtgaaatggctgagttttggtgcttatctgttgtgcagctgagtaata

SEQ ID NO: 57522 - DNA, 790 bp, Populus trichocarpa
  Intron number 1 from transcript POPTR_0004s21250.2 (locus POPTR_0004s21250) derived from phytozome v7.0 (chr-ID scaf fold_4; pos 20453673 to 20454462 reverse strand)
ttctcgtcttcttttcttgcttctcactctttcaggttagttctttcttgtttaaactaccctctgcatgcattgttctgtttgtttccctggaaacttcaagaaacgaaaaaacaagcttaagctgttgtcttggcttctcaattgggttgttgctttacatatactgcatgttcaagcatgaaaacaaagttccttgactctgtgcaattgctaccattattcagagaacttgtttctttcctttctggcaagtctatgatgaatttagagggattttgcttgattttgtatttcttttcttgatttcctttgatgaatttggacctgaaatcttaatctaactgaagcttaatgggaataattatgaattggaaaagcaaagattctattacttgttgaacattcatagtggcatgtaaaggtagtaaaatttattcttattcgatttttagactggaaaggctttccttttcatgtcacttagaattatttaatttgttctccttttttttttgttaatttttgaagcaaagttttttttttccccatgtaggcatattttcttcaatatattttaatttttaatcctaaatagtttttaatcctcatattttcctgcattctgcaattatgtgttatgatatttgatgattcttgctcttgtttcttaattccttgctttatccttcatgatttagtttcttcaacttaaaattctgttttttactcttgtttttcactctgtttctcagattcagctgtcagggtccttggtgctgggcttgga

SEQ ID NO: 57523 - DNA, 405 bp, Populus trichocarpa
  Intron number 1 from transcript POPTR_0015s01190.1 (locus POPTR_0015s01190) derived from phytozome v7.0 (chr-ID scaf fold_15; pos 746133 to 746537)
cccaagtgtaagttcattccttttttttaaaaaaaataatattatttttatgacgttttgttgttgatttctgggttctgtgaaatggggttgctattttgtgatttagatttattcgtaaagggatttgatttttttgggtttttctgtaatctgggttgagaattgttgactggaaaggaaaggtaaaagaaaggaatattataaacaaatcaggaagtgaaaattgtattggcaattatgtggcatttgataacctggaattgttaatcttcttcataatattatttgtgaaaaataatttattcttggttatgagagttgtcttttgtctcaaattgttgaattgaattttttttttgatgaacagcatttcctcttgttcaaacaaaaatcattgatttc

SEQ ID NO: 57524 - DNA, 485 bp, Populus trichocarpa
  Intron number 1 from transcript POPTR_0011s13350.1 (locus POPTR_0011s13350) derived from phytozome v7.0 (chr-ID scaf fold_11; pos 16119684 to 16120168)
actctttgaagatccacctaactgtaagcctcaaggtatcgcatttgtttaatctttacttcttttttccatcaagtcttgaatctttattaattaatctcctactgcaaggatttgatttaatcgttcttggtattagtatgcatatttccttcgtaagttatggaatggctaaggaaatagcagttttgctgtggacatggttaggaagatgaagctgccttgaattttattatctgccatgcctgttgctttcactggcttgtgtttcagtcccagaaactgatcacagagtactgcgtttcaccttttcccttgttctgttacctttcacaaataatcagaagaaatttcctaaaagaacaggcacagcattttaaccgcaaggcataactgtacaacattgtttgatttattacatttatatttttcatgattgggggtactgttaatcatgtgaatgcgtgcaggtgagtcgaagaatc

SEQ ID NO: 57525 - DNA, 766 bp, Populus trichocarpa
  Intron number 1 from transcript POPTR_0014s04220.1 (locus POPTR_0014s04220) derived from phytozome v7.0 (chr-ID scaf fold_14; pos 3319549 to 3320314 reverse strand)
tgggtttttcagctccaatccgactggctcacatcgtcgaattgctaattcaaatcttcaggttcaaatctttttgccttaaatacttcaaatatatcttttgtgtatacttctctctactttgtgattgctgctggggtcctcaacatagggtaaacttgattctgatgttttctattaaaaaatttctttaattgggtaatgattgttcttgaattttgattttttataaacctcaaagatttgactttgtttcttgcagttgactttggttttatgcgtgttgctgatggtgttttgctttgatagttagaattcgggttgttttttgttttaatgaattaattgaagccatgatttcactaaggaatggggtaatttggtgaaactaaaaggatacagaattgaaaatgcttttaaagagaagccagttttgtaccattaattattttttttgtgaaagtggcatcatttcaccagtgtcccctcttcgctgtcgtagtctttgcttagtatttttgcctttcttgttgcatcccctggcttggtgagaatgaaaagcaaggtttgttattttagttattattttgaacatgagcttgtttgtcacatgatgcgtagagtgcatttccaagtcaatattatgtcagttattgggaattatcatttaatggtagcttttttttggggggtggattctgtgatttataggccacttattgtgttgtgatttcctattgtttgtttgttagacaggcttgtcttc

SEQ ID NO: 57526 - DNA, 944 bp, Populus trichocarpa
  Intron number 4 from transcript POPTR_0014s14910.2 (locus POPTR_0014s14910) derived from phytozome v7.0 (chr-ID scaf fold_14; pos 10950427 to 10951370 reverse strand)
cctggaagctctttactaacagagaaaattataaggtatcgatcaaataggaacatcttttttattgtttttcttgcttactgcaaacatatgatatcttataactttatgttttacggactcccctttctgaaagtatgtggaaaactttatgcgtctttgcaatctggcaaatatctaaaatgcttgcttgattctcatggctaaggaaaatccttaaagctgcattacgacccgctgttaattaacatgctctacaggattgatgcgagttaaccttttgttttgtctatcttgcattcactttcatggccaaggaacattcttaaagctgcgttgctgcccacgtttaatgtcctctactagattaatgcgaaaaggccttttgttttctctatcttgcattcatgggcaagagattgatgttttcctttcaagtgctatgaaacctagcatccctcttctgtatgtactctctctctatatatatatatatagtttactctagggggttttaacattcattgagaaagggaatgttggagtttgaagtgattcatcctgaaaactgaaactttactgtttgatatctaaaagattttcatcatctttacttggtgtagtactctgttgaaattcatttcctttttttttttattcatctgccaatcatgtttctgccaaaatgttatcaagtgctcctgagtctcgattaccccccattcttccaataacgacatggaaatttgcatcatataaaacttggtagtgaattctagattggtactgattattctaaatttgagaagagatatatccgtgcgtgagaaatcagaattataccatgtaaggatagacggaatttgaaatgcatatagatgttattttaaagtgttctttcttctgcagggttctgtttgttttctcctggggctctttttcat

SEQ ID NO: 57527 - DNA, 565 bp, Populus trichocarpa
  Intron number 1 from transcript POPTR_0015s11470.1 (locus POPTR_0015s11470) derived from phytozome v7.0 (chr-ID scaf fold_15; pos 12048463 to 12049027)
gattttaactaaggtactatgatcatggacttattttgtttcttggttatatatttatttggtttcttgttttgtttgtttgatttttaaattgggattttgatgattagctttcgtaaagtccataccatttgttaaagttgtgatcttttcataattttcgtttgcttttttttttgtttggttgcccagataatggaatttagaatcgggtattaaggttgttgttgttttagtttcgaagtaattaaaacataaagctgaaaacaaatgctgtattgggcttagttaagtgcagttttaagttttatctggacataaatgatcttctttcaattggtggtattaaaagcgctttcttttttcggaatttctcgtgggcttgatcatttatgagtaaatttgaatcatatttatgtttttaagtttatttccatcatttgggttattctagtttttataagccatctgcagatgtcatgcttctttaatgttttggaccgtaagagtcttatagagctaatgtgcttctacatgttgttccagggattgattgctgtaaatt

SEQ ID NO: 57528 - DNA, 505 bp, Populus trichocarpa
  Intron number 1 from transcript POPTR_0004s00250.1 (locus POPTR_0004s00250) derived from phytozome v7.0 (chr-ID scaf fold_4; pos 39618 to 40122)
ttgtggaggcatcattgggtgaaaaggtgggctgaaatgcatttgttttggtttgaggcataaacagctgactatgattctaatttgttgtgctactaggtgcccaatataataggtcaactgttattgttttctcgataatcaagagaatgaaaaggaggaacgagaagtagggtttagagtgggataataaaagagtaatataataatagaagcaggaatgaagaggtggatgtaaaaagagcaggcgcactagttacattatagtgtttcttcattttcgtgggactaaccttgttacctctgaaggcctttttctatgctttttagttcttacacttcaaacatgcttaatcaattgtacattcatggaacatatttttcaatcatctatgcaatcctttataagttgccgatgagtggtgcttatttaattttgtttttgaataacatagttttccctctttctgaataggtgcgcttgagtgagagagagaagcagaaa

SEQ ID NO: 57529 - DNA, 858 bp, Populus trichocarpa
  Intron number 1 from transcript POPTR_0004s08660.1 (locus POPTR_0004s08660) derived from phytozome v7.0 (chr-ID scaf fold_4; pos 7231182 to 7232039)
aggtgtgttatcttttaacttaattgattttcatgtgcatttcttaatgtaatcctgagttttgtacatgctaggcagatttgcaacagagtcctgactttacgattcatctaaaataaagctgatttcttgaaggcttctaaattgttgtaagaggaatgagtcatactgcaaatcgtggaagaagaaagtaaataaaaaataaacatcaacgttgagactagttagcttttagacaagaagagataaataaaaaaaaataaatagaaacgataaagattgagatggaaaatagaatgaatttttatctttttaaagaaagtttgtggatacaagttttttttttttttttgtctccatactctaactaaatgctagataatgatagtagaaaaaagaataatatacgtttcatatacttctgaaattaattagaatatttgtcttcatcgttcgtgaacaattcttataatttattgctcactttttgctctaaaaagttaaacaacaagtgttatagatgtataagaatcctactcttgtaggtcacataccttataattaacctcctaatttcttggctgttacaatcaccaaaataaagttgggttgttgatccttgtctaggtcttctgtccgttgggttgacattagtaattagtctccttttctagtttgaattggtacttgaaagctatatatacttcaattattacgcactagttgccttggggggccaaaaaaaacccttcagatatatttaaatttctgtgaaatttggacaaaattatgtgttgacatttttcatcaaacaaatgtgcagaaacgagtgagttttgctcaagaagagggcgaaac

SEQ ID NO: 57530 - DNA, 942 bp, Populus trichocarpa
  Intron number 3 from transcript POPTR_0012s04760.1 (locus POPTR_0012s04760) derived from phytozome v7.0 (chr-ID scaf fold_12; pos 4142657 to 4143598)
ctgctgtaagctccattctgcccctcattgttctttttattcatattttttgtgattataattgtagtgcaaatgggggagaagagagttgtttgtgcatgtaggatgttatgtttaacttttaagtacttcattgtaatgaccactcaaaatggagtcctcatattggatgttcttctgttgaaggaaacaaaaatggttcttttttccacttcctgataacccagagtgattttccaccaaagcatgaactgcttgcaactttagaaacaagatagtgaagatgccagaagcaattttgttatagtttgagtgacaggatggattggaatcctttggatgaagcgtctgctgcttttagaaacaggacactgttaagtttctttcagagatagaatggtcattggtcattttagttttaaagtatgatgaaacttcgcctattatgttacttggacacaaatccttaattccaggacttgtttcctggatttctctttgtttgtaacgtaaaagctactgcaacatttgtaaactgcatattcttaattttgatgtgaattagatttcacagattttattgattacatcctacaatgatttgcaagttcttaaaactgaaataaatgaagggttgcaatatgtgaagaggttcttgacacatttttgttaagtagagaactggttatcatcttctctgaattcccccatatttccttctttcttagtccctatgacaagttcagtcgcatatataatattatttttgtgtattgtcttctatactaaagtataattggaggaagaatttgattaggttcttcttgttatgaaacttattgggttgcttttaccatccaattgatgacaacacaaattccttactgtcacttttagatactccataatcttctttggattgtcagggcaagaggattgaaa

SEQ ID NO: 57531 - DNA, 725 bp, Populus trichocarpa
  Intron number 2 from transcript POPTR_0579s00200.1 (locus POPTR_0579s00200) derived from phytozome v7.0 (chr-ID scaf fold_579; pos 8033 to 8757 reverse strand)
caaagtactgaaaggtattcaaggtacgtagtttgttctcttcttctccttttcggctctctctctcccttttattttttttaaggatttctctctctttttcgagaaagagtttctttagttttaatttttttttgaataaaaactaaaaaaagaggccaacgagaggtagggtgattttgatatcatacaggtatgaatcttcacatgttaaattaaatacaagtgctatttcatagtagatcgaatttaagtattgatatttttatttaataaaatgtgtttcaagaacacaggttgagaagacattaatattttaaaatcttaatgttaaatcactacctacccttttagaaagcatccgttagattctaataagtgatgatccccttaaatgtgattcaacgaaacaaaaacgttgacatatgtcttaaaattctctgctagacaaaccctaaatgtttcaatcatgtttcctatcaggctctatgagcatcttcacttgcatgtcagataagttcatactagattatcatgctacggcctgcctcattctatgtatattaagacgactccaaccgaatccatatagtgtttaaattcttaatagttgagtattgagttataatgttgatctttttgtttccatgataatcatatttattttctccatatttgattttgtgttaggggtgtctttcaccatcgacgccagccgggggcgt

SEQ ID NO: 57532 - DNA, 537 bp, Populus trichocarpa
  Intron number 1 from transcript POPTR_0009s07680.1 (locus POPTR_0009s07680) derived from phytozome v7.0 (chr-ID scaf fold_9; pos 7117551 to 7118087)
agaaagtagaggtaaaataataactccttttttgaagggttttttgcggggttttgacaccctttagcctgtttttgattgactatttttttttatggtttttcttgtattgtttattgattcttgaatttaatgtcaagttttaaggtggctttcgctttgatgggtgctgcattgggttttttattggtatatgtcggtgttattgttcatcaatgctttcaatatgttttgtttttccagacatgcaagggttgattaggggttctttagagactaccaaatttttagtcaaatgggataccgtaatgtaatggttttttcttagtgttcttctcaagttattaccctgttattatatggaaattttctctactggtgtttttttttttatttgtaaattttggtaatgacttattgagcagtttttacttatttttgacaatttaatgtttttcatatctgtatttttttttcaccttggataatgtatttgtatgtttaattttgagattttataggtaaggagcgaggaag

SEQ ID NO: 57533 - DNA, 338 bp, Populus trichocarpa
  Intron number 2 from transcript POPTR_0011s09570.1 (locus POPTR_0011s09570) derived from phytozome v7.0 (chr-ID scaf fold_11; pos 11900489 to 11900826)
caataactttacaaacaccaacctcaataccttaggtaaacagcttaccagactggaaaaacaaatacaaagaatcactaccagttcgattaataccaaaacctcagttgacctaaaactaaaaaattcagtcttcaaaccttaccaagttaccaaaacaagcaaaaaacatatccaagaaaatcaaacagatttcttcaaagccattaaaacacacttataacaccttgacagttcatctctaattgtctcagacacaccacaaacaaccaacccatctacatccacaaatcaagtcaatacactccaaaacaaccctatataaacttctgatgaag

SEQ ID NO: 57534 - DNA, 489 bp, Populus trichocarpa
  Intron number 1 from transcript POPTR_0012s09110.1 (locus POPTR_0012s09110) derived from phytozome v7.0 (chr-ID scaf fold_12; pos 10180598 to 10181086)
tcttgcggtcacggcttcaccaacatcaggacaaggtaacgcaacccgaagaactgtcttcttctttgctctttctgatttgcaactcctcagttctcacagcccatcttctttctctgtctgatttagataaacagccatagaacaccatcttgtaggttttattaattaacaaggtcagattttgtcagcgtttacgcgtttgatggccgcgtgctccattggatattcatcatgtcaaaaattaaggaaaaaatattaataaaacttcaaaaatatatttaaattgttggaattgtggagttcataattgggtttccttttaaaatcataatccacgagtttatgtatgttcttaaaattacttttttttttcctgttttttcttgaagtttatcgttttttgttatcttaatcatgataataaataactcattacaaataaaatttgcagtgttgaaaggtggtgtagacaagatcactgtgaca

SEQ ID NO: 57535 - DNA, 502 bp, Populus trichocarpa
  Intron number 1 from transcript POPTR_0004s03720.1 (locus POPTR_0004s03720) derived from phytozome v7.0 (chr-ID scaf fold_4; pos 2597249 to 2597750 reverse strand)
ttccttttctgtttcttatactaacccttttggtaaaccattgtttcttctgggttcgtgttttttcatttcttttggttttgtgttttgctgtttttgatgttttgcttcgtcatactcttttagtttctaaattttaaatattttctttgatttgtcttattattcacttcattttcattagcttaagacatccgtaataaatttttgttttattttttattttttattttgcaaatattgccatgctttgctcatttgtgtttatggaaacatgttaattatgttgtacttactgaattttatcacattgttgataactagacagatgtagtttatgtcatccaacttacttgcccaatctcgtttgctatgatcattcttgctttaccaactctgtattatttattttttattcatatttttttgtgaattctctaatgctataacaactgcagcctcagtatatgtgatttcttttctttcttttgcagtcatagca

SEQ ID NO: 57536 - DNA, 1002 bp, Populus trichocarpa
  Intron number 1 from transcript POPTR_0011s13470.1 (locus POPTR_0011s13470) derived from phytozome v7.0 (chr-ID scaf fold_11; pos 16214292 to 16215293)
aacagtttccctttctctgccaacgaagcaaacaggtaatgaatatttttgaactcgaaaatgggaggaaaacttcttacgtttcttaagagaatgtgtctttgcttttcttttttccatttctgatctggggtttttgagttcttctttcttttgaaccaaacagatcataaatgtgttgtgtgtttgtgtttttggtttgaatataattggactggtgtataaaagtttgtgtacaaacattgaatggtttaaagatgctgtctttttggagtaagtctttgttaatcatacaggtcagactgagttaatgttttgcgatttacaagcatttatcaagttgtattttttattatgcttttcaatgcaaatcctatctcagtaatctaaattaaggccacgatttaatgtgtgttaaatagttttgcttgcttctctttttcttcaacttttatctttgtggcttcctctttttgaactttattcaagaaggaattcaagtttttatgaagtacggatggtgggtttttcttcttctttttagttataaaattgggtttcgttttgttttctttgcttgtttagtgaatgattatgtgttaatgatgcttaattaaggacaaattggaaaatgggttccttacgtagtgtagacatattgtatcagtttttacaaggtagactattcaggctgaatgcagagttgttgtttctctgtcttttttaacaatttaatactagtctgcaaattgacttgtatttttagttaaacagaattataaatttgactacccttttgttattaattccatgatttgctagcatataaatttcaaggaaatctattgttaaaaatgataattgaaaggtcagattcaagaatctgttaactactgacgtaactatagaaaatgtgtgtatattgctctgtttgacttcttgttataagatgcaaagtggcgtgattttctttaacactgaccaagattttcttttttgcag

SEQ ID NO: 57537 - DNA, 642 bp, Populus trichocarpa
  Intron number 2 from transcript POPTR_0011s13470.1 (locus POPTR_0011s13470) derived from phytozome v7.0 (chr-ID scaf fold_11; pos 16215620 to 16216261)
gtttcagtttctgggatacctgagttttcttacaagtatgtttttctctaatctgtttcggtgatgacctatctgttgattttgaatgaaattactttttggttatacatatgatagagtgatgaggctgattgcaattgagtgacctgatcataattattatgatgttagagtttgttttctgcgtattggctccagcacatgtagaaggtcctgtgctgcttggaacagttgatgatggtgaatggataattgtgcatcaaatttagagtcttcaaaatgatctgatttgaagttcaattatacctgcaaatagcttattttgggggtctaagatagaaggagaaactactggagctttttaagttcagaatgtgtttaatatctgattattaatctcttgatgtagaggatggcttgaatgctttgtatgggtttaacctcctgatgtgttgttatgtgtgttgcaacagaattacatttgagtaggatatgcaatctctttaatctataactgtggcattttgttatgtgtgtgtgtgtgtgtgtgtttttttttctttctttagattcatgattaaattttgttcttggtgttatcgtgcagggatctacaaaaagcaacctataattttacaacac

SEQ ID NO: 57538 - DNA, 1059 bp, Populus trichocarpa
  Intron number 2 from transcript POPTR_0015s13590.1 (locus POPTR_0015s13590) derived from phytozome v7.0 (chr-ID scaf fold_15; pos 13471713 to 13472771)
cttcttctaatattcccaactttcagtggtgaaagaaagatctgaaacatggaagaaagaatattgaagtgaacagtgaacagtgaattaattcacttggcactgttcacgttaacaatgtctccaatgtgcattggacccgtatgacccattgaaattttttttttaattatgtttgacttgaaaaaatattgtttaatattatttaataacactatataacatagtatttacagaatttgatcgcaatttcaatttcatttctaatgatattttacctgattttgttgcacggtcaaaaaaccatgaaaattgaaattcttattggatgaatttcatacatgatgaaattatagataagttaatgaaataataaaaaatatttgatataaagtattatttatttaataatgtaatagttgtacttaaatttacaatatttaaattaaaaactatcaatattaatatatattttttttaatttttttataacctcaatttaaaaagcattttttaatcaaacacattaaactactttttgttcaacctcaatttcaaccacagttttaaccaaacatatatttttccaaactaacctcaactaaaagcactttttgtaaaacaacttttttcaaaccacaaccacaacagctaccgcaataccaaacagacatcctcaagtgcgtttcctcaccctcttctaaaaaccagtctcttccaccaggtcccaagccatggcctatcataggcaacattctccactttggaaaaaagcctcatatctcaacggcatactttgccaaaactcatggccctttaatctcactaaaactaggaaaacaacttctcattgttgggtcctcgaagagggcagcaactgaaattctgaaatctcatgaccgtttgctctctgctagatatgtgtttaaagcagctctctttgaaaccatgtccttgaccgcatatcaattgtttgggccacacagtgctctgatggatggaagtctttgagagccttgtgcaggaacgagctattctcagctaaagcaatagagtcac

SEQ ID NO: 57539 - DNA, 526 bp, Populus trichocarpa
  Intron number 1 from transcript POPTR_0011s13970.1 (locus POPTR_0011s13970) derived from phytozome v7.0 (chr-ID scaf fold_11; pos 16572052 to 16572577)
ctcttattttcagtatctactaaaggtaaataattgctagacttgttgaggtttaagtgttcttttgttgattaggtttctgggttttgtttggtttctgagaaaactgagaaagaaaggagaaagctttgtacttttgtgttctgtattgcttttacttggaaagaaacaagcttgtttcggttgagcttattggggggtctttgaattttcagtctctatttgaattttcttacatttatgaggctagcgatggatagaagaataagaaaattttgggttttttgcctctttttggacgtcaaatttgaagagaagtggagctcctttggggtctagtagctatcactgtcaagttttgtggtgtttcatttgcatctttatatttagaatctgtagtatactgtatttttctggcaattttcagtttttttaaaaaaaattatgagctcacattgtttatatgtctatttatttgcttgagatactaggtgaggagggatttgagactttttcaatctagcaa

SEQ ID NO: 57540 - DNA, 479 bp, Populus trichocarpa
  Intron number 4 from transcript POPTR_0014s11610.1 (locus POPTR_0014s11610) derived from phytozome v7.0 (chr-ID scaf fold_14; pos 8603906 to 8604384)
ccttcagagatcaagcgttacttgtaagcattaccctgacattttctttatagttgttgaatttgttctttgttctagtgttgtctttgatttttttttgtttgggttcgaattcgcagctaatttctggatttgtctctgatttgagcagcatatctttgtttcctacattgataagtgttggaccgcttctgtttgttagcccagaatcatttattattattattattattctttgactgatcagggcagacaaattttgcaggatagtctagtcttgataaaaaccattctcacatcaattattggcgtctataatagaatgaatggttactcgtgtttagtgaagggtttgcttatgcatctcatgttttctagttctaggtgtattgtgctgtcactcaacttattctgtctctttatgtgtattttttcttcttccagtgaagtttatattagagcaccttcaaaagggcggc

SEQ ID NO: 57541 - DNA, 559 bp, Populus trichocarpa
  Intron number 3 from transcript POPTR_0014s04870.2 (locus POPTR_0014s04870) derived from phytozome v7.0 (chr-ID scaf fold_14; pos 3760970 to 3761528)
tttcctgatattcaaatttgttgtggtaggttacttactttgtttctaatactgtaattttatgccttttactactttgatttgcattagttgcttttttgttttagttcatggttaaagctataggtgatttatggttactcatcatgttagaaatcgtttttttttccttttaaaacacttcaatctgaagtcgatgcatcaatttttttgtttggatgttaatttcatgctacaatcacattttgctttcatttaattgtcaataatttggatctattactttaatgaagcatatttatgtttctgtggtttagaagaaagattgtaggataatgagcttgaagcatgctcattaagaagtttgatgttctttcctgattgtatggaggattagtaatgaagcatgtggatcgttttctgcttgttgaacttggaatatggttgcatagtggactgtgaagcttcactgttgaagttgtagaaatttcatctttcaaccgtaagtttttattttgtcacagctgaggttgtggcaggatcagcagcctggcttggc

SEQ ID NO: 57542 - DNA, 739 bp, Populus trichocarpa
  Intron number 1 from transcript POPTR_0012s03450.1 (locus POPTR_0012s03450) derived from phytozome v7.0 (chr-ID scaf fold_12; pos 2731222 to 2731960)
gctaactctcgtaaatacctttccctctctttctctcttattatcatacttttaggaatggtgattccggaattctgtagtagtccaagatatcatagtaataataatcataatcgcttgttaatcgtcttttttagattctggagcccatttgcaatttaatctcactggagaaattatggattataagtttcttttttcggatgtaaatgtgtcttttcttactttatttatatatgattatcaatagataatctattttaggatttgaattcaagggtcttgagataaaactgaatctaagcactcccctattctcattttgtaatgataaatgttttaattatattttgagaaacttctgaaaaataagattttattatcaatttgtggaaaatggaaaaaatatactatgcattattgttttttttaaaattaataaaggaattagtttttttgccaatagggttggaggggttgtaaaatacttgtttaatgaagtagtttttgtaagaattataaaattcatcttcgtttgtacttgatttggttttggtgttccaacgttgtattttggttgcctcaatttctgacacgatggaaactgccatgcaccatcattgatgcttatagcaataaattcatgtgtggggtggggaacagttgctgtttgggtattgtttgatttatgcattcactttgtacaatgcaggccaaaacattaggaagttggtaaagg

SEQ ID NO: 57543 - DNA, 467 bp, Populus trichocarpa
  Intron number 2 from transcript POPTR_0012s03450.1 (locus POPTR_0012s03450) derived from phytozome v7.0 (chr-ID scaf fold_12; pos 2732025 to 2732491)
ggaagccaagagaaagggaaggcactctggatgtatatttaatctgaaccatttgactatttagagtatttgcaattttaattgtatgtttgagcttgggagttgttgaagaatggagctctatgaaatattttttgaaaaaaaaaaaccaagtgttttttgtagaagtaggccactgttcatgtcttatattcttctgtttgtgtctctatcttgcactttcactaatatttgttttgcactcgatttattaaatatgtgaaaaaaaattcttaagagagaaactaaatttttagatgacatacctattaattacgttgggaatggtgctatgttttttttattcgtatcatttgtctttggctggttcatttcctatatgttttgtgggaaaaaggttgctgactacaaagctctttaaaactactctaggtaagcgcaagggtacaagggaggctaggttgcca

SEQ ID NO: 57544 - DNA, 819 bp, Populus trichocarpa
  Intron number 2 from transcript POPTR_0011s03060.1 (locus POPTR_0011s03060) derived from phytozome v7.0 (chr-ID scaf fold_11; pos 3061657 to 3062475)
cttttgaatgtaggaggcaatgagttgctacttgcctgtctcctcattctctcccactcttgagtctgcaaaatgtttcccatctcaaaaagctaacacagtccccagaacacatactatgaaaactgaaattcaggctcagtacagatctcctgtttcaggtgtctaggtttggataggccctattgaaatggttgcaagtagtagcgtttccagcagagaatcaccaaagtcaagcttgattggcctataatgacaacatcacagtcaaggagaataagggaaggaaagtaactaaatgtggtttctgtatgcctacaactggctatcatgttgcaatgcaagaaaataactaaatgcattagctatcatgtttcattaaatataaagcgtgcccatcatatcaggcaaggcaacgctcgctcagattcaaaagcatcttcttcttccccaatttcttcacagtactaatgattgcttctgcaattgacaaggttaccatttctaggtcaccatttgttgttttttcattaggtatggcctttgtgcttttttttctttgagatatcttcttacaagttatttatggtgtagattatgatgaatgaagtagctctatcctctggatttttatttcctagtgtcaaaatttcattcttcctaaggacagcaaggcttactagcctcgaaccaaaggcaagaaagaaaaatcaatccccctttcttgttattgcatttctttgcaagtattttagagagtctatctttcactgaatcttttttgttttatacacaggtaacaagtgctctttgtgtcaa

SEQ ID NO: 57545 - DNA, 771 bp, Populus trichocarpa
  Intron number 1 from transcript POPTR_0012s14810.1 (locus POPTR_0012s14810) derived from phytozome v7.0 (chr-ID scaf fold_12; pos 14552293 to 14553063)
cgaatccgaatctctgctctcttctcttgtttacggttcgtctctctctctctgcctcgagttcatttctctccgttattttttttttaaatttcgtagttcatatcttcaattttgtatattatgcactcattacgcttcgaataatctcaatttaggttagtttttgttttggtgctgctgctgctgctgctattattattatatgattttgttattataatcaaatcttaaactatcattttcaagcgttttatttattaatcgagttttgctaaagcattcagctatctgttctaattagatttagatattacatgattttccgctgttgattttctgtttttctttttaattcagatcgtacaaattttgttagtgtctactagaatttctgtggttgatttaggttaagctaaatagtttgaggaaaaaaaataatttcataataattagataaggctgtttgttaatgataatgttttacatattgatctctgtttggttgcgattactatgcatattttgcttttttggttaaaaaacggtcttctcatgactcttgaaacgtggaattttgaataattgtggaaaattttaactaatattagcgacatataatccttattagattatctgttatgattcttactcaagaaactgaaatgaagctcttgattttattaacgatggtaacaaaaacgatgttttatgttgattttagtcattttattcgtccttttgtgtacagatacgtcacagcagtttcag

SEQ ID NO: 57546 - DNA, 1008 bp, Populus trichocarpa
  Intron number 1 from transcript POPTR_0009s12700.1 (locus POPTR_0009s12700) derived from phytozome v7.0 (chr-ID scaf fold_9; pos 10317596 to 10318603)
atcagctaacaaccagggttcctgtcttcgaaacagtacgtttcacatactctttctctcttcttttgtctctttcatgtgttagacatccatcactgttcggtttttacttcaaaattgttgcgtcggaaacttcttgtggatttctacttcatatgctgagagccaccgaatttcattgttaagattagttagtaaccgtgttagaagttcattctagcttgttagaaattcaactaattttcatgtgttctttgaattatttaaccctaattgtaactatttctttatgatgcatttattgcctattattttgaaaattcagagcgctattaccttggactgagcacaaactgtcttaagatcatactagagcatcaaccaaccgttttaattgtgtcttcttttgtttaaatgcatactgttgtgttttctattaaccagatggtttgaatgataatgcttgtgattgtccgatgatttttcatggatttcttgagggaatgttatgattagcatacgtatggtaaagctgcaacaccgttatattgctgcatctgttgatttccgtgagttgtttcgttattaaacagctgttgggagttgggcattggcgtgcctgccatggattgcagtaggacaacgaaattagaaagttccctcattttgtagcttttttaggacttctgtttctctcaacttttagcttgtctatatttttggaaaaagtcgatttcatttgaaggatatgcgtatcattactagaaaaggatacaagtttttctgcctctcatggactggatgtcgaatttgaactgttatggaatcattctttaattagataattgtgtcagggcaataccaccctgcgggcctccttagaacaatatgtaatttgcatgtcttcgttagaccatcaattcaacgccttctcttcggattttgtggttccgcattaacctgacttttatcttgtctattgacgttgttttctacatatctttagcc

SEQ ID NO: 57547 - DNA, 922 bp, Populus trichocarpa
  Intron number 1 from transcript POPTR_0015s07260.1 (locus POPTR_0015s07260) derived from phytozome v7.0 (chr-ID scaf fold_15; pos 8399399 to 8400320)
gaaggacaaaaacacaaagaaaaaaagtactttaatgaccaaagccaaaaagaataaaaaactctaggaacccaaaaggagaaaatggatataaataatgggatgaatatcttaatgtagcttgattaacagtaaagctctgtagagttatttgtagggttactaatgagcaaaactagaataacgaggtaagctcttcatttaatgttaagaaattcctgtaggttcttgctcggagtaaaagtaactctctttctcctagtgcccaagtgttattaattacgtaaattcatgttagaaatatttcaccaaagaaaaaaatttctttgttaacataaatttaccgtaaaaatcagctatggattagaaaagatcaggacaatatgattaatcccgcggaaattccgaaaaacacaaccatctttgatttaaaatcgattacttcaacgcaaaacattgtagtcttcacagctgtgacaagacctaaacacctcgtattctacaacaaacagacaatgcaaatctttcttttgtttatcaatctttaattttcattttccagtctgctttacttggaattcatttcactgcaattaccggtaccgtttaaatttctttcgaagtattattgaagtagaatagggttgtatgattataaatgaaagtaatttctcatatatgtatgtgttttgatgcatggcatggtcttgatggccgaaatcgatctgttaggcatcatttttactttggtttcctacggttagattcttgatgtgtataaaaactagcttccaatttgactacaaatcgtttaagctaagaactaacacagatcatgtctttctggcattaatttcattctttgaacaaccatgcttaattataactatcggttacgatttttgtcgcaggttattggctc

SEQ ID NO: 57548 - DNA, 752 bp, Populus trichocarpa
  Intron number 1 from transcript POPTR_0009s11930.1 (locus POPTR_0009s11930) derived from phytozome v7.0 (chr-ID scaf fold_9; pos 9825322 to 9826073)
gccacgcaagaggtatagcagttataagtctcactccttcacctaaataataaccaagataaaatcacagtcacacatgcatatttagctacctaactatatggtcacttacaagacttgactttatagctaaccatatcatgccacaattaaaggtagctaaatctaatcaagtggggtgtcatggagtcactgctactgtctaactctgtaactttacatggattttcacaactctttttctgtggtgtgctttacagacgggattgtttagtttatttatttcttgagagccacatattgactctcatatggcaaaaactgtgcatctacaatccaaactaaaatccaagctctcatcaacaagaatatgccctcgtgaagactgactttaaatggcccaaataacatgcagagagtttagtcctataagaaaataataagttacgtgttgtggaaaattattgcagattaattttttaatttcctttttttttaaccccacaagtgcttttcacgtggcttcaatgaatagtgatattgacaactaaattatgaatttaacaagcaaacatatagctttcaaacttaagaagttgcagtttagtggtatatctctttcaggagtttcagccacagcaaaacataatttctgaaccaaaaaaaaaaaaatcaaaagaataaataatgaataataataataataactgatgacaaatatgttgatcttttttttttccccgacatgcagg

SEQ ID NO: 57549 - DNA, 811 bp, Populus trichocarpa
  Intron number 1 from transcript POPTR_0966s00200.1 (locus POPTR_0966s00200) derived from phytozome v7.0 (chr-ID scaf fold_966; pos 520 to 1330)
tctcgcggccagggtttaatccattctctcgtaaggttggattttctggtacatgttatcttctcttgatttccgttgtagttttgatcaagattacataactgagttgctgattagtgacttatttgtcgaagatttgtgatatatttctcggctttagtctagaattttaagctgtatcctgcgtggatttttttcgttagtttttttttaattcttattattttttatttcgtgttataagttgctgcatgaaatttgttcttgtttgacagatagatctaagaaattaatcgctgtgatataagatttttcgaagataaataccgttttatacgtccgtgttattttcattggcatattaaaatatggttttatatagatttctttatgtttgtttttattgcttatgcttttacttgggcgatgattttgttaatatttgagataacagacttgcagttttaaccctgtagttttgaaattgaagctggaaaaaatctgggacgattttatgccctaattattatggataatagttattagattttcatgccgtattttttaacagtcatgcggtatttacgaataactattatctaaacagttcttccagtaccgcctttgtttatttcttagttctcttctggtgtttaattaataacacttgtatataatctgaaactattaatttgatttgacttaatactttatgttgagtatgctttcttcttgtaattttttactctaccattgattgtttaaacatttcatatcttcttgtataacagttcagctctaatatatcatc

SEQ ID NO: 57550 - DNA, 691 bp, Populus trichocarpa
  Intron number 1 from transcript POPTR_0004s15410.1 (locus POPTR_0004s15410) derived from phytozome v7.0 (chr-ID scaf fold_4; pos 16051212 to 16051902)
gttgcttccattctccaagacaaaaagctggtaaactttaatttactttcttgctctgtttgcttgtttggttacagagaaaatgaagagaagagttcttgtgttattatagtattagctcctatttaggtactcaaaatgtagaaatctgtttggcttttgagaaaattgcaggagttctagtttttcagctagaatccagctttgattaccgacgacgacttttttattatccttttttttttcttattgcaaattttgcttgatgattttctatcctcatgggagttgaaaattttcaaatttgttaaccaggcaaggttgaagaaagagttggaaattagcttactgttaatgtctctactcttttcagattgttttgacaaatagtttgagttgtggatcatcgtttgccttatgggtctttcttttccttaattcttctgtatgtggccttgaatggtgttatttttcattttcctttgtctttctttagccttaatgtcttattcttttttcctttttaaggtattttctgtggtttgctcttgtttactgtacaagaggattcaatgttttgtttgacttgaaagagagcgcctaggttgtcttgaaagatggtgtctttgtttcgaaatgtgacttgattgtttatgccaacagaagataccaaaaaagtttgtcaacaaat

SEQ ID NO: 57551 - DNA, 541 bp, Populus trichocarpa
  Intron number 1 from transcript POPTR_0009s16940.1 (locus POPTR_0009s16940) derived from phytozome v7.0 (chr-ID scaf fold_9; pos 12777252 to 12777792)
accccccctcgctcgctgccaatcttactctcaaggtaagaaatctaaatcccctttcttttttagggttcttgaccatggttttaacccatccatctctttctttgagagatccatttctctctcattccctccccctttggattcccaatctcaactacttcgccattgaatttcttagatgtgaataaggattatattacctttcctttccttttcttttgcaattgctttattgctctctggatatgaatcgggctttgattagatttgtattttgggtgtttgaatcatagtggatccccccccccccaatgctctcttcccatctgcttcatttcttcatacaatgaataatgctcccctctctttatattatttcccactattcttatacaaatcactttcctcttgacattaacaatctcttctgcaagttgatctggtcttcttcttcttctttattgcgtttcttttcctgacattttccaatggttttgctccaggttgcgagacttgtgcaactggggccaatctttgt

SEQ ID NO: 57552 - DNA, 497 bp, Populus trichocarpa
  Intron number 1 from transcript POPTR_0015s03740.1 (locus POPTR_0015s03740) derived from phytozome v7.0 (chr-ID scaf fold_15; pos 3569307 to 3569803 reverse strand)
attcttgtcgatttttagagaatttgatcgtcaaggtacagtttctttttgctgtggtattgttcttcttcattttattgagataaagattgtggtacatccattttagcacaagtgttgtaagaattgatataatccctagttaaatatgagattttgagttaaggtcaagggtgtggtttggtctggtgattaattgaagaatggtttttgggttaggttgttggtgaatttagtatctgggttttgacgataatagtctgtgttgggcttttgacgagctgttcagattagattgcacaactaggaatttgtattttggaaactggatttggatagagttgaatgagtaataagtagttttgctaagtgttttgtctcaataggtatatgtgctgattggaaggattttggtggaatgtttatgggatgagatgactttgatgggctactggctatattttctctttgatcatacagttaggtgaagatcagag

SEQ ID NO: 57553 - DNA, 650 bp, Populus trichocarpa
  Intron number 1 from transcript POPTR_0014s09350.1 (locus POPTR_0014s09350) derived from phytozome v7.0 (chr-ID scaf fold_14; pos 6950394 to 6951043)
gaaataaatttgtcaggtttgtcacgtgaaatcataatcctagacaccacatattatcattattattttttatacatatgaattttagcattattgatggtatgagaccaaaaaataaaagaaaattgaattctgttgataatggagtagtgtttttttgaatatttgatcaaatgacttgagactttaattagttataaaccatcctgatagatttgtgttcattcatgttggccatattgggtggttggaatcactctcagtgtgtgaattatagggtttttggcccataattagttcatgatatagagttgttttggaagaatatttttattactgggttgtgattatgttgccacatgttgaacataatgcaactttcgcattgaatattcagggtggctgaaatcactgccattcttccagactccagtgcgtaaattgtaggactcttagcttttttctttggaaccccatgtgtagtttaattaaagtgttggattgttttgagaagagattagttatacagggttgagtctatcatctcctcgacggtttgcttggctgaacttagcatgtcttttttgcgctttcaactcttactttcttatgcaggtttcaggactggagctcagagaaatccttcagtt

SEQ ID NO: 57554 - DNA, 563 bp, Populus trichocarpa
  Intron number 2 from transcript POPTR_0009s04310.1 (locus POPTR_0009s04310) derived from phytozome v7.0 (chr-ID scaf fold_9; pos 4743742 to 4744304)
tgaccctccagaagagatattcggaattctctgaggtttgcattatgctattgatttcagttctttaatttgtattacagattgcattcatgttcggaggatggtgattatagcatgtttagctccaatagaaacagcgttgcaacagcagggttcttcacgaaccaaaatcataaaaaataataatgaaaaacttggggtgaacaagttgttttctgtaagtttttatggccaagaccttcaactgaaatgatgctgttcatgcactaaactctttattttaaggaagaactccttttgatacttttgtatgcttgttcatgtatgcatgtgatcagctggttgttttgtgactagagaacaaaacatctgcagtttgtttttgtgtttactagtcagttcatccttggtaaattgcttcatgtgatgtaatcacaaaaaaggaactcacagttctcactgaactgctgaaggggtagagctgactttctactgttaatgcaactgaaatctgattcttttatgtccataaattgaaagttttattaatttcagggcttcaa

SEQ ID NO: 57555 - DNA, 765 bp, Populus trichocarpa
  Intron number 1 from transcript POPTR_0009s16530.1 (locus POPTR_0009s16530) derived from phytozome v7.0 (chr-ID scaf fold_9; pos 12527505 to 12528269 reverse strand)
tcttcgtcttcttttcttgcttctcgctctttcaggttagttctttcttgtttcgactgccttttgcatgcattgttctgcttgttcgttttccaggaaagtgcgaggaaagaaaatagatgcttaagttgctggcttaactgggttgccttttttattgttgtatactgtatattcaagcttggaaaccaaggtctgagaaattaccaccaatattaaaaaaaactgatcccttttgcatttatttttcgtaagtctatggtgaattctgtgggatttacctgttttcgtgtttcttctctcggcgggtttccttttatgagtttggaactgggattttaatctaactgaagcttgatgggaataattatgaactggaaaggatcctgttacttgttgaacattcatagtggcatacaaagctagtaaattttattcttattcgagttttagactcaaaaagtttttttatgtcccttaggagtttttttttaaaaaaaatattttgatattttttgttcatttttggagcagagttgtttttttttttcatgtgggcatcttgatcatattttcttcaatacagttttgcacgcatattttaatttcggatcctgactagaagctattcctcggatcttctgcatttttgaattgtgtgttgtgatgcttgatgattctggttcttgttcctttattctctggtgttcctatcatggtttagtttgttcaacttaaaactctgtttttcggattcaggtgtcc

SEQ ID NO: 57556 - DNA, 783 bp, Populus trichocarpa
  Intron number 1 from transcript POPTR_0012s10520.1 (locus POPTR_0012s10520) derived from phytozome v7.0 (chr-ID scaf fold_12; pos 11271578 to 11272360 reverse strand)
cacttaattcacctgaactggaacgatttctcactgtaagtttagactttccattttcacaacttcctaactttacattcttgagctttattttttgaaagatttacacttggtgtttctattttcttggtaagaatatggtttagtttttttaatcattgaaggtctcatctttttggtcattattattagttcattgattagttgtctggttatcataattttaccttaaatctttgttgtgtatttagctgcttttgctgaaagactcaaacttgatcggatatttgatatggtttgataatttgggtgatggggttagtgggaaattttctgctaaggattgtttgctgattcgatgagtaaagttatttttttgaaagtaaatttctggtttattattttagatgatattcttatcgactttcctagtatagttgttggttcttgtttcttttttagggaaggtgctgttgtggttttaatgatttgatttgatttgtaaagtcttcagaactatcacttggctatcatggatttaattgaataggtaattatactattttatgtgtaatcattgcatatttgcttagagtggagaattaacgagcaagaaaggctatttgaggggagtgttgccttgtaatttgagtatcttaaggtagtaatgaatcgggagtggtcgttattttctgctggaacttcgatattttacaattatgcatgtgattctcattttggaatgatattttttgtttttttcaggaagagaaggaaagagct

SEQ ID NO: 57557 - DNA, 729 bp, Populus trichocarpa
  Intron number 1 from transcript POPTR_0012s13470.1 (locus POPTR_0012s13470) derived from phytozome v7.0 (chr-ID scaf fold_12; pos 13610986 to 13611714)
tgcagatttaagcaggagcagatcaactcttacatgtatgtgtctttgattatttccatgacgtgtttaaaaatttatttttttctttcctttttctgaataatataggacctgacatgatcatatatatatatatatatatatatattatctgggtttcagtttttgttatgtttttgtgattttcaatgctgaaaagcaactgggattctctcactttcaagcttgtcttcggtttcgattgtggattgcttttcctttgatggtttttgagatgggatcttgagatttacttgtaattcaattttttttagtattttctaattcagatcgtgattttaatcaactttttttggttttggaagatgaaagttcagattttttgtgatgtaataagaaggaaaagggtatttgttttgattagtttttgtaacaagtcaatgatgacatgagcagagattagtggtgtgttggtggccaatatgaggaaaaatggagagcgcttgtggaaagattaattatctgccgaattcccattttgtcaacagtgatatttgagtgtgttgaataacttttctggctattagaaacttaaatcaaatgataaataatacataaatagaaacagcatcacggataaagcagattgagttggatttctcaataatgtggattatttctctttgtttttcaggattgttaattgacgagcaggagaggaatctgttt

SEQ ID NO: 57558 - DNA, 189 bp, Populus trichocarpa
  Intron number 3 from transcript POPTR_0009s02980.1 (locus POPTR_0009s02980) derived from phytozome v7.0 (chr-ID scaf fold_9; pos 3708615 to 3708803 reverse strand)
gaaattttcgtccctcctgccaatcccttgggtacgtaaaatatcccttataactagctaatatcttcttgatgctatcgttttcttttcaaaaaaaaaaccagcaattgtttttttcatttgatttaatttccaaataatcatgtgatttcagcactaaatcccatttatcttcttgtccctggaaaa

SEQ ID NO: 57559 - DNA, 628 bp, Populus trichocarpa
  Intron number 4 from transcript POPTR_0014s13890.1 (locus POPTR_0014s13890) derived from phytozome v7.0 (chr-ID scaf fold_14; pos 10149599 to 10150226)
gggataaagcgacaaaggcttcaaccagcggcagtgtatgttatgtacataacctcagttaacttattttggtgcttttgttgctttagggtcctctgtcggtttctgctattactttctcggtaactgtttttccttgtgatcaatttgacttctttaaaaaaggaattagaatataaattcttccttaatgtatatgttaccgggaaaacactcttttaagaaaagagtttcttagaatcaaatccctggagaggtgcgcaacaagaccttgcacactgagcttgtggtaagctagccttagaccactaaagatcaaaataggattttggacaaaaaactagaaaaacaaaacaacttgaaagaaataatctgaatgtgaagtgcggataaatcaagagaaatttgcattatatgggtgtgaacaaacaatacaatgaggaaaggggctctttttacaggcatcaatgcataagggccttgaatacaaatcattctagaactcgtatctcttacttgactgaattggtttgaaatcttttgagtgtaaacaatattcaatttatttaatatcattttgaaggatacctttgtggttttgtggttttatctacctatggacggcagg

SEQ ID NO: 57560 - DNA, 963 bp, Populus trichocarpa
  Intron number 1 from transcript POPTR_0011s00480.1 (locus POPTR_0011s00480) derived from phytozome v7.0 (chr-ID scaf fold_11; pos 196769 to 197731)
ggtctacaacattcaactctgccactgtaggtaaagatcttcctcctctttccttttctttatttcttctacaaatcaaatccagcccttttcttatcataaaatcaatgtcgatggttttctttttccaattattatctcatttcatttaggagtccaactaggtagatcagagagcacattcgaacacgccaccatatagaaaagacaaacaaagggaaaattgaaatatatcctaaagtttgccctcttttgttatgaaggacaacaagccggctaatataaatcagtgaatgagatttcttcaatgatttgaagtaattacttttggagtgaattcattactatattatttggagtagatttactcattttgatggaattgaatatttattttaatataataatgatttagataaatattttaaaaaatcacaataaacatgatttatttggattaaaattgtccgattggatgataatatttacattataattcattattatattaaatatttataatttatattataatagatttgatttttcaataggtttcaatattttttattgtattatttgtgtcactttctaggtgtttgtttttgtgttataatttactttttaaagtaatttttaatttgattttcatctaaaaaagtatatgatgtatttttaggtgattttgatatattaatttaaaaaataattttttaaataatatatatttttaattaaaaaatacttttaaaaaatatttcacaatccaatatctcacatctaaacgaggaaaaaaacatttgattccattagcaagcttagaataatcccaaatcacaagcatgattacgaattaaaaggcttgtacctttcataattagtttcttacaaattaaatactcgcccacattatacgtcaaaccaaccaagttttatgatctatgaatgcagctgctgttggtg

SEQ ID NO: 57561 - DNA, 507 bp, Populus trichocarpa
  Intron number 1 from transcript POPTR_0011s04310.1 (locus POPTR_0011s04310) derived from phytozome v7.0 (chr-ID scaf fold_11; pos 4319670 to 4320176 reverse strand)
ggccagcctgaaagaaaaaggcctgctttagctaggtaaaaaaataacttattttttcgttttttgagtgagatttataatatatttgctttcatttttgtttttaatttcagttactgattttttgaattaatgttagttatgaatcttttactttgtgtcttttaagtcaaagggagtctttgcttctagtaacctacacaaactagaagatataaatttatggttgaaaaaagaatttttggttttctttccttcctttttttatgtgatttgtgaagagcatcaagtagaaagcaaaaaatattaatttttcttgcttggtatttggatgaaatacgccttctattttgtttgagggaaatgaaatgaaggtcatttaagtgtgttgttgggcttgaaattgttaactggttgaaacttgaaatccctgttgaaatttgtctcaaaaagtttttgaattttcttgcagtgtaattgttgaagctctgaaggtggatagcttgc

SEQ ID NO: 57562 - DNA, 579 bp, Populus trichocarpa
  Intron number 1 from transcript POPTR_0014s12320.1 (locus POPTR_0014s12320) derived from phytozome v7.0 (chr-ID scaf fold_14; pos 9104176 to 9104754)
ctaatctattggatttgggtctcaacccagctcaggttcggcctctttataactgttttgttttttttttctatgcttgtgtgctttgattatcatgttagagatgttggcatggttatgaaaactgtgtttatgatgactgtgctttgctaggaagaatgtgaatagaaattaggctttgattagaaggctaagatataacttgaaatgaaaaggttttataagtgaacaatatgatgttcaaatatgaaggatggatactggatgaaaacagtgtttatttagtagatcaatcttacctcgtaatgctataatcttgtaatctgaattgccaacattctgcatcattagcctgaatactttctgatcccaggttctcatttttcaaaatggatacactgttgaaaattggtcttctgtttgctacctttttggatttccattcctcttgaaactgcaacttctaatcctgtttgtcttgcatattcagaaaccattgatccaaacagaatgctttgcaaccttcttatcgtcacctttgattgcactgatgatactgtccttcaatgaaaatgcagg

SEQ ID NO: 57563 - DNA, 505 bp, Populus trichocarpa
  Intron number 1 from transcript POPTR_0011s10520.1 (locus POPTR_0011s10520) derived from phytozome v7.0 (chr-ID scaf fold_11; pos 13010606 to 13011110)
cccatctactgtcgcgtctccggtgaaattctcaggtgggtatccttaaaaccctttaaattcaaattagtatgcaataaattcatgcagcacgggctgtttaagcctttaatagataggggtttattggttgttgcctatggttgattgttatctacataaattggaagatttttagtttagttttaacacacaaagaagtttacttcttctttttttccccttttaatccaagcaagtcataagattttgtcttccaaatgcaatttgacttgggtcattgattcaaaacaatagattttaatcaggtaatattttttatttcaaattggtatgcagtaaaatcaatcaattagtcttcgttggttattggttttggaaattaattggcttaatcggaacaacaaagcatggattttaacaattattttcttcgtagtctcatttattggatcgtaataagtaattctagtgttttttcattcatcagggttggtgagataga

SEQ ID NO: 57564 - DNA, 966 bp, Populus trichocarpa
  Intron number 1 from transcript POPTR_0004s16660.1 (locus POPTR_0004s16660) derived from phytozome v7.0 (chr-ID scaf fold_4; pos 17059908 to 17060873 reverse strand)
tccctaaaacacccacaagtgttactggtttccaggtaattttttattgcttgattggtttcttggattatttttttgttctcaatctttactagtattttattattattatttctccttcatgtgtgtctctgtctgctatctcttttgttgctggagatagagaagacgatgatggtgattatatgattataatctacggaccttttttcctaaaaaaatattggatatctattggtcttgtcctgcttcctgctcaggatcatgttctttttttcccctcttttcttttgcttgatgggcatcaaaacttttgtttttaaataattctcatgggtttaaattgtctgtaaactttgaaaaatccagaatttttttgttttaggggaatttttggatttaggttatggattttgttgtttctttagtacgtctatactggatcgattcaaagaggttttttttaatcatttcggttctagaattcactaactgctattgtttacatccattttctttttttatctctttgaaactgtcaaaccccttaaaaagctttggttttttgcatacaaggatcttttgatttttgattcttttgttctttatgtccaaaccacctgaggtgttaactgttgattatcgtagccaagaacttgtaagctccccttttagctcatgatactgaaatactatggatttcatttcagcttaaagtgtattctttctgtggattatttctttcccttgttgtattggtcaatttctcctgtaattttttattctcgttttgagcttatacttaagtgtgggtgcaatatctacgcgtgaacacaaaattgcgaatttggaattccaactctaatgataagagtggttaagcaccctcctggtattaagtatacttattacagttgatggtaatggaagctcgttttctatgttcatttcagttccctgggcggt

SEQ ID NO: 57565 - DNA, 845 bp, Populus trichocarpa
  Intron number 2 from transcript POPTR_0015s12250.1 (locus POPTR_0015s12250) derived from phytozome v7.0 (chr-ID scaf fold_15; pos 12591832 to 12592676)
aagggaggaattagatatcatcccgaggtgtgtgtgagatcattgcgtttttttactttctgtactaatttgtgtttcttgaagatttgatgtcttattaggccatagttgccctgtctgatttgtctagttaagggcaagtttggatttttcaaagggggctttgttaaggtatggacgaaacataggtgattatggcttgaaaagagaaaaaaggccaccattgattcataccaatcttagctgggatctgaatcctgatttcctctggacgtttggaaataaagaagcttatcaatttagtatatacagatttacctggtcctttacgggccttatgttgaaaggaatttgaaacagatatttttaccaatgcagttccatggataagttgttttagaaatagggttgatgctgttgttagtgcttgcaaatgttatataatctagaattgttttgggatgttctgtctttgtttgagccacgtctgtgtttgagccacataaacagaatatggttaggacttaggattatctggacagaacagcttttatatcttgtgaagtgtttggcatccttcttgacaaaggatttctgcctactcataaatgttctaaatcagatttctcctagggtaaagttagcatggaaaaaaaattaaaaaattcattcatactttcctcttattttatttctgcgccaaattttccagagcaaatgtcacctgaattatctttgctctgttgtatcttaaacaattattggattgattttgcttgaaggatatcgacttagaaattgatgctgatgctttttcttattttgttcttgaaaggttgaccccg

SEQ ID NO: 57566 - DNA, 756 bp, Populus trichocarpa
  Intron number 2 from transcript POPTR_0011s14220.1 (locus POPTR_0011s14220) derived from phytozome v7.0 (chr-ID scaf fold_11; pos 16706038 to 16706793 reverse strand)
ctggtaagtgccattgttttattatattagtttttcatgcttgcttgtgctctaattttgaagttgatattaattctgtcttgttgtgttcaatgcatttgttcaatgcgtttgtgtttgaatcctgagaaaatcgagggagaaaacaaagggaaatctttgcacttcatgaatttctctctgtttctctgtttcatgattttatttttttgaggtcccagattcaatcttcaagttttcatccagaatatttaattttgctctcgtactgaatttatgcaaaatgttatatataaggtacataacaaatgagttttttggggttatcctagggagaggcacctcttttctctgttgctcaaaagtggtccggggcttggtattgattatagggacatatctcctgcagatttttgagaaatatacggtgctcagtcaggtaggtaatatgcggtgctcacaaaacaagacagaataagcttcatgaactacaaccttgtcgttagattattcggtttcggctaacaaacaatttcagcaatgtagaacttatctataatgctagaagaatctattgtggaagattaaatgaaatggcacttaatctagtagaagaaaatgttaacgagcttctgataagctgttatcagagctagctgatcctggaaatggaacctttgactgctttggagtgagatgagtgttggttgtattgaagaaatgaggccatctaaaagtgcacaattttcattgcag

SEQ ID NO: 57567 - DNA, 1006 bp, Populus trichocarpa
  Intron number 1 from transcript POPTR_0009s12560.1 (locus POPTR_0009s12560) derived from phytozome v7.0 (chr-ID scaf fold_9; pos 10228286 to 10229291 reverse strand)
ttatcttcacacccgaccagacgatcgtgtagcaggttagttaaactttgtttctttcctgctatgtcgtcaaatttgtgagccctgcaaccacatatgcattgtttactgtcaatagttttaccaattagctaatcacagatttgcacaagtgggatcgtgactactgaccactgcctgttgctctgaaacatcgaatttctgtcaataacattaagttttctgctccatgtcaagtgatgcaatcaacaattcaatgaaacttacatgtttcagtctggtatttctaacttgtaggtgatattgagaactgatagatagctaaaacattttaaatcaaactagctttaatttatcctcaaccaagcatcttgatagatgttcatattattagtcattggaaagctctttcttttattttgtttgcagtgaggatcaagcatcttctacaaaccaatcatgaaatggatatcaggaattgcaaaaaacttgtggatagaaaaaccattttcaatcatgctatgtttgtggatatcttattttgtgtctttgcagatgcacaaggttctgataccttacttatagcgttatctgtgacacccagcactcgtagccttgaagggcattgctggtatgcttggtttgacttcaatttcaatatggatcttcccccttgggtttcttgatgaacgtgcatctcatggttgtttttcggaccaagaattagtgaagctggttttactggttgattcttgctcgacacaaaaatttggacaaagccatatccaacattgcatcatggtctcgagattatgtttatttgcaggctggacgagatcttaaatttattagcttgtcaacatgcggatgctttgccttggtgttgattttattaatggtagagttctattccttggtccactggcacctatccaagaaaattctttggattttccatgaatcaccgatcaatgttatcttctcttttcttgtaaacttgcaagaa

SEQ ID NO: 57568 - DNA, 333 bp, Populus trichocarpa
  Intron number 1 from transcript POPTR_0012s06250.1 (locus POPTR_0012s06250) derived from phytozome v7.0 (chr-ID scaf fold_12; pos 6391816 to 6392148 reverse strand)
ttgtcgaacttgtggtacgtactattcgcagtcatgtctgaaacatattctgaatccgttggagttgaaggtgatgatctcttgtatttttattgtttgatccaataagcccaccaaacctaaacctaaagctaaacctaaaccttgacctcaatcttcttaataaactggtagctctatactttcaatttgttttgcttttcttaagatgctctgctcaaactcttcgtttctatcagttaactttcctctctctctctctctatatatatatatatatatatatataatgaatgctacaggtccgggaattagagaaccatccaaacttta

SEQ ID NO: 57569 - DNA, 834 bp, Populus trichocarpa
  Intron number 1 from transcript POPTR_0011s07110.1 (locus POPTR_0011s07110) derived from phytozome v7.0 (chr-ID scaf fold_11; pos 7847989 to 7848822 reverse strand)
tgtgccgaagcttggtttaaacttaaaggaaataggtatatgttcttttgcttggaagtcagtttttctacgacttttctgcttatatgcatacatgtacatcgagctcagcatgctccaacactgtcattgtttattgcaatcaatttttttttcctgagattgtgtgcaactggcaaataatcaaactttgttaattgtagatcctcgatcttttctcattcttctattatttatttatttttttgcaccctggttgtttcaacaaacaaattcttttttcaagattagctgcaagaaagtcgtgtagaacatattagtaatattcaagtatcatgaattgggtaggaccaaatttaatcgtattcgagtcagtctaatgttggtgtgttattattgatatccatctcatggacgcttggtgtcagtgtcatgagtcctggagggggaatccttgtcttctttgaattagtctcatgttggtgtagcattattagttttctttggtatactaatgagaacatcttgattttctaactgtatcaaaacatttctctatcctagaccaccagccttctattttcctcaatttctgtttctgctaaatcacgcttgctgtttccttttccattatttccctatacttctctctcagagtatctcattataagacacttaagtttgaaatttctaggatcatttgtagcagatctcggtttatgaactaatcgtagaattggaagttgccaatttgggaattgccttgaatcaacttgccgggaattcatcactcacagatgtcttcttgttttctttatgcagaatctgtgaaat

SEQ ID NO: 57570 - DNA, 724 bp, Populus trichocarpa; identical to SEQ ID NO: 56026
  Intron number 1 from transcript POPTR_0012s11120.1 (locus POPTR_0012s11120) derived from phytozome v7.0 (chr-ID scaf fold_12; pos 11697663 to 11698386)

SEQ ID NO: 57571 - DNA, 1033 bp, Populus trichocarpa
  Intron number 1 from transcript POPTR_0015s13940.1 (locus POPTR_0015s13940) derived from phytozome v7.0 (chr-ID scaf fold_15; pos 13691573 to 13692605 reverse strand)
aaattactcgtctcaaagacaccgatctatttactgtaagtcttggccttttcatctggacaaatttctcatatttacggtcaagatttagcaattgcaaatttacaatcatgcccgctttggtttttgaagtgtttgaatgagttcttgttcaaagttatgttccttgagtatttttttgacatgggttcttgtagttgtggtagggaattgagtataaaggggtgaaattgaaatagattgggtatgagggggcttagataaagtttaaatctttgagttttgacagtgttgaattgtttaaacaggaatctggtttgagaattgagaacttttcttcattttgtgagatgagttgtgtgggatttaagattgttgaatgattatgtggttaataataatagtagtctggacctgtttttatggaatgttttagagcttagatatgatgttagtttcataagctgaggtcaaagaattttataatgtatccatagtttcctagagagggaaggtttcccattcggttgcagtgcaatcaaaagtaatttatatggggtatctagatgatcaagtttgatgtgaattgagattatgaggtaagagtctgtcatgcgaatgtgttatgtaatgaaatgttcttaaaaagaggaaaaaaccataagcaaatgcagtctctggctgaagaaaatggccggactaaagacatgcagtgtgtcctaaaaataacaactctatgttcagccgtctgaagtgaggaaattttcgaatttctgacagtgggacgtgtgaccttgacttatgttgtaatactcttttttcttcatctttagttagacatgaagggtagtactatataacaacaaaacaagaaagactgactcccatttcagctaggctgaccatatgcaaatgcttgtagaagcagttttttcttttactgcttttctttttcaattttatgattgaaatagttttaattcgtgtgatatgttcaggtgcaagatttcttctcttctgctgaatcaaaggc

SEQ ID NO: 57572 - DNA, 850 bp, Populus trichocarpa
  Intron number 1 from transcript POPTR_0015s11625.1 (locus POPTR_0015s11625) derived from phytozome v7.0 (chr-ID scaf fold_15; pos 12176028 to 12176877 reverse strand)
gaagaaaaaaagaaagtgagtggaccaaaaataatttttttgcgagaatttgagtttggccatgcaatttatttttattttacactttggtaatcttttgttaaattatatctttctgcaataaattataacatattggtcataaaagacttcaattgaaccaaaaaaaaaaaattgagagaaaagaaaaacttacaggtatagtggattgctgcagcaagaaacctaatcattttattatattttgtaattgattaaatttaaattataggtttaaaaatgatggatccgtgaatttatgatcatagcacatattaaaaaattatcattaagaaaccctaatattatggtaaaatccactctaatattatgctcttagcacatataacaacctgtagatatttcagaagttctggtaagccctaacctgtttgataattttaaataatgttttacatacacgatagcttggctattttcttatttataataacctagatggggcacaattacaatgagtttgtttttatattttaaaagtattttttttaaattattttttttataattttagattattttaatgggttgatattaaaaataaatttaaaaaaataaaaaaatattattttaatattatttttaaataaaaaaactttaaaaaataaccaattgcttgaaacaaaaatatatgtgcagaaaataattcaaatcccaatgcttgcagggatcatgtttctatctacactattatttcatttatcacttggtggtgttcaagacattataacgtaaaacgacaaacaccgacgaagttcaagacaaggttgccatcgtcaccggaggtgca

SEQ ID NO: 57573 - DNA, 480 bp, Populus trichocarpa
  Intron number 2 from transcript POPTR_0004s15740.1 (locus POPTR_0004s15740) derived from phytozome v7.0 (chr-ID scaf fold_4; pos 16307932 to 16308411 reverse strand)
cagaaacggttggaagctaaggggtataaaggtttgtttctcctttgtagttgtttatgccatcataacgttgaatagtagttcttttaattatgcaatttgctgctaggacacaatgattggtagtctgcaatttatggtggaaagttgaattcagttcatgaaataatcttttgatgcaacacaattaaagaaacttgtggggatgtaggaatcaaagatttgttggtctctacttcctaccaactgatgatgaattgctggattttaaatcatctgattagcttgtttgggttgttcaagtaaaacaaaacttgtttcaatgtatctatgataaactttgtgaaacatgttatctagataagaagggggggattctgtgttttttaacaagaagctgtttttcaaaaatgcagtggtgtctaagctcttctttctttgtcccctgtatcatcagaaataaaagtgctggaagctgac

SEQ ID NO: 57574 - DNA, 398 bp, Populus trichocarpa
  Intron number 1 from transcript POPTR_0004s09920.1 (locus POPTR_0004s09920) derived from phytozome v7.0 (chr-ID scaf fold_4; pos 8450701 to 8451098)
cctcatcaacgctggccctgaacatctccgtcctggttagtacatatattaagaatatttgggttgtcaaaaaatctacacatcaataagtgtttctgaaaacttagtaatttttttgtaaccctttcaattttttaggtaaaaaaatccaagtttagttcttgctggtgcaagaaacgactcaaagttcttggtttttttttttatctcaacaactcaaagtttttgaatgcttgtgaaaattgaagaattcttgatgaccctttaaagttttgatgtaaaagaactggccctaagctaactaagataattttatgatgcatcaaaattgatgggtttcttttctcttcttttttgtgacagcaatttttaggtctttgctttacgaggcttgtggg

SEQ ID NO: 57575 - DNA, 361 bp, Populus trichocarpa
  Intron number 2 from transcript POPTR_0004s01030.1 (locus POPTR_0004s01030) derived from phytozome v7.0 (chr-ID scaf fold_4; pos 509442 to 509802 reverse strand)
agagatctcttctcgccctccaggtcaatctttgtattcttatctttgcttttctttgttttttgttttttttttggatcttttattgtgttttgatattcatgacactagtgctagattattgacttgaattcagctttcatagtaacctgtgactttaggatgcaactaaagcatgtctggaacaaagttatgctttgaatgctattccccccccccccccacccccctcttgttttccttttccatatcttttgataagcaactttgttctcgaacacctgatttcatggcatttatagagttttttcattttttgggtgcagggtcctctttctgcttctgttctccaacacctgac

SEQ ID NO: 57576 - DNA, 767 bp, Populus trichocarpa
  Intron number 2 from transcript POPTR_0004s20010.1 (locus POPTR_0004s20010) derived from phytozome v7.0 (chr-ID scaf fold_4; pos 19668376 to 19669142 reverse strand)
ttggggtattatatctgctatgatgtgcttgtatatttgtttagtttgcgcacatacacaaatgcagttatttctttaccattctagtgaacagcataaactgctcctatctatgcttttatataataatatcaaatgcaaagtcaatcaatagatatctacatatatatagaatttcgtgtttctttcttttctagccaaggtagtgtctcttgcagtcaatagttaagatggggtgtttgtgatcttagtctaatcaatctaactgttataactgtgtcacattcatttccttgtggattagttggaaacgttttggaacaatgcctctgataagtcttgatgcaagagatttttggagtgatgacaagagccagcttttaaggcaatcatggttgattttttcctttgaaatctatgattatgtggttataatattgaccctttgtttcatccaaaacaattctcctcgttatactaataagatttttggctgtactgccacgccatcttcagttaagtagtatcagttgttgcttctgcttcagtctcagaatctcagagtacattctgtaaatgctcttagttaatgaattggtttctctccatttgaaccccttgaagagccaaactcaaatgttactgctcaatttaagtttgtcgtaaacgttattttcattatctgttgggtttgttccttgaaccccattgacatgtttcattttactgcagaaacgttacgaggacattccagttttggggcaaag

SEQ ID NO: 57577 - DNA, 778 bp, Populus trichocarpa
  Intron number 1 from transcript POPTR_0004s20010.1 (locus POPTR_0004s20010) derived from phytozome v7.0 (chr-ID scaf fold_4; pos 19669176 to 19669953 reverse strand)
ccttcgtcatcgccggcgcttttgccggtgagcgggtaagctttttcattttaggttttttttttatgtttgattgcttataaattagttgaagaatttattataattattcttagactaaataaacagacagatgccttggcttatccgagcatttcgattcaaataaattctttctaattgctgggggaattcgggaaatagaaatcgatgagtaatgttattagaattctgtttctcaggattataggaagcaatgactcaaaaactgaatatttgtcgaagttgggaacttttttttttctagtaggattcgcatgttgcatcttttaaatctttcggggtagccagccaatctatagagaatacaaacgagtttctatttgctgtatagcttattgacggttggatctggaaatgaaatgaaggaaagaagagtggtgatgggtgactccctctcactgagatatcaagtttatttaacaaacctgtaatctaatgaggtgggaaattttgttttcatcttttgaatacggaaggggctcgtctacttgagttgcacttattgatgcttttaaaaaatttctttgttgattatcaggctaaagcaacaaaaaagaatttccaacataatcaatttaagcgttgcttacctgtaaagtgaatacttatgcttaatcaatttcttcaaatggctgacttatattttgtgattgtttttagttgaatgtgtttttttatcctggttaatattgtggatacgtgcaggctgtggatt

SEQ ID NO: 57578 - DNA, 630 bp, Populus trichocarpa
  Intron number 2 from transcript POPTR_0011s07180.1 (locus POPTR_0011s07180) derived from phytozome v7.0 (chr-ID scaf fold_11; pos 7945803 to 7946432 reverse strand)
aggggagttcgaagaggagcttcaaagtgccagtatgcattgctcgtattttggctatttatggatcaatctttaaccgttttgtttgtaataaaccattatagtttattcccctgttgattgcgtgcagttatgcagtttgttttaagtgtgattttgcttgttgctaatgtgaatttgtattatctgtgttcaacaattgtgaagctaaagtgggattgagatcaatgttgttgaaatatgtttgtgattgttctgaaggaggaagttaggcctgttattattgtataaagacttgataggacaattaacatcgtggcttatgtctttaagttagtgattttcctcttctgttgcatatgatttgatggcattttactttggaaacaagtgttgttgagtgttctcagaaattgatgtaaagaggaatgagtgcgtctacaggcaatataaagctcctgctcatactgcatttttttggactactgctttgtaatttgcgtgcgattacaatgaaataaggcaaattcaaagttcttattgtttcatagttagaatgctcaagctgattattggttaaacatccatgtaacaggtgctatccaagaaaaatcttctccagcaactgct

SEQ ID NO: 57579 - DNA, 926 bp, Populus trichocarpa
  Intron number 2 from transcript POPTR_0015s01480.1 (locus POPTR_0015s01480) derived from phytozome v7.0 (chr-ID scaf fold_15; pos 911667 to 912592 reverse strand)
aatcatctcccaaggaattaccaatagagaaaaaggtcgtcatatttttttttatcataatgtatttacttgctcctttgaaatatcatgtggtgtttttttgtgcatgcttaagtaataagcaaagttaattattattaagacttgttttatacgatcatttggtacacctaattgaactataaaccttgtgatctaatctgatagcctgccttcaaaattttcatcatacgtttttctattattccttagttaaatatttcattagtgtgtgttcaaactcaacttcaaaatttgcacgagttttatttattattattaatttttaatttttcctagtatacatattgtttattagaatataatttgtaaggtatcaaaccatctcctaattagcaaataattaagagtgtcctagatacatagagaccacccacatgagcaatctttctcgactcatttgttgtcaaaaggcaatgaatatttgtgctctatgagttatgttcagctactagggccatatttaacgaagacctacccttttagtactgtatctaggaccataaacttgaagggggcccaaatgggaccataaacgacacgtacgaccataaaatgttgccatctttcatgacttattgttatcatgccaccgatgatatccttccatccatctccacccacatgtgcacggccttgctagaccctcttcaattcatgccaaaaaaaaaaaaaaaaattcttgctgtgctgcattattaatttctttgttgaaaaagaaatttttgttatgcctgaaattaattaatcttaactaatcttgttagttatatgctagctagctagctcatgattttatgataattgagcacaaatttgacatcgatgtaaatgatggctggcatgatatgtatttcagaaagaca

SEQ ID NO: 57580 - DNA, 881 bp, Populus trichocarpa
  Intron number 1 from transcript POPTR_0001s14120.1 (locus POPTR_0001s14120) derived from phytozome v7.0 (chr-ID scaf fold_1; pos 11081755 to 11082635 reverse strand)
tgctggcatttctagaaaacccatttcaacttcgtgtaagtttttctgtttattcatttcggtatcccttcgtgcttcaaaaattgaatctttgttaagaggaaatgataaagctacttacttgactggtagtttctgttctttttcaaatgtgtgttaccgattaagtgttataaagtggaattttggcttacttgctgcgctaaatagtttagctggtatgcctaggagaatggatacacagtgaattttagtggagcttaactaggttaagaaacaaaaatagcttagattgtgcaaagcttttatcttaggatgaggtagaggataagaacttagcttggggatactgggtttattctgttgtttttattgtcttgttttttggatgtttgctgggatttaagggtggatgtatgaatatatgctggaacataaagggtgtggagttgcaattgaatggctccatcaatcatgaatatttgatggttttgtttatctgaatgaatgataaaatgtaaagagtccaactagctagaccctattgtaacatgaatgtgctacaatgttcatgttttgtctcctgtgcattgtgtgctattaagtaaaactctccaactcatacggtcaggctgaaataatatcgaggtataattgtggaggctattgagtgccccctttgggttttaaagtagttcatggagaagcattcttcgttgatgcttgtaccactaaaaattgccatgcatcttgttaatatatttttatttcttttgtatgtatttacatcatttctattgtcagttaatttggtgttgagttagtgggtaacatgttctttaatagtaagacgcagagagatctcaaagttgaattccaga

SEQ ID NO: 57581 - DNA, 527 bp, Populus trichocarpa
  Intron number 5 from transcript POPTR_0011s09160.1 (locus POPTR_0011s09160) derived from phytozome v7.0 (chr-ID scaf fold_11; pos 11318762 to 11319288 reverse strand)
aggtaagtgacacccattctatttccgtgctttgaattgaagagactctatttgaattagtgtttctaggatcagaatttagactgtaaaagtgataattagatgactcagtgaaaccgtttttaggttattgtttgattgtgttttcatttgattgtctgtatcatgtccttttctgtaacttttatgaatcctactctactttttatatctcaaaggttgaaatacatgctcctgttgttgatactcttgcgcttcaatggggtgggttaactaatttaacctgtggtgtagaactacattttccatctttcatccaccattgaatttctaaattggagattacctgtactttctaattctctaataaaaatgttgattaggtgaaaaaggctgaagaactttcatgctaattaaagttgtttattgtttattacgtgctgcttgtagtgctctctctctatctctgttattttttttttttaattttttagtttttcttgttatgcagagaaggtgtttccaac

SEQ ID NO: 57582 - DNA, 283 bp, Populus trichocarpa
  Intron number 1 from transcript POPTR_0012s14230.1 (locus POPTR_0012s14230) derived from phytozome v7.0 (chr-ID scaf fold_12; pos 14197316 to 14197598 reverse strand)
gctgaactctccaagccactcactgcttattgcaggtatacatctgtctctgtttatcaaaaaaacatctgtctctgttgtggatcactcttgcttgtttttctatattttgattattgtctatatgttagtcacttggcttaaatatattgacaatcaatttttttgtaacaagagcacaaccaagataaagtaattaaattggagccaagaaataatatatactcataaaaatcatttgcttgccaaattattgataataacttgcattggttaatcttag

SEQ ID NO: 57583 - DNA, 380 bp, Populus trichocarpa
  Intron number 3 from transcript POPTR_0014s06870.1 (locus POPTR_0014s06870) derived from phytozome v7.0 (chr-ID scaf fold_14; pos 5180399 to 5180778)
gccttttgttgcagaagtaagattcttgtttttatttattcttattatatttttttgcttacaattaggtgtaattgggaaaaaatttcaagtgcactttagtttcttgtgaattcgattttttttagagaaaaaaaatcgatgtatactggtaaatgctgttcatgtttaggcaaaaaaaaaataaaaaaaatccatgtatattgataagaattacaggaagatagaatttgatgtaaggagagtgttgcaaatcaaagattttgtaaaattttaatgagcctcaaaaacaagcttctttcctgacatgataaacctgagattgttggccgaatatgttcacaggcagctgcactggtggttaaagaatctgttgaacc

SEQ ID NO: 57584 - DNA, 513 bp, Populus trichocarpa
  Intron number 1 from transcript POPTR_0011s05870.1 (locus POPTR_0011s05870) derived from phytozome v7.0 (chr-ID scaf fold_11; pos 5899879 to 5900391)
aaatccgtacctgggaaaacagttcgatctctgaagttagatttcatttcatttgaattatcttttcatttaatgcaatcgaatcattcaaaggatggattgttgtatttttcttggattttcttatatattttttagatttttctgttaatgaataaataatttatgggtctctatttttttagtgtcaatccatttctttgttaatcatattcttcgaactgcttaaaagcatttagatctgcatttattaattaaaacccgttaattcgagtaacatttgcttttcagttttgagtctgtttaagatttgaattgcctttcattttcgatttcgtttctgggtttttatcaaattggttatttacgatgattatattatttaaaaaaaattagtgacgtaatttgatcattgcttaaagctccttataaagaaagtaaagtttagtatacattttgctgatttcactttgttgtattaatgtaggttgagttatagttattgtttttaac

SEQ ID NO: 57585 - DNA, 847 bp, Populus trichocarpa
  Intron number 2 from transcript POPTR_0015s06690.1 (locus POPTR_0015s06690) derived from phytozome v7.0 (chr-ID scaf fold_15; pos 7670740 to 7671586 reverse strand)
gcatccatgtaagttcacccttgattttatcctcttgtttagattatgtgattttcctgagttgagggctagatttttttaaaaaaactttgtcctgtttatagatagatagttataaagatcgaacaagactaatacatagcatttatgaaggtcattaaatgctagtcagtgtcattatcatatacttggagatcttttccaaattgtaggggggcaaggaagtaagcctttttaaggtcatgggtttgtctactattcaggcattgatatttatctgaaaaaggaacacactcctaccattttatcatgaagtggtcaagtcaagctgttgtgtttctgtaaaagtttgcaagtcatctgatttgattctcttaatttttagatatgctttgtagctttaagttctgccttggttgtctcaatttgccaagtcaaaagttctaaaacagtgttaagtccttggatcacataatctgagtaagagaaccttgctcttttgcatcaattaatgtatttcactagagaaactccaaaaatacttgttgggtctgaaagagctctcttaccaaaagatgatcttaatttatgtaagaacccaactttggatgcatggttggttttcaaagcaaaactagttatagatactgggttttacaagaagagttcttgcactaggctaattggtaagaatatacccctgttgattctcatttctataacctatggaactacccaatgtgaaagggacaaggggattattctggcaagatttttgaaaggttactaatcataggttggtgtaactgtaggactgtaagcattgttctgttgagaattagcagtt

SEQ ID NO: 57586 - DNA, 616 bp, Populus trichocarpa
  Intron number 3 from transcript POPTR_0004s11150.1 (locus POPTR_0004s11150) derived from phytozome v7.0 (chr-ID scaf fold_4; pos 9748315 to 9748930)
tgactttcaagtaaagggatcggattttaatgtaagatgtaaacatggagacaaaaagaaatctcctaaaatgatcaaagggcctggttcttttgcttttggtgatgattatagaggacctaagcaacaccctcccaagcataactgacagaagcgccgaaaccctttagttagatcccttttttctgcaatattcagcttgtaggtatcctagctaggagatatcatgtacaattttgatgcttcaaggaatacaatacaatcaatccttaattaggctatgcttgtcttttagttacagttttacagcgcattaatttcttacttgtaaccatgtgagattacaaatatttgtttaaagctttggttccaagattttggaagcggcctgggttagaatatgttgaatattttgttcatagttatctctgactgcagggaagaagaataatgctttagacaagtctcttgtaggatcacaagatcaaattaataatcaggtctccttctatctctctttctcttcgacacacataaaatcttggtatattttaatgtaagctctttcaactaattaattaacaataaccttttgtttttcccacagcagaaggat

SEQ ID NO: 57587 - DNA, 677 bp, Populus trichocarpa
  Intron number 1 from transcript POPTR_0012s05770.1 (locus POPTR_0012s05770) derived from phytozome v7.0 (chr-ID scaf fold_12; pos 5576159 to 5576835 reverse strand)
ttcattgcagttaaactttccctagttagaaatatatctgttgtttcttctttgtcaaattcgatcgatagagagttatttgttagttttaatccctatgccaatatgtatgaatattctattgttccaaatttgttcaaattcgatcgatagagagcaacctgtcattttctttcaacttgcgatataaaccagccagaaatctactaatcatcaaatatctgtcataattcatgagcaatagcatatggttttgccatactttatcttttaattcaaccttctgtttatctgatctggtgctggatgattgggcaccagatgctgccattttcttgccgttgttcatactcaaagctgcaaaacttggtaagaaaatctttgtttttgcattttattttagcattcatataaatatccatcaattaggctctaaatgtttcataaaactctcaatttaatccttttatcagtatttaactcctttttggccaatcattttccaatatatctcgtaaaacattcacatcagacgtaagacgctaacaaatattgaccaaggcacttaactgcaagctatctcaaacgttttggacccacttgatataatcttttgttttagtattaaattgagaatattagagacttagatccttcgtggtcatagttttgaaacc

SEQ ID NO: 57588 - DNA, 457 bp, Populus trichocarpa
  Intron number 1 from transcript POPTR_0012s09000.1 (locus POPTR_0012s09000) derived from phytozome v7.0 (chr-ID scaf fold_12; pos 10079355 to 10079811 reverse strand)
ccaagctctagtcagccctctccttccacagacccgtatgtttcatctacctcctgttgctgttaaattattggttaacaactgttgggcctgtacaaattttggtgcttttatgttttgtattcagaaagtttgcaacttctttcccttacagacctaaattttgatacttttgtcatgatatcatgctattctctgtttaatggtaagtaatcagaaaaaaacctaacttttgtgtcgttttgattgatgtgtttttgttattttctgaagaatgattgtgtggttattgttatgagcttataattttgattatgttctaagaatggattcgttgcactatatggtttgttgggttttaaatagtcgtctctttaccgtgcggtaacagaacttgtttgtgtgtaaatgatgaaaagcagtaagaaagattattcgactgcaattttggagcgaa

SEQ ID NO: 57589 - DNA, 405 bp, Populus trichocarpa
  Intron number 1 from transcript POPTR_0012s02530.1 (locus POPTR_0012s02530) derived from phytozome v7.0 (chr-ID scaf fold_12; pos 2084340 to 2084744 reverse strand)
cccaattgtaagttcattccttttttttaaaaaaaaaaaaagtgtccttttttagcttttttatggggttttgttattgattttttggttttgtgaaatggggttggtggattttgtgatttaaacttaatttttaagggatttgatttgtggggtttttctgtggaactggattgaaaattgttaactgggaaggaaaagaaaaaaaaggaatgatagaaaaaaaattaggaagtgaaaattgtattagcaaatgtgttgcatttgataatcttggaattgttagtctcttaatattattaattgcgaaaattaatttttttttgttgattttgtctcaaattattgaatttgtttttttaatgagcagcatttcctcttgttcaaacaaaaatcatcgatttc

SEQ ID NO: 57590 - DNA, 815 bp, Populus trichocarpa; identical to SEQ ID NO: 55942
  Intron number 1 from transcript POPTR_0012s11870.1 (locus POPTR_0012s11870) derived from phytozome v7.0 (chr-ID scaf fold_12; pos 12232873 to 12233687 reverse strand)

SEQ ID NO: 57591 - DNA, 622 bp, Populus trichocarpa
  Intron number 3 from transcript POPTR_0011s00610.1 (locus POPTR_0011s00610) derived from phytozome v7.0 (chr-ID scaf fold_11; pos 287076 to 287697)
gaggtaattgaaccattactgatgttttcattttccgctattgacatgcttttttggtgctcttgttggcttaactgcagttttttcttaattttttccccgtgttttctaactaacgtggacaggaaggcgatgaactgtgtttatgtatctgattgaattgaagcttttgcttaataatgctagatagtaaaacaaaatcaagagggaaaaaggatgcgttttgattctcatgtactcatgtctcatgcaagttaacattttgcgagattttcgcaatcatgtgggttcgttgtgaaatcttgaatctatccttgtggagtctctattaacatgctgccacattcttagcccgcaacaaatggtcaaaaccaatggttctcgtataaactaccttctatttcacaagaaaatttttccactatagctctttcctatgtaatggtattttgaaaggtcaaagtgatgggtattttccatttgagctcttatcagtttaccttctacaaaatcttatatccattaatgtgccacccatgtgtttagtcattttgttgctttagttgaaatacactttgatcaaaagtttaatgggaatcactttgcctgtagattataacca

SEQ ID NO: 57592 - DNA, 756 bp, Populus trichocarpa
  Intron number 4 from transcript POPTR_0015s12420.1 (locus POPTR_0015s12420) derived from phytozome v7.0 (chr-ID scaf fold_15; pos 12676007 to 12676762 reverse strand)
gctttagcaattgctgacactgtattggtgaacatgtgagttttgaagttcagcattacaatatctagatgctatttcttcctggaaaaattgatgaatgtccacacgtgggtatagtcaaggatggccatgaatggcttggtctaggctgtagctggcccttatatatcattgttgtcacttgcttatttgatacactactagtcactggtttactgggaattatcctatgtttaaatcttgaaaaaaaaagaaaaaaaaactcttgttgtagccttttgccttgaaatgatttccttgggcattcagggctcattgcatatttgcaatccaaatatcctatggggttgtagtctgttaaacatttttctgtctcttttttgattgccaaataactgagaaaatgcatctgaatttgttacaagatattcagatgaacttgaggaatacatttacctacaagacaactgcatgtgcatccagccaaggaaaaagaccaaaagaacaaaattgtgaacgagctttgttagtatccatattgtgaaattgttgataactttttttctgtgtgttggatatattatgccttcacacaaatcaggctcttcataaattgtcactccagaatttagagatttcaaatggagacacgaaggtaatgttttgtagaaaagacattccctctcatgctcacacactgtttctatcctgtgttgaatatcatttacaggtggtgcaaagacattggtctggaac

SEQ ID NO: 57593 - DNA, 635 bp, Populus trichocarpa
  Intron number 5 from transcript POPTR_0015s12910.1 (locus POPTR_0015s12910) derived from phytozome v7.0 (chr-ID scaf fold_15; pos 13082418 to 13083052 reverse strand)
tgactttggaggtattctattggttcctcatctgtctgtttaaagggatatgttttacagttttataaataattaaacatgaattgtctatgaagattcctcatctgtgctttcaataataggtttagcttgtgtatctgatgttggcagcatgctatattctgtttgaaacatgcactgtacatttgtctgtttgatatgcttagtgtgattgataccacacagagggtgtctagttcccaattttagttatttgatgttgcaaaatgctaagatgtcattcaaaaatgtttctgtgaaaatttcttatgctgccaataacaaatttaaaaacctttctccccttttactttgtcgagattagtttcttcagttttgttggatgttttaatgtagctagcagaaatgatagtgaatttggattccagttgaattattgatattagctgctgactgtctttatttgtcccatatttttatatgttgactaataagcatctggagtaggaatctttaccttttccttacaataaaatgttcattgtcattctataatcattttgtaagcattttctccacttttccttaattacttactaggaagttccagggtcttcgattataaagtcattgac

SEQ ID NO: 57594 - DNA, 656 bp, Populus trichocarpa
  Intron number 1 from transcript POPTR_0009s10630.1 (locus POPTR_0009s10630) derived from phytozome v7.0 (chr-ID scaf fold_9; pos 9095919 to 9096574 reverse strand)
ccgatttcctctccgcgtaagtcttttttttttttcctttccttgccactcgctgtttggttcctgagaattttcttttaaatttttttcttttaattatttttttgttagtgtcttgccgattatctagtgaaaaaattagctcaagtttgttgatttttattgaaataaatacttaaataatgtcatttttcttgttgttgtaatacttgaaagtcttaagtagccaaaaagagcattcagggtctcttaatcaaattaatgatgtacaattatgtgcggattctagctttcattagtgaaacttgattcaatcttcgaaataagaaaagaaatgtgtacggatttctggttagtttgtgaaagaaggtttggtactagagagaaatgagaattgattggctatatgctgttaaatgggaatgagtataggcaattttattatattgatatctgttcgtgtaaaatgattgaagagataaacctaatcaactttttttatatagttagttgctccaaacccagatgcaaatagagtgaggatggttgggttaattgttttcttcataatgttaaacttgattagtgtttgttgctggctaatgatgaaaattgatacagattttatcctgaaagggctttgtcactggcatata

SEQ ID NO: 57595 - DNA, 642 bp, Populus trichocarpa
  Intron number 2 from transcript POPTR_0009s14720.1 (locus POPTR_0009s14720) derived from phytozome v7.0 (chr-ID scaf fold_9; pos 11467697 to 11468338)
aggtacacaatataataaaacttgagggaataaaagtgctgcatggtctttatcttacaaattatggaatcatcgtttagataggccaacaccatatatagatatattggggatgcatattcttgaaagtacttctgttactaaaagtgggaaaaatattatgaggtagacatttgatgtcgttcattgattaagagccttggaaatacatacaactcttctttcacgaatcagtctgaattgggataatgttctatgtctattctttcacaaatcaactgctcggatccgttcctttaatgttaggttcagctacactggtatgaatatattaaagagtaaggagtgtattacaacttgaagtaattaatagatgtcattaactcttattttacttttagttcctttactgatagattttttcacttatttttgatggttttctatccactagatgaccatcttaataaaaatatctcgtcattcgttcataaacaaaaaaaaaaagaacaaaaaaaaccttggaaccacgtacgtagatgatttgtttgatagctatttttgtctatgttgttatgaattgtttgtaacttgttctattttgtaggttatagggaaggacttgtttagaatcctaaagga

SEQ ID NO: 57596 - DNA, 708 bp, Populus trichocarpa
  Intron number 1 from transcript POPTR_0009s06050.1 (locus POPTR_0009s06050) derived from phytozome v7.0 (chr-ID scaf fold_9; pos 5965532 to 5966239)
cccgtaattaccccctctcaaatctcactccctccctctccctcattattattattattattattattattactactattatcatcatcatcattactactactactactaattcccacagtcttcgaattgattcccgtttttgttctttgtactgaaattatcggacttgggctctgatttcttgttttgaatcagctcaatgtttgtttttgaattagaacttttggtgggctgaactggaatgctattctggtaggtgatggaaatgtgagaaataaaagaagtattcgttaaagtttgtatgtgctgttaagccagtccaactagtaaggtctgatattggatttaattaatcagactttattttcaaattttgagtgaaattgttgtaaatcattgcaatgtaaatatgagtcccaaacagcgaattttggtgcaaaattgttttttacagattgtttggtaaactggatgtaaccctaatcttgatgatgacgttcacctgtaatgtttctgccaactgtaaaattggacaaactttattgcatggacatctcttatcaaatgagctcctgaactctgcagagaaaacggggtgttactgttcttgtgcatctagagacgctcacgtgcatgtgtgtgtttctgtatgcatatttatgtattcgattattcatctgatgccattggttttgcattgtaggt

SEQ ID NO: 57597 - DNA, 770 bp, Populus trichocarpa; identical to SEQ ID NO: 56686
  Intron number 1 from transcript POPTR_0001s35510.1 (locus POPTR_0001s35510) derived from phytozome v7.0 (chr-ID scaf fold_1; pos 33853794 to 33854563 reverse strand)

SEQ ID NO: 57598 - DNA, 531 bp, Populus trichocarpa
  Intron number 1 from transcript POPTR_0004s20170.1 (locus POPTR_0004s20170) derived from phytozome v7.0 (chr-ID scaf fold_4; pos 19802094 to 19802624 reverse strand)
ctactgtttggctcgcttgggacattcaaggatcggtatgttttatggccttttcttttcttttttcttctttaatcaataatggggaatttgtgtgttttggaatcgaaattccagtttcttatgtttggatttcctttattttgttgttctaaagagtccttttgttgctaaggaagatcatggaaagaaatgctagatttttaatcggatagaataatagggtttgtttagtcttaaacgagggggaaaaaagagaaacgatagtaagatgacagtgttggagttatcaaaaactactgagggtatggattgtggatttaatggaggttgtaggcacacaacattcaatgaagttttttttttctagtaatttttttgctcttcaagatttaggttataaggtgctttattagataatttcatgattgaggaagttgtcattagtttttattgtttgactttgttaacaacatgagaaattcattgtttgtagcgttacgtagctttgaaagttcaaaagagtgctca

SEQ ID NO: 57599 - DNA, 773 bp, Populus trichocarpa
  Intron number 2 from transcript POPTR_0012s10550.1 (locus POPTR_0012s10550) derived from phytozome v7.0 (chr-ID scaf fold_12; pos 11288600 to 11289372 reverse strand)
agggaatcgaaagcgcggttatattggggaaaaaggtaaaaattggctcctagatgcatcacatgatgttagtttttctcagttgtgttactggctagagtcttgtagcttctgctagctggatcaagaaccctgattgtgaaggtgttatcgtacatgcttgtcttggttttcactaaactatttggttggattttcgtttttgagtctatatttgcttcaataacaaaacttgcaaccagacagattagaaactggtatttttttcttagttatgagaaacatcaaacccttgtagttttgtctggaaactcaattaattgaacctggaaaacatgcccgcgtaaacattaaaatgcggatgcattgaactaaacactactcaaacgcaaatatgtgttggggagtgacctgatgcgttcaagaacctagctctgaaacaatcagtttactttaaaaaaaaattaaggccagaaaaaagaatgaaaagatatgaacagacaatttttttcaattgtggaacactgcataaatcagagtggacaaatggaggctcacggaatgaccatgggctggcttgcataaagatacaaaatatgataaattatgataagagtttcacaggcttagcaactgtaccatacattaaaccataaaacgagacttgtttaaccctataacagctcttgtttatcttcaaattcaatctaataaaccttgttatggattgatctgcagggattggattcaagagtgtgtttcttataactgcg

SEQ ID NO: 57600 - DNA, 573 bp, Populus trichocarpa
  Intron number 1 from transcript POPTR_0012s10550.1 (locus POPTR_0012s10550) derived from phytozome v7.0 (chr-ID scaf fold_12; pos 11289548 to 11290120 reverse strand)
gagctcattcaggtttctttctcctttcacttcctttttgtttttgtttttcttcgtcttatcatgtttatgttttcgttttatgacacagatatgtttactatgcttcatgctgtatgttttccttttcgttgaccttttcttcttcttcttcttattttgtatcggctgattgctttgctggtgattaaaacggggagttgtaatttatattgtttttctgttttgttgaattgagatgttaaagtcaagctgagtcaatggctggctttttcttactattttggctgttactttcagtgaaaaaaaatgggttcttgtaatgaagtcatcaggcttcctaatttctttgatcattcaaggtctttaacagttaaaataaagaaaatgggatgaagaaggaatgaattgctgtcatcatggtttgttgtacttgatggaagtttttgcattgaaccatatactcactttcatgttagattttggatcttttaactgcatcttatacactacacaggcacacacacagagtttagtatccattgattccaaggtgaacttttcttgcacaga

SEQ ID NO: 57601 - DNA, 892 bp, Populus trichocarpa
  Intron number 1 from transcript POPTR_0001s02190.1 (locus POPTR_0001s02190) derived from phytozome v7.0 (chr-ID scaf fold_1; pos 1637137 to 1638028)
ttttggttgctattagtatatctgaagcttgaaaggtaagttcttttaatcttcttcttctctgtcactaaagttactgtcttttctagcgtttttgctctctcatgttgcatgccattgccagctactttctgttacatttactcacatacccgtttgcatgtttttgagttttgatgcatgttctctttatgggctcaaagaggtcatctccaatctcccttggaagttgtgctcttcaattgatggtttggtttatgcattcagagtgttcatataatttgatcagtcttgctgtcttgattttgatggatatttttggtattggagattagaggtaattgtgttaatactgggtgttaattttatcagattttaacatacgggtacctatgtttgtagtaaatccaatttctcttcatgttttcagatgttttttttttttttggtcttttctgagtttgatcaatcaatgttgagttttgttttttcttttaatttttgatatgtttccctgtgcatataagtatgcatgtcttcatttcgttggattttttatttttatttttgcaaagcatggaatctgtctttaagagggcaacaaaaacaataataagagtgagtcttaatttcttattctggtggagaatattttgggattgtaatgggtatataatctcttagatgtttaattccttaagtagaacatgcttcagtaaggaattctaaagaaggcaaaagattacattttctggaataattgctatgcattgtatttcaatttttttttatatatattgcagttttagtgctgattctatttcgttaatagattattattatttttatttttgtagagtttgtttctgcataactttgagaagaacaacac

SEQ ID NO: 57602 - DNA, 783 bp, Populus trichocarpa
  Intron number 1 from transcript POPTR_0012s14100.1 (locus POPTR_0012s14100) derived from phytozome v7.0 (chr-ID scaf fold_12; pos 14111230 to 14112012 reverse strand)
gcaagacaacgtggctttgctgaaaatagtaaccggtacctgcatggcttccaggtggtaggattaggattaaattcttgacataaaccaaaacatgcttttggttgtgaaggcatgtgcgcacacaattgcacgtctgacttcattagtgaaataattattaggtttctgtttcggaagactataggtggaaatcaaatcttatcatcagtttggcaaaacagttgaattgattgcattctattcttaacattcagccatggacttgttattttttctccattttcaattgaaataaatcttctttagcctgtcaggaaagaaaagaaaaatgttcttccaatcctttggtggaaatttgtttcaaggtgatgcatttcttgtttttctgtagcagcatattaaactatgatgtttaaatatctgagaagcatttatgtgatatcgcatgactgttttcggtaacgcttgtttaacagtactataatttttatctagtctatgtagaaatgcgtgtttgcttcagtagtgtgctaaattttgatgttcagttatcaatcatttatttgtaggttaattgcctgactatggtttctcaacccttatcagttagctcataacttttgttttggttgtgatggtattatgttcgtatctagcactggatgatcaattattcatctctgtatacaagggttcttaaaatgcttgctcaattctttttcttctgttatgtttttttgagcaggggacaaatatttaaagccagttgtaatagcagag

SEQ ID NO: 57603 - DNA, 473 bp, Populus trichocarpa
  Intron number 1 from transcript POPTR_0004s11600.1 (locus POPTR_0004s11600) derived from phytozome v7.0 (chr-ID scaf fold_4; pos 10380772 to 10381244 reverse strand)
tcatcacttggccagaccgagatcaactgggacaagtaaactaccttttcacttcgtcttttatcatggattgattattgctcttcttttttgttttgttaccgggaaaatgaaccttgtaatagacccacatgaggtttttgcttcattcccttatggcactaatatgagatgtttttgaatcgttgtgcatttattatggatgatttgaggaaccgagaaaccagcttgatgagctaggtttcggttttttttcctgaaacgaattgtaaggtgacttgattttcatttttttttttcatttttaagtgggtttagggagtatttgtgataataatgaagattttcatgatgggaaatatcagatttgaaaaaaaaaaaatttaaaaataattaaacagtatagctcattcatctctagttggcttatttccactacctgttattttgcaggctcgataagtctaagttct

SEQ ID NO: 57604 - DNA, 712 bp, Populus trichocarpa
  Intron number 1 from transcript POPTR_0001s41280.1 (locus POPTR_0001s41280) derived from phytozome v7.0 (chr-ID scaf fold_1; pos 40894955 to 40895666 reverse strand)
tgattgtggagcgctcaattcacaaactaagtaatgtaagtggcatcgtctacccactgtatagtaattttcttattttctcatctgttgttccagaggttgtattttctcattgttatgatttagcagactcactttgacatgcgatgtctgtgtttatacagaatttgattgttgttcttttctttcattctatttaaagttcaaggtctagaatgaattctcttaaaattttatttatatatttgagccctttgaaatttcaaggcactttacttggtaattgatttctgccactacttcttttcccatgttttgatgactttgagttgcgaaatagcttttatttcttttttgagggcttttagctgatacttctagtttcctgtttgtgtcatagtcatggctgtaggctgagatctcattgattgtttcaattgcatcaaatgctttagatttgaaaattacgttttggatgattgttatgataaatttaatctgtttgctttaggagaactgtatattgacagatgaattgaaacagaatctgtcagatcatttttgtaattttagctcatattttgtctattttcctttctggaatgtcaatactgtgttagtttctagagctttggtgactgctctgaaacttgatgctttatatgtttgtatttcagtggttgcgaaaaaccaataggaaacctttgcttgc

SEQ ID NO: 57605 - DNA, 956 bp, Populus trichocarpa
  Intron number 1 from transcript POPTR_0015s05720.1 (locus POPTR_0015s05720) derived from phytozome v7.0 (chr-ID scaf fold_15; pos 6063281 to 6064236 reverse strand)
gaagagacagcaaggtcacatttgaggagttcccttattatctcaggcaagataatgcttcttattctctgctagcttttttacctttatcacatgcttgtattatacagtcccaaaaattattttattttgataccagcattttgaagatcttgagaaagaaactgtgctatttctttgtttatgggactttgagttgattctatgtatctactgacatatggggttttggtacttttattatcattatctggaaattaactgctaaggatctcttctcttcaataattgaatttgatttccctctttctggacaggttagccttaagttcatcttgttgaataggggaaattcactcatccatagatgccacaatgaaaagtcaggaatttatgtaatctcagaaatttttcttgaaccatgaggaggattttagtccagcatgtcaaatatttattaatgttctagggttttgataccaagcctgccagttctctctgtttttcactggtattgctggattttttgtatctttgtaactgctatgaggcatctaattattcatggatccctctactgtttttggaatactcaacttgaaattgttgaatttgagaaaaaattatctggatgagttgcttacttcttcctggattattggagatgatgggaattaagtcatatagttgtatcaagatttcagttatgttaagcttgagaaaatcttctggctgagttgctgcctgttcttggattgtaggaggcatggaaagtaaaccatattggtctacacagagcacaagttgtaacatttttatgaagtccttctatggcattagttcagatactgctgcaatatgtgttctggaattcattcttagggaagattttcaataatcaatccatttttactttctcatttctttgtatggttgattgcagtgagaaaactcga

SEQ ID NO: 57606 - DNA, 434 bp, Populus trichocarpa
  Intron number 2 from transcript POPTR_0011s01410.1 (locus POPTR_0011s01410) derived from phytozome v7.0 (chr-ID scaf fold_11; pos 993282 to 993715 reverse strand)
tgcctcttgattttctctgggggagtttctttgaggtaattaaaaagaaaaatggcaactttttgatctttttttgaattttgatttgaattttttgagttttctttcactttcccgggaaagctggtggaatttgggaatagggtttttatttttatttttagtttgtgatttgatttttctgtcactttctttggaaagtaatggaatttgggaagagcgtttgttttacaatgcaatttgtgttttctgtcactttctcgagaaaattaactgaatttaggtttatgtgtgtatttgaatcttctttcagaaagttaacggaatttaggaaatgggatttgatttttgtgttgattacaatttgagccttctgtcagtttctcaggaaaattaatggaatttggaaaattgggttctaatgtttttgcaga

SEQ ID NO: 57607 - DNA, 905 bp, Populus trichocarpa
  Intron number 1 from transcript POPTR_0001s22800.1 (locus POPTR_0001s22800) derived from phytozome v7.0 (chr-ID scaf fold_1; pos 21692244 to 21693148)
ctcgatccacgtctcctttcttgttccctcctcaggtataatggtaattgtgatgatttgattgtaaaattttggattcttaattcaaaggttgtgtcttttattggatgaaagataggttcaattaagatctgtgaaaaggaaggaagaggaagattagtggtgactaattgccttcatgcttggattttaagcattttgagaaatgggttttcttttattttctcagtttgttttgatttgtttttaataattaagatctccatttaggtggtttagttgttttttgaagtgggttttatttaaatctgatgcatgtcttttaaactgcatagtttttgtgaatgtatttgtcaatattgtgatcaaataactaaaaaagaaagttattacgatgccaagggggctgaattgaagattcaatcatgactgtagttcttaagaatgttatatgatttgagagtttggtttctttctgttccttagatgtccttgttaactttttgagaatcaataatgacaatggggctcttaacatatatgtggttgatccactagtctatcgtacttgcctcgttatgtttgcttatttaaggcatttgcaacccgcgtgtgatgctgtcatattgtgggttagagttgggatggtttgatttcagcagctcaattgctgttttatgtgtgagaaaaggtgtgatttctctggtggatattgttgtggatagttgcattttacgtttattgctgatttctattttcgtacttgttgggggaatctaaaggttaaacttgctctatggactgaactgtggatttatctctgcatgtgatagaactttagctgatgtaactgcttctgtattgtgcatgtttgcaggctcctgttgcccccttgcgaaggcctg

SEQ ID NO: 57608 - DNA, 826 bp, Populus trichocarpa
  Intron number 1 from transcript POPTR_0012s13950.1 (locus POPTR_0012s13950) derived from phytozome v7.0 (chr-ID scaf fold_12; pos 13940095 to 13940920)
atattggaaatgtttcctgttccttttcttctctcgagtcataattgcttagccctttgctccataatttactttatgcttaatgattaatccttttctcttcttcgtcaaatgaaataccaataataaatgatctaattatggtatttaggttccatatctcaggtaattatatgattaaactaatcaattaatctcttattcaaaaggctcatcaattgagcaatttgtgatatcttgccagtgcagtcaaaagaaacaggcgtggcagttgattttactgatccttccatagtttatgacagtgaaataggttcatttcctttccatcttgaattttttttcacattatcaccaacaattactactaatcataggcgtttttctatttggtaattctcattaggcaacaacatttagcatgaaaagtgcagtgcattgccttcgattaaagtgtttggaaatatgattgcggttcaaaatactttttactcggaaatgtattaaaataatattttttaatttttttaaaaatatttttgatattagcacacaatataaaaatttaaaaaaattaattttaataaaaaataaagaagattttcaaatttttggtaagctagacacggtcggagcgttgtctgcatcctgtgacaaagccagtatgctgagcagagggtgagctagaaaccatataattactgttggaatttgttaattgctagaatcttaagaccaacactttttctgatttttcgagcaattatttcgtaccatgaagatgcctgtagggttgtctgatcgcaccaactctgtccattggttc

SEQ ID NO: 57609 - DNA, 471 bp, Populus trichocarpa
  Intron number 3 from transcript POPTR_0001s36540.1 (locus POPTR_0001s36540) derived from phytozome v7.0 (chr-ID scaf fold_1; pos 35169631 to 35170101)
ttcctgttgaaattcaaggaaagtttcgaggtcgaaaaaagggaataacataaaatgttttagcagctataacttttgatttgaagtttatatacgttttagttggatagaaaaaaagtgcacacgattctcaggttttaggtgatgcactatcaagacctagtgatctaaaaattccagaaggtataaactaaatatttcttatatgcaataaacatataaattgtctaattagataaagatagtaataggttttattttttatttgtagggaaatattatcttggtgatattggttaaggtattcgaaaaggaatcatttctcctttccgtggagttcgataccacttgaatgagtttatagaacattcactagaaaataaaaatgagttatttaatctttgacactcttcattgagaaccgctattgagcgagggtttggtattttgaagagtcgttttagaacaatt

SEQ ID NO: 57610 - DNA, 697 bp, Populus trichocarpa
  Intron number 2 from transcript POPTR_0004s20540.1 (locus POPTR_0004s20540) derived from phytozome v7.0 (chr-ID scaf fold_4; pos 20054732 to 20055428)
gagaaacggctgagacctggactcctggagctgctgtcagtgtatcgcctggaagtcgtatcacatttggtactaagtctaactagaaatatcattttcccccattttctgcataattattatgctgcagtatttttgttctctagaccctaattgaagttgattgctttcggattcttaccgatttcgttgcatgcagtgtcatcttttatcaggacaccagtaataattccattgagatttagacaagaaattgaaagagtactccagaaagctgttgaactcatgaacttgcataggataccatgtgctagaaaacaatccaataagaaattcttatggatctaactttttgttcattttcattttttgttaagattttgctagagaagttgactttctaaggggcaagatgcatgcatttctaatccatttccatttgtcccgtcttgtccatcataccagacgcccccaaagaaatcatatcacttgatagagtagggaacaaattcatactctagattgctacgacttattattttcaagctgatgaagaaaagttttggtttcttgcagacatcgtagaatgtttgtccaaatggtgctgttaagattttgagaaatgatttgaaaactcttcttgtaggtacacaatggttcaatgtctgaatttctgaagttctactatcatttgctt

SEQ ID NO: 57611 - DNA, 602 bp, Populus trichocarpa
  Intron number 2 from transcript POPTR_0009s07410.1 (locus POPTR_0009s07410) derived from phytozome v7.0 (chr-ID scaf fold_9; pos 6920882 to 6921483)
tacctttgatcttcattgcttccaatcactcactggtggctacctcaacccttttatttatttatatatttatttatttacaagcatactaggtacaatattagaaagagaaatgctctataatttaccaaggtatcaatttcttagttatttggttattgataagcctgccatcttatgcttaattgtcaatttcttctgtgttggaatttggacaccacttttcttaatttaatgaacttcaaccctttcaaagttattatcagctagctgattgttagatccaaatttttttacagggaactgccatgttctgtaacatatggattatagtgttttgagcattgcttgctatttcctaacttttggttctagttagcatgcctcattttttaaggtggatgggctgggtacttgagtatttatttgtggctgatttatgttctttaaaagtatctcaagtccatgtttttcaaaccatgaatttgtagtgacaagctcttcgttcctctttgaatacttttgaattttctttttaaacttttttgggttttttcccttctacaggaacaaagttctttgtggtgtgtgaacctggaaca

SEQ ID NO: 57612 - DNA, 372 bp, Populus trichocarpa
  Intron number 1 from transcript POPTR_0009s13890.1 (locus POPTR_0009s13890) derived from phytozome v7.0 (chr-ID scaf fold_9; pos 10979265 to 10979636 reverse strand)
ttttatccttgtttactgcaccgctggtatctctggtaagaacaagaacccatctctctcttttttatttcttttctttttttcagtcttgtattgagtttcttaaatggaacctgacatactgtgttagctagttatgtaacacttgccaagacttttggttcttttatttcaactaacttcaaaaatgttacctttttgtgtaacttggtaactgttactggtgatttttgtatgtaaggcactctcttttagtaaaactaagaagtatgctcttcaaaatgaagtcttttgtgtggtttgttaatggggtttggtttttttttttgaaaaaaaggtggacatattaacccagcggtcacttttggcctg

SEQ ID NO: 57613 - DNA, 919 bp, Populus trichocarpa
  Intron number 1 from transcript POPTR_0015s02580.1 (locus POPTR_0015s02580) derived from phytozome v7.0 (chr-ID scaf fold_15; pos 1956618 to 1957536)
atttcgtttgttcatgcaactcacacgcaaagacaccaattcccggaaagccaagtaaatcaggtttgataggagtgtgacacaaagataacttgtacccaagcaccaacactattggaaaagaaaaacccccacccaatgaatattaattcgcgaatgagaagtataaggatgacaccacgaagccgattgttcttcgataagtcctttatagttctttagagaaccaaggaagggagattatcccaccaacacacaacaagtgcggcaaacaagaattattaatctgaattgtctaacttacatgtctggttatgcctttatttatactaactctagacttaaataaacggacccccttaggtggacttatatgaggcccacttacaattgacccaaataagtaataataacccaaagtctaagaaaaaaaaaataaaaatccgaaaattactatcctaaatatgatagaatcagatttctcaccattaagaagtcccaaatagactaggaaatcttatctgaaggtagaattaattcttaagtcttcttcccttgttgtagctaggatgaataaggaatccttgtaagaaaaggattctcaaacatttatgaatgcttgccacagttggaaactatgttgtagcccattaaagatctttgtagaattaagagattcccaaaaccagctgtcacatccttttaggaaaagaatcttaccaaataggaagtccacaagtcaaaaggaagtaaataacaaaattcatacatcctctgaaagtttaacccatggtaggaaaacatgtcaagagactccacatagaatttcagcctgatccaacagtcggattgacaattacaactgttgtcttaaaactggacagttgggcattttacatcagaatccgaatctgattgt

SEQ ID NO: 57614 - DNA, 886 bp, Populus trichocarpa
  Intron number 1 from transcript POPTR_0015s13550.1 (locus POPTR_0015s13550) derived from phytozome v7.0 (chr-ID scaf fold_15; pos 13452163 to 13453048)
gcattttggtaggttctttctgtctgcatgcctcttttactgttttgagctatacggaataattcgaaacagtaaaaagtagtatacgtacaagcatcttctttctaatctccattattgtttctcttctcttattcattatttatgtccatccatttcacatctatccactggtctctgtcctccaaaagactgagaaggaatatatgtacgcatcttttttctttctttttatttgatttttcatttttttcttcctttattatatatgttcatccattttacatccatcctatagttcctgttctttcaaatcttctcaaatgcatttttgttgaaaagaattcatcagttgtaatcctgagtttgaccattattatattgtaatcttttattaaatagttttttcaaaactatcagtcttatatttcttttttaactaaatccatttaaaacagtaaactaatacatttcaaatttaatattcaataagtttacgttgtaaaactatgtcaaaattctttcgaacttgaagcttataccactgggtgaacagggtggcgtgtaggctacatatgaggaagccgtgctcccctaaaattttaaaaatttaccatagtccgtaaatttagtctcattttcatgtgttccttaaaatttattactaagccctccaaaattcctaaatttaattttaatgatattcttgaagcctaattgatatataattctaactcccaaaaaatcctcaagcctaacgataattctgatcccaccagcattttagtacaatatgaataatttatctatatgtatattataaaatcaagaatacatgcgggcctttttttcctgataacttcattttgtcttttcaaagattggc

SEQ ID NO: 57615 - DNA, 667 bp, Populus trichocarpa
  Intron number 2 from transcript POPTR_0014s14990.1 (locus POPTR_0014s14990) derived from phytozome v7.0 (chr-ID scaf fold_14; pos 11044824 to 11045490 reverse strand)
ctttaccggaagcaagcacttaaggtgattttctttgtttcacctttaaatccaattcttcacaaacaccccgccaccgccaccccccccccccccaatcccccccaattattgactacaagcaattggttagttatcagtatgtaatttaaaagtgaactcattagctgaatttgcttcaataattggagttttgtgttgttcggaagtgattggttataaaagaatgtctgtcattaagctgcggggatgcagtggatgagtgtaagaaagcaaggacatgaaaaactgagagaaatcccgcttgatcattttttgaggtgataggagagttcctgatgaaataattcctcagagtagaatattgatgcagatgcaatataaaccaatttgagttgatagtgaagaatttgggacatgaaaaactgaaagaaatcccgcttggtcattttttgaggtgataggagagttcctgatgaaataattcctcagagtagaatattgatgcagttgcaatataaagcaatttgaattgatggtgaagaatttgggctgaaacttttttttcaatgatcttgttcattgttttccttttttttccttcattttaattttaatttgagatgtttatgttgttgcatctccttttggaatctgtgcaggcaaa

SEQ ID NO: 57616 - DNA, 775 bp, Populus trichocarpa
  Intron number 1 from transcript POPTR_0012s13450.2 (locus POPTR_0012s13450) derived from phytozome v7.0 (chr-ID scaf fold_12; pos 13609253 to 13610027 reverse strand)
aaaacaaaatcagcagaacattttcacaaactggtaataatctctcactggctctctcatttccttgtaatttaattattataatcaattttttttaattcttctgttgataatttcccttgatcattgcttcattacaattaacttttcataaatcatgcacaatctgtcatttttttctaaacctagaaagaaatttttaatttttttgtttattttttaattctaatgatctgttcgactatttaaccttatgtttaatctgattttatcaagaattaaacaaattgctttgtctttgttgaatcagatcaatccgcagctgctttatagccaccaaaaagatgaagtaattttttcagctttctcttgcttgcattcttgcatgctagtattctcaaatatcttggaaaaacaaaaaaatgggttttgttttcgttaatcatctatggatgtttctttaatcatttgtgttgtttttatgttatttaaggaaaattaggttttggtttttgggtttcgggcttgggatttttctgtaatgatgatggaacacggtttatgggagtttgtacagtgtacatttggtgggttctttgggagtattttgattggttgagaaattttatggagaaatggggtttgtagtatgatttattctcaatgctttatgttatcgttttggtttagtttacgtgtatttttatgtagttgtgagttgttttgatgtgatgtttatgttgttttgtatttgtagtactagaggacgagtaaa

SEQ ID NO: 57617 - DNA, 883 bp, Populus trichocarpa
  Intron number 3 from transcript POPTR_0014s09980.1 (locus POPTR_0014s09980) derived from phytozome v7.0 (chr-ID scaf fold_14; pos 7483957 to 7484839)
gagcacgtaactacaagttttttcttcttttcttggtaatttcaattctacctttcaagtcaacttataaattacttgtgactacagaaactattttttttcaaaactggtaatttatatgactgattgcatcttcgaagttgatttataaacctgtagggataaatggaatttattatgagtgagttggtaagatgtgtttgggagctgaacaaatgaatgcacccccacccccagttctgcacttgaagtcttgttgatgctatgcaatcagacatcattttttaactctgttgaaagcccatcataggattagcagaagaaattgatagatttatttctttctttgatttgccttcaatgatacttttgatatttggcaagttgatggattcagtagatactgaatacttactgaagattgggaatgctggtcgaactacctgactttaggtggttcttgaatgtcagaggccatttgattgtgttatatttggcatatgtgtttgaagtacatggaaagctcgcttgattgttcattgaatatcaagaagttttggatagatttatatctttctttgatttgccttcaatgatgcttttgatatttggtaagctgatgaattcagtagatactgaagattaggaatgctggtcgaactacctgactttaggtggttcttgaatgtcagaggccatttgattgtgttatatttggcatatgtgtttgaagtacatggaaagctcgcttgattgttcattgaatatcaagaagtttggatgttggttaggccattaggggttctctcttctttctgttcttctctgacttaacttttcatagctatcaacctctttcttttccctgaagctatacacattc

SEQ ID NO: 57618 - DNA, 453 bp, Populus trichocarpa
  Intron number 1 from transcript POPTR_0012s05390.1 (locus POPTR_0012s05390) derived from phytozome v7.0 (chr-ID scaf fold_12; pos 5034019 to 5034471)
ctctaaaaaagtcaaggacaaatcccatctctctggtacctttacttcttcattctcaagtcttaattaaaaaaaaaaattatttttttttattaatgaaacatgttttaagctattgcatttgtattttcttttcaattttgtgatcttggttgctgaaatatgagttttctttgttttttattttaaatggggatgatctggttatggatcttcaagtatggtgtttcatttacgtggagatcatcgtatggtgtttgagtgattattactgtgatattgggttatcgatccctgatccacaagattttcaatcgcaaattatgccatttgtcatgcgttggatatgccatttaattcgaagaatatgtgtgctagcaacgttgtttagcatttggagaacataatgaattcaattacacttctggtctgactttaaatactgtgcagttg

SEQ ID NO: 57619 - DNA, 536 bp, Populus trichocarpa
  Intron number 1 from transcript POPTR_0011s05120.1 (locus POPTR_0011s05120) derived from phytozome v7.0 (chr-ID scaf fold_11; pos 5030263 to 5030798 reverse strand)
cgaaaacggttcactcacgcccttcaggtttttctctttttgggtttttcttgtttcttttgtgttttgttgatttgggttttgtttggctgctgagaaaatgtaggaaaggaaaagaaaggaaggttgaacattaaactaattgtcgatcactttgcttaatggtcaatgccatgttggaattttgcctcaaaatgagttttcacagaaaaaatgcttggctatgcatggatttgaccgtatgtgcatctcaaccgtgttggtggatgaattgctgcctttttaatctatatatctttctttatgaaaacacatacaaatgttttttttttcggttgataaaagatgcaatgtttataaatggaggtaaatgagagcatcaattttttattcatttgaactttttgttattaatgttggctaccaaagaattatttaatttaatctgctactcttttagaatttttgttcaggtaatatatacttttattgtattgcctctaagtttgtgacactttgtgggtgcaggtgtcaga

SEQ ID NO: 57620 - DNA, 777 bp, Populus trichocarpa
  Intron number 1 from transcript POPTR_0327s00220.1 (locus POPTR_0327s00220) derived from phytozome v7.0 (chr-ID scaf fold_327; pos 15050 to 15826)
tcttttggtaaattttactgacactcagagtgcaggtttgagtcttgagagtaaccccccccccgcaaaaatattgaagcctataaaaattacctttcgaaacttttttaatacaggtttcaagtaaaagtcatggcatgcaatttttttctattgacatgattctcataagtcttagcaatccaatcatatttgcttatcgtcatgggtacttttttgggcacctgtcctatatacattaacacagtttttcagcctttccatttctgtcaagagttcagtattttacaagcaaccttatctagttcggttcataggttattttgtttctaacttgttttaatttaacctgtttctaacttactagtgccaggttattttgttaatttctgaagcaattgttgaaaaaaatcatgtatatctttatgttaattgctggtatgataatcccatgtcgatttaagtagtcttcccttcaaatttatttgcatatccaaaaaggggaaaaggataaagaggcaagttgaacttgctgatccttccattcatttaattgtaacaatacagagtcggtagcctcataaaaagaaaggtcttaatttcaatgaaattatcactaggtcgaagtttctatttatcctgtaaagattcgttcagaggacttccgagcaaatacttgcagaactgcattttgaggaattatttacttgagtcactaaagctatccaattgccaaactaaattgctgttcttgtcaatgcaactttacagacccag

SEQ ID NO: 57621 - DNA, 526 bp, Populus trichocarpa
  Intron number 2 from transcript POPTR_0004s10440.1 (locus POPTR_0004s10440) derived from phytozome v7.0 (chr-ID scaf fold_4; pos 8996858 to 8997383 reverse strand)
ccgggttttcttcaaggtgtgtatttttgttgcatgagtattagttaatgattatgagcttgtggttatgaaatgtaagtaaattgttttctgttgttttaattcaaatgtaatgcaagtaaatttagagaactgagaattctgtatggaagaagaaattgttttctgttgttttaatataaatgagttaaaccagttcagttcatgcactgtaaatggtaactgcccagcttttcatatctagctctatttttcgatctttttcacttggaaaccctattatttaactaccaattgtatttatcttgaccttcacatttctttcaataatatgtccaacatgtatctgaccataagttggagatcatgcattcaatgggcggggaaatcttaaatattgtgtttttcaagaaattgcaggaaaagttgactttcagattcagtgaaatcattagattgatggaaaataacttgccttttgatctctgcagttgcatattattatttcttctcaagtcaggttcga

SEQ ID NO: 57622 - DNA, 574 bp, Populus trichocarpa
  Intron number 1 from transcript POPTR_0004s10440.1 (locus POPTR_0004s10440) derived from phytozome v7.0 (chr-ID scaf fold_4; pos 8997410 to 8997983 reverse strand)
actcggcttaccatcactctgctccgatatctagggtaaaatatcttctctgattatcatggtatagtaatcgtaactgtgtagaaatacctgtgtaagtatttgtatgatacataaacagttttttcccgacgttcctttaaacagaaatgcctttaaatttttttgttatttttccgacgttcctttagacagtttttttttttttaaattatattcccttaactgtgtagctttgataattaaattttgtttatatatatatatatatatatatatatatatatatatatatatatatagtaagcatttatgttatgaattttgagagctgtaattactgatgttatacatgttagagcaataacggcctggtggtccaggcttgttgttatttagctgctgcaatgattgctttggttaaaattgttagtatttcaaggagcagatggtggagaaagaagatttatttatttatttattaatgttatttcttttcatttgcattatgtcatttttaatcatatattttcattcagggtaggctaccggtggatcacaagattagctgctc

SEQ ID NO: 57623 - DNA, 1003 bp, Populus trichocarpa
  Intron number 1 from transcript POPTR_0015s06450.1 (locus POPTR_0015s06450) derived from phytozome v7.0 (chr-ID scaf fold_15; pos 7253345 to 7254347 reverse strand)
tgttgtaagtgtgttttgatggctctaagaaaatctgtttggttttcttggatatggtttggcttgtttgtgtgatttgataaggtttgaagactgagttttttagtttcaggtcatttgaggttttggtgccaactaggctgatagtagttctttatatatgtttctctagtcgggtaagttgtttacctaaggtattgaggttggagtttgtaaagttattttggttaataatgtgtttggtatttgaaagggcgtcatcactgggtaatttgtagggagctgcatctacagtatggttgttgtgggtgatttggatatttctcaggggtggatggtcatactcaactgttggtccactggtgaggttccatataggtgttttggatcttgatgtgaccggacatgcatgtttaatggatgcaaaaggatatgaaatgtaatgttcagatacataatgcaattcgaaccaatcaaagaacataatttgtactttatgtaattcaatgaaattataaaattgtttttgtatctcacatctctattggagaaagtgttgaaaaaaccaaattcgttttgcagaattataggcagcataaaaagcttttttgaaaagggttttgtcaagaacaaaatgtttttctgaagttaaaacattcagctcattcaagccaaaaacctccttacaaacgacaaacccatagataccaaaaatagttttactccaaaccaaaacaaacctattacaaaaaaccctacaagaaatttaccaaagaccataagcctttcgagtcaaaacccaaaccaaaatttgaccttaaaaacattacctgttacagatgcaaccagaaaggacatacatctcgtttctgcaaaatcaacaccaaactccatgagcttcaaatagatgaagaaaccataaaccaaatacaaaacctatacattgaaaccacagacacatacccctctctttcagacaattctgaagaagaatttcaaattg

SEQ ID NO: 57624 - DNA, 916 bp, Populus trichocarpa
  Intron number 1 from transcript POPTR_0001s31280.1 (locus POPTR_0001s31280) derived from phytozome v7.0 (chr-ID scaf fold_1; pos 29616310 to 29617225)
cttcagggattgctggcttgactactgccttctgggttagttcttttatcttctttttttcctattctctttgtcttggagcatatgtacatatgccttaatgtaaattataggtacaatatgcatgttaagtctatcttttttgtttcatgtatttgaactttcactgctcaattagaaagttcttgcttcattggaaattattgcagagaccttttcttggtacaagaacattttcagtgaatatttaatattctctaagttcttcagatccttgagttaattgtttttgtgatttgagcagaaatttaccaacctctttttctttaatatttagaggttatattcctaaaagtttagatgatgcatggtagttcatcgctaaaagataaaagcttcttcactccatgttcagtattgaaacatcagaaaaatgtcactaatatagcagtatagcccatccatgatttttttttttttcctctctaaatcagaatgaatatgaggagaaaaattttagtggaatatttttcaactctgccaaaagagatcttgagtatcgaattcatctatgttaactaaatcgtgtatagtattagctcaagaaacaggtaagctctctcttaaattactgaatttagttagtcttagaggttcatcacctttatggcaagacatgaattcatgatgattagtataaataacaatattataattcaggatcaatatttttgatagttgaccaagaatagtatagtgtgtgtacataaaaattataatagactatttttgttttgttcttgaaatttcttccatgacatgaggagaatatatatattaattggtgggatggtgagagattttcattgtaaatgatgcaggtaggtccaagatcaacaaaggatagagagagatt

SEQ ID NO: 57625 - DNA, 846 bp, Populus trichocarpa
  Intron number 2 from transcript POPTR_0012s03590.1 (locus POPTR_0012s03590) derived from phytozome v7.0 (chr-ID scaf fold_12; pos 2824493 to 2825338)
gtagcagagttttattacaatatatagtaatagtaaggattcttagccatccttctcctttcctttcttttacagtggatatatatactataaagcccgagtcttttgaggtgtttgctaaatgggttgcttttattttgaccattgaatgagtaattgagcatttcaaaagcctttgtcttgatgtttccgttgtgggttttaaagtttaaagtgtttttaatcttatattgcttttaacctcaatatgcattttcattcttaaagcctatcaaacgctggatctttgatattgctatgctggttgaatctcatattcagttatattagactggcatttcaagaagtctcatctttcttgcttggcatgcgaagacaaattttgttcattacagcacttacatgcatgccgagcctatttagttttcaccttgtttaaattgtaagtccagccacaatgttgttgttgagtagacatagtgcagcaatctcagtgctcagcattcttggttattagaccatacacaaggatgcccacttgaataagtggaaatgagaaaagaaagaaagaaagaaaaaaatagagaaatagtactaaattacatggttgtgctctccaaattatgagcattcttcaattattgcattagatttgctaaaactctgattattcaatgtttattgggggacagaagctgcatttagtttgtgaacagtttgtcaccaaataatatggctattaggctgatttagcagtaaccagttggatggttttccacctacttctgcttaatttgtttcctttgtccaggaatctcctctagtgttaggtgctactgtggctgc

SEQ ID NO: 57626 - DNA, 514 bp, Populus trichocarpa
  Intron number 1 from transcript POPTR_0012s02440.1 (locus POPTR_0012s02440) derived from phytozome v7.0 (chr-ID scaf fold_12; pos 2010146 to 2010659)
taggaccattcattgccgacgctttcttttttgaggtcagtcttagccgtcttgcagggaattggttgcaggtgtgtaatccgtactcctacctttcacctttagtgaggggcaatgtgatctatgctaagtgtcgccgagctaagagcagggcggatataaaaacgtgtgtgattaaagagatatgaataaaaattaaattacttactgtaagtaatttaggcattgtttttctttctagattttgagttttatgctctggctattgtgggattgctgttgatttagtgtttgatttagttatgctaacaaatcttgagttactttcatttttcataatcttttagcaagaaatgaaatttcttgattcttgtgctcttatttttgggttctgggttttaaagcacttacctttttgttgcatttttctttgcttatttaagattttgttttgttggtatttgcagcgactgaattttggtttgttttgaaacagggactctttgtggtgatt

SEQ ID NO: 57627 - DNA, 786 bp, Populus trichocarpa
  Intron number 2 from transcript POPTR_0011s01640.1 (locus POPTR_0011s01640) derived from phytozome v7.0 (chr-ID scaf fold_11; pos 1143630 to 1144415 reverse strand)
aaaatagtgctattggtgtcaacggtgctgacggcagtggcgatggcgcaacaaaaagatgctggtgtaacaaaaaatgctggtggtgatggtggtggtggtatcaccacaagcattggaaatggtggcaatcttttcaatttacatagagcctctttagatatggcaatttaatttcaactgatcattactcatccaaaccaaatgggtgtgtttgttttttatatttatagaatataaaactccatcttgaaatatatatttgtttatataaatatatatgtagaatataaatatttgtattaaaaaaaaaaaccactgaatcatataaaaaaataactaagtgtgattttttttaatccaaatacaattttacaaaaacaaccacgtacgctgccttaccatacacattcaaacatgcactggattatttttcccgtgaactgttctttcaatggccaaagctcgatgttgggatccatagagatgcctaattattttatttgagatgcaaaagttgctattgcatgtcttgatagagccataaaggccagtcaaaccaactgcacgtcgagtttacagaacatgtatgtcattagcatgatagcgtattcatctcttccctgtcttatctgtctttgcatcacctgtttgtttgttatatgcatatgttttatgatgcatcgaatcacaagcatggaagttcatggatacttgtatttaactggtcgttgtgtcgagaggtagaggacacaatcttattggctctccagagtcctgacatat

SEQ ID NO: 57628 - DNA, 582 bp, Populus trichocarpa
  Intron number 1 from transcript POPTR_0012s13190.1 (locus POPTR_0012s13190) derived from phytozome v7.0 (chr-ID scaf fold_12; pos 13451669 to 13452250)
attttcgtgatttcttacctgatcgatttcatcaggtctatttccaaaatatcgtgtttattttagtttttttctttggtgtttaatttctgtcgattatgatgcgttatccttaatttatttgataactttcaaattcgtggattttttttcgaaactggagcctttatatcttagatcattttttctttgttttgtttctgtttttctcccttaatattttttttctgcttctatttttcgatcagtatttagaaaaattatattaagttataattttattttattttatttcagttatagtttaatttaatttaatttcagttcttttttcttaattatttttttctcactatgcttcgattaagttaaaaaacaccagagttggaaatggaagagagctaaattatcattgttttgaattaacagcctctgtttttagcctttttttaattgataatgttaaatttggcttattttgcgctgtttttttaaatgatttcaaggtgaaacagtgattttagattatatttgtatatattcacagttggtgttcaatttgcagaaggaggaggagataga

SEQ ID NO: 57629 - DNA, 239 bp, Populus trichocarpa
  Intron number 1 from transcript POPTR_0015s12100.1 (locus POPTR_0015s12100) derived from phytozome v7.0 (chr-ID scaf fold_15; pos 12513454 to 12513692)
cagccactaatcagtcgtctacgataatcttaaaggtaacaattcttctttcaattttcaattatttcaagagctttaaattttttaggtttttataaattttaaggttttttgtttttgtttttgttttttcgtgatttcttgtacttaaatttgttgtcaataaggtgtttgataatacacgagagattcatagcgttgcatttgtttgattttttgcagaattaagtatccatata

SEQ ID NO: 57630 - DNA, 889 bp, Populus trichocarpa
  Intron number 1 from transcript POPTR_0004s00620.1 (locus POPTR_0004s00620) derived from phytozome v7.0 (chr-ID scaf fold_4; pos 236300 to 237188)
ctcctgaatagtactccactggtggcgagaaaaggaaacaaacaactactctcccttgaacctaactttatattcaaatttatttcttctgctttttcaaagttttgatttttaatacaaaaattgcagtcttttttggtgtgtcgcacagtgtgatattagtagtgcagtgttagttttgttggcctgtggaaaaagttctgtctgttggatgaattttaattttcattttgattctggttagaagtaatctctgagctcgctgtattgaaaatgcatttggggaggttccaagagcatccggataacagcattagtagagtctggatgacgatgggaattatctatagagctcacttttccctacttgattccggagctgtagcataggtagagaagaagcaccttattcagagtctcaagactagttgtagactgggtgctgaccaaagaaagctttgtggtcttggaatgtgtatagatgatggttcttttgtgcatttttagcattatttcagccttgtatttatcaggttgtgtcatcagtaaatccgttatattctgtattcgaagcatttgtaattttcaacctttcataattctatgaagaacaaaatttgatatttgcttattttcatattctcaactatttgttaattcaatttttttgagattttgctctttcaatcctgtaattgtggcacctgatattatccaactcttttggtaaattcccatgattgcacataaagctttagttgctatgactatgtctatcatttacttttatctgactcgaatcccttggttattccttcctatgtatgaaatgtgtttatatttaagtacttctcatacttctaacactaatttttattgttgcagtggt

SEQ ID NO: 57631 - DNA, 263 bp, Populus trichocarpa
  Intron number 1 from transcript POPTR_0009s05700.1 (locus POPTR_0009s05700) derived from phytozome v7.0 (chr-ID scaf fold_9; pos 5737366 to 5737628)
ttcactttatcaacataatcccgaggagcttgcaggttcttttcttctaattttgataagatattgtttcattgaatttgatatgatttatgaccatcttgttagtttcagattacaagttttctttttgttaatttagagtatataaatgagatttctttttaatcaactttgttcttatagttttatgtataagcattaatggatttatgactacaaattaagtttgttgtttttatcgatgatagagcaatttaagcact

SEQ ID NO: 57632 - DNA, 867 bp, Populus trichocarpa
  Intron number 1 from transcript POPTR_0012s15030.1 (locus POPTR_0012s15030) derived from phytozome v7.0 (chr-ID scaf fold_12; pos 14702808 to 14703674 reverse strand)
tcttggagcagttaaccacgatcgttgctcaacaggtatttttctaccatctgcaataacctgatttacctagcagagataagaaatatatataaagttcaagccttttttcttcctatcataaaaagaatacttttaacttgaataaataaaaataatattttaaatcctcaagtatatatttggattttattaaagaatcttctttttcttgttttattatttttcatatttccaaaaataacctaaagaaaatatatcattccaaatataggaaaaccgaaaaaggcaaaacaagaaatattaagggtaaaataatcaataaaaagttcaaaggattaccgagcgagtatatatatatatataaggtaaaatatctatagtttaatgtaaaataaaaaccagattttatgtcggttcaaaggagaaatccttctctcgggagaacattaaactctttccatgcctatattaattatatatatatatatatacacgttcaggtttaacgttttaccatttaagattcattttataccttcttgtacagtagcatagtgcagactgatatcatcataatgatgataaaaagaaaaaaaatatattattatttctaataaatattttatatataaattattaatatagtaaatccatttcacaataaaatatattaatacaaaatagaaatgtttcctatgcttgaacttccttgtcttttccacactaataggtactggaagaggtgaacctagtagggggtgtgaaattgtcttcaaatcagataaatgtttcccatgcttaacgtttcttttcctttgtaaactaataggtacaagaagaggtgaacctagtagtgggtgtgaa

SEQ ID NO: 57633 - DNA, 594 bp, Populus trichocarpa
  Intron number 4 from transcript POPTR_0001s13980.1 (locus POPTR_0001s13980) derived from phytozome v7.0 (chr-ID scaf fold_1; pos 11006234 to 11006827)
agctttatcgtaagtctttggaagtttgcgctaaggtatgtgtctccttctcttctcacaagtaaatgtgagtgtaaactgttgtttctatttgtgtatttggtggtttgaagcctgcccttctaaacttctggtatgcaatttactaattatactaataaggccctctatctactattaaaacagaaatcacctagcattttacatgaaagcagtgcggaaagcagaaagtacatcttacgtttgcaaatttttctatttgaggtgttagctctcatggaatcaaataatgaaaaaccacgacaattatattgattgttgctattgtcagcttcttcaaatcttcaatattttcctttttattttgtgcacgatattcagattgaatattgcaaatcaggatttaacttttccaaaatcacttctgtctatcctgatcaaatgaattccacttttttgattatgtgttagtactatcttcaaagtgatatgtttgattaattattgatgtgtgccacttcctgtgttctgatgaaagatgttgatgatatcttcacaggctccagaattacatacggagatccataagcattc

SEQ ID NO: 57634 - DNA, 828 bp, Populus trichocarpa
  Intron number 2 from transcript POPTR_0015s04870.1 (locus POPTR_0015s04870) derived from phytozome v7.0 (chr-ID scaf fold_15; pos 5084354 to 5085181 reverse strand)
gcctaggtgctcgatttcctccagagacaaaatcggtgaggcatggtttcttgactacacttttcacttcttatttatgcagttttggttttttgcctgctgttgcttctgggtttgtaaagaacgcacaaatttgtgtacgagtgattgtctcattggatttgaacttaccttgttgtcactggaaatgagctataacttcatttcttgcagttgtatattgctgaaatactttaaagaatggttttcgatactaatttacatttccttatgatcatttcttgaaatggaaacaaatgaggaaaaagagagagaaaagagtcaaccttgaaccgaatttatacaattaattagtgttattacataaaactctctttgttgataaaagtttgagctctatttgataatatatggagttattaattttttttccattaaaatccttcaaagaggaaaagatgaaggattttgtaatcgaaacatttgatttatctcgttcttatgatttttactctaaaatatcacgctgtttttcatttcaaaaaagaatgttttcttctctagtaattttttctatactgtttattttactggcagaaatattgctctcgagttttggactctgacctagtggattagaaagttataacttgcttggaacaagagagagatcgagtccctcatttttccatgtcaagaattcttttcaataacgaccattgagcctaactggttctctttaaaaaaaaacaaattataaaatggtttgtagcatgggaggtaattggctttatgacaattgttaggtgatgacgacagggtgctcat

SEQ ID NO: 57635 - DNA, 559 bp, Populus trichocarpa
  Intron number 1 from transcript POPTR_0011s09240.1 (locus POPTR_0011s09240) derived from phytozome v7.0 (chr-ID scaf fold_11; pos 11434879 to 11435437)
gtgaagagaggtggagggatcagttagggtttcaggtaacgatctgctgcgctccttcttcttcttcaatagaaagatctacagtcataaatgtgattaattattgaatttcgaaaattggtgtgctttaaagattcatgtggtataatgatgctactatgttagtattcgtaataataattatattttttaagtgaaaaataatttgactaaggttttcttgctatctttacattcttccccgtagcatagcatcgtaatttatttattaaagtatgtttttggatgcctatttattacaactaaagccggtttaaacatgttggtgtgcttcaaaaaaccttagctgttcaatgccttttataatttatagatctgttggggttttgggcttatgtaaatcccaatctttcatttagattttgaatggcttacgattttgacttgttgagcctgatgtttatttcgaccttggtggtcaaggttaacaaagccattttgacgttgacttattaaattcttacaccatgagtttgtcaatgctgcttgtctgtgcagc

SEQ ID NO: 57636 - DNA, 1016 bp, Populus trichocarpa
  Intron number 2 from transcript POPTR_0011s09240.1 (locus POPTR_0011s09240) derived from phytozome v7.0 (chr-ID scaf fold_11; pos 11435522 to 11436537)
actctactggtgcgaggaacagattcttgtgcaaggtaccaaggcttctgaaagtgtcttatctatattttcaactgttcatggccattagatactgacagtattgagtaatgatcatacttgaagttttagaagagtcttccagtcgttgttactataacctagcctctgtttataattatggactctgtggctcatttaggtaatttcttttcaaaagattgacttcttgaaattctcatgatattccaaaagttgcctgttccattaagaacgtgaatatctttgttcccagtagagcagggtgttaatgcggtgtttagttttgcaattttcttcacttggaaacaatgttccacgtatttgtaaatgagtaggagtacattcaaacatgcaagcatttatatggacaagatacgtattagtaaaatctacataatttaaaggatagggcacaattactcatcgattaaatttacattacaattaacatgatcgacatagtccagacttaaaaattggattgtcatcaataacctagttttaaagagaaaaataaaaatttcatgagatagaggcattaaaggagaattccacaaaagtatgtcgagtttgttaagctgcaatattgcttggtacttgaatttcattaaatgataggttgcatgatgtttttaaccacgggaaaatgcattgtttcaaatactggtcagtacattgacgtggcaatttattagtcatacaggagttttgtaaagtagctcagtctgcttttgtatctaatgttgaaaagctttgaacttgttttctaacttgggataagctgtcagctatgaatagttcagttttgaaacctcggtagcatagcgtagaattgtatgccctcactttcacttctattggttatgttttcatgatgatgggtctatatataccttttatgcttatttatccaattttggatgtgctgtggctgtttagcctgggcccacgtttcagttttccaactctgctat

SEQ ID NO: 57637 - DNA, 607 bp, Populus trichocarpa
  Intron number 2 from transcript POPTR_0012s01620.1 (locus POPTR_0012s01620) derived from phytozome v7.0 (chr-ID scaf fold_12; pos 1236196 to 1236802)
gcccactgatttgttctttcaggtatggtcgattcattttacccttctttccttctgttattttcatcaaatcaattgtttgttttttttttcgtgttctgatctttagatttcataaattgtgactgcgcatgtttctttggattgacaaattatggaagacgtttttttgttgacaaaaattgtacgattatccatgaaaatattgctgttggaccctaaattttgatttttgtgttggtttttgaggcaatacaggatgctagggttatcccctctgttgttgtcagaactacagtaacagaggacaactacaaattgatagaggaatatcctattggtatgtatccatgaaatgaaattgtcaagggaaaaaccaaaaactgggtttaagaaaggtggctctatggatttcttgcctttctcaaagggaaagataaagggattctgtttgttactgataatgaatgagcatcgcaaatgggtcataaatgtgatgattagttcttaaataccaggaatcaaatgtctataattaccaaatagattgttagatgtgcaaggcaaattttgatgtgttcttttttctgtatgtaacagagaaggt

SEQ ID NO: 57638 - DNA, 553 bp, Populus trichocarpa
  Intron number 2 from transcript POPTR_0015s06140.1 (locus POPTR_0015s06140) derived from phytozome v7.0 (chr-ID scaf fold_15; pos 6413612 to 6414164 reverse strand)
ctacttgcaatactccaggtaaaggcttttatacattgacattgttgatttgaacatcgagagtatgtaatatctaggctgatggaattaatatgctagattttcttgttggtgaatttatatgtcttagataaaatccagatcttttgagtcttttatctatatatttggcaatgttttggaggaattaactcttgatcgtatatgcaatttggctgtgatttgatccttattatgagagtttctaaaagggcatagtcccatttccattgttagaattgtttatgacaaaggaggagccggtgttcctgcagatcaatttcttaggtttatcatagaattcttgattcagtttcaattttattctgttgctcccaaaggttgtatcaacttatttcttatagtgaagtttttcattagcataccagaatacagcctttcttttctggaaaaaagaaacaatgctgttctgttccttgattaaataggaaaagctgctttatttactttccttgactgaactttctttttgttgaggtaggcacacctttca

SEQ ID NO: 57639 - DNA, 1013 bp, Populus trichocarpa
  Intron number 4 from transcript POPTR_0015s14810.1 (locus POPTR_0015s14810) derived from phytozome v7.0 (chr-ID scaf fold_15; pos 14280777 to 14281789 reverse strand)
tgatagcaatagcaacaaaagtatggagatatctttgttattgaaaataaatgattttcttttaatttttaatttgcatttatgatatatatttacatcagttgataaatcttccgggcccatgtgttttaatgattccgtgtttgtaaaggcccattatgtgtggttgcatatggtatgcttcaatctctaccatgtggggataaatgagtattgacagctttttattgtacacaactaccatttgctcatatttttctcttaccagatatcatctttgtgggccagtttttaatgctgaacagtgaacactgtttttttttttttttaatgtttgtcgggttacatggatttgctttagtgttctttttccatgatgttcacctactatttaggttaataatgttattagtacactatttagggagaatgattaaaatagtttaatcttggcgttttgaattcgttgatggatgccgcactgctgattttatctggagttgtttcctgtaaaactagagtcctttattggaagatttatggcttatggaaacggattctatattaggaaattgtgaatgcttgacaatcagagtcttaacaaccagttgaaaatgttttggctttctagttaacatggatacagaatagataactcattgtaagatatatttctgttctgtctagtggcagttctcatgcgtgttgaattctgtggtttggtagtgatttgcaaattaccgagtccattattttttgagaatgttctgtttgccacaccaaagtttttcaagcctacttgggaactgctttgtgggttttattccttttcttttaatgattgtttcgttttgcacaatcatttgcacattcaacttgaacatctctgctacatacagtagattattttaggatttactaaaactgctttattttggtgtctcttgcatcacttagttgtttctccatgttttgcagaggattgaagatttcctgtggaacgtgaaagcaaa

SEQ ID NO: 57640 - DNA, 765 bp, Populus trichocarpa
  Intron number 2 from transcript POPTR_0009s06320.1 (locus POPTR_0009s06320) derived from phytozome v7.0 (chr-ID scaf fold_9; pos 6106728 to 6107492)
gacctgagataaggtatgtagctttaattcttctttaatagctagaggttgagagttttaattttgtggcaatactcgttggacacgatttctacagaaaatcagttgctgaagcctttactggctttggtaaaaaatgtctttgacatttgcacaagtcgagtcagttggtttctgtagtatgctctctctaacaaggttggatctcgttggctttaggaaatatcatatttcaaggttctgcaaatttacagtttgactaacattcataatgatggacttccacattcgaatttaattacaaaatctttttaaagcacttaaatatattccttgaatctggtcaaactgattccagagatggtgtctgaaatagttcaagttattttttcctttttaatttcttttattgagatgcagaaaatgtgacaattttcgtgaatgtcacggcagcttagtgctaaatcattcggtgtttcaccttattggcattcttcaagttcgggtaggttggaagcttatatagtttgctttagagagagttgggatagcatactcgtgtcattcctgacagagacagttcaccgggttttatatacttttattctgtctttttttcaaaaaaatttctataccattctacctacaaaatcaaagggcaagatgcttctctctctctctctctccccccttttcttttgacattttggttgttgtatctcactttcagtattaaaggcaccacagcagtagagattgcatccg

SEQ ID NO: 57641 - DNA, 669 bp, Populus trichocarpa
  Intron number 3 from transcript POPTR_0009s06160.1 (locus POPTR_0009s06160) derived from phytozome v7.0 (chr-ID scaf fold_9; pos 6030156 to 6030824 reverse strand)
agacttctctgcctcgttctgcaccaatccgacaagtaagttaatttcttgctctttacagttactactcatgtacaagatagcttcagctcctttttctttctttctttttttgttttaaagttttgatttttagttttttgaaggtttttgctttctgaatttagcagtgattactaaactcggttgattatgaagaaatcttgaacatttttccttctccttctcagacttctctgcctcgttctgcaccaatccctcaagtaagttaatttcttgcttttcacagttactactcttgtacaagatagcttcagctccttttttttttttttttttttaagttttgatttttagttttttgaaggtttttgctttctgaatttagcagtgattactaaattcggttgattatgaagaaatcttgaacattttttaccagatattttactaagttttggtctgtgttattcaaactgtttttttttttaaagcaattaatttgaactttattagtatgtttataggatatagaaagggcttcataaattctttattgtttttcaaatcagttatataaatttaacaagaaagtagttatatgctccctccctgttcccccccctctctctagcaaaaaatagaacttttgctgatttttgaagttac

SEQ ID NO: 57642 - DNA, 422 bp, Populus trichocarpa
  Intron number 5 from transcript POPTR_0011s06070.1 (locus POPTR_0011s06070) derived from phytozome v7.0 (chr-ID scaf fold_11; pos 6072435 to 6072856 reverse strand)
caataaaaggtactcttatttgcttgcttctgtttgtttttgtttttggttggttatggtatcatgttttcatttcattcacagttagtaagatttttcgtgtaaagaaacgaaaaatgctaacaaaggtcagcccgtcttatattgttatattatattattataacggttattttttaaaatatttttttatttaaaaatatattaaaataatattttctttatttcttgaattaaactatgtatgaagtgaggtggcagattatactgaaaatttttgatgtaaatatacgattaacgttatgagtgaattacttaattctttctacattcttcatcctataattgcttcagaaatgatcgtgtgatctattccttcctgaattttccaattgctttttgtttttttgttttttgtttag

SEQ ID NO: 57643 - DNA, 409 bp, Populus trichocarpa
  Intron number 2 from transcript POPTR_0015s08610.1 (locus POPTR_0015s08610) derived from phytozome v7.0 (chr-ID scaf fold_15; pos 9927621 to 9928029)
cttgcaacaagtgcgtatcctttttattatgttcacattttaaattttggcattcatataattcagggttttcattttatttctttaattcccaagaaagtttgaatctttgagtgtggtttctatggtaccagctagctaggctcttgcttaaccttcttgtttgtggctttcttttggtgattatttaacatcaatctcttactatcttttcttggttttttattttaaccgtttggttttgaagaaaaactctgcattttttgaaattccaaagaaagttagatcatgaattgagttctaaacgattattttatgggaattgatagttaggtttacgttgtttgttctttctttgacaatgttactgatagaatcatcgttgccatcaattggaagcgttaccgtc

SEQ ID NO: 57644 - DNA, 364 bp, Populus trichocarpa
  Intron number 2 from transcript POPTR_0009s16960.1 (locus POPTR_0009s16960) derived from phytozome v7.0 (chr-ID scaf fold_9; pos 12797789 to 12798152 reverse strand)
tctaacggttctgcttcttttgcttcgtcacctaggtaattttttttaaaaatcacttgttttgttttcgtgttagatttggacatctgcgttttcattgttttctgtttttctttttttatatatacaatcttctgttttgttccatattgttcatcggttggttaggttgatagtgttgatccattggtctgtttctctacccaatatagatctgcgtacctcataagagaatcgaactcttgtaataatatttatttttttcgaattgggagagcgataaagttttccaccatttgatctgtgatttttgggatcttctctatcagagtgtacggtttgtggttagagtttagaagaaatc

SEQ ID NO: 57645 - DNA, 330 bp, Populus trichocarpa
  Intron number 2 from transcript POPTR_0009s06990.1 (locus POPTR_0009s06990) derived from phytozome v7.0 (chr-ID scaf fold_9; pos 6653399 to 6653728 reverse strand)
tgttaggtcttttggcaatcacactcataaaagtagcttgcacttgttttatttgttttcttcgtgtttgattttatgggttgttttaagattctctgtttggttagctggaaaggttaaagttttggactcttgagttgtttcaacgacttgggcttcaaaagctataaaattgtggtggattaagcttaagagaatctgaattatgcatgcgtttctctaatctgttcgttttctttgcaacaatttttttttgggggtgcgtgttctgatttgtgtgatttgaaatttgcagttaaccaaaaaaattggttgctattgggagcttta

SEQ ID NO: 57646 - DNA, 589 bp, Populus trichocarpa
  Intron number 1 from transcript POPTR_0015s06010.1 (locus POPTR_0015s06010) derived from phytozome v7.0 (chr-ID scaf fold_15; pos 6313749 to 6314337 reverse strand)
tggggtttggtgcaattttcaggttagtctttttattcttttaaatgttatccaggtgtgccatactgctggtggaatgaatgcaaacctgaatttcttttatttcttatgaactcaagatttgctgacaagactttcttgttaaatatctttagcaagactttcttgttaaatactttggaggatctcacattttctgttggtcattaagaaatactattttatcgtgtattaaatgtagactttttttttttgccccaaaaagaattggtaatgaactaatgatgaagtttttatcttttcgtaggattacttgtctaccttttgtttctcctttcttgcttttttatgatcacatttgctttaatctttagttctttgtgagtgatggtacttatcattgtggggtgtgtgtggaaaatgcttgttcttcttcttcattaaaaaatcattgataattgacaaatagatattgttaggtggttttaaagatttgattaattgatgatttttcttgtaacacagagcattgttttcttgcattgtaagccaaagcaggagttgaaaagtaagcaggaaaggaaagcta

SEQ ID NO: 57647 - DNA, 228 bp, Populus trichocarpa
  Intron number 2 from transcript POPTR_0004s05830.1 (locus POPTR_0004s05830) derived from phytozome v7.0 (chr-ID scaf fold_4; pos 4570084 to 4570311 reverse strand)
gcatctcacctcaacgattctcaggtataactatttcctgaaatgttaatgatgcataagagactcgtgattttattttattttttgatttaaagaaactcaagaagaactatcaagtttttttctagtttaatccatgaagttttaagcctgctgcgtgttatatatataatgtttcaaatgttgggattctggcagcattgtttaattaaccttggttcgtacagg

SEQ ID NO: 57648 - DNA, 385 bp, Populus trichocarpa
  Intron number 2 from transcript POPTR_0011s11660.1 (locus POPTR_0011s11660) derived from phytozome v7.0 (chr-ID scaf fold_11; pos 14446667 to 14447051)
ctatcagaaagaaacgctccaaatattcctctcaggtattattctctagttcggtatccaattcttctttgctattaaggagtttttttttttttttaataaatttgtgtgcatttctcgatttctttgctcagtttcgtgtttttcacttgcaacttcaattgggttgttaaaatttttgtactttattaggttgttggttaagttttgacaattgggctttttcctgtttgggatttcgtgtgcattattaacatttaggttttgttttttgaggttgttgttttggtgtttcccttttcttttaattccgtttttgtgtgtttctgtaatatatgttgctcgtttagggtcgtgcaaggaagaaaaaagatactaggagaag

SEQ ID NO: 57649 - DNA, 886 bp, Populus trichocarpa
  Intron number 2 from transcript POPTR_0001s15130.1 (locus POPTR_0001s15130) derived from phytozome v7.0 (chr-ID scaf fold_1; pos 11978550 to 11979435)
aaaggcggcattagataccactctgaggtgatttgccctctctttctctctctctctctctgttgcatgtgttgatcagtcaatgccattaatttgctaaaactagaaaatatcgtctatgaaattacttggctggtcgagaagtgaagttgcttttgcgtttggcttggaggtgtgaatgtgtgggtccaaacaatagaacgcattctttctgcaaaaagcaaaagaaagatgttctttctatttgattcaactacttcgttgtgtcattctatggattacctattcccccagaaaaaaaaacattacggctgccatttcatgtggatggaacgaacccgttataaacttaccgagcttgattccagattaaaagaagcttaagatgggatttatcttatattttaacgtgcttgttgtaatcggcatttaatggtggatatctactcttaagaatttatgtttaacttctcttgtcgtcattaattgtattgaaaaaatgcccctttcccctttgtttggttttttatcatgaatgctcaaagtcagatcaaccgtggatccgttaaattaaatgagcctcgagatattcttagaaggaaagaatctgaattgaaaacatggtctccgagtttgagattttatgcagcattgttgatcatgatctacatacatatctcttgcaaactctacagaagtttcttggccttgatgaatattggaaaaaaaatgagcacttttgatggttttgcctgtaaattttttcattcagttgaacatgatgaagtctaatgcttggtatggtaaaatcaaggctggcaatctctaggagttctgaatactttaatcgaattaatgtagattatctcattctaggttgacccag

SEQ ID NO: 57650 - DNA, 573 bp, Populus trichocarpa
  Intron number 2 from transcript POPTR_0011s09450.1 (locus POPTR_0011s09450) derived from phytozome v7.0 (chr-ID scaf fold_11; pos 11712809 to 11713381)
ctcttcggcttcttttaatccacaaacccaggaaggtatgtgtattgattattatttgaggaatcctcatttcttttttgcttcaggtatagttttggtggctgtgtaaatgagatcctggaaaaccttagcatgcttggtcaatataatccgtacacaaacctggattaagcttttcaaccttttcttcttcttcttcttcttcttctttgattctgtatttttcttgtcctatgtttagagaccttactttgtatccctgttttgaaccttttccttttgtgtttttcttttcctcaattttctcgatatcatatccagtggttcaccttgttgtatttactacttccttttcccttttcttttggttatttattttaatgttttccttggtttctgaaaagtgaatttttttttcaaagccctggatcagcattcttggctacttcattctagctaattggtggccatattttaaattttcttcaccgaaaatgcagtttttcatgtaattttatgacatttctctggaatggattttgtaggggagaagcgggtgctgaattctgaact

SEQ ID NO: 57651 - DNA, 436 bp, Populus trichocarpa
  Intron number 1 from transcript POPTR_0004s11220.1 (locus POPTR_0004s11220) derived from phytozome v7.0 (chr-ID scaf fold_4; pos 9844271 to 9844706 reverse strand)
ttctgttcctgccgaagttattcttcctccaaagagtaagttcataatttcattaatttcagcttagttatagttgagcatttacattggaaaaggttgttgatattcattaaagtagagaaaaatcatgtgctttggttttgtatattctttgctttcatcaatttgttccagctattaattggagataattgatttgattagttattgtcctttcatgttcatacattttttttctgtctaacatggattgatttgctgctcatgactataataaatgtttctgtaacattgctgatttgctcaagattttcaatttgtttgtatcgtatatcatttctaattttgttattttagttttccttgaaaaatctgattcttttctcttcttattcctaagtttggtaattgttgcttgcaggagtttataagaata

SEQ ID NO: 57652 - DNA, 788 bp, Populus trichocarpa
  Intron number 1 from transcript POPTR_0014s06115.1 (locus POPTR_0014s06115) derived from phytozome v7.0 (chr-ID scaf fold_14; pos 4593527 to 4594314)
acacgtatccttggcttgacgggttaacttggtttgatgagttaacccggttaattataggtaaacctgtcattttttttctatttaattatcaaactttcatgacgcaaatcctaggttttacggaataacctgatttaaaaggttgacccaattaattcaatgtttttttttcttttttttcattagttttttacttcttgttgattttttttctttgtttttttaattaatctatttaattatcacacttttatgacacgaccttatagccagacccacatccagtattcttgggtccggtgttacagccaaactcacttaaattttttgggtataactttgcagaaaaactcaagattttcaaatttttattgtttttcaatattttttatgcaaaaaaaatgacccgcggcatcgcgcgggtatcaaagctagtatacatatatatctcgtgacaattgcaatgattcttttttgtcttttgaaattagctttagctacgaagttgatattttagcgagaagctaggattatttaatttcccaggacgcctgcttttgaaaatacgtctgacaaaattgacaaaacgaaagacgtcttttgaagaccccacccattcgagactttaacacttttcctctcctataaaaggccccatcaatgaagtaacgatacttcacccattagtctatagctccaaaccccaaagacaacatctctctagcaaaagaaggctgcagaaaatcgcagaaaaccacccgcctcatcttggtttcaaaggagac

SEQ ID NO: 57653 - DNA, 826 bp, Populus trichocarpa
  Intron number 1 from transcript POPTR_0004s06460.1 (locus POPTR_0004s06460) derived from phytozome v7.0 (chr-ID scaf fold_4; pos 5228435 to 5229260)
aaactggaactaccattgtgggtttagtttttcaggtaccgcccaattgttctcttactttttttttttgtatgtgtatagattattctttctgggttatcgtctctctctcttattttttcagtcaaattgattgattgagttataaagtttaggaatttttctcgagttaatttggaatggacccgtgttttgttttaaagtaattgttttaggggtggtgatattgtgtttagtttcactaattgagactatcgatatcgttaataattgattttggcaaataattttatctaattgtggaggctgattgattatttgattttttagttcgttgtagtggcagtgtgtttttttttttttttcctccaataaattcttggcttttattagagtataaaagaagatgcccctggaatcttcttgtatagaatacatgtacattaatggatctttcacggattttcaaagaagccctctctggtttatcaatgttcgcgttgccagcagcggctacttcttaacttgttcaaaaaccttgtaaagtatgctactttgcaaccctttcaaaaggagttctagtataatgaaacagaaatagaagtatggaggatagttatgaagtctgttgaccctgtcactgttacttagattttgggactgctgagttgggtaatccatgttttgggaaagacttgacatctttgtgtggatgttgaaaccttagcagtatatatacattcaaatttcttgcacaatatctattctcgtaagattgatttatgcatataatattttttttttgctctcacaatttctacctagg

SEQ ID NO: 57654 - DNA, 900 bp, Populus trichocarpa
  Intron number 1 from transcript POPTR_0012s06750.1 (locus POPTR_0012s06750) derived from phytozome v7.0 (chr-ID scaf fold_12; pos 7226818 to 7227717 reverse strand)
ccaatcaccgacgttcgatcctcccttatccccgagtatgaatcaatcagacctatctagtcttcattatttgactttctttcagttctctaatctctccctccctctgtgtttgctctctgtttggctgattgcaaaatgggagactaatttatttatttaagaaagaaagaaaagaaaaaaattgttcgatagaatatcacggtgtcgtattctcttctacttgattcttagtaaacctgagaaagatgaatttgtttgttttttttgggtgttctttttcatgttaaaataatgttatggaaaggaagtggcttttgcagttttaattaaattggtgttgttattgaccttgactataaaaatgagtttcttagttatcgtatacatatgaaagatgaagttggtcttcattgtttcttctaatgggtttgtgttattacgaccagccaagtagccacttgtttgtgattccagtgcagttcatgaatacccaatttgattccattgagattcctggctgccgtagagccttgtttgttaaaaatgattacttgctctcatcttggaaaagttgttgtttagctcttcaattagttatgtagctgaataacagcattcaatttcagtcacagaattgcccgttccctgattggatatggtgaatccataaattttaaatatggtggaaatatggggattgctctttgatcttttgaatccataaactttttatttaaaaaaatgcaggttcttaggaacaatgaaagaacataactaaacttgaatctatttatttatttatctatcctgcaatgattcccactttcctgattgcttattttagatgcttttagaagtataagaataagaataattttctctggattcacagggacc

SEQ ID NO: 57655 - DNA, 619 bp, Populus trichocarpa
  Intron number 2 from transcript POPTR_0009s06610.1 (locus POPTR_0009s06610) derived from phytozome v7.0 (chr-ID scaf fold_9; pos 6361775 to 6362393 reverse strand)
tcaatcaaggtacatgatctttttctctcttcttctatatcgtagacgtgtgttaccatcaaaccaagtagggaattttagaaaaatataattacaattctttgcgaacaattctaatttagttttttgttttattgatcgaactggggttgatacagaacaagctattttacacaatctagataaccttgtaaaacatgtaattccacgtgataagaggattccccaatttgtcttaagcaaaatttgtataacgactttgatagttgataggtggagacaattttagatggtatagttttagttttatttttctttggatctttcggccccctctgttaacaaaaaaaaataaaaaatactaggaggattctagtttcaggccactataataacgagcctttgaagccaggtactgcagaggcttaatggttaggaccaacgtgacctgatttttaggcctaaaatagaggactgctcacaaattcgaagatctggcccatgactgagcaccgtgctttcctcgataaattgatgacccgttattaaagaacttgacacatctacaacagattcataaatctactgtgggtttaaagttacaaaaaattcgatacag

SEQ ID NO: 57656 - DNA, 978 bp, Populus trichocarpa
  Intron number 1 from transcript POPTR_0009s01510.1 (locus POPTR_0009s01510) derived from phytozome v7.0 (chr-ID scaf fold_9; pos 1925118 to 1926095)
agcaaaacaaaagtgggttttgaaagggcaaaaaattgtcaataattttggtttacaggtagagcactggattggctatatttggagacaacttataggcccaaaacctcacctggatcctccccaagattaaaatctaggtactttgaatatagagtgatccttcagcttcctttaatttttatgtttgcttttttaccatggaaatttagctgaaaaaagattttccaatatcattttggaggacacaggaaataaaatctatttatgcgctcctttttaaactaaaatctattgccgaatatataagattcgatagtaaatatatttttaaattaatttgtatgttaatcaagattaagttcatttctatatgatttatgatgataaaggacatgttatatatgaataaattaagtattttatgaataaattaaggacatgctatatataaataaattaagtaaaacaaaaatgaataaattaagtattttacaagtttttccataattagaaagaaattttatttgtaattaagggttttaatttacaacaatcatgttattcttcattccagtcagcatcacaaaacctttgaaattaacaatagaaaaaccaattacaaagaaacaaaacaaacacaaaaacaacacgtttttcttaaaaagtacccttgattttagaaaaataaggaaataagaagaatcttgattgtggatcaagctaaacagaaggagacatccatgtgttacagacaatagagtcaaaaacctaaaatttatctttttccagatatactgttaatttgtaagatgtagaatccaagcttctgtactgtaaataaatgcacactcctttgcttgaaacatacacaaacatggaaaacacaatgccttttgtgtctctttccctcgttttcaccatcatctcttttccactgccttcaagcactgccatttcttcaactcatttgcatca

SEQ ID NO: 57657 - DNA, 753 bp, Populus trichocarpa
  Intron number 1 from transcript POPTR_0011s03740.1 (locus POPTR_0011s03740) derived from phytozome v7.0 (chr-ID scaf fold_11; pos 3818699 to 3819451 reverse strand)
tcattttcatgttctcctttcaagcttaccttgccatggcttcctactgaaaatggcatagcatattttattacaaaatgagctttcttgacaagtcatggcattttatatttcttttatgcttgttattctccattttatcatataccaccaagaaattacatcattattatttccataaacagtgttcaaatgtgttactgggttccatttcagatttttaataataaaaattttgataatgtccttcgaactttcctgtaattgaattactaggttgcatttggttagtaactcaggacaaaaagaatacatacaaaagggactaaaatatgtttggttagaaatatgtctgtgttttgtatctactgtcttgaaacataaaataattatgtttctgaatagttttgaagttaatttttgtactttcaaaacaaaacaataggtataaaagaatatgtccgctttgtatctattattttaagacaataatcaaatgttaccttagaagagaatacctttttcggcctacaaatagtttaaatcaataacctctgccatatagctaaggttaattctaacgcaacaatattgtttagcatgtattcaaacatgattttttttgttgcctttctctcatgtagatccttgtggatttgatagtcttctctgatttggcagatgaatcacaaaaacgttttcaagatgagaatcctaaagctgatgaggaagacatagatcagctgcctttat

SEQ ID NO: 57658 - DNA, 754 bp, Populus trichocarpa
  Intron number 1 from transcript POPTR_0012s03160.1 (locus POPTR_0012s03160) derived from phytozome v7.0 (chr-ID scaf fold_12; pos 2512189 to 2512942)
ccggcttattgttcctcctctacctcttctgatcggtgagttctctctctgaaaaatactctctttcactcttccttggtgattctagtgattttgctttctatctctgctttttccagatccgatcttgaagaaatagtagctgtagatcgtgttttcagtctctaatactacttcttaccccatttgttcttatctcttcatttttttctaagtttttgcgttcttagatggaatttgcgtgggtttggcttggtcaatttagggtttctatttaaaaaaaatgggttgattttgttatttttatggattttttttccggtttttttaatctcttttgatatggattgttgtttatttaatgcgtaacttggtttataataacaatggtgcggattttcgagttgaaaattgaatgtctgtatgcttttgcattacatttttgggaattaggttagggtatcggtataatcatatatttttgcaagctaccacatctgtcgcaaaaatctaatttatttggattagagatgagtgctattacaaaatcttttctatctttttcttgggtgatgggtatttaaagaaactaccaaaaagtgagctgcttgatagtgccctttcgctttcaatggagtatttttattcagacatttaactttccttgttggattgtttgtagtcgtgttgattttgtttttgttggaatttgatcattgttgttcttttattgcaggggtcgactgaagtcacc

SEQ ID NO: 57659 - DNA, 792 bp, Populus trichocarpa
  Intron number 1 from transcript POPTR_0009s07300.1 (locus POPTR_0009s07300) derived from phytozome v7.0 (chr-ID scaf fold_9; pos 6848901 to 6849692 reverse strand)
acaccggtattcttcttcctgagaaaacccccaaggtcatccctttctctttactttcattccgtttgatgcatgcagcattggaactgctttactactgtgcgtgatatgaagtgtaatgaactcttttattagggagggattctctcaactctaagaggcattagtacttggttaatcataactaaactaaacttatgtctaagatttatttttgttgcaaagagttgtattgcattacatttgaatctcaaaacctacggcaaccacatactagaatctgggttctttatgtcaccccccacaaatcctccaattgaagtattgaacataagcaacgtttggcttgtaaaataactttattctgagtactaaaatctgaattggttcatgcatgaatccgaaacttcagcttcagtttaattgctaacagtaacggttaagtgctttagctcaattttaaatggttttgttgggattgggaggttcttagttttaatatgtgcttcattggaaataaattatactaacattcaagttctcacgactgctgttattttttattccttggtaattggctcaccttgatagtgcagcatgctcaacttatgtgtatttgtttcttgccagtttgataaatttatgcctgacaagaaaatcgaaggctaattcttatcctgttatgctatgatgtaaatctacgtttattcatttgtttgattgctggatacatgaggtgattacttattgttttttgacctcatgatttcttttaatgcttcataattctag

SEQ ID NO: 57660 - DNA, 891 bp, Populus trichocarpa
  Intron number 3 from transcript POPTR_0012s01220.1 (locus POPTR_0012s01220) derived from phytozome v7.0 (chr-ID scaf fold_12; pos 842847 to 843737 reverse strand)
tgccttctaaaccgttagaatcgactccttcaacggtaaatgtgcttcataattttttcattggagaaattcctatgatttgtcgttgcagtggaattgattgttataattgtttgttttatgtaatgattaatgatgaagtagggttatgtaacttaaaaataagggagttgtagagaatggtgattgagattttgagattcgctggattgggtgttagtagaagaaaatcaggaggaggagtatgggtgtataaggagatggctaatttgaagcctctctatatcgcaatccatgctactctcctacctccttggaattgatgcctgttttctccgtgtatactgtgccaagtcctccaattcttgtttctcctctccttgttcgaagatctgccttctgaaaccaatagaatcaacttcttcactggtaattttatttgtgttggaggtgttcatagttttggtacttgcttaaatactatcctagtggctgacattttcttactcacatttgatcgagtggatttgagtatatttggagttgagatgtataatttgagaacgttgtgattttgtaatcagtttttgtgaatgaagtaggagggacagtataaagaccagatcaattaaattgattggtgcagtgaactctgctgttatatgtgattagattagtctggataaattgattggtatagacaataaatatcatatccttattgaaatgtaatgataattgcatgctagtttttttttttttaaatgattttgggatatgtatgtgtaggtttaattagtcaatgacaaaggttctcagttgttgagttatgaaatgaacattgttgataatgcagggtccgaccgcagatcctgtagagagaaaatatat

SEQ ID NO: 57661 - DNA, 365 bp, Populus trichocarpa
  Intron number 1 from transcript POPTR_0004s21220.1 (locus POPTR_0004s21220) derived from phytozome v7.0 (chr-ID scaf fold_4; pos 20444650 to 20445014 reverse strand)
agagccttcattttcatccactatctttccgccatgtaagccctaaaataacccccacaaatttaatccctttcatcttctcgattttggggttgtttttttggaattgcgcaaaaaattcggaattgagggttttttagggtctaatgttctcatttctacgtgcttaattaggtctcagtttttaataataaatttgaggtttagggattatggaattatgtgggattttttgagctaattctgctatttgtgtgtaaattttctcatgctgtttttgaagggatcttggtttgtgaaaatgggttttgttaattactttgtaattagggctaatgacatgcaaggaatcaaagaggcaaaca

SEQ ID NO: 57662 - DNA, 615 bp, Populus trichocarpa
  Intron number 3 from transcript POPTR_0009s04530.1 (locus POPTR_0009s04530) derived from phytozome v7.0 (chr-ID scaf fold_9; pos 4864117 to 4864731)
aaatctccaacccggatcgatttttgtgaataagggtgagggaacgtgtatggtttttgtggattatgaatttgctaatgggtgaaaacaaactgtcatttaaaatgccagaaaagctcttgctcggcttttggcttttgctaatgggtgatttgtgtaatgccctttgttttacgtagaatgtatcacccagtagttttacaagtttccaatttggtgttggaaatttattgtttagatgcttatttctttctcaatggtcgtctttcatagagactgtttttgggaacgatctaacaaatctttgactttcaattttgtgtcattctggtaaaatgacaaccttctgtatttgaagagcttattcttcatcagatgccattttagcctgtgctaaactcttaatcaataactggattgaacctggatccctctacttcttcttgttttctctgtggttgtaccatgtgctatgttgcacccatgattgtatggtctcttcgcaaaagctgttattgcatcctttcattttttggcaagggccatggcggtggtcatattgctgaatataatcttagagaggttttgtcttcttacttacaggagagatcttag

SEQ ID NO: 57663 - DNA, 957 bp, Populus trichocarpa
  Intron number 1 from transcript POPTR_0011s10260.1 (locus POPTR_0011s10260) derived from phytozome v7.0 (chr-ID scaf fold_11; pos 12719018 to 12719974)
cccttcctccatcaactggtcaaggattgtattcaacacgcaaccctttattatctctctcgtagaaaagatgctttttcttgctaattaaatatttctccgatttattaagaaattccttttgtcttctataaggcggcaatgattgagaaattttatttatgtcgaacaacttttgttcaccgtttctcagtaaaactctgttatcatcggtttattttaattgataaaatattattttttatgaatacaaaaacaaattaatatcattgggaatcagaatgccatgttccattggttagtgctgcactgtgctggccgaatgtttcagccgattttcttattttacttcattttatagtgctcttgtggactactctcgcctcaaacctagttttctatcaatgggagaaaaatatttttaaaatagaccaagtgggtgttaattttcaatattcatggtatgcgtatttgatctcttggtagtgttggtttcctactggacagaacagtactaattactaacagttgaaaacattggtttccaagtcagtattgaacttgttattagttggctagaggttgtataaatataaataaaagaacttagtatcgttttatacttttgtatttatctaggtatattaaaagaatcataactttatgttttcctgcatgttaaagtaaagttgcatctagagaagatgcaactttgtcaactctattgatgtgttcataaaaatataaaaatctattagaaaaagaaataaaattctcgtacaagaattttaccttaaagtgtgaagtgcaattttttctgggtttggatttcttttgttcatatctcaatttgagcctcgtgtatttaccttaaagtgtgaagttgcaccttcaccagcactcgtgtatttgattaataaatatgcttcctctgacgatgcaggtaagaattcattt

SEQ ID NO: 57664 - DNA, 874 bp, Populus trichocarpa
  Intron number 1 from transcript POPTR_0004s22330.1 (locus POPTR_0004s22330) derived from phytozome v7.0 (chr-ID scaf fold_4; pos 21242012 to 21242885 reverse strand)
tttttttttaaggtaattactaattttcttgatacaagattagagtatttcttatgagtttttcctttgaaatttgatcatcaaaatcttgctcaaagatttatctttaccttcttcctttttttccctcgcatatcctttttttcttttcattttcatgtatttggaaatctctgtttgatatctatatgttttcttcttcataacctgtgagtgttatcaagaggcaaccaaagctgcaggggtcaaagtgaaacaagagattttcattatacatgttcttcaacaattggatctcttccaactcagtctctcattcttgttttttccttagatgttttagactgctgacatgcacgagggtttatgctgtttttttattgaattagggttacagtggtttacgtgaggtataattatgatatacctgtactgcagtatatacacatgcatataaaagggtggcaggttacagacagttcttatttagtccaagattgagttggttcgagttgttgagtattaactctgcaagattttttcactgctcctttggtggggggaagaaagccttacagtttggctgtaacatgtacaaaagttgaaaataaaataatgatgacgatgaaaatggtagaaaaagtcttgtacagatttgagagcagagacctctctctgagtgatgacgaatctacagttggttctactgttattgcttttcttttttcctttcttgatgaatatgttttcgttcttctagattcgtgtcgtcatatcctgccacttttttaattatttttattctgttacattttatgtcagtcgtggctgtaaaatttagagcattaatataccatgtaatctctgtaacagg

SEQ ID NO: 57665 - DNA, 476 bp, Populus trichocarpa
  Intron number 1 from transcript POPTR_0004s04840.1 (locus POPTR_0004s04840) derived from phytozome v7.0 (chr-ID scaf fold_4; pos 3597863 to 3598338 reverse strand)
ccagtccgtacacttcttcattctctctttatgtttacacggttttgatttgatttgtttgcttttgatctcttctggcttggattttctctatttctttgtgtttgtgattctgtttatgcttggattcctgctaattttatgtgttattcaatgaaagaggcttagttgtttgttagttttgttgaaattttgatttttttggcaattttaatcacataactagttaattttcgtgttagtgattatagatgcttaatgttttctctagatttatgtgtaatatgtttacttcacttgttttttttttcttttttttgcatggatcttggatgattttgattcaataattagctattattatttatttatttatttcttgcattatgcgcgcgcgtatcagcatgtttttttttttggttgatttttgtttgctattgctggtttcatcagctgagacatatccgtcagaggag

SEQ ID NO: 57666 - DNA, 892 bp, Populus trichocarpa
  Intron number 2 from transcript POPTR_0004s21380.1 (locus POPTR_0004s21380) derived from phytozome v7.0 (chr-ID scaf fold_4; pos 20539448 to 20540339 reverse strand)
actctaaagatctgagtttacccgtgtcacaggtaaaagctgaattcactcatttccctgcattcattatttcaacttgtcatgagaatataattgaatcctctttctttgcacttttactttactgcattcattaagtattgacacctctttcttaggtgaatactggaaacaaatgtctattgatggtaacataacttttcagattaacaacaggaactcgttggtaaaagtttccttcaacaaggcaaatcgaaacaccattaacaatttaacctttagtacgagttcaattatcagagagattcagaaactaccattttttagaattattttcttgtgatcttacctcagcaattaacgcttaatgattcaagtatatttattttgtattatatgaagcaattccaaggcaagtattactcatgtggcatctctattgctcatttgattagattggaggttggctgggtgggagaggagagatcaagctgggattcagattgtcttcacccttgatccatacatttccaaacatacatgttctatgcaaataagtcacgtattggttaaaccatttcaagataccaaagaaatgaaaaactcagggttttgttgacaaaacgtatttttaaaataatctctcggtcaataggtttgtttattgaatgtctatttgaccttcacttgctttaacactgctttgagatgtatcagttgaccgatgcttttcttgtctgcaccatgtctttcagggtgtgtgtgtccttctcatacatatgtaatggtattaaaaaatttatgttttatctgtttatggtaaatcatattaattcatcaacgtgctttgatttcaggaaactatagaggagctgagcatatatttcctttt

SEQ ID NO: 57667 - DNA, 1048 bp, Populus trichocarpa
  Intron number 1 from transcript POPTR_0004s08630.1 (locus POPTR_0004s08630) derived from phytozome v7.0 (chr-ID scaf fold_4; pos 7167004 to 7168051 reverse strand)
aatcaatttgaagcagaaatattgactggatccaggtacttgttgataccatacaatagaatgatgaagtgatcttcacttttggttttttattatgtttctatcaatttcttactagccttcctagtttttcttcaaactctgatttagtttcctttcttttttcaagggtatgttgaataatatgtggaactgatactagggaatattatagcaaatctgtccatgaccattatatgttaaatgtgcaaagttggaattgctctgatctgttaacttaaaaaaacccaagtcctcacataaatcaaatgtaatgtcatgatgttaatcaggcatggggctttacccctgaatatttgccagtaatcagattcatccatccattttgcagccttttgaaactctagctcttgatgaggccatcattcttattagttcaagctacttgcatcctgacattctgtttatgtatgcttcttttgaatattgctaaactacattgcaactcttccttttctggcacctgtatatcagtgctttaattctactttctggcaacacttctccttatgaggggtgaatttcatgaaagaggtagtagttcatataagattatcacaaatctttggccctgtgagcagcctttctagtgcctttgactatggggtaggaattgctagcaacagaggtccagtcaggaagttttaatcgtggaactatgcaatccctacactttagtgatgaaaaagtctcggaggaacagtgcttcataaggagttaatatgcacaatgacttaaagcgtgcaaattgacttgatgcaaacatatcaactggttttatctcacgatcataagattttcaatatcgtcattctgcctaggtttcatctttcttttccatgagatttttaacaattgacaacttaaattctgggtcttacaagaacagggaatagctagtagttatttctctatgctttattttcttcttcccttgaatcttttgccttctgataagattctctgtacaggattgtatctgaacaag

SEQ ID NO: 57668 - DNA, 651 bp, Populus trichocarpa
  Intron number 2 from transcript POPTR_0014s16880.1 (locus POPTR_0014s16880) derived from phytozome v7.0 (chr-ID scaf fold_14; pos 13017205 to 13017855)
accaccagcgacaaagtatccggcaccttcaacgtgtaatttctactaccctactacgtcataattatcctttcatttcatatcctctcttcaagattggattaaattatgcttcattctggtgctagtgttagtcaatcgtgaacaattaggtttcttaccaacaaaaatgttattagaaaattgatttaataaatggcgttgttttgctagtgaattttcaattattttgacatttttttgctatttaattccattatgctgtgcatttaattgcggggcaatccatctctgcggtcactgtaatcactggtataattgactggcaaacggcaagcatatcatttttctcaattgttatgtgctgagagtgcaatggtgttggtgaaatgagtttaagttctaataaaaggtaatcaggaagagggaaaaaaaaacgaaaactattttcgtgcttgatgaaactattttcgtcggattattattttcctgcaagcatgaattggaaactgatttttgagttgttctatggctttattggtatttatttcctcatgattgattactatcataaatacaagaatgtttacgtctatgtatttttgttcaatttcagagtttcgaaaggagtcagggatatacccgggagtt

SEQ ID NO: 57669 - DNA, 825 bp, Populus trichocarpa
  Intron number 2 from transcript POPTR_0014s16680.1 (locus POPTR_0014s16680) derived from phytozome v7.0 (chr-ID scaf fold_14; pos 12775806 to 12776630)
ctggtgctactactactcttggaaagcctcagactgtaagcaacaacctttcttattttatttcgctggcttttgggtttggttaaatactctgccattatcagctggaagcattttcatctcacacatcacgctaccagtcccatgccttaatcttgaacttggatgtatttttcattcacttaacattaatgaaagtaatctttttaaataattctcaatactgtttactgattgcctcttgaattttacgttgttctaatcatgaggatttttcttgtgctagtgctactgtgggaattgcttcagcaattcaaaataattaacggagatcccaacttcctggcacatgctacttcattttattttttgcacttaaatcttgcctcttgaattttttgcttctgtctgaagttttacctctcattaaatcttaagcatgtgcatcttactatgatgtgcatgctatgttatttcggaattaggattttttcatttattgctgttacatatcagagaggtagaaaactaaaaggaaagtaaatcattgctcacaagtattttcactcttcttcagtagctttcatttggatgaatttgggaccatttttttctgaagtagtttcttagataataaataattgtacttggttgttatgaatttttcaataacactcttaattgctgggactaaacccctggacaaaaaccacatcaatgagcaacaataaaatgctttgttttattaacagttgctaaattgaacaaattctaggtttgcatcatgtttgatactttaaaatttattactggtttgcagaaaaa

SEQ ID NO: 57670 - DNA, 610 bp, Populus trichocarpa
  Intron number 2 from transcript POPTR_0012s07100.1 (locus POPTR_0012s07100) derived from phytozome v7.0 (chr-ID scaf fold_12; pos 7789359 to 7789968)
ttattcaggtaaaatatatctatatttctcgaaggaaacatgcccttttccttttatttttatttttttcttaactaaaatcttccttttctaactaattttttgagttgatttaatcatttaatatgatattaaagctttcatgggtaaattaattattatgcgttcgaatcatataacttttattcttaggttgcaactaatctcatgttatcatttgctaattaatgtaatcataattaatttttaaaagaagagttaaattactaaagcactagatctgaaataataataataataatcaatatcgttgtcaattagtttcattaacattattcaaattttttatgctccttcgctattaattattgctctctcctatataataataataataataataataataataataatcaataatgttaatgagaagacaaaagagtagttgcaatgaccatttttttaatttgcatgttccttccctattattgctctctcctattttcgtctgcatgtaaatatatataatacgctcataaaaactaaaatttgggcactcatgtcaaataaaggtattgagcaacaataatttcaagagcgcaacgca

SEQ ID NO: 57671 - DNA, 740 bp, Populus trichocarpa
  Intron number 1 from transcript POPTR_0014s08910.1 (locus POPTR_0014s08910) derived from phytozome v7.0 (chr-ID scaf fold_14; pos 6575191 to 6575930)
tcaatttattctgacattagcaaagagcttgataggtaaataacgtcttccacccaacaattatgcaattcacaaaatgaatgataggctatctacattactttagttgaccattagcaagtctcttttgtttgggttcattgggagtggttccatttagatgaacatgagcttgaatttaccatagatcacatccttcccaagaagaacatcaaaatttaaactggcaaagagcataactgaaacaatgaaagttgagctcaggatcatattcaagatttttcttcatctcaaaatctgaatttgaactgtttcttttggacacacttgacagtaaattgcttcgaatctgagcgactgagatatctggaaacaacaaacaaaaactccacacacacacacacacacacacacacttcttcattgtaatactttatatatgtgtgtgtgccattatgatttcactttattctattcaaagactatccactgcttaaaaaataaaatggaggagggcaggtagaatggaaagttcactagcctgtccatgaaagagcccactttcctcctgtcatataatttatccaaaggaaaccaggggtggttttgccctctctttgttttcccccacttgtctactgaagatgaacttgataatctgggattaaatagtatcttcattgatgaaatactttctgccatggttccattgcagttctaaatttagattaggtgtggga

SEQ ID NO: 57672 - DNA, 956 bp, Populus trichocarpa
  Intron number 1 from transcript POPTR_0009s08110.1 (locus POPTR_0009s08110) derived from phytozome v7.0 (chr-ID scaf fold_9; pos 7475497 to 7476452)
gacaattcctagtggatttgttaggtgagaacagcttcacaatcccatctcgtgtagttttctctgaatatgaacatggaaaaatgatagaactaagagtcctataatggatctatcttcatatttcactattttttttctttttctaaaagaatttcatataggtcttcagcaggcagattgaatatttggcatcatccatcattactattttataagtcaaactatgatcaaatgtgtttaggacattacgtttgaactactatcgaagatcttcgcctaattttcatggaattagaactctcaaaagatatgccatgatttgaaatattcaactagttcaaagcttaagcttcatggaggtcaacactctggtaatctactgaagacatggaaatttaaaatcactcatgttgttttaacaatttcagtctgtaatattgttgctcttttagctgtgtctttgtatatctgtagtttttaatactattgttctttcaaaacattttatatatttaattttttttctcaagtgataataaggtttgatttgtcatgactcattgattgaaccaatggcccagtaacctgattgactattgtaccgggcaggttttcaaactatatgattgaatggcattagcatttcttttaatccacagtattggaacaagtaaaaataccagcaaaaagaaatatagagaatgaaagatgagtctacgatcatatttgcattgctgaaagattgtgcattgctctaattagttatggatccagatgcagagatttaatgggatttgcttcatgttttgtttcctttgtgtgcgaggtttagagagagggtatgaacgtgcggactacattccaggagtttcttcaacaagtctggtggatttcccttccttcattaatgggagcaacccatacatgttgggtcggattgtggaggtattctc

SEQ ID NO: 57673 - DNA, 822 bp, Populus trichocarpa
  Intron number 2 from transcript POPTR_0009s11650.1 (locus POPTR_0009s11650) derived from phytozome v7.0 (chr-ID scaf fold_9; pos 9642405 to 9643226)
cctcttcccgtggatttctcacctcattcccggaagtaagtatacatatatttaactatttagtacgtggctagtttgggattaagaggtttattttaattgtagttttaggtttgagtcatgtggttgttaacatggtggctactaaaggcttatatagttgttaacttcagggtccgtaggattagtcgaagatgcgcacaagctagcccaaatactcatgttaataaaaaaaaatatatacatatatttaaatacattttctttaattttccaaaaaaaattgttgctttaagacttgtgttttaaaatttcttttaaacaagagagattaaaaaattgcaaataaaatggtattcttactaatttaatttcaaatcttttaagagagttttatagtatttttcacgggcattaagaaaaagcattaaatattgtcgactcatatattttttttattgtattttaaaaataaatgtagttaaataaaaaaagtgtaaatttaatttttataaagggataaaataataaaattttatactcaattcttgaactttttgataaaagacattcaaaaagagaaggactctctttatgagatatagaatgagtgtttgggtgtttaatatgtaattatgtactgaaaatggtttccaagagtaaataatagccttgaaaagtttagtttgaaatactcttaaaattctaataaatgcacaagaatcccacttttagcaatttgaatgttgaaaaaaactaaaatctggggatttgatatcaacatcacctttgtgattctgtatcttgtgcaggtattcataa

SEQ ID NO: 57674 - DNA, 692 bp, Populus trichocarpa
  Intron number 1 from transcript POPTR_0004s02580.1 (locus POPTR_0004s02580) derived from phytozome v7.0 (chr-ID scaf fold_4; pos 1721714 to 1722405 reverse strand)
actgccgcattgccattgaatctctttggtaatcttctatctctgtttctgttttccgagtgttccgtgattagaatttacaaggagaagctaaacccataaagaaaagatggaacttttcattttgttttcgttttctttttaattattcctttggttttgttgtgtttctagctaattattgctttgcgttaaatttaatgaaaaattattttagtttagtttacgtttgtgtggagtcttttaatgttaatgggtttggggagtttaattggatatggaaatttcatgatggcagctttaaatttgtattttaaaaaaaaatcagtttggtttataaatgttactatttgataataattttgtgtaacatgaggtgaagaattcatgtttgtagctttaaatatatatttgtattgtttctctaaaaaactgtttatgtgtggatattgactttaattttatgggaatttaatagttaaaggcaatgctcagaagggattttttttgtgtgtgttatgatgaattatcttcaatgttgatttgtttattctggtcaattatgccgtctttgggccattgaacatagagtgtttcaggcaaaattggattcttccatttttttattggtattatgtgtttgaattttgctctgacttcaagtaaccgtgcacttgatgttgcagctgtcc

SEQ ID NO: 57675 - DNA, 623 bp, Populus trichocarpa
  Intron number 2 from transcript POPTR_0012s01630.1 (locus POPTR_0012s01630) derived from phytozome v7.0 (chr-ID scaf fold_12; pos 1243230 to 1243852)
gcccactgatttgttctttcaggtatggttgattcatttcacccttcttttcttttgttattttgatcatcaattgaggtttttttactctttagatttcataaatagcagcttctgctcatgtttctttggattgacagagtatgcaagattttgtttttggtgaacaaaaattgaatgattatccattaaaatgttgctgttggaccctaaattttgatttctgtgttgttttttgaggcaatacaggatgctagggttatcccctctgttgttgtcagaactacagtaacagaggacagctacaaattgacagaggaatatcctgtcaattgattggtatgtatccatgaaatgaaattggtagggtaaaaatgatcaaggtaaatattctttcatgaatacttaccaaaaactgagtttaggaaagatgtttctattgatttcttgcctttctcgaagggaaagatgaagggattctgtgtgttactgatcttgaatgagcatcaatgcattacattgacaataattaccaaatagattgttagatgtgcaaggcaaattttgaacacaaattgatgcattaaaaactcggtcttattcgtgtatgtaacagagaaggt

SEQ ID NO: 57676 - DNA, 928 bp, Populus trichocarpa
  Intron number 2 from transcript POPTR_0012s07180.1 (locus POPTR_0012s07180) derived from phytozome v7.0 (chr-ID scaf fold_12; pos 7958953 to 7959880)
ctcctcttttcacttcaggaatcttacgtctccaggtatactcaactcatttcttctctacactaactctgcttcagcataatatggtgtaaagagggtagatagtagtagtagtagtagttcttcaatggagattaaggtgcgtgttttcttatctgaatgaacatgggctaacgggatagggtcaggggtgatgatccgttgctggggaaattcttacttatgtgccacgtggttggttgtcattgacttgactgccattgcttcttatcctgtgttgccttttgcttttagaaataaataaataaataaataaataaactcaaattagaagaagaagaagaagaagaagaagagtgataagccaggcagccggcggaagggaatggtatctaaaaagtcatcatgctcccttgcacaggctgattgaaaatgaatgatcttttttcagtgaaagcatgcatcttagcgttttatgatcaagtataagatcgataagttttatgacaaaaatataatgagaaattataaaatttaaaaactcacacgttttcttacctttttcctacaaggataagacatgctagagttttcatgtatcagccattccgcatagataacatcattttcttatgagaataaaaaaacttagaatttcttatgagttttcatgtatcacaagtcttacattcagtagcaacttaaatatcgagttaatggggtgaatgtttatattgcaaacaaatagtacgtgcaagaaagactattgaggcatatgtatgtggtaatgaattcggtttatctcatattattgttttgggttgaaatttggaaggaggtaaatgggatttttcttcctaaagctaatatcctacgatgtgattgaaaaaaaggtgccaatccaacagcaaattgaagcaattgattg

SEQ ID NO: 57677 - DNA, 944 bp, Populus trichocarpa
  Intron number 3 from transcript POPTR_0004s18030.1 (locus POPTR_0004s18030) derived from phytozome v7.0 (chr-ID scaf fold_4; pos 18042236 to 18043179 reverse strand)
cagatttgtatcaggtgatctgtttcactccagtagtgtttgattaagtaatactgcagataattaaataaatgtttaattaatactgtttattattctccatctatatgtctatttaatttgttgtttcagtattggtagctaataattatactgataatcaaagcctaaactgattttcttgtcaaaaagtaacagtatgtagagatataattgaaaaacttgagtaaatgaagtagcgattatccgcgtgggtgtgtggcggaggtggaacattccttggtaaatctaaccttatgatttgtggatggagatagaaattctaaggacattaccgccactgacaggactgaatcacaagtggaagttctaaaaatatgtcttgtctgacctgtctagtcaatcttcacaagaaatgtgagtgaatggcgatgaaatgatgattcctagtcatgcaagtatagcataaggtggttcctgttctattttcttccatgttggtattgaatgctcacaaatatagatacctgacgtatttttctaattcatgattaggtttctaaatttttcggggaagaatttggagagatattcttttagtatgttaccgtagcaattcagttggaatttgttgaagcatgctgggagttgggcaacattagatgcactatcatggttgctgttctgttccttggcatgatacacaaaatatttgcaaaattatgaacagaccagcaagccataactccatgattgctgcatcagttagtacattaagcttaacatgcgagtaattgatatataatgagtggtggattttaatgtaaaatgtttgaatatccaagtacaattgctgggttttaaaatataaggagcaactgactcatattcaactacttgcatgttcagctagcaggcgttgttgcagtcgaggtcactggagg

SEQ ID NO: 57678 - DNA, 575 bp, Populus trichocarpa
  Intron number 1 from transcript POPTR_0012s03690.1 (locus POPTR_0012s03690) derived from phytozome v7.0 (chr-ID scaf fold_12; pos 2900416 to 2900990)
ctactaaagctaattttgttatttttctttgatttttttagtttttcttcaagtttccattttgtttagaaattttgatttttctttcttggtttcagacttgtttaaactcgatttcagaaatatagtgtgataattctttttggttttcgatccattatctgtctttcttacttgttgctatctttactgtgcatcagcttgcataaaaaaaatcattcagtttttaagcatttatttaataatataattgaaagtaattttttttaaaataatttttgttagaaaaaacttgaaaagctccttttgacgtcccacgtcaaaagctcaaaacaatcaacttgttgtcatcatttttcttagacatagtagtgttagagatcaataatgctttgtcaaggaagagttgtgtccttggttgattatattcattttgattagtcagttgctgatactgccactgcagctcgtgatagctcttatatggacatttgtatcatctcctttgatcggttaaggtggaattattgggaagaacagcaaggctgagttccaagctccttgtcgcaccgccg

SEQ ID NO: 57679 - DNA, 425 bp, Populus trichocarpa
  Intron number 2 from transcript POPTR_0012s03690.1 (locus POPTR_0012s03690) derived from phytozome v7.0 (chr-ID scaf fold_12; pos 2901238 to 2901662)
gtggtggaggtatgcatttagctgtaatttatccaacatctaagcagtttcctgatccatagcttcgtttcatattgcatataaattcatatctaaatgctgcagattacttcatatcttggagattgtgggcttggactttagtacaaaaaaaaaaaaaaaattcggaatttttgagttttggctattgatgttaatgaaggtggatgattagagcaaattcttatcgtctacagatgaatatataccaaatagaagagcagacatttttttatagaataatgtttttaccaattcttcgttgatccaccttgaatggatgttaactgcagttttctgcctgatatctgagttttggaggattaatgtatttgctttatttggtgacaggtcttttctctctggtggatcaaccggctcattta

SEQ ID NO: 57680 - DNA, 910 bp, Populus trichocarpa
  Intron number 1 from transcript POPTR_0004s22800.1 (locus POPTR_0004s22800) derived from phytozome v7.0 (chr-ID scaf fold_4; pos 21668743 to 21669652)
tctctcccgctctcgccttcgacgcagatcacagggtaactgaaattttgatatctcaaaccctatttgtttagttctgactcaggtgcactcaccaatagtgactcgctctttaggttttatgtaataagttcacgaattttagtcagatctgcaaggttttgcatcgttttcttgtataaaattaatgaattattggaaagttggatctgattatgactgatctttttggattacattatagggaattcgttggcttaattctcattagggaacactctttttattaaaaaaaaaaacacctcttgaccgagtctcaattttgcaaatgacagcttatacattgcgttgtgaaaggtgttttgtttgttggttggcaagatttgatgcggaaattcactttgctggttcaatgcaccttgtttaatggataggatgaacttaatcaggagcaattgaagttgaattttctcaaggaaagattttgggaatgactgttagctgtagtgtttcgtctttatcttgtcgttcagaggacgtgtgacttagtgtgatgatatttacatcttgtagttgctttaaatttgttttttttatatacatatgtttgtgaggaatgggaaaatttgactatggcgtgattttcgatgacgagagcagactaggaagagtgaccaactatctagagtgggagacagattccatttttgagagtaaagtgatgtttcttgtcttgatatcttaacagtaagatgtgcttcctgtctttgtatgagctaactagcttgaatcctcttatgattgtcctgatggttttatttaaatgaaatgtgttcttcaaccaatctcttgctatgcttttaatttattctccaatgacaagttttttttataaaattacatctgcagt

SEQ ID NO: 57681 - DNA, 755 bp, Populus trichocarpa
  Intron number 1 from transcript POPTR_0015s03880.1 (locus POPTR_0015s03880) derived from phytozome v7.0 (chr-ID scaf fold_15; pos 3796020 to 3796774 reverse strand)
ctggtaactcttcatcaaatatttcgtttatcccatcatccttgctatgtattttttctatttcctaacaatggcaaattctcggggaggactagccatttctgattcggttagattgagaatttggacaggttaatttcttgattagtccatgaatttacatagacaaccaaactttaaacaatgatgccaatccctgacatattgacatgaaaaggcacttgtactgtatgaaaagttcaatgcttggatggagttgtgcttgcatcagagtatttgtctgtttagaaccatgattctttcttttctctctctttccttccatattttttatatgctgctttgtatggaatgctagatgcttctacttattggatcgatctcttcaacagcacaagtactatgcatacatcgcatttgcagttttagaaaggtcagttttgtatataaagctgttctgatctcgcagaagtctaaaatttcaaatttttttgttttaacttttttcatgagaatattaacacctcattgctttgaattattctatccaggaactagtttgaatgtgggccggaaggttgccataggtaagatctctgtctaccgtttatttatgtttctgtgctttgttactcacttcaatttcatgtctaaatgttgtagaaattctctcaccaaactgttactgaaaaggctaaccaatttctatattctgcttttaaggtcttggggcatctcttggtacattagtcaca

SEQ ID NO: 57682 - DNA, 986 bp, Populus trichocarpa
  Intron number 1 from transcript POPTR_0012s01740.1 (locus POPTR_0012s01740) derived from phytozome v7.0 (chr-ID scaf fold_12; pos 1322740 to 1323725 reverse strand)
gtggggttgccgtgccattgtcagttgatcataaggtaatgatttttgggtttgttgaaatcgatcgagtgtttttttttttttttgttcccaccttcaatttggatttagaccatcaatctcttaattgagtgaagctatttgctagttttatgacttaattctcaatcaattgatttcaatttaaagttgagaattatcctgaaaaattaaagtgggaaaaatagaggaagtttatgaaaattctacgaatctacgcgctcaagctgaaactgagatattttatagtataggagagacggataaaaaagaaaaaaaaaagaaataggagataaaaagttttaaaaataatattttaataataataaaaaaaaaacttcttttaactctttgatctatttttttcaagtatagaacaataaaatcttctgggattttccggaattttattctcagatatgaaatttgtgcttattagcctaatcaagatcaaaagaaaaggaaggttccatgagatttctatttaggttgtgttgtttaattactattaaaatcatttggtaatattatatagaatgttttgatcatcagatggtcaccctataatcttagctcagtgtcctgttaagattttaaaaagaaaatgaaactataaagaattgttttacacaacaaaatattgtaaaatatgaagacagggatgatacctgtggtgctaattttcccctgaactggacacagttactgcaaataatttgggaaaaagcaatcagaattaatccactccttctgaggttgagcttccaagctacagatcttaaaaggggtcatttaatcaaaaataaaagggaaaaatggaaaatataatgtttgaacaaattatgctatatgaccattgttttttaaaggtttagtctctttctttttttaatgtttaagatgaataatttgttgacacctcttttttgcgaagcctgacagacctg

SEQ ID NO: 57683 - DNA, 631 bp, Populus trichocarpa
  Intron number 1 from transcript POPTR_0014s13170.1 (locus POPTR_0014s13170) derived from phytozome v7.0 (chr-ID scaf fold_14; pos 9696410 to 9697040)
aagtcaacctcaacgaatccaaggtatatgtatatcctctccatttcttcaccgctctctttccttcttcttacattactatcttgttcttttcatttgcttatcatttctctaatgaagactttggagcttaaattattgttaccttttcttcctcttcctctttcaattctgcttcatagattgtttgtttttctttagtttacattgaaatatgaagaatttgacttcgatttgagtcatttcaagggctgattttgctgctgcttcgatttcttctcatctggttcaaaggttcatcaagttctttaacttccatctctattccgatggcatcttttggcaaaacttgaaaagcgttcctgggttttcattcaagctttactctgtttagtctccctttcatgatttatttggcattcctattcaaatacttttacctggcctgctttgttgagtataagaaaacctgatgtgttctccaatatctaagatgtacttgaatgattcaacgggctctcaatcaatatatacaacgtcaaggatcgtgtaaaccttttttttttttaatatatataaaagacgtttgaaatcctgttttctccctgcagagggttgttccgctaaacac

SEQ ID NO: 57684 - DNA, 272 bp, Populus trichocarpa
  Intron number 2 from transcript POPTR_0011s01450.1 (locus POPTR_0011s01450) derived from phytozome v7.0 (chr-ID scaf fold_11; pos 1021809 to 1022080 reverse strand)
tgtcggaaattgagaaactgtcaaaagaagtccctatcttcattttcttatctaaactccataatgattccaaaactttgagccacttagttgttttttagcatatatatctagcttcttactgcaaaaaaagctagtatatgaagtttattagtcccttttaagctttttgtttcccattcactatttgcatagtgcatcaccactctattttgatatgatggatggttctgttattattcagatagcagaagatagggaaaagattttaa

SEQ ID NO: 57685 - DNA, 496 bp, Populus trichocarpa
  Intron number 2 from transcript POPTR_0015s10290.1 (locus POPTR_0015s10290) derived from phytozome v7.0 (chr-ID scaf fold_15; pos 11248180 to 11248675)
tgttctgatcttggtgggttctttctcaaggtaattttccttcttgtaactctactgtgtagggttcttttgcttttgtgaaccttttgaacttgaatcatgtactggaattagtctaattccaattaatttttgacctttttgcttcctttctacacaattatcttatcacttgtctctactcattatgttttgtcttgcttttttattagttttgttatttttggatcaggggtttgataggttcgtttttctgctgtagaaattggtttaggaactgtttgaatcaatccgttatgttcttctttatcttttccttgttagtaagcctttttctttttggtttatttttgtagtccattttgattattgggtgttaatgatgttttatgctgttttggtttgacaaagctgctctttactataagccttttcaaattaatttactggacttgaattaggttgcccaagtcattgggaagcctgacttggctcc

SEQ ID NO: 57686 - DNA, 271 bp, Populus trichocarpa
  Intron number 1 from transcript POPTR_0006s22000.1 (locus POPTR_0006s22000) derived from phytozome v7.0 (chr-ID scaf fold_6; pos 21019561 to 21019831)
agatcacctcgtagattctcagaagaaggtgctctcctctttcttttcttttttactagtgaattagtctaaaataaaattcccacatttttattttttgtttttgaataattctcttcattcttcatagatccacctttaatggtaccttgttggttctgaagtttgttttgtttctctgccctctatacaccccttttttcatttcatatcatgcagtcttaattctgaatttctgtttttttgccacttttttcatgcaagatttgag

SEQ ID NO: 57687 - DNA, 923 bp, Populus trichocarpa
  Intron number 5 from transcript POPTR_0007s14290.2 (locus POPTR_0007s14290) derived from phytozome v7.0 (chr-ID scaf fold_7; pos 14122116 to 14123038 reverse strand)
ttacttctttggtcattagctggtcaatcacagaggcaagtatcatgtccaaagtgacttgtgtcatcagttctatgattttgattgtttgatttaaaaaattaagcaattagaaatgtagatcagaacgaatctgtggcagttggtcgtgaacaggacgagcaccatgtatatgagagaattacagtgatctagtggagaaactgatcacttgatatatattccttttctttttgttctcactgctcattttgtttgttcccaccatgtattagttctcccactaggtcttaattttgaaacatccgatctcccaaatcgatgtagaataaaggtttcagtaatcttacttaattaggggcttcctatttagcagaagccaaccatttatttcatgttttatatggtttttgttatgagtagtattcttgaatttaggtttcccgatccagtaatagctttggttcctctatgtagcagcctcgttagatgttcaagacagggtatggatactgttagaagtattgggttttcagagattggttctctttgtatatgttttcctccatcaaatggttctacataacatatttgcttggaacttgacttgaatgcagaaaaggaaaacccaagatgctaacagaagccctatttaaaatacataaatcattgctaagaatatttaggcaggaaaaacaagatattaagatcttttgcttcaacgcaagtttcttgtacttgaccaattccaacctttttcatggcatatgctataattgcaagatactttttgcctgatgttttgtattctcttagtgactggtatggaaaagaaattcaaatttccataggccaatttaaaagtttttttcattcttgactgtgcagattattcggtattctttctttggcgtgaaggaggt

SEQ ID NO: 57688 - DNA, 931 bp, Populus trichocarpa
  Intron number 1 from transcript POPTR_0010s02200.1 (locus POPTR_0010s02200) derived from phytozome v7.0 (chr-ID scaf fold_10; pos 2516868 to 2517798 reverse strand)
ttggcagagttagttcaggtaacaaaatttgatttttttgttaattttggtggatgagttttgtttttgtattcttttttaaagatcatttgatggttttgttgtgttgaatcatgctttttttagtttcatttagaggtttttggtgatggtttgctggtagaattgggtaatgctttgatctgtttcattaatgagtggcttgataaattgggttttttctcttttagttttgcagtttttttattggattgctagcttcttgtttgcgctgattaatttttgttctaacggtgtagtgccaagcgtttattttggtgatctactcttgtttttagtaactcgatttgtgttgtttcttataattatgttttgctttatgtcttaaatcatcattattaggatgaaataggatggtagtaattgcctttcaaactgaaatcttctatttccctagcagattgggaatgagaaaccgaaaacttctgaggtgatctgtgtttctatgtcctcagtgtttctatgaagaatgtaaaattagtgatgtgttaggcttaaattaatgttgtcttcgaaatatgagatgagattgttgtcatttctgtttggacaaagactagtttcagaatactcacccataagaaaagcccaacatctcgtttgctgttctagctttatatgtagtattgttttgggaagttcatctaattgtaaagtgctcagagtcacataaaaagtatagagcagcataaagatatgctgttccatattttatctatttatttatatatatctttatcctctcgactgctgaatcgtgctccataatttagcttgcttgaagttctgcctgtagcaattcatctgtctgttttctgattcacatattcatgcagacaaatcaaaatctcggagtggttctgatcctaag

SEQ ID NO: 57689 - DNA, 573 bp, Populus trichocarpa
  Intron number 1 from transcript POPTR_0007s10210.1 (locus POPTR_0007s10210) derived from phytozome v7.0 (chr-ID scaf fold_7; pos 10010590 to 10011162 reverse strand)
ctttctcactcaccatttgttccctttcctccatagtgagttctgcttcttttttttttttttttaaagttttatagcttgtttggttcatgggagagagtgggaaagtagaagaaaatgaaaggttttatgatcttaatttttcgtaatgtttgccgttttcttattccactttggttctgctttggcccgtgttgcattttttggaatttgaactggaaaaaaactattaaaagaaaatagaccaaggctttagcatctttagttttcgtctgcttaattttgctaagtttggtttccgagaaggtgcaggaaaagaaaagaaaaggcgggtagttggatttattgatattgtgagaatacttggaaaaaaaatgtcaacagtaaaatgtaaaaccttatgtttttgggtcattgttgttattggcaattccatgttggttaaatcaaaacaatataggaactcaattggacaatattttagtatttttcatttctttaatcgtcttgctcttaattcaatggttttcgctatcagagtttgcaacagaacaaggagggttatcttcagag

SEQ ID NO: 57690 - DNA, 430 bp, Populus trichocarpa
  Intron number 1 from transcript POPTR_0010s21400.1 (locus POPTR_0010s21400) derived from phytozome v7.0 (chr-ID scaf fold_10; pos 18697490 to 18697919)
gattcccttcattggtacaattttgacgcattcaggtatctacctctatatatatatatataaacacatcacaaaattcactcttttttttcctcctttttttcctcctaagtccaattatttactgtaaattactgtttggttcgtcagaaagaaaatgcaaggaatcaaaagggtgtttcttatgcttttaattcaattttttttatttttcaaattatatcttcccgctttatgcctttttcagaaatttattgataaagtattgataaagttcaaaattgtttgagatttttatttgttatcatttgacccaagtacttccccgacagtttttacatgtattgaaaagaacagtgttgattttataaaaaaaaaaatctttcctgaaatgatttaaaacatgttgacagatacgttttcgctgcga

SEQ ID NO: 57691 - DNA, 907 bp, Populus trichocarpa
  Intron number 1 from transcript POPTR_0001s04350.1 (locus POPTR_0001s04350) derived from phytozome v7.0 (chr-ID scaf fold_1; pos 3449894 to 3450800)
tctcctccataaaacccttattctcaatttcacaggtctctctctctccttctttccttactcccccttttctgtcatagattcttgctgtcgtttcgatctctgtttagctgcagcttattttaccctcttagagctcgaatattagtgttaattaattaattctgatttcatgaattacatggaacttgatagggtttaatgctctatttaggttaatgggtttttgttaaaaaagaaaataattaatggcttcatatctgtaaatgctagggtttgctggaaaacatgaagaatataatgggtttgatgtgttattagcaaggagaagatggattagggttgtttcttacattacatgcctaggttaatggtatcgttaatgggtttcttttatattttaaggttgtgagttgttgttgtactatatgatgtgtaaacgccattgttaaccatagtgttaatctttgatgtatgaaagtagaaaaagataacaacaatgagcaactggaagtcatctataaaagctgtggaagtagggatttcaatgaagaatagccctcgtttgatagtggagttaaattgactaggataatcaagacaaggtattgaaaggaagcgatcatgggtttgtttaacatgagtgtaatctttgacatttagtctctttgaattgatgtatgacatgctaagatcaatttaggccttgaactcttcacgtgctgttttagtggaaagttgtttgcttaagttatataaaatttatttatcatatgaagctggttgttgaatttattgcgcatgatttaatagtttcttaatctggttgggttttttcttcgttatgatactatttccttgactgctaagtttaaattgcacagagagagcaaacaattttgtgtaa

SEQ ID NO: 57692 - DNA, 649 bp, Populus trichocarpa
  Intron number 1 from transcript POPTR_0001s41790.1 (locus POPTR_0001s41790) derived from phytozome v7.0 (chr-ID scaf fold_1; pos 41489700 to 41490348)
ctattaataaggctagagatcactgggcatttctggtaactctcgtacttctttttttttaaaaaggattctaatggggtttatggttttttctgtatctttgaatgggtacctgatttttgttgcattgtgaaatgtttttttcttttcgcttgtttttgtcacatgttttatcagggtcatgtgtgtagtttaggaggggttatctaacaggttttgattgaaatttcgaggttctttatcttgaatttggtgtcttggtagtatctctgataggtatttaacatgtttcgggcaggagatgttttatttctagtatatttttaatcttggggtcctattttgattattgattggattttttcaattgtttttagatttgttgtggcattatgtcatgatatacaatgttgattttggacttagttaatattcctgaaatgatttgagcatattagatgtcttatttccaaaactttaggctcagttgatatcattttttttttcaatcacattgccttttgtttgctaatggtggcctttatattttatctggattttcacgcattcatttattacacgttgttgattacgctctggttgttgatgtacaggaagaaattgaagcaccaatttgggtggatttttt

SEQ ID NO: 57693 - DNA, 548 bp, Populus trichocarpa
  Intron number 1 from transcript POPTR_0010s14510.1 (locus POPTR_0010s14510) derived from phytozome v7.0 (chr-ID scaf fold_10; pos 14086773 to 14087320 reverse strand)
tcttgattcatctctcaagtctcaaccatccattggtaatatacctctctctctctctgttcatgcactaggattttccttttatcagttcttctgggttttcccccctccttaattgtgttcgttttagactgttaattttagtataacttgtttgttttgttaagaaaagaaaaaatcttaaatgtagagaagctgctcttgactctagcttggtcataaagttggcagcactaattactgtaatgggataaactactacaaattatcaggttgtctaagcagaagagccttgatttttgggattcattatcacactactaatttaggtatcaattaatttgatactactatttcttagttttccggatttggtgttactataatttcttaggcttagtagcgaacaagcctattcatatttacttgcattctttcataacagcatgattttaccaaaatatgcaaccagttgatgaaaaataatgacttaaaaatcttttttcttgaactgttttaggtgttcctgagcaagagttgcggataca

SEQ ID NO: 57694 - DNA, 459 bp, Populus trichocarpa
  Intron number 1 from transcript POPTR_0001s13060.1 (locus POPTR_0001s13060) derived from phytozome v7.0 (chr-ID scaf fold_1; pos 10142257 to 10142715)
gacggcaggggttgctaatccgacaccgatttcaggtaattggggttggaggttttattttttcttctgaaattttgaggtttggtgggttttttgggtttatgtaataattgtggttttgattctataaattttgtttggttgttagtaaaagatttaagatttttagtggtagatgatgctgctgctataaagttggtggtcggattttattaagtactgaaatggggtgtttcgtttgtacttttttttaaaaaaatgaaagccctccaatttccatggttactccttttctttttctttttttttaatttctatttatctattatttttttcgtatttatttattaccaataacagaggttttagattatcacagttgctgatttttttagctctttgttttggttcttgtcatgcacagagaagcagtaccagccagctccacgagcaagtcaa

SEQ ID NO: 57695 - DNA, 515 bp, Populus trichocarpa
  Intron number 1 from transcript POPTR_0001s38910.1 (locus POPTR_0001s38910) derived from phytozome v7.0 (chr-ID scaf fold_1; pos 38175619 to 38176133)
tttctcatcctgacaaacccgctcttgtgagttctctaactttggctgcctttctttttgttttgtagtgtgtgaataactcttatggtcatgatttcttgaatggaattgattcgtttttgttagaagcttcaaacgttaatggggttttaaagaaagtcagtttatttttttttgaattggtagatccgtttccttgactgcttcaattagcggaactcatgtcaggcctatgtaggtttcgtgtttgatcagtgagtataagatcatgtcatatgcaaattcttatttcaaaagaaaaatgaagtcgtgactttcttttctgttgatgtacatggtcaaatctcaaatttgaatggtagtattgcattcagaagggaacatatcattgaaaaaattaagggtaggtcctagttttgattcaaatttactgggtggacttttagatatgatgtggaattgtattggtttatcttgcagttgattgaccctgtagacaagactgttgatagaga

SEQ ID NO: 57696 - DNA, 892 bp, Populus trichocarpa
  Intron number 1 from transcript POPTR_0002s09290.1 (locus POPTR_0002s09290) derived from phytozome v7.0 (chr-ID scaf fold_2; pos 6584127 to 6585018)
tctggccgtcttagtcacttttctggcaaaaagaggtgatgcagcctatgccttttcatcatttccttacgtagataactccaagtcctttgcttttgttattagcccttttcattcataataatcgtgattttgttacatttcttgattgcctagctcatcatagtttgccataaaattgtcaatgctcttaacatatattttgattataaaggcatttctataaacaggtgattgtccagaatcggttttaattatgtcaaaaggccaggaaatattatcagattatccctatcaatattggtttatttaacgtgatcaatcctagctagctcatgcaattttctcttagcttgagaaatcccaagcacaatggtgacacatgcatttcagaaaaaactcaagcttggtaaaattgttgtgattattagcagtactgacaattgtaaaagtgaataaccttattagggattaatgaggatctctgggtagacttataaacaatattcttggccctgcataatgggtgcggaattgatggtctactgctgctctgcttgaagcatgcaggaattcgatttttggaactattcatgttaagtagagtacactttcacccctatcgattcattaatattccacttttctcctcgtagctgtttatcgttttctaatattacccctatggtttcaagatttcttcagtgttttcgatattccaccattaaatagctaacaaaaaatctaataaaactcactttttttttatcatatacttttgcatgtattcatctccatctgtagttctactccacgattttcattttcttcttcgaaccatctttttcgttgctgtaattttatttgccatgttggataatcaggattgagg

SEQ ID NO: 57697 - DNA, 811 bp, Populus trichocarpa
  Intron number 1 from transcript POPTR_0002s10650.1 (locus POPTR_0002s10650) derived from phytozome v7.0 (chr-ID scaf fold_2; pos 7736447 to 7737257)
agctcgaaacacaatcacaactccttgtttttaaggtatccgcattacattacgcttgtaatctgatcttgattttttgaacctatagccttcttttagcaattgattggtttcttgatcctgagattgattcagccaagaacgcgaaagaaagtgaatattttgatttttcaaatttcttatttatttagtaataatattgagttcacgtgcatctggtgagcttgagaaatctgttttctgctcgctttgtatggattgggagagatctatttttggtgcaattacgtccttttctattttagattttcttttggatgattctttattttgatattaaattctttatttttcatatgtgaatttattgtatagactagtggcagttcattgaacccgtaccttttaatttttcttttcttattcattaaatttatgtaaattcattgtatttatcagtgatagttcatcgaacctgtgccttgtgatttttcttttcttattctttgatttttttttttatttgatgttaaattttggatggaaccaaaaatgtgaaaaaaaatccaaccttttcgaagttgtttcatcatgaaagtgaaaatcataaggaaaacatgaagggcaatttttgtttttctttttttttttgtttcatttaaagctagttggttttgttgctgcatataaggttgctgtcttctttttggttgtcaacatcagttactctatttttgtgtgttaacactgtgtttattgttgattcctttttacaggggtaaagtactcgttgtcttgcctatttccgctc

SEQ ID NO: 57698 - DNA, 489 bp, Populus trichocarpa
  Intron number 1 from transcript POPTR_0010s10920.1 (locus POPTR_0010s10920) derived from phytozome v7.0 (chr-ID scaf fold_10; pos 11303183 to 11303671)
cttatagccatctctggagccaaattctactgtaagttaatttcatagcaccaaaaataaaatactacgtacacacatagtatcatttgtaatcttgatttatatttcgtgctcgaaatatatttgaataagatgagaggtgagaagaatcttttagcaaaagaaatgggagaaactagtgctatatatatattaatggatatacgagtgggtacgtgtactaaagagagagaggttcgtagtgaaattaagctctatttatatatattttttcaagtttctttttctttttgcgtgtttgatcatttgatgtttttgaaatgacaattaaacttcatattacaagaatttccatcctacatcctaatatatgtttcatttcttttttgtcaaaaagaaaggtaaagtttatctgcatgctttccttgtggaataccttaattttaatgctttgatttattttaaaccctaatagaggagttgggagca

SEQ ID NO: 57699 - DNA, 953 bp, Populus trichocarpa
  Intron number 1 from transcript POPTR_0010s12280.1 (locus POPTR_0010s12280) derived from phytozome v7.0 (chr-ID scaf fold_10; pos 12307643 to 12308595)
aaagtatatcaaatcggtcaaaattgcttaatagggtaaacgagtgtgtgttgacagacgagttttcttttgcatttgttctctttgcctttttttcttttgtttctacaatttcttcactcactgcagtgggccttttcttcaagatgatgtgtagcattagcaaatcttggacccgtaattagttatagaaacttgatggtggagaataatttggccatgtgcggaaaaaaaatttaaatgttttagaagctcgattccattcaagatgaaaaaggtgacacggagaaataaaaacgacctgggttgatggtaaaaactcgataacagtatttgaaggaaacttcacttaaatgctgtcttcctcttgcttggaggttttcctttttttttttgaatttctatcaatcctattgtttggatatttcttacctacaaagttttgtaattaagctatttagacttaatgagagttcttacttttattgcctttcccttttcttttgaaccccccccaaagagtgaacaacatgcaagtctgttgggtaaaatgtgatctagaacaaaattaatgataggttagaataatcttgataaaaacactgttgggatttttaaggcaagggttatcattggtttaattatgttagagatcacagctaatagctgagaaatcgatcatgaagatttccagagaaaaatgcccagcagcttgtaatcaagaggcatctcataagcatggatcaatcattcttgttagtggaagtcaccccacccttttgttttaggttttgtattttcacgaggttttatcctacataatcgtgtaattattctctatgttattggaatatgaagaatgcttcgtctgcattgtcttgagtgttatttagctcttcattccagatgttctttgacctgcaatttttaatttcttacaggtccaagcgctc

SEQ ID NO: 57700 - DNA, 518 bp, Populus trichocarpa
  Intron number 2 from transcript POPTR_0001s09300.2 (locus POPTR_0001s09300) derived from phytozome v7.0 (chr-ID scaf fold_1; pos 7101690 to 7102207 reverse strand)
agtggaaggaagcagcaattggcgactcttggcaagtatttgaattagattattttgtagttatatgctattgtaagttattaatatgaaatcttattggcatttaatgtggtttaataatcagttataatgcagggaattcacacttgcttaatattaggaagtaatgaattgtgctcaatagtgatcttgtcattttattttcatcgaagtatttaatttgcaatgttctgcgtttgttatcataattttgcttggacgtaaatgctaagcttttatccatttaattgccttgctctattctttcaaagctgttgccatctgtcaattaaatcttttgaatgcttcttgtcttaatgcagttttaatctgtctttgatgttaaatttgattttgatatctgtgttgtctttaatatatctatggcttgttgatttcttctaattttctaaaatgtttttaattgatattgcaaggtgaatggatgaacagttctgctggagtagctttttctccgc

SEQ ID NO: 57701 - DNA, 274 bp, Populus trichocarpa
  Intron number 1 from transcript POPTR_0001s47280.1 (locus POPTR_0001s47280) derived from phytozome v7.0 (chr-ID scaf fold_1; pos 47529358 to 47529631)
ctcttttgcagccattaacttttgccacacaaaaggtgagcagccatattttgcttttctctgtttgtgatcatatcgttcctctgcttttgattcttcaaaatggtgtggtgttcttcttttatgccttcatgaactttcaatgattttttttgtactaaaactcaacatgggatatcgataacttctttgaatttctcatttccattttggaaactaaagtagtatatatttgatcaatggccttaaggttgaatttttctcgagcagtctt

SEQ ID NO: 57702 - DNA, 558 bp, Populus trichocarpa
  Intron number 1 from transcript POPTR_0010s16010.1 (locus POPTR_0010s16010) derived from phytozome v7.0 (chr-ID scaf fold_10; pos 15081867 to 15082424 reverse strand)
actacaattctgagatcggcacaagagtcagtagcataacctcacttccttctatttattttgtgaatttttccctttcgttggttctgacatagatgactacaattctgaaaatgggatgtttttgcttggtgggtttatgcatgaatgaggaaatttatgtgaattatgtgggattatggaattatgggcaccaagaaaaattgaagctttcttctttcaaattcaggggaaaatgaaaatggttacaaggtagttcttaattacgttggaaacgagtgaacgattttttttaatcaattaagtgtttgatggtaatctttctttgttttttattgttgttttctatatgtgtgttctttttcttcctaatagtatgggcaatatgctttgtctatacgaattttgaaggtaattaaaaacaatcatatgggaactcccataagacccaaatgaaaaatgaagtgaaatctaggcaattatttgatgtctgacggatagcattttgatttccattgtgcatgtgttttttacaatcaggtcaaggggacagttttt

SEQ ID NO: 57703 - DNA, 186 bp, Populus trichocarpa
  Intron number 1 from transcript POPTR_0001s08790.1 (locus POPTR_0001s08790) derived from phytozome v7.0 (chr-ID scaf fold_1; pos 6712550 to 6712735)
tagaaagtgaagaattgtcttcttcagaggaagatgtgagtgttcattacaaactgaagaaaccccttaattgttctgtttcttcttctttcttctttctttttatcaaatcagttttttacatgttgggttttctttttgattggagtaggagagtgaaatagagagagagctggcagaagttac

SEQ ID NO: 57704 - DNA, 595 bp, Populus trichocarpa
  Intron number 1 from transcript POPTR_0010s24880.1 (locus POPTR_0010s24880) derived from phytozome v7.0 (chr-ID scaf fold_10; pos 20848640 to 20849234 reverse strand)
aaaaacactgtacatcttctcacccagaatttctttttttttttagattcagatttgtttttggtttatcagtgatgtaaagataagtaacttcatcttgattgttagctagttaacctagtttgcctctttgtgtaagatgtccttttcttttgtcatcaagtcagcaacttttttttttttttctatttttgtttcttgtttttgggtttttaaggattttgttaaaggcttggatggcttgatttgagttagggaatggatcccttcaagatgcatgtgttcttatgcctgatttaagtggtaaggatgcatggaattacttaggttagtgatatgatttatgatatttgagcatctaaatttggattgtgatttatgaagcaataatgctttgttgtggctctatgatctagtgtaggaaactctttttagcttctcaaagcgatggttactttgtgtgtaaaatcatcgttataaatcaggagacgtgttatgaaagcttttcttgtgatattactggcagttcttgtttatcaaacagcaattgaagtttggttgtaatcattttaaaggttacctgtaacgcaggtat

SEQ ID NO: 57705 - DNA, 717 bp, Populus trichocarpa
  Intron number 1 from transcript POPTR_0002s05650.1 (locus POPTR_0002s05650) derived from phytozome v7.0 (chr-ID scaf fold_2; pos 3720273 to 3720989 reverse strand)
gacctcaacaagaaatccatcatccgaattccctggtctgtgctctttctttgcttctctcacttggatgcaatcttttcatttatttatttattttatggttttactgcttttttgctagctagttgtagattcctttttctgtttttcccttctggtatgtggttctgttctttgacttgcaatcactgctagcttttgttgaatgcttgtttgtgtttatctgctaaatatagtaaccgggtatactccagtttgatccgttgaccttttcctgcaagaaattcgactgatagatacaatcagagatgcccttttttagctgatgtattatgtagtctgtatgcttttatttggtggaaatggggtgttagattgtatacatggaatttgaatacttcttttagttttatctactgggttgagttcttcacgtgcttcttcttttttgttcttgtactttgattgtacgttactcctgaccttgtaacaagacttgactttgttcatttttggtagggatgtggctatttgtcgacaataagtggcctcccttttcgaacaatttattacatgtctttatgatgttcttacccgttactgaattattgtggctttgtttttttttttcttcttgcctgctagttgaatgtgatatgcaacatttctttgctcctttttttactgtaatttttgtttctcttgaagattgcaatc

SEQ ID NO: 57706 - DNA, 1036 bp, Populus trichocarpa
  Intron number 1 from transcript POPTR_0001s21800.2 (locus POPTR_0001s21800) derived from phytozome v7.0 (chr-ID scaf fold_1; pos 20304878 to 20305913 reverse strand)
atttgacccagaagcaatcccagtctacccctgaggttctcttcttttttcacttgctttctgatttaaatacataaatttcttctgaattaagcataaccaatttggtggtttgggatgtgtttttggttttttttcctctctttagttttcagattataacttaaggctgtttctctttgaggattgtctttagctcacattgattattgaggctgactttgttccagaagggcagggtgctaacaggatatagtgaagtgtgtcgtaggttattgatttagtgctatatcattgtaactcgaacaggggagaaagggaggataagaagtacaaaaagaagcgaaatcatagattagagtcttgacgaaagtgagggaccattgcaaagacatgttcttcccactcaattgcttacatgatgcttgatcagcccagagcagcatcaggtccttatttttggaaagctaacatcagaacatttactgttaatatggtcaacgaaacaatcactcgtaatccccttcactcaatgaaacttgaaaaacctcagtgcaacagaaacttcatatgacactaagtaattttatttccatgagagttccctccttgaatgactgttttgcttttgctttgaacagtgaagtgcctgtaatagctctaaatttagtagaaatcttactgattttctatttgaactaagagcaaatgtttgaaaattcagattgagcatggtttactcatcatgcctgagtacaatgaaaaacctgtacttgtacatggattttatttaacgacctatcatattggatttacaattgtttctctacagcgtgcagtaaacatttaagctaactgcctgcactgaattgcttcactcacctctcagtaaatatgcttgtgtttggtcaaatctgttttgggtatgcctttgtaagagtattcagtcaccaagtttgaagggtcaatggcaaagcccttaacatttttgataatttcaggtagcacttgggggaggtggcggagatattggaaa

SEQ ID NO: 57707 - DNA, 777 bp, Populus trichocarpa
  Intron number 1 from transcript POPTR_0007s01460.1 (locus POPTR_0007s01460) derived from phytozome v7.0 (chr-ID scaf fold_7; pos 824054 to 824830 reverse strand)
ttcaagggtatgtcttgaaattctatttcttgagggattcttgtttcttattatgttaaagttctcatctttgcagtgtttaatgattttttttagtttagatttgaaaacccatttgagaaaatgcttcagatctctggaattattgtcagaaatcatgaatttggatcggtgggatttaaagtcgtaggtttttttggtaaaatttttaatttttatggattttgatgtgatttcaattcctaattattggcattttccatttattccccttagattgttgtaatttatacttagatttgataatccatttgtttaaaagagctctggatctcgttatcttcctctagtaaataagattataagttccgaggaaatgaaattctgcagtcatctggaaaatgatttcaaactcatgcgaattgcatttgatcttgaaaattgcaaggtagagttgataaaattgatattatttatatggtgggagagagagcaagagtttagaggaattctgtaacggtggagataggtcattggacacaactacaatgattgcttgatgcatgctcatgtgatggcatgcatctgtttgcggggtgaaaagtattgccttgtacatggttaagggacatagtttgacattcatatggctggaggtgtttttcttttcaactccttttaccatgagctgtgctagacttgaataatggcacttagattttttttttttcctgcaatgaaggttacttaaaggtcgtagtattcctggtaaagttt

SEQ ID NO: 57708 - DNA, 819 bp, Populus trichocarpa
  Intron number 4 from transcript POPTR_0001s35710.1 (locus POPTR_0001s35710) derived from phytozome v7.0 (chr-ID scaf fold_1; pos 34062516 to 34063334 reverse strand)
agtttgccttctgctgtctctcatgtctaattatacttggatgactgcatgcttttaacatgaatgcgaggaaagcttgttttcagctacactggtagccatataaggttgttatatgagcattataatgtgacatacacccagagtcattggatcggaagatcccatatattaatctgtaaaaggtgatcagattaactaaaagaaaggatatcacttgattctgtttgccaatagtgtgtttgggctgcgtatgaaattgcttttcaaagtgcatgtctttatataaaaaacatctgaaagtgcatgtctttatataaaaaacatctgaaaacacccccaaaagcatcaatttgatgccttttcagcccaaactgacttttgcaatcaaagttttgtttattcacataccagaattagttgaggataatcaacctttcctcatgatcaaaaaatactcgtagctatattaaatagggaatgcctttatctaatttgcaatgacatcataaaatgaggagattggagtgcacttgcttgttcaacaaatttatgaagaagactggaaagattctttatgatccttatttttttcccattctcaattcacatcatatttgtttgcattacagaacaagatgcaagattgaatatattcttgtttgcttgagatcacattttttcaggtggtaaacaactcataaagtgaaattattctcaagccattttctaatgcgtcaaatgtgttgctttggggtttacagctttctggaaattcagcctattagttattaatttgaatttctgtagtttccaggt

SEQ ID NO: 57709 - DNA, 948 bp, Populus trichocarpa
  Intron number 1 from transcript POPTR_0007s08220.1 (locus POPTR_0007s08220) derived from phytozome v7.0 (chr-ID scaf fold_7; pos 6785087 to 6786034)
tgccaagtggctgggaaaaacggttggacttgaaggtaaattggtgttcttatctgggttctgtttgtttcttgagaaaatagcaaggaaaagaacatcaaagggtttcaagatcctatgatgatcatcataatcttttcaaggttcatgagatatacttttttgggtttgtttaacttcttgagagtatctggttatatattcctaggaaaaacagagtttttttaatgtacaaaaagagattttatatatgtgtttcatgacatttacttgttatgattcttatttcttttccctgttttctttgaaggtagaaatcctaagggttcaacaatttccttccatttatgcaaatacatctttttattacatggctgcacttaaatgtttagtgatttatctaatttgaatttctctgctttgtttgatatcctctgattgatttccgagaaactggaggaatgggaaatgagagtccaatcaattgattttcttttagtgccagcttttggctttcatgggaactatatatgcagacagaggctttctttaagtttttctgagcaatttaattccccaacttttccagcaatcaaacagttttatttatttctaggagtaatcaaacattagattgctcccttttcttttctttctttctctttttttttttttttttgataaagggtttaaagttctacgcatcctttcaacataagtaataatcaaatgctatagtgccattaaatgctcttcaatgcttagcaacttgtaagttatttcctccaccttctcttcaataaattccgatcatctatttaatttctgatatacttcaacttcagaattaaatccatcattaatgtcatggccagtaaaaaaatcaattttctttcttattaatcttttattttattggttgcagtcaggaaaggtttacttgcaaag

SEQ ID NO: 57710 - DNA, 578 bp, Populus trichocarpa
  Intron number 1 from transcript POPTR_0001s44680.1 (locus POPTR_0001s44680) derived from phytozome v7.0 (chr-ID scaf fold_1; pos 45124151 to 45124728)
tcgctcctctgctcctcctcatttcaccaggtacatgaaggtcacacaccctcttttcatttcactttctttttaatctttctatgttttttttttttttttgaggttctatttcttgttgaattttgataagtatcataaaatgtattatatgccggcaaggatggatggattttttttaaaagaaaatatgcttgtggtgaattcacttttaatccagttcaaaatatcattttcgattctgtggtgtctggttaagttacaactatgcatgtttggttgctgggaaagctcgagaaaattaattgaggggaattcggttaagattgagaagtttgtagtttgaaataaaagatcagtacccaaattgagatttaaattagagatttgagtatgttattgaatcacgttttaggagctttcgaaagaaaaacactgctacaatctttaatttcttggaattatggattcttctgagttatggaaagttatatttcaattgtttggctttataaaatgtgattccttatttaatcgttcttcttctgtaggggagtgcctggaaagcttttgttaaa

SEQ ID NO: 57711 - DNA, 765 bp, Populus trichocarpa
  Intron number 2 from transcript POPTR_0001s10290.1 (locus POPTR_0001s10290) derived from phytozome v7.0 (chr-ID scaf fold_1; pos 7976277 to 7977041)
tctccagaaagaccctcctacttcttgcagcgcaggttcaaatcgagatctaatcgctttttatttctgggttttggttttcgttttcatttgtgtaagaaaggagctgactttatatgcaaatgttttgatttttggaatttatggaaagatttagtgttttttcttctgataaaataaggtctcataagtttttgtttacatgtatgatgtatcctggttttgaaagaaaaaaggttatttatttttcgagagttgtgatcgtttggttattttgtttaaatggtgttttagcttgacgaaatcggtctatatgtttgtgctaataagataaggatgttctaagctctatacctatataccgagcaatatgaatcatggaccattgtcgtcttcttttttttttggccgagcctcaatctgcagtgtttcttctactgttaaaattaaagaatttttctttcgggacctatgataattcttcgttcgaaatgcatggagtagctataagggcaagtaaaaagctctgcatggagtagctataagggcaagtaaaaagctcttcgttcgaaatgattggaaacgcacatcaattctttttatgttgcgaacactgcacttctatctgcttcttttgcttgtctttgtttctggtttattatgaataacttccaaaccggtgtttttttgctagttttagaacaaaatagttcttattttctctgctttggttgatatgcatcttcaggccctgttgctgaagac

SEQ ID NO: 57712 - DNA, 904 bp, Populus trichocarpa
  Intron number 1 from transcript POPTR_0010s10580.1 (locus POPTR_0010s10580) derived from phytozome v7.0 (chr-ID scaf fold_10; pos 11078335 to 11079238)
gctgttaagcagtcacatcgtaggtacttaagctttgcttttacttttttttttgggtacttggaattaggcatttctagttaaaatttgtcgactttgcttttatttggaattagtaggcattttgttgttaaacttgtgaatcttgactcgtatcaatttatacctaagaggaacccttcgtatacattcaactctcaaccaaaaactgttctttgtcttccaagttagagctaagtttgagaatgtgtgatcgtgtcactatgtgacctcggaaatccttaatgaacaaaaaaatcactccaggaaggttgctaacatgtccatacaagtctttgctacctgagttttctaataggattagatttttaagcaggtgaggatttgtgagaattgtttatagatagccatttggaattcaaatcttttactcgttctcatacgaaattatggtttggcttcttttacctgcaaaaatacaattttgcgttccgtgttttgctaactaattgaacactaaaagttagatcaatttgatatagaacgatgcatttaatttgttaataacactatcaatggagagaactagaaataacagaaccttgatacgcttacatcacaaactgtaagtttaagatttttgctctgataggtgttaccttttcagtggcttcatgaatatgtcaatgccttgtgacatttccatgatctacagatcttcacgatacagatttttgtaattttatatgtttatcggtaacttacccctacatgacccttagctactaaactagtttcaaaacctgcagtgtctaagtacattgtgtagaactagaccggacttaattttatgcctgtggaacttccaggaggggaattgggtggaatcttctgaaggcaagcg

SEQ ID NO: 57713 - DNA, 982 bp, Populus trichocarpa
  Intron number 1 from transcript POPTR_0010s19210.1 (locus POPTR_0010s19210) derived from phytozome v7.0 (chr-ID scaf fold_10; pos 17192700 to 17193681 reverse strand)
caggtaaagtaaaaaagattatttccttcttcttttttcaagagttaatggcacctatttaaatgaaacattcaatcaagtttttttcctctggtagaaatccaatcaagttgctttatacaaacatgaatcttttattgatatttttttttttatgaatatctcttcttggattcgaatgagggtgcaaaaatccatatattcttttcccttgaaaattttacccgagaatgcgttattttttcttcttcatttattttctctgggcactagacactaggagataagtgaaagcaggatgtttgactgtttttatctccagtttctgaaaagtgaaaagacatgttgaagaagcaagaactgtttgtttattaaaaacatatcctaaagcatgcttaattttgttgaatttagggtgggcaagaaaaaaaatcctgcgctttctctggacggttaactataatctgtaccgttaataacaggttggccctacgatgttggtggacccctgagatacgaaggactctgattccatgaatattcctgtctccagtgaatagattggcaacagaagtgaaaataatgtcggtgtgatcgagagtaatggtgcagtaacttcttattcatgacaaagaaagtagtaatttgaaaaataattaataggcttttgagctcactgctttctcaaaactagccaagagagagcactagttgctgcaaaatatattagcttggacagcctcttgtatagttcagaaccaaagcaatgcgaaaaggcactgattcaccatataaatataaataggaatggatgatgtttatgttgctatagcaatgttcacaagcgacactctcgcttgagttcgataatgttttccttctcatgaacctgccttgtagtagttcaagttcaaacaagttggtcttgaaattatagatatgtgcaggatataaaggaaggctggcaggcaattgaagagga

SEQ ID NO: 57714 - DNA, 387 bp, Populus trichocarpa
  Intron number 3 from transcript POPTR_0001s23030.3 (locus POPTR_0001s23030) derived from phytozome v7.0 (chr-ID scaf fold_1; pos 22083200 to 22083586 reverse strand)
agtttgtcaccgggggagagctttttgacaaaattgtaagttttgtattgttatcaaaccttttttttttccactagtttatgctccaccagttttactggctcaatatcctcggtagagttatgggaattacatgttggatgctattacaagtactagaaatttgttgtacacctgttaaggcttatctccttatcattgacaattacaatcttagttgtaatcatcagtgcatttgtttttgtttataataatgcaatcttgtgttgattggaaccaaaacattaaaaggactggaagtttcttttgactctttattttcataccaattacggagcatttctttgcatgtataatttttctgttttaattctacaaaggtaaacc

SEQ ID NO: 57715 - DNA, 520 bp, Populus trichocarpa
  Intron number 1 from transcript POPTR_0007s11280.4 (locus POPTR_0007s11280) derived from phytozome v7.0 (chr-ID scaf fold_7; pos 11624568 to 11625087)
agtctagaagtaagtgtctgtctctcaaacgtatatatacattaaattattagtttttgtttgtttgttttgattaataataggaggagggttttgtttgtgtcctaaaatttgttacccttttcttggggattggatgaccagtttcaagattctcgtcgtcgttttctaccttcttctctgctctgtgtactcttttgtttgcttgctttctttctttcacactgtttgagataataataaaaaaaactactactaatactaaacaaatgcttctctccttactatgacgcctagctgcagccatttctgtttctgggcctctttgctttcatgttttcccgctctctgtaaaaagaaaaaaaacagagcttggctaggtactttttttgtattattttccctctctcagtgttttccttttctttcttaacatgtgatagctagtgagttggtgtatatatgatttgcttttgtttttgcaggttaatataattgatatagagaacgttggttccat

SEQ ID NO: 57716 - DNA, 418 bp, Populus trichocarpa
  Intron number 2 from transcript POPTR_0007s11280.4 (locus POPTR_0007s11280) derived from phytozome v7.0 (chr-ID scaf fold_7; pos 11625179 to 11625596)
atactaataaagtaacctcctcctcctcctccttcttcgctatatgtatttcaagacttggaagatttttactgaattggttttttttttctttctatttttcaaatggtttaatatgggcttaattttacaaatccttgaaatttagttttttctgtccacttaattttcagccactttttataagaaactggattaaagatagatagatagataagcttctagctcttacagaccagaaaaagtaagtgctttagatccagcaatctgcattggattctttcactcatctcaagaaaagaatatatatggcttcttcttttgcttcctttctttataatactctttttctctcttttacttcgagtttgattctttatttgttgtaattgatactgaatttatcaagaaggagaag

SEQ ID NO: 57717 - DNA, 700 bp, Populus trichocarpa
  Intron number 3 from transcript POPTR_0001s29390.1 (locus POPTR_0001s29390) derived from phytozome v7.0 (chr-ID scaf fold_1; pos 28091339 to 28092038 reverse strand)
ctccagagtggcatccagcttctgctgaacttaaggtctgccctttttccccttaaataatctatggtgttttctttccatatcatttgtcctttttattaaattactgcttagatcaaagcaaatgttgcctgcaaagttgtttagccccaccttatctcaacaagatttgtgttcaggtttgttgagtatagttaacatccatcctagcatgcacagcacccaccatccagactctggcatgtatacagtccttttaagatcaccgatcatattttggagggttggattaatctgcaggggctattatcaaacttggagcactcttgataagatggaagagtggtacatcatgataacaaaaatcaaattttaagttgaaataaatatctgtcaaatcgtggcccttgtccactatgaatttgttgaggattttagctagcacccatgtttcttgatgggattgagggctgttgctttcaatatggatgtaatcaatcacactggtacatgcaaactttgatactcctattaggaattctgatcagacaatctgaacaggatatttaatatggctgtctcatgcatataatcgtgaaaatcttggagatgcttgcactgtctgcctagttgaaaatggattacagctttttgaaatttatttgacttgtttatgtatgcttattttccctcagtctgc

SEQ ID NO: 57718 - DNA, 534 bp, Populus trichocarpa
  Intron number 2 from transcript POPTR_0515s00230.1 (locus POPTR_0515s00230) derived from phytozome v7.0 (chr-ID scaf fold_515; pos 9119 to 9652 reverse strand)
cactattgatctcaagaaaggcgaggtcatcaaaggtattggtttttccattaagtttgcttttgttctgctatccgattggaattttgatacacacacaaagctgcatcttgcaaataaataaaatgggaggttccaatatgtttttggccctatttcttatttcatgacctgtgcaaccggagatcaactaaaaaagactttttttttttttaaaaaaaaaatggatgatgaaaggagaggatctttagtatgttgaattagtataatggtccctctactgcaagcaggactgatagtagatggtgaatgaacaactgctgtataaaagcatggtgattgtagctctcttgactttcttctgatactcttgtttgtttttgggtgagatcaattagaaaatgcatcagatactagaatttttctctcttgctcacgcacgcacacacacaactgtcctttttgttaaataagtgtagttgttgattgtgcaagatttttgaaatttagggcaatacgaaggagggaagcctg

SEQ ID NO: 57719 - DNA, 443 bp, Populus trichocarpa
  Intron number 3 from transcript POPTR_0010s20590.1 (locus POPTR_0010s20590) derived from phytozome v7.0 (chr-ID scaf fold_10; pos 18112110 to 18112552)
caaaggcttaaatatcgaagattagttaacagcaggttaagtattttgtgggtttttttttttgagcacggagaataattggttttggtcatggctggaattgctgcaagtgatcacgtgagaaactatttgtgcatttagttatttgataattgcggatgatgttcttttggactctgtgatgtgatggctgccaatattttgggtggaaaatgagaagttatgccatgtacttaactgtaatgcaaaagctgattttacattaaaagttattttctgtcttcgatcgtcttcttttagtgttttgctactatcactactaatattattatcattgattaaatccagttgaagtggcatatatatatatatatatatatatatattaatgtttcatgtgtactgcagcttcgccgatctccaaaaaccgcaagttgattttg

SEQ ID NO: 57720 - DNA, 609 bp, Populus trichocarpa
  Intron number 2 from transcript POPTR_0002s16350.1 (locus POPTR_0002s16350) derived from phytozome v7.0 (chr-ID scaf fold_2; pos 12231046 to 12231654)
tgtggagtcctgataccaaactgatagccattcttgtaagtgttttttaattttgatttctttttgtatgtttgagtttgacgtgccacttcatttgtgctttctcgccaatctcgatagttttcatgtaagaaactttgcatgcatttgacaattacaggaataggcaaatgcttttacgtagattcagtcaactcacactatagaaataatgtggtgcacctatccctatttgtcaaaattctattgaaattggaagaccagtagacgctgagacgactgtagctagttagcttcactagatgcacagttggagctagaagttcgggctcaattattgtaatattaaatcagttttatggggacaatcttctgttttctctaaaatttttatatggataatgatatagacaaaatggcatgaagagtggctcgtcattaaattgttttagttgaacccttttttttttttttatgtctggtctggaaataaagcctggatgcgttgagtttatgaaaagtgaattgtgatagttttgcttatatatatatatatgctttctattgtgtgcagacaacatctttctttttacatatattcaaggttca

SEQ ID NO: 57721 - DNA, 797 bp, Populus trichocarpa
  Intron number 3 from transcript POPTR_0010s22440.1 (locus POPTR_0010s22440) derived from phytozome v7.0 (chr-ID scaf fold_10; pos 19356519 to 19357315)
gccaggttattctctttcaattccattgttgctatttctgtcaggtgattttggccattttgtataataatattattaaatagaagccaatgggaatatgaaatttggcctgttaaagaaaaatatttcagctggatgccagcatatccaagttgtcttcatgagctgatggttggtttatgctctgtctgactggttgaggatgagtatgagaacataaacggtaaagtctgatatgataggaaccttcattagatctctgttagctaaaatggattgatgtcaagggtggatgggtagtaggggtattggaatggaagaagcacatcaaaacagctgactactagcaattgcatcatctgtcaatttatttgaattttttttatgttcttgctttcaaatacatggataaacaactgcatagcttcctctaagctgagatacaactttgcataattgatgtaatggtccaactgaagtggggttggaatgttagctatggatttcttggcctgaaaagcaatcttctacagttgaaaaagtcaggccatggctgttccatgctacacctgtcattccattaactagattatttactctcttctttttttttgttggtttctgaccaggatatctgtataacgtgtacatacaatggcagaaaaagaaagcattactaattgtgcatgatggaatatattgctggattctagactattctcatacttctagaattagaattcattccataataaaccaatttcaggttacttgtgggtcggagcttgctgtgatct

SEQ ID NO: 57722 - DNA, 914 bp, Populus trichocarpa
  Intron number 1 from transcript POPTR_0001s44800.1 (locus POPTR_0001s44800) derived from phytozome v7.0 (chr-ID scaf fold_1; pos 45204295 to 45205208)
gagacgactccgctgcagattccttcaggttacaggtattatttaccctgatataagagtctatagaagatatgcttgctaaagagtgcagggagatgagactcccggtagaggatattttctttagtcttggttgtttggttgttgtggtccagtgttggttgggtgtaagaggcaggttttgagctttgcagtgggattctaaagatttatcattgctgacaggggtataaggttgtggcgagaaagagtctcttttgaaggccaagctttaatgctccagtggccttgctgaattcacatcgtataagacaaggcccgttctgcttggagttgattttgggaaagcttgttggtagagaaacagtggtggggagtcctagtagccgctatttctggaaagagatcttcaacaaccatatgtagctgttatgtgttgtcaatgacatttattgtggccggaaagctatgatcgtagacctcatatgtcctatgtgggttgtgctttcttgcctccagcgtgtgtgccttgtcatcagcttcaaaattcttatcagcaatagccagcctgcaaatgttgtcatctcctgccaagtcaaaagccagatcagtgtacacttcatcatctgagtcactgtcagcatcttctccctgaagtaatgtggtttgaaattctgtcatagagtatgaaattccttttgcctctggatatcttaaagggtcaatctcatctagctgtatgtgtactaacttggagtttagcatgagatctatagagtcgtggatctccggcaagtgagtacctataaggattttcacgctgtgaagttcagagtttagcatgagatctatagagtcggggatttccgaccgctgcagagtcaaccttgttggggattccaaagggaaaatat

SEQ ID NO: 57723 - DNA, 1021 bp, Populus trichocarpa
  Intron number 2 from transcript POPTR_0007s05140.1 (locus POPTR_0007s05140) derived from phytozome v7.0 (chr-ID scaf fold_7; pos 3322687 to 3323707)
ggcgctgttccaggtttattttaattttattttttttaaatatatttacttctggtactgggtccccgccccccccccccccccccccccccccccccccccaagaggaatagagaagtaaactgttatgatgtgttctggatttgggattggatttgattggctgctattttttattattcggaatatgatttaaacctttcgttatcttcaaatagagggttactgaggaatggtgtttggaatgttaaagctgaaatttacttgttcgtttatttgctgatgtttaagtggaagttgttagagggtattctgataagattaaaaggcaatttttgctacattgtgattttactaagaaaaaagagcaggtgggaacttgggatatgtaaatgaaggaatcagcaagtaggactctgtactcatgtagtttctgcgaagcttcgttttgtgagtggattggaaatttagcagacatcattttggtactctgaaatttggggtgctatgtagttgtgttttacacattgtttctagaaatactttcaaactttcttttagggatggggaaagttctgtttatagagtaataataaatctgtccaggtccatgttctgtgaaatgtcctgacattctctcatatgcactgggaattctctatgcattcctttgcgacatggtatttttacgcatagatatatgtttgttgtttcagttatgtatggccaaagcgtatcgtgtgatttaaggatttcaaccacattaaagtttgtaaatccgatgttgtggttaagttatagcatataagtattctatcatttaattttgttgttattgtagattactgtttaagtggtgcttgacaaaggttctattcatattggaagtgtcttcctatctttagctgctctctaaggttcttttgttttctttctttaaatttgagctcgtattatatatctgcatggctataatgttcccacagatcccgctagtgcagcagctaatcaagcaaacaaa

SEQ ID NO: 57724 - DNA, 204 bp, Populus trichocarpa
  Intron number 2 from transcript POPTR_0002s03680.1 (locus POPTR_0002s03680) derived from phytozome v7.0 (chr-ID scaf fold_2; pos 2286466 to 2286669 reverse strand)
gtccctctataaattcaccgagctgggtacatgctgttcttctcaacttattttggatcgtgtatgaaaattgatcattaatatcacaaacgaaactagttgtaaaggacatggaaaagttaaggtttttgcaacttttatttttgtttcaaaagaaataatctgtaatcctcattgaggcggtgctttgatttatttgtgtag

SEQ ID NO: 57725 - DNA, 586 bp, Populus trichocarpa
  Intron number 1 from transcript POPTR_0010s17100.1 (locus POPTR_0010s17100) derived from phytozome v7.0 (chr-ID scaf fold_10; pos 15840345 to 15840930 reverse strand)
tgataccaaaggcccagctgttacaacttcaccaggtaacattactaatctgaaaccaccttctgtttcgtaatttttttcagttatttcttgttcttcttgtgataccattatatgcatgtatgtcccttggaagtttatatttattgtttcatgtcccttggaagtttatatttattgtttcagtccaaggactctagagaagtacttgtgttcttttgctttgagcttttatactaccgagttattaaattatgacagctctttcattttaatctccttgggtacattaaagtagtatagagttatcagcaatgaggaatctaattatttacaaaaggagaataatgaagatatttaatctaattgccaaacagattttttcttttacttataagaaataggactcaaatgctataatgttcttgattttattgtagctctagatctttttaaccatttctagatgatctagtatgagaccaaaccatacccaagtggttgaatttagttccattgacttacggatagttttcaccatgtatgaacagcttttgaggggcttcaacaacagaagaatcggcct

SEQ ID NO: 57726 - DNA, 563 bp, Populus trichocarpa
  Intron number 3 from transcript POPTR_0010s01850.1 (locus POPTR_0010s01850) derived from phytozome v7.0 (chr-ID scaf fold_10; pos 2029541 to 2030103 reverse strand)
gaagaagaaagacactgttcaaggtgctgctttggaaattttgtcagtttattatagatagttacctggtataatatgaagatacccccttgtcaaatatcctgatttccccctactttgcctctccctctctctcttctctagaagctcatgtcttttgattgcatcactttgatagtggttatttgctataagtttccctataaataaatccatgcagaatcatggaagttggaactccaagatgcattaaaatacttaatgttgcatttgttaattgtgaaaattttgtaatggattttgtccttgaaaagcccttaaccttaaaaatgaaaaaataatatccattttgcactttgcatctagatgaggatttcaatttcaatttactccatctagctttctaagcaatttggaagttttttccaatctaaacagaacagacagatgtcatgttaacttttcttatgttttgtgaagttgtcagaatgacctgctttctaatccacaagtacctgcaatttgcttctgagtgttggctattttcttttccaggaacatcg

SEQ ID NO: 57727 - DNA, 466 bp, Populus trichocarpa
  Intron number 1 from transcript POPTR_0001s19960.1 (locus POPTR_0001s19960) derived from phytozome v7.0 (chr-ID scaf fold_1; pos 17530324 to 17530789)
acattggtggtgtttttaaggatgagacatgttgctacccaatttttgacccatattttgataaataaaaaaaaaataaaaataaaaaataaggatttacatgtggcgataacatagagcattagggttaaggaagcaatatgtcaaggagataattactgaatcatatataattactgcaatataaaataccataaatatatgatttgattcgtgctggttatggaaaataatcactgcaataaaaaaaataccatatatataggatttgttggtgctggttatagaagacaatctctgcaataattattgtaatatttccttaaacatccagccatatgcaggggggaagaaaaattgacataggacaatttttaaagagagaaatttagggcaaccacgaaaaaaacctaaacctaatttttttgtagtcggccaaaaccaagccgcgcccccacccttggcc

SEQ ID NO: 57728 - DNA, 663 bp, Populus trichocarpa
  Intron number 2 from transcript POPTR_0001s21750.1 (locus POPTR_0001s21750) derived from phytozome v7.0 (chr-ID scaf fold_1; pos 20264371 to 20265033)
cattagtccctctggtgcccgtgcccctgcccctggtatgctcttttcctgatctttgcatgtgacatttgatgcactggttgaattatgtagattttttcttattggcccatatctgaattatcaagggaacaaaaaagatgaagaaagaagaaattgaatgcttggctgttgtcttgctgccattcttttccttatttttgtataatttatttcatgtcatgtttctttttttaaattgtaatcccttgtttgtgcttgaacactgtggagagcggcgaccatctttcttggtcgtttggtcttgagatagattgttcatccgattttgcattccttacatccgcatttttgaaagaggaaacaagagacccccaactcacatcttcagctgggtgcatgcaatcaatattctctggttgtggtggatgaaaagggcatccaaatcttgccatggtagttagtgaatttgatgctgaaaataacaggatgttgatggttataaatgtggcaagtggtttgctcacagagtcatatacgcatatgattttgctgttttgttaagaactatattaatttgtttgccaatcaaatatactgaacaccgctcatcatgttgctcgctttgtgtggcaggaggatctgcgcctggactagctgtga

SEQ ID NO: 57729 - DNA, 794 bp, Populus trichocarpa
  Intron number 1 from transcript POPTR_0010s06300.2 (locus POPTR_0010s06300) derived from phytozome v7.0 (chr-ID scaf fold_10; pos 7715030 to 7715823 reverse strand)
ctcatccatctagtgcttccagagaagccaaagaggttagtccttcaagctttattgctttattatttttttcatgtcttgtcttatcatgctctggggtttgaaggaatggtttttctgttttggtgttgtttttagtgatcttttgtgggttttgcttcaattgttgtgattttgcctgtgatattgagacatcttgaaaaaattatgactactggggtttttggtgaaatggaaaaatggctgttgtgagattctgttgctcattttccttttgctttttgggttgtcaaacagaccataatgctttgaggatttactcgtttttattgaattaattactgctgttcttgattttgttcaatgctttgaacacttgaaacgaaagtaatttaagctctccttttattttccgtaactgctaatattttccggagaattgcatatatttgattaaatgcagccttgattggctttcgttaaatctcattttcggacatcctcgtgttgatgattgccttttttctttccattgttgaaacttcttttggacttgagtatggctttttttaatatatctggcattcatcaagattatggctcttttttgtttcagttaataaagaagacaccgagtctctggagtttctttgcattttgtgttaattgttttatggatatcattggtttgaaatagataataatgaattgcattaaagaaatcactgagcaaacatgtaaaatatttttgagtttcagggcaatcccattctagccctgactgaatcaatctc

SEQ ID NO: 57730 - DNA, 330 bp, Populus trichocarpa
  Intron number 1 from transcript POPTR_0010s13540.1 (locus POPTR_0010s13540) derived from phytozome v7.0 (chr-ID scaf fold_10; pos 13361970 to 13362299 reverse strand)
cctttgaaaccaaaaaggtacgctcttgtctaattttcttttgataaaccccatgttttttttttcgtttcttttgatgtttctcatcaatttctgaaatgagttctgggttttttatgtttttgttttttcaggccttgttcgggagtagaggctttccatttaaagcgattttttaatctcttcctgttcttgagaggggctctcacttgataaatcaaatagcttttctttgcttccgtttcctcttatctgttcctttttttttcttcacaaatttttctgggatcattttgagggggttttggagagttttacccactattcata

SEQ ID NO: 57731 - DNA, 480 bp, Populus trichocarpa
  Intron number 3 from transcript POPTR_0001s14040.1 (locus POPTR_0001s14040) derived from phytozome v7.0 (chr-ID scaf fold_1; pos 11049039 to 11049518)
ggccctaaggtactgacaccaattgcctgtttgatcatgttttactgatgtttgatgcccttgaatacaatcttaagagtttcattttttggtccaataaagtacagtgagattttaattttgtagcaggctggtgttattagactttttcataaattgaaactatatatagtcttcaatggtaacactgcaacgggaaatatgttttttcttggtagaaactagtgttgcaggagcttaatagatcaacaatagggcttgtccaaatgctttattctttggattttccaagataaatgtggatgtttcttttcctcttgcaacatcttatcgaggatgatgaatcattaatgcatttgagtttctttggtggaccttagttattttttgccaaactttgtctctgaaatgataaaatgagcaagttgattaataaataatgaatgtcattcttggtaatttgtggtttgcagggtcgca

SEQ ID NO: 57732 - DNA, 426 bp, Populus trichocarpa
  Intron number 1 from transcript POPTR_0010s22520.1 (locus POPTR_0010s22520) derived from phytozome v7.0 (chr-ID scaf fold_10; pos 19413016 to 19413441)
ggtcaagtctttcttcaaaaagaaaactgctaaaagtatgaataaatttgtttttgataccttcattgctttcttttcttttgtggttgcttgagcttgagtttgtgagtaattattggcttaggagattagagagaagactcagatggagaaagaaaagaaatatatggtggaagctaaagaaagctatcggggcgcattgttttgaccatgaaagattagcttcgtttttgttttcctgttaatatatgataaaaagcttttcttaaatagctcatttggttcttattgatattagttcagttcatttctgcttgtttgcttgtacaggagaatgatttcgaggattgatatgtttattgatttgaattagctctttaaaatccttatcttgtacacagaaacaatgaagttgagatcttaaag

SEQ ID NO: 57733 - DNA, 689 bp, Populus trichocarpa
  Intron number 1 from transcript POPTR_0002s06710.1 (locus POPTR_0002s06710) derived from phytozome v7.0 (chr-ID scaf fold_2; pos 4516513 to 4517201 reverse strand)
aaattgcaagagtaagtgttacttggatttcttcttcttcttcttcttcttcttctgctgctgcctttttttttaattgttttgcggatttaaacactgagtatggaaaactctgtttcttttggtatttcaagtggttgtatgactccatttctgcatttcgaacacaccatttgcccatctttactacgttttgactgtgattaccgatttcgtgcaaagttcaacgatcccaggtggtctttaagctgtgatagtgattctaatggtttttcttcattatttcccccccttgtctagtgaatatttggaagatttttaagcatactggtcatgcttaatttattgtttttctttaagtagatagactatgatagtattgaaaatatgtgttgtcttaaatttcttttcttgtgcactgcggtaatgtattttataaacagttttcattaattagttcctgtttttttcccttttacctctagatttctgagccagtcaatgaaaccgttgcatgaaagtttgcaactttgtttccccatcagtgcattttactgatttttttagtgaaatgaatagtaaaatttcataaacttctgcagtcttcacttcatctgattatagatttgattttatggctgttatcaattccaggtcacctctgttaaagaattaagtgggcagatttg

SEQ ID NO: 57734 - DNA, 392 bp, Populus trichocarpa
  Intron number 1 from transcript POPTR_0031s00230.1 (locus POPTR_0031s00230) derived from phytozome v7.0 (chr-ID scaf fold_31; pos 42805 to 43196 reverse strand)
ttctgttcttgatctgtatctttcttgcttgaaaggtaaatcctactttcttttcttgtttttctaccactaattttgtttcaaataagatttgcccatttggttgtagaattaataagtaggattgtagattgatcaatcaagtagaacttaattgtatatgtgttgcttgatctattttagaactcaaaactcatatttagctttgttcttacatattgccatcaacttaaactacttatcttaaaaacagctgctctcaaggtttcttttgtgtgttgagtgcctcttgtcagcttgacaggtgactagttagtttgcctactcttcctcatattcttgtacttagattttcagatcagctttcccagagtttcaacattggggcgcgt

SEQ ID NO: 57735 - DNA, 398 bp, Populus trichocarpa
  Intron number 1 from transcript POPTR_0001s06900.1 (locus POPTR_0001s06900) derived from phytozome v7.0 (chr-ID scaf fold_1; pos 5266552 to 5266949)
tttaggctttcagtgtagttaaactcttcaacgtaacgatttcttcttctttttcctgtcattaaatctgtgcatttttaatttctttttggtgtagtttttgacatttttgttagggtttcagtttcatatttttttgaaatttaatcaacttttgatctcaatttaaatggtcaaatagagaataatcggtaacctaattgtgattttagtcgttaattttagttacaggttttacaaaatttcaaaattttgaggactttactcactcttgttgatttttaataaatattatactgtcgtttcctttttgttttctatttgaatgatggtttatggtggttttatttttatgcttcttaggaagaattcaggagggctatattgcagcctgggcc

SEQ ID NO: 57736 - DNA, 773 bp, Populus trichocarpa
  Intron number 1 from transcript POPTR_0002s14200.2 (locus POPTR_0002s14200) derived from phytozome v7.0 (chr-ID scaf fold_2; pos 10519884 to 10520656)
aagacaaatcgacagcgtgttcgcgcgtttagcaggtaatttatttttatcttttttgatcatttggatctgtcctagttggatctttgtttgtttgtttttttttcttcttttcagataatcgattcttttgatgtcgttttgtggctaaatttcggattaatggtgctgtaaagctgttatttttttggtagaggttatgtttggctgattttaggttagattgtttgtattcagtgacaaattggtattttgaatgcagtacagtgtaaactgagctaaaagggggattttttaaaaacaattttggttagttttgtttattagttagagaaatttgaatcaagatagctaaagcatgagcaaagtcttatcgctaatttgaaattatttgttggctgtaatgcgatgaggagattggcaatgcaagtctttggaatgtgttgaattttgatggaattttatcgctaatttcttatcgcttgattctgagatactctattatgtcaattgacaaaatttctggatagttattccgttactgttatccgatctggaatatttttttttgcagcatgtgtgtattttctgtgtgcatgagtaactactgccaattatttatgttttgagggggtggccttttttttttactttctttgaaacaagagtttatgatgttaggttagagttggacaagcttatgtgtagatgattgttttttgatttattgacttgacctggtctttgagcagccttgttgaagtgttgtaata

SEQ ID NO: 57737 - DNA, 793 bp, Populus trichocarpa
  Intron number 3 from transcript POPTR_0001s01130.1 (locus POPTR_0001s01130) derived from phytozome v7.0 (chr-ID scaf fold_1; pos 886138 to 886930 reverse strand)
agtctactgtcgtcaaagcaatttccggtgttcaggtgatttagatggttttgcctttaatttttatatctgtttcctatcagcagtctcttatggttatattatgtggtatttactttggggaatgaaaggccaaaaaaaaaacagaagaagaagaagaaggttataaatttttgcaatagggatagttatgtgagccggtgaattggaaaacaatttttcagtgatctcaattcctttttctttctttccctctctttttttaacacaatggaggcccatcaaataagtaagtcttccctctccctctctaaccccctttattcccagtgtaaataggatatgaaatgagtttaattcatataatgcaaaatgaccttgctgcttaatccactgagcattcatattcctgcaatatataacactactactaactatcaagtattgaagtgttgctggattaggtgcgtttagaaattgatccttgctctgataaagggagttttacctccatcatgacaggcaatcctcccccacaatatgttatattatcacatgtagctaagctagttgttttctttttaatcatggttccacagagtagttaccttactagcacaagtttttgccaaatgttgttccgtggttatgattatggaaacttgtattttgatctatccatacataacaatcaggcagatcattttcaatttgttataattatgaattgtacaggtttgaggggtgctaatttggtggttttctattcgtgtgcagacggttcgttttaaaa

SEQ ID NO: 57738 - DNA, 485 bp, Populus trichocarpa
  Intron number 1 from transcript POPTR_0010s18580.2 (locus POPTR_0010s18580) derived from phytozome v7.0 (chr-ID scaf fold_10; pos 16791871 to 16792355)
atttttttcaggggttagttccaaaacatctgcataatgttgataactgaagctaatctgctgtatgtagtgctttacttttgtagttcaaaagagtttcagatacaagttgaccttgcaaagatctagagttgatcatatatttcttttgggtttattcttcaaagggtccagccattatatgtgccagtctttatccagtaattgttggatgcctgaccattgaagtttttcaagtgactgcatggccagttctgctggactaattatataggattgatttttattttttttggtatttagatggtaatgtcgtgctgcaattttctgatgtctatagaagatttggcaaattttttaaaagtgttcatgttatctgttttattgattgaatataggcccggattatattatatcaaattccttctaagaacctgtgatgctttctcatctggatattaacatactactctattgcagcaact

SEQ ID NO: 57739 - DNA, 822 bp, Populus trichocarpa
  Intron number 4 from transcript POPTR_0010s18580.2 (locus POPTR_0010s18580) derived from phytozome v7.0 (chr-ID scaf fold_10; pos 16793295 to 16794116)
agatatttgtgaccaatgttattatagctgctgttaattcgttgagagcacaatgtatatatataaaaaatctgttctatataaatgagaggttaataaacttcttggttgcaggacaaatgtatcatttccatgtgcttttgtttgcccaggcactcctcttactgcaaattcttacatatgggatattaacttttatcttaaaattgctcttttatttgtgcatttttgagtttagtgtttgtggtctcgagttgaagcatgatgttgtggttgtaatgaggctgttgtagatgcaattactccagaggaagaaaatagttagcttcccttttatttacatctgggctcaacatctactctataaatagtctgtcacaaagctattattattgtcatgggcaatcattatggttgattcatggatcatttacagcgtacagactttttaaatgatgaattcatagaatttgtgggggtagttatcctggtgattgattcataaaatcattcctctttttacaggctgaaccttcagacatctgtcgaaccagcagatcgaaaagtggaggaagatcatgacatgattggaggtgcagaagccatgccagtgaatggtattagaaacaaggttgatatggatatcaaaataaaataaaatatatatatatatatatatatatatatatatatatatatatatatatatacttttaattgggtccgttgatttttgcctgttatttttcggattgatcatttgtcttgtagcgggaggataattactgttagctgatgaaaatggtttactgttgtgagcag

SEQ ID NO: 57740 - DNA, 785 bp, Populus trichocarpa
  Intron number 2 from transcript POPTR_0001s18260.1 (locus POPTR_0001s18260) derived from phytozome v7.0 (chr-ID scaf fold_1; pos 15329539 to 15330323)
atctgcattcttttgacaccgagttgcttcccgaggtgggtaacctgtcattttctagtgattcagtaatgcggttttggatgtttgagtgagtgtacgttaatggggcatccaacaattgcatctatccatcttccaatcaattaaacttctactttttccatttttttttcttttttaccaatatggaatgaatttgagcttgaatatttgcactagtattgaactcttctgtttcaagaatcgatgttctagctactttcaaatttataagtgcttctaaacgatattctgatttttgggctcggtggctaatgaagaacatcttgtcttgcatctaataaaagatttttaaatcccaagcccttatgactcttttgtgcatatttggatttggaaaacatttcttgaaaaatagagaagagctttacgtttttgaaaccagttccattcataaccaaacacttgcattacatggattttgtgattttccaaaaattgaaaatacaattaaagaatgaaaaggtgaatcttctttattttgttgacatgcgcacaaacttttcaaaagaagttgaaggtagtatacatgtcgttgcatcaagaaacaatgataatatagtgccggctctttagcactccattacattcacacaatacgctttgctccttagtcttgaataaatgatttgggatttcacaatgcagtttggtgctatgactttttgtccatttttatgctaagctttctgtatttcatggttagttgcaagttccaggcttgt

SEQ ID NO: 57741 - DNA, 1049 bp, Populus trichocarpa
  Intron number 4 from transcript POPTR_0001s21330.1 (locus POPTR_0001s21330) derived from phytozome v7.0 (chr-ID scaf fold_1; pos 19737887 to 19738935 reverse strand)
agcgcattgccaacttgcttgagccaggagaaacagtaaaattgattgaagcttgattctttgattttttattagcctttttgaagtagtttattctttcataatttaaattgtattagagttgttccacttgatatgtcatggatatgtgtcctgctgtcattgattactgctgtgcaaggacatggtattattaaaaacactagtatatcgaacctgaagtccaggcttagagttgcatatggttaattatctatttgtgagtaatgcaagatggttatgtaggttttttaataagaaatttcatgcaggataactttgaatttgtatcccataaaggtttttgcttgtggtgaaccagagattcagagagttagggatttttgtcaggggtttgagtttataggagtaagagttgataaggggcttggtttagaagaaattggagttgttcgttgtgagtagtaacccgagatattgtaacaagaagattttggaagaagaaaggaagagaataatatttagagaaaagagagggacacactcttcgcaggactcgatccataattactcaaaactccattatcaaagccctaaatattagatagaatttgttttatttataaaggcacccaaatccccaatgattccaagtaaaataggaaatagatatccaaatgggcatagatcttatgtgattaaaattactagataaactggtatgttgagaatttaaagttgaattaaattaaaataatttatgaacttcttattattactactggatttctgaatgatgcagtcaaggagagagaaattgagaattggggctccatttttttcttttaaaacaatttgtctttggaaatattttagatgaaaagtattttcctatgtttggttatgttaatgtaaactacttgaaaatacttatttggtgtttggtgtgtggaaaaataagtgctaagaaagaaaaaaaagaattgattagtggaggggtccctttgttgacaggtcttacaagctttgagaaggttgaaaggaagatc

SEQ ID NO: 57742 - DNA, 687 bp, Populus trichocarpa
  Intron number 1 from transcript POPTR_0001s44130.2 (locus POPTR_0001s44130) derived from phytozome v7.0 (chr-ID scaf fold_1; pos 44595146 to 44595832 reverse strand)
ctggtaagaaactccaaattgaaattatttgttaatctatacatcttccatataacttctcaatccctttttgtgtgtattttttagtataaaaaaaatctttgaggtttgcttttgtcccttcattgttctcatatcctcacagtagcagccacacattttattctgacctcagatttgagtgagaaccttctccctttctacttttgagatcattgactgctctagatagtggtcaaggttttttcaagacaagattacgctgcaggctttgcggcaattgaattgagttttccatttaccttgctgttaattcgaaccagattcttaaccggcatcaaattgttctttatagttcaaaatctaaattttataatttattagatgctccgcaacaagccatttcttttatcctgctagatcctcttctgaaacctccaaattttagtgaagctgaagagaggcgtagtaattggttggttttgatcacttttagctttatatacttgtacacgaaacaatttaaactggtatttcattttgatgctggtctctccaactccaagtcaattaattttaagtggtttgctgttcttgagatttcagagcagctttccttatcagcagctcattatatttctccttttgacagtcaccgaacttgtggaaggtgactcatcacgaaaa

SEQ ID NO: 57743 - DNA, 647 bp, Populus trichocarpa
  Intron number 4 from transcript POPTR_0001s33310.2 (locus POPTR_0001s33310) derived from phytozome v7.0 (chr-ID scaf fold_1; pos 31496310 to 31496956 reverse strand)
aacaggtattgctaaagaactgtttgtgaactcctgaatcggaagacatgcaggcttaagccattatgattgataagataattgttgctcggaaaagatttgccctggaatcaccgctaaagctttaactgagtactacattatttgagctaaatgtagtgtttaatgatcattagtaagtggtttttttttcttttttctcaatggcttattttggtgtatctggtgcatctggaagtccctcagataagcaatcacgtgataaactgcaacttgaaacagagatgcttcatctacaatttttgcctgagcaaaaacaaagatatatgtgcatacaattagtgtggattttgtttaagtaacatagattcgaaaaaaacaaatgattttcgtaacattgtggaccatgaaattggaaattcttcttcaaaagacagaagtatgccatgtatgttaatatgcacaattcaaaaagacacagacacaaatatttgtatgcatgcagacaaaaaaatattcttcggatgccaagaattatcttgatgtacttaggatataatttgaattttgaactgattagtgtcattatgtgagttgggtcctatattgcaggtctgtgagagctccacaggcagcattgaactgca

SEQ ID NO: 57744 - DNA, 539 bp, Populus trichocarpa
  Intron number 1 from transcript POPTR_0001s41330.1 (locus POPTR_0001s41330) derived from phytozome v7.0 (chr-ID scaf fold_1; pos 40946876 to 40947414 reverse strand)
tggaaccaacttcaaggtattgagaattgtgttttttggagttttgctatatctcttgaagttttatgcttttgcatattcttgaaatctgcagctcttcttattctgtttttattggtgttcttatctgggtttttattgatttttcagttttattttctttatgggagtttccaagctatttattttttgctcaaaggcatgcttggcagtaatcactttagcataagatttatgatgctctgccgttagttatgtggcacttccttccttaatcaagaccaattcttgatcaaatttatgtaaaaaattaagatttgttcttaaccttaattataaatctcaatttgatatacaaatcaggatgctttggtatcaaatctgattatatatatataatagacagcaatttgaacatgtgtgtgtgtgtgtgtgtgtgtgttcaatagacagcaatttgaacaccaatagtttagtggtacacaaatttgagtttttgttcagcttattggaagcaattgatctcatccttcaaggag

SEQ ID NO: 57745 - DNA, 710 bp, Populus trichocarpa
  Intron number 1 from transcript POPTR_0001s37280.1 (locus POPTR_0001s37280) derived from phytozome v7.0 (chr-ID scaf fold_1; pos 36265438 to 36266147)
attggttgctggatgtgagtttctgttttacccttccttcgctacccttcaacttttatttgccatgtctctctctttgcctggttttttgtcttcaaatgttttttaaaactaatttagactcccaaattgttgaatattggtgaagcttgtatttatgtgttcattttcttcttaaattttccaatttgaattgtgtatttatcttgaaagaagaaatatgttggtgtaaggaaaagaaaaggattaataagcttaccgaaaaaatatcagccattagatggatatctagtggattttattagtgaatgtcataaatctgatggttttctgtaagtgaattacctggcaagattaaattgaaattaataatttcttgtttttttactttactattttatacttgtcagtatgtgatgtgagttccttttcctctcaagggaaaaaatgttagaaaattccaagcatactttcaaggaaatcgttcatagatataaaagtaaatgccaaaatcctgacgaccgtctatttcacctcattttgatttccttccacttccatcaatccttgacacactgtaagaatttttttaccaaatgatgatgtgatattatttacaattggttatgattaagaaaatattattgaatggcgactgcatagattagttgttagctacttttaatctctctgttgaatgtgtattcagg

SEQ ID NO: 57746 - DNA, 854 bp, Populus trichocarpa
  Intron number 2 from transcript POPTR_0002s13870.1 (locus POPTR_0002s13870) derived from phytozome v7.0 (chr-ID scaf fold_2; pos 10283537 to 10284390)
agtataggcaactgtttcgtcttcccctggaagaagtaagtcactctatgctatggatgttcatatctttcaaatgtctttatatatattttcgaagaattacttagctgaaaaaaagagaatcaagaactcagctcctggttcctaggagtttcttatgctaaatttcagtttgctcttcgctatctgtagctgttttggttttattaaattatgtttcttcaaaatttggttttgataggatcgttatcaagatgaaaatctgttaactctacgtgagttgagatccaataatttgtaacatttcagaaatgctctcaattctgttcgagttggagcttcataacatgtcagaattgacattttttatccttttatggttagggctggaccctgtttggaattcattgatcctagccttaagtcaataggattttgaaacttacaaatgtatcaaatagaacacaaatgataattgaaatgaggggaaaactgatggaagtgctgtgaaatgtgttataagaagctcatgagaagtaatctgcttagtatcatttccaacctcgaggacatcatgtgttcaaaatgcttattttatcttgcacttgtaattgtgcaccagttaagcatgtctgtgtacatgtttgtaccttgaattaattgtttctcgtgtgaaattttctgaaacggttcttattgttaaaactttcgatattgccccctctctgtcacgcacacatcagaggatattgtagagttctaaaggacctttgttttctctgaattatgtttctaaaattttcgtttccccccctataggtccttgtacaagactttaattgtgcataccaagg

SEQ ID NO: 57747 - DNA, 382 bp, Populus trichocarpa
  Intron number 1 from transcript POPTR_0001s14800.1 (locus POPTR_0001s14800) derived from phytozome v7.0 (chr-ID scaf fold_1; pos 11645328 to 11645709)
aattattacctgagaactgaaagagaggtgagttggagaacaaggagttctggcggcgagttttagggtttaggatgttggcttcacagtgaaaaccccttgctaccatataacctaacaaaaaagctaaaaggaaaggcagaaaagaaaataaaaaaaaaatagttgaaaaaaccgtgagaaaaaaaatattatttagaaaatttaaaagtatattcggttcaactcggttttgattttatagggttggaattaaaatacccgaaccggaccggtccggtttgctatgaaaatttgctttctgagtttctagttccctagcaaaccaaccgcccactccctcccaggctctcacacccaacctttcaatcttcatctacac

SEQ ID NO: 57748 - DNA, 766 bp, Populus trichocarpa
  Intron number 3 from transcript POPTR_0001s14800.1 (locus POPTR_0001s14800) derived from phytozome v7.0 (chr-ID scaf fold_1; pos 11646079 to 11646844)
ataaagtaagtttctttgacatatgtttctcaacggatgggttttcattgttgattgaaaatggataatttgtcgatattaatactttcaagtcagaaaaatgaagagattgtttttcttgcccatttgttagcttgtttgtttgcttgcatatcttgatgaatataaatagaaagtagaaacagagtccacatttgcgttttaatctgatttgggatgatatgggatcaagttttacgttttgttattttttagccgagaatgccttagtccacacttacgttttaacctgatttggctaaagttataatgcaaagtagctcttcttcttcttttaattataaaaaatgaccattaaacaagctcgatctcttaatttgttttgttaaataaaatttgattcatgggtcaatggatttattgcagagatccaactaacaatttgcttcagaattgaatttgtagttgattaccagacaaaattcggagaagctcaccggaaactagagctagaaacgccttatttcgttttgttcctgttcttcatttccttcttctcgaatccaagggggaattctcatatttagaatctttggtgtgctctgtctactattcttttgtactttcgaagctgccagtttacagcatcataacaacggttcctcgttttctacatcttcctcaaagtcaacattagttctacttcgttactcaccggttacaacatgtaggtggccccgctgttaattcaccggaaacaggtaca

SEQ ID NO: 57749 - DNA, 643 bp, Populus trichocarpa
  Intron number 1 from transcript POPTR_0007s05400.1 (locus POPTR_0007s05400) derived from phytozome v7.0 (chr-ID scaf fold_7; pos 3487475 to 3488117)
tcggcaacacttgttactgtaatagcgtcttgcaggtctcttcttctctcttcaatttcaattatctctcgatttaatcgttttctaccttattttattttaattagtttctcttgtcttgtgttttgattatttgacttttttttccctgtatttgaatttgattatttgatttgtaattcagtgatttaattaggttagacgcggagcatttatgttttagccttaaatattacaattaaattaggttctttttaaggcttggaattgaaaatttagatgcagaatttttgtgttggaaattcagccacggttctcacgttgtgttgaaaacttttaacttttttattttaattaatactttgttagtcagtttcttttgagaatcatggctacattttctcataattcatgcaggtctttttgattgaatgtgattttaagtcattgtatttggtttatactgatagcgaaacaggatgtacggctcataattcatgcaggtctttttgattggatgtgattttatgtcattgtatttggtttatactgatagtgaaacaggatgtacagttttgaaagcagtgttttttttttctgtgatgcaggcactttacttttgtgcaccatttcgagaacagtt

SEQ ID NO: 57750 - DNA, 856 bp, Populus trichocarpa
  Intron number 2 from transcript POPTR_0007s05400.1 (locus POPTR_0007s05400) derived from phytozome v7.0 (chr-ID scaf fold_7; pos 3488165 to 3489020)
atctcttgacttgcttggcagacttatttactcaggtaataataataactccatggattgtgtttgaatcctatttatgttaatactttgttttctccttttctatatgtcagtttatgtttttcttttttctgtttcattttggtgcttgttctcctcttgaccatcacttttatgttgaattttcatgtcaaaaagagagggataattgaagcccatttagctgtaaatctttctctaatgctctttacttggtttgcccttaagggaaaaaaatctgattcggtatgctatattgggattcatgatatctgcatcttctaatcaatgtttcctctgctcatgcaatacatgtaattgaaggctgaagattctttgtttggcatgcttttctgaaggtctatttcctgcttatattaaatcagacaacttcactggttttgctgttttacattaggaacatagttagaacttgactcattgggttctgaatctattttcttcttgtgtttgaactagtttccttcatcattattttcatttcttctccttgaagagtcaagacacagaacaagccagacctaagtgtttgtcaatatttttttacttggtttgctgtcaatagctttgatagcatcctgataaacaagaaatttcgtggcacttgtatactttctgcatgcttgtttactgtgcgcatttcactaaactaatgagaaaggaggggaaaagggagtttcctgtacacagaacatatatttgttacttatttagtagctcccatggtgctggagctaactgttgatatttcttttgcatagataagttcacagaagaagaaaacaggtgtcattgc

SEQ ID NO: 57751 - DNA, 1002 bp, Populus trichocarpa
  Intron number 1 from transcript POPTR_0453s00220.1 (locus POPTR_0453s00220) derived from phytozome v7.0 (chr-ID scaf fold_453; pos 15606 to 16607 reverse strand)
aataaatcccagcttgtcgatcttctttctagactgtacgtccctctctttctctccctcatgccttttcttttaatggtttattgggttttcttttctgggttcttttcatttttttggattctattgtgtttctcttcggttgccggatatttaacacatatatgggtctgttttgtgaagaatgaatagtgggattttagtttatattgatgtactttttgcaattaatctaagattaaaagttgagtcttctttctacagggttggtagtaattgtagtctgtgttagattgagaattttttagccttgttctgttttaggcaaataaacagtgccacgttaattttagattggttcttgttagagaaagccactggattgttgttttcctatagagattttttattttgtgtgtttaattaataataccctttgtcttttgattagaagtttgagctttgtacattgtagtgcattctagtagatgcatttagaagctgtactgttgtttcttttcagaagttataaattttggatctttttttttttatatcctctgatggttcatggttcaaatgaacagttaggatttttcattgcggtgaattcttatagatgcatttacattttccatgattgttttctttggaaaaattaattttggatctttagatttctatatccctgatgttttaaataataaatactgtgaattcatgtaaacacgtttagaagctctttagatgctacaactttctatgaagaaaacagctctggaacccatatttgttgcttctttgttctctgcttgtttgtgcgcgcgcgtgagtttgcatgcactgaatatatcagtgcctttgtgagaatattccacttgtcatgctgattgggggtttgtgggtggttcttcatctgtatgctgtgtgattgacactgtgcatgtgtgtttgcttgcatgttgaggcataaagagggtcccaatatccttcaattgcaga

SEQ ID NO: 57752 - DNA, 643 bp, Populus trichocarpa
  Intron number 2 from transcript POPTR_0002s07920.1 (locus POPTR_0002s07920) derived from phytozome v7.0 (chr-ID scaf fold_2; pos 5451242 to 5451884)
aggtagggtttaactctcttctctttctctctctctttctgccccctaatatctgatccaacaccttttgtctgctgtatttacctttgaagcatcttgttcttccaatggaaaataagatgaagttttatatattttgctataattatggcaagcaacgacatcaactttgaatcctatgaacagatctacaaaagggatgcaatctattacaacattgtttttatactacttaaaaagaaaaccaaaaatagtatttcatggacagatctagtacaaattgttttattaatgagttccttttccttgctaaaattgaatgatcaataataggtgttagctataccacaaggaaatgaaaactgtttccaaaaatagatctacacaggcgatcgaatctactctctttacaagcttcacagagacaccactagaagactgttttgttctttggaacagaagcctattaaccatatgaacagtctaaaaggaccaacgctcattatctgtctatcttttcgcgaatttctattttttatattcatgtgtttgtgaggaaaaaattaagacctagggtttctttatatatatatatatatataaaacagaacctcagcaacgagattgacagaatcaagaaaga

SEQ ID NO: 57753 - DNA, 651 bp, Populus trichocarpa
  Intron number 3 from transcript POPTR_0007s08180.1 (locus POPTR_0007s08180) derived from phytozome v7.0 (chr-ID scaf fold_7; pos 6734092 to 6734742 reverse strand)
aagcatttttgactgtgcgtggtcttgttgctaaggtaatttcatctcatcgtggtagtatgtaaaattgtaatgttaaagctcataacctgcagtagtgcatttgcatatattttttactgtgcgtgctcttgttgctaaggtaattccatctcatcgtggtagtatgtaaaattgtaatgttaaagctcataacctgcagtagtgcattttcatatatttttgttatgtaagtgctctgtttagttcttttgcagggagtgcttggggtgattgaatttagttatttttggggcaacttgttggatttttgtttgtgatgcaactatgttgcattaatttcttgtattttgtaattattgactgttagcttgggagatgtttcttaaggtgttgagtcttaatagaagatgctttgctgtgtggcagcgttcctatccattagtgtatctttcttattagttactcactttgattttttgttggaaatgataagaccagaagtttcttctagcaggaaggattatagtaatttagattagcttttgggttaactgaatcctaccttcagctttatcctgcaaacaacttctcacaacaacaattagctaattttagtggtaaattatcttttgtagattggtactgcag

SEQ ID NO: 57754 - DNA, 830 bp, Populus trichocarpa
  Intron number 2 from transcript POPTR_0010s20520.1 (locus POPTR_0010s20520) derived from phytozome v7.0 (chr-ID scaf fold_10; pos 18068465 to 18069294)
cggtttctgggacggatagcagggacagcattgaggtaattctcgtcgaagtctattgattcattaaattagaaattcttacaagtttggagcatcaaattattgaaaactgtgtttgtggtggattggatgggtggtacttgaaaaaaaaaattgggatctaatagttcgtcttgcaaatagaaaatttggttgaatttgaatgtacgagttatcagaggagtggtatcaatatgcatttgtgctcaacctaaactttacctgcaacctcttgttacccaacttcaagcgcgtttccccccctaaataatgcatgagaaaatttgaaggtggtaaactcttgaactggtggaacaaagatttgataacgtaattttgtttctttctttccaaaaactaccattgaagataaaaagaagcattttgtttcataagattactgttgtgtgcttcaagcatcaaagttgtcaacctgtttgggacttgaatggagaaaaggcatgctcagatcaacgagggagaccaggtttccttatattccttgatcttttgcattctgcaaaatacaatcttccacaggcaccctgtatcacatcacttgcatgcttgtttgtagtaaaaccttttttaaagaattgctcatgtggaattttttttgttacatttcgaaacaccatgcatccattttatttgtttttctcgttgccatggtaacttgatttacactgtcacgagggggattctttttggtccactacaacaagtcattgttggatatatttttataatttgtaggaatctttatcagctattagctttagtaacaaggg

SEQ ID NO: 57755 - DNA, 497 bp, Populus trichocarpa
  Intron number 2 from transcript POPTR_0007s11940.1 (locus POPTR_0007s11940) derived from phytozome v7.0 (chr-ID scaf fold_7; pos 12284081 to 12284577)
aaaagaagaaggcggttgccgggtttgatcctgaggtattttattgttcattttgctgcttagagagtgtatatagagatctaaaattagctcaattaagtgatgccttgtttagtgatttgattgattatgcttcagtaggatcactgagatttttcgtgtgtgtgttgggtatttgttttgtggtgtaattgttttttattttggggaatacctgctcgcatggaatacctgccttgtatctctatctggttgattcagttcattagtgattgtattattattttaacttgtatcaggtcttggctatgttgctgagtttgtttggaaatgaaactaattcatttatgcaaagaagaattttttttagtgcgtctttttgttgctaattcagcttgattgagctagtggatacctgtttacttttttcaattggtaatgcctgtttacaatcaccaagatgttggtttgtgtacatcagggtagtgccttgcata

SEQ ID NO: 57756 - DNA, 628 bp, Populus trichocarpa
  Intron number 1 from transcript POPTR_0001s15665.1 (locus POPTR_0001s15665) derived from phytozome v7.0 (chr-ID scaf fold_1; pos 12491039 to 12491666)
catgtcctattacaacccgttcaaaaactcctacatgaaccccaccagtggaccaacagttaagtctgatcatccacctttacgcaacatacaacttacccacaaagatcaaacagttgatgcaaccccttataaattacctggagaagataccctcacaaataccaaacatatcatccaacaaaacaactttacaaataccaacctccataccatcggtaaacaacttaccagattggaaaaacaaatataaaaaaccccagtccacctcataaccgataaaaaccccgtcgaccttaagctaaaaaacctagtattcaaaccatatcaagttactaaaacaagccaagcatagattcaggaaaatcaaacagattttcttaaagccattaaaatacacttacaaaaccttgaccggacaaccttgactgtcccagatacacctcaacaatccaacccttcatcatctacaaatcaggtcaatgctctctaaaataaccccgtatcaaccttagatacatatactcttcaagaacaacctctacaactaaacagacttacctggcaagctcccaaaacaaccattgctccagacatttccatatctactgaaccaactatcattagc

SEQ ID NO: 57757 - DNA, 651 bp, Populus trichocarpa
  Intron number 4 from transcript POPTR_0002s18960.1 (locus POPTR_0002s18960) derived from phytozome v7.0 (chr-ID scaf fold_2; pos 14838884 to 14839534 reverse strand)
atattcttcgtaagccttgttgtgtcaattgtcctgttatgaaatcttaataaattcattccatttttctaggtactttatcttgtttctgatactgactagttttatatgcttggagctagagtcttttattcctttcaaacaccataactgatcacagttcttatccttttccgagtgctgtcctatgtagtcagagaaaagagcttccaccattaaaattatacgatgtggcatctttatttgatttcgatgaacattttattcatgagaacttgttttctcagcattcatttgattttacatgcctaacaaaccttgtggtggtaggcacatattacatagcaaatgttcctggtttcaaacccatcaataaaaaccttgctattcaaaaaaggatacagtggaaattcatcagcatttgcttgtatgaaattttaatagatgtcaaaacaccagcactaaaagatttttaatgaaattaggtaacattgagagtttacaatgtttctataaagttgcaaatactctcgtgttctttggatcttacaatgaaatgttggttcttattatctgcatgattgatgccttagttgtcaatgtcttgttaatttagggaggaaaggtgttaaaggagcacagcctggtcct

SEQ ID NO: 57758 - DNA, 703 bp, Populus trichocarpa
  Intron number 1 from transcript POPTR_0002s18960.1 (locus POPTR_0002s18960) derived from phytozome v7.0 (chr-ID scaf fold_2; pos 14840278 to 14840980 reverse strand)
actgactggtcaagcatagtgattgtcagctctttgtacggatccatctcttctgcctctctcttttttttttcatttcttttcgtcgtgcttaattgctaaaggttgcagcttgcgtttaatttacagttcttttttttttgtttgtaaattttagtaattttaatgagatataccgagtcgttgtcttaaatattcttctaattttgtcttaattattattattgcctttttgttggtactatttagtaaatatcagtattatgcatttctggagtgagagtcagttacctctgctttatatgtcagtttctgtgacgataattttttctgggattcttttataagaaagttggaggaactgggaattgtgggattctactgatttcatggccttgcttttaaatccaaactgatttctttcatggggaatacttggccaatttctgtggagtgtggaagacaatcctttgcttgtgtttattcgtgcctttggtatctcaactgggtgtttgaataaatccatttctgatggcatgttgaaaaaacgtgtgggattttcttgttttgggcatattattttgtgctgataaccatgtgcatgttaactcttctgatctctttagtgtttgttttttatgttttttaatggccgtgttaaatattttgcgttgcagagtgggatttataaagattttgaatc

SEQ ID NO: 57759 - DNA, 814 bp, Populus trichocarpa
  Intron number 1 from transcript POPTR_0007s09760.1 (locus POPTR_0007s09760) derived from phytozome v7.0 (chr-ID scaf fold_7; pos 9278675 to 9279488)
tctatcgtgaagctcttgcccctgaagatacgaaggtgatcatgctttttcttcaaaccataaatttaaaatttcctaatttctttcaattaaatggcaattgaatgtacattagtttaagattcaaagtcgaattaggtctggtttaagcactttctaaattaccttaatgagttatgaaattcttatctgttgatatggtgatggaaatattttgcatttaattgccaataagctatgtagctccattggcatattgttttctccatccccacctggattttgcattttaacgtttcaatcatcatgtgatcataacgtgcgttagatttgatgcatttttcaacctagagttccctaacaaatcttgatcaaggtgcccagctagctgttaagatttgagatttatgctaacaggtcgtaggttcaaaccctaagaggtttggattgggattcagagatggggaaaggcttcgtctttgagtagctcatggtttgtggggcctctcagatgaccaaaaataaaaataaaaaaaacttcacacctgaaatctgctgagcttgtgaagttattgagctattttttaaaagaaaaggctttaattcaaattcaacgaaggtttatctgtcattatttggttataaatttcttcttcatttaatatgttatactgaattttctctccgggaattaaatggaagtagagatgcagtggcattgtaaacaaggggaaagaatttagcgttgcagtaaaggaagtgctgagtaagatgttattgaaggctccgagtttccgaggctttgcttccaagc

SEQ ID NO: 57760 - DNA, 784 bp, Populus trichocarpa
  Intron number 1 from transcript POPTR_0002s23730.1 (locus POPTR_0002s23730) derived from phytozome v7.0 (chr-ID scaf fold_2; pos 21254207 to 21254990)
ccggcaactctgctggcactgtaacagcctactacgtacgtatatgattacaagcaaaagaaaaaagaatagcttaacccttaatttcttaatatattatatatataagtaaactataccatatacagtcacattcaaactagaatgaatttgaaagcaacttgctacgaagtagtgttcattgccttcagctaacgcatagaataggtcacgagaatgatacacataggaatgtttgtttttatgttttatttttattttaaattaacattatttttaatatttttagatattttaatgtgctaataacaaaaatattatttcccagtaaaaaatatttaaaaaataattattgctacgaaaaactcccattaacgtgggaaagaaaaaggtcacacacacatccattttttcgagaaaaaatgccttcactatagaggggccggggaaacatcaaaggcattaactttacgtcaacaacttgtttaaataaccaattcattttacatatgcagttcactgcagaggggaaagaaaagggtcatccacaccaaatacttgtaaaaatagggcatagtttttaaaaccagaagagaattgttttttaaattgtttggatgtgattaaaatggttgaattggattttacaagcaaaagggatagattgaatagattgatattcatgatttatgattttaatttatattaaacgtctaactggtagtattttatttgtgttttttgtttttttttttcatgcagttgtcttctcaaggagcaacac

SEQ ID NO: 57761 - DNA, 622 bp, Populus trichocarpa
  Intron number 2 from transcript POPTR_0010s05900.1 (locus POPTR_0010s05900) derived from phytozome v7.0 (chr-ID scaf fold_10; pos 7337956 to 7338577 reverse strand)
tgtatttgctcttggagagaatttaacatcccgctgtaattacacttaatcaccattgcagaggcttttgcattattattatgtcttgctatgttgcatgctgagtttcatgcacctcattgcctgttgttacataataatagtttgttcctttgcattagttactttttcaatttttagttttatttttctaatagggtgctgagttttaaatcacaaaggattttaaagagtattgctgtggcctttgtagttttctttttcttcgattttttatttatactttgagttaaaagttttttgtgtcctcagttatctactctgttctgcaaaactagatctcattgtcccctccaaatcagatattgccaactagtgatctaccagataattagaattaattgacacccactcaagatttattcattattacctttcattatttccacctcatgctctgggtgtcgaaaagtctgtctaattagataaaagccttgaagtatattggttttgtttcatgggtcttgatctagtttgatttttattttgtgaattttccttctgtgttttttttcatctacttgcagataagattcacagaaagattggtgaaggttagtat

SEQ ID NO: 57762 - DNA, 674 bp, Populus trichocarpa
  Intron number 2 from transcript POPTR_0002s18970.1 (locus POPTR_0002s18970) derived from phytozome v7.0 (chr-ID scaf fold_2; pos 14859443 to 14860116)
cagcgtttctgtcagcagtgcagtaggtatgtgtgtataagctcatttattgagaacgaagacgaattttttcactggaaaaataagaaatacattgccattacatctatttctcataaaaaatcaaaaccataatttataataaacatcttaatattttgtgttcttgataattgaattgtagaattttattttatttcattcaaattaaaaattatcaatttaaagttatattgttaactaaaaaaaaatcgttatattagatttataataaaaatttgacaatatctaatatgtaatgtaaaaaaataattttaatcttttatatttttaaaaagtgcttgtatataaaataaaaatattgtattgttcatgtatcttcttcttttgaaaaacaatgaaaaaaaaactagtaagaaaaaactatggagagcttctaaaatgtgtttccaaactcaatataaatttggaaaattggaaaactagttttccaattttttggatggagattaatgcatttgaacagaaagtcccaattttcttttaccaactccagttttcaaaaaaattcgattattactcatatatttcgggaaaaatttcttggtttgcagctccttatattctgccaaaagtacttaactgatgccttgtcaactttttttgcaggtttc

SEQ ID NO: 57763 - DNA, 674 bp, Populus trichocarpa
  Intron number 3 from transcript POPTR_0001s27480.1 (locus POPTR_0001s27480) derived from phytozome v7.0 (chr-ID scaf fold_1; pos 26388122 to 26388795 reverse strand)
caggttagtggaaacaattgtactcatctgtctaattattgtggttgcaagattgtgttggccactaaagtatgtttacattttagctgctgaagagggtgtttgggagtgttggtatggttttttattttttttgcttgaaaatgcattaaaatgatgtttttttattttttaaaatttatttttaactccattatatcaaaactatataaaaacacaaaaaaatattttaaagcaaaaaaaaaatcaaatttttataaaaagcgggttaaaccgcagccctaaacaggcacggaatttaatcacttcttgagacaggaatggtgttttttttgcttagtaaatgcatttagctctgtaaatgtatttggcttttttattccctcgtcactataaaatctttgactggtaccaccgtactaaatcttgtgctcttaatttcagtgcttgaagcccaagatttttttaattatctactggaattaattgtgtctgcaagatggttgctttatgttttattaattttgaaatcagatcaccggtttaactctttttgttcaaactgccaaaaagctttctgttgaataaattagtgtttttgggtttttaacacttagttttctgttctgatttttacaggatagtttctttgctagctttgcccttggttggct

SEQ ID NO: 57764 - DNA, 355 bp, Populus trichocarpa
  Intron number 2 from transcript POPTR_0001s05180.2 (locus POPTR_0001s05180) derived from phytozome v7.0 (chr-ID scaf fold_1; pos 3967535 to 3967889)
ggaagaacatcaaattcttctgcatcttctaaaaggtaaatttgttctaccatttttgcctcttctatccctgtcatattatgtagagattaattattttaatcatttcaggaaatatgcgtatcttttagttattaaccatctgcctgcctttaacatctttgaattttcattttgtttcatttatggggatactcttttaatctgtatcattatggaatttcgttctcaatcagacagatttgaaaattaattgtcattcttcattttgtcatatagatttgccttttgatatacacttatgatatccctgttaggctgaattagtttttcattctattgtgaaataacagga

SEQ ID NO: 57765 - DNA, 711 bp, Populus trichocarpa
  Intron number 3 from transcript POPTR_0001s05180.2 (locus POPTR_0001s05180) derived from phytozome v7.0 (chr-ID scaf fold_1; pos 3967921 to 3968631)
tgtccttgcccttccagcaccctgcactcaaccaggtgaactacaacttcctttgtaattagagcaatgccacacagttagttctcattctgattgatgtggacttcaatgttcatatccaaccttgtctactgatttgacaaatgcaactgtatgtctgcaataattgaaatgaatagaggagtcctttggagtcacgcttcaggatagggagcctgcttcaaagatactgagggcattggtgcaatcaaaggatccgttggtttcaacatatctactatgctaattccatgatacaaatgctgttggctagactcatatgggtgtcaatccgtgctaattaatcaccgtataaaaccatttctaaattgccattatttcatcaaaattaatgctttggaatcgatcagtgtaaaaattgtaaagtgaacaagacacttagaaatacatgacctttgttcagaaacacagattagagaaaaatcttttgggtcctacattgtttctcgaacagaattggttgagtcgcaatccacctgtaagtattgaaggctccttaaaaaaattctttaggttgatttttttccattacaatatttgttgtgattctgctttgatactttgagcctctgttttcttctcaagcagtagttttattcctcgtatttccttgtagctcgtggcaaaaaagtttatcgtacacaaaaggaa

SEQ ID NO: 57766 - DNA, 411 bp, Populus trichocarpa
  Intron number 1 from transcript POPTR_0001s07810.1 (locus POPTR_0001s07810) derived from phytozome v7.0 (chr-ID scaf fold_1; pos 5899408 to 5899818)
cggcgtcaccactgatctcactagttgcagcggtattgtggattctgagttttgatagatttttttactaatctgattcatgttgtttttttgctagggtggttgatggttttgaacctttggggttcaagaaattgcaatttgatttaaaactatgttaattttgtttccgataaacagaaaattaaagattgtagatattaattctcgtctttcaacttatggtcattcagattttcttgatattctcatttttattttcacatcaaggtggccgattccgatttttctcgattagaatattatgttattttttttaatatacgttcttgaacatgaaactaattgttttcttttccttgcctactttttacagcttcagctccaacgccagctggttcaggtaaatat

SEQ ID NO: 57767 - DNA, 951 bp, Populus trichocarpa
  Intron number 2 from transcript POPTR_0001s07810.1 (locus POPTR_0001s07810) derived from phytozome v7.0 (chr-ID scaf fold_1; pos 5899776 to 5900726)
ttttacagcttcagctccaacgccagctggttcaggtaaatataataataattattaattttcttgatactattaaagtaaaaattaggttttatatcaatatctgagtatcgtgttccggggatatcagattatgatattctggtggcaggctgtttctgattctttaccagttaattaattagaaaagtcacttcaaacttcaaagtttaggctgtttttggtgaaaaaccgtgcttacttgactgctaaattaatgtgtcataattgaatcctttaggatattgcaagggtgagtcgatatgatgatgcccagcgtgctctttcggtgcgccaccaatttcgcctgtatttttaactcagttcgaaattacgattaaaatatcgttttattttatttaattatttttatattgttttaatataataatatcaaaaattaaaaaaatattattttaatatatttttaaacaaaaaaaatattttaaaaaataatctttactacattttccaacaactctttaatttacacctaatttatagctaccaaacacgcgttttcagggagaacacctcatattttggctctattttggtagtcattaatgatagttcatgaggatgataaaaaacaaaaaagggtaaaatattcttgaatggcatattgatgcacgttagaagaattatagaatgactttgttatatataaaccatatttgctgccttgttgattgtattcaacatgttcgttccttctcctctctaaccctctgtgaacacgcttccgagaatatagtagcgatgaactgaaaaattggcaccctcaaggattggtggtcgttgcgcagtagtggttaaatcatttcaattctgtgtaggctatcgtagttttccatccaattcatcttcattaatgcctctgtttaacctttacagcagttcctggaaacg

SEQ ID NO: 57768 - DNA, 914 bp, Populus trichocarpa
  Intron number 1 from transcript POPTR_0001s30910.1 (locus POPTR_0001s30910) derived from phytozome v7.0 (chr-ID scaf fold_1; pos 29326505 to 29327418)
tggacactctagacttggaagtgctcaacggtaaccatatgaatcttaattttagttcttgttttaatctttacaacaagtagagataataatttaatcagatttccacggataatattcacctgaccgtatagataattatttattggatagttattaataaataaagtatgaatattcttaaattcaatccgaaacttgtttaattctatcttaaaatatataaatatatatatgttttatttcaatatatatataatttttattttgtattaaatgataaataataatcaaataattaatacttatatggatactcaaaacctaataaataatttataattaaatatttaaatttcttacatgatggatagtaaatataatatatctagaaatattactcgtgggtttccattaccatccctaacgacaagtcccttcctcgttggatattaatatgtagaaaaaagatgtatcctttattggttaaaaaaatagacaagctaatctatgtacaatattagaatacatttaacatgatttatgaaaaacatttttttagccttgagtttaattttaaaagttatttttttataaataatttatgaaaaaaaattaaacttactttaagttaaaaatatacttcataacagttatgattcaaaatatttgttttaaaaaagagatattgtatagttaaatttcataaattaaaagttaaaattaaattttgatttaatccggttgggggaggaaaaggtggtgcagtttggcttttaattttgtaacattcatcttctttttttaattttgagtgacgagatctcgtccgttgttttttttttttgctgtagtgaatgttattactaattgtttacgtgcacttaattctaaaggtcctgggctattaatcg

SEQ ID NO: 57769 - DNA, 784 bp, Populus trichocarpa
  Intron number 5 from transcript POPTR_0010s03250.1 (locus POPTR_0010s03250) derived from phytozome v7.0 (chr-ID scaf fold_10; pos 3991044 to 3991827 reverse strand)
caggttttgaggttttctcttttgagttttttccttttccctttccttctttcctaactcttcaggcagttattaaaattggtgttaatgtggcatatggttcaaataatagagctccatgcaatgaatataaacattttaaagtggttgaaaaacacaggaacattgatgttgacaaaatatttgtttggaaatgatatggacaaatgcttgtgtttaattagaaccattaagtgcttcattttctcctagacatcagcattattactgtttatcccatttttttttaaaaaccatcattgcttgattcacacaaatgctagtcaggacatcctttggagtccctgtagatgctttcatcgatactccaatagcaatgattttgttatatgcttttacttgaatgagtgcttgaatcagggtgtaacatgattttttaaatcaaatgatgaaatatcacaatctccgcataggttttatttgcaatctcttccaaataagttttagtcaactaggtaattgtgttttggtccaaactttaaggtcttggaggaacagatggtgctagccaactggttgtctaaccttgatggcatgaacatgtacttttgggagtaactgtttctttatactgtacatgtatgttacgggtaaattgatagcctaccttcaatagttaggtatgaccctttaagtctggcagtgctggtgcttaactgagttaggtttcttttttctttttttctttttagagctttgtaggttcttaaattctgcagaagaa

SEQ ID NO: 57770 - DNA, 906 bp, Populus trichocarpa
  Intron number 1 from transcript POPTR_0001s41530.1 (locus POPTR_0001s41530) derived from phytozome v7.0 (chr-ID scaf fold_1; pos 41144482 to 41145387 reverse strand)
ccaaggtgtggttttatgtttttcaaatctcctctatgaaatgaagggttttccaatgctgatggcataatgtactaatcaaggaaatggtattgacataagattatgattagggtctccttagttatagtcaacaaatatttgaattcgagctcttttcttttcccagcttcactgttcgaattttaggcgtcagcatgtgttttaatgatttttaattagacaaatggtgttgatgtactactggttaggaataaggtaactgctgtggcagctgatagtagtggaattggttctgattgggactgctacacggagataattagtctatagttctggtgaaaaattaattagtaatctaggaagaattgcaataaaaaattttgaagactgcagaatcaagtttggttttccgagtattttataagaaaataggagccttagggtttcttcttacgtgtaatgcaaaaatctcctaagcatcatcaaccaatatatatggcctttgttcatttgaatgctgggcataattcaaagtcttgctttatgtgtttccatttatgaaaaagttcactccatggatagaggaatctgattcccagaagcaatttttgttggaataaattgatgtctatttttctttgtccttgttatttttaattgcaattgactggcaatagtagataacctggtatgataatcctgtctatgcattgcagttttactgcaagaaactaatttatttaccctctttgtatccataattatgcaattttttgcctttgtcacttcttctttccttacacaccgattagactatctaccttatggatcaaataggggaaattataatccccttttctgtagtgctttctaaaatggctttttggttatgtaggatctggc

SEQ ID NO: 57771 - DNA, 631 bp, Populus trichocarpa
  Intron number 1 from transcript POPTR_0001s35390.1 (locus POPTR_0001s35390) derived from phytozome v7.0 (chr-ID scaf fold_1; pos 33735913 to 33736543)
ctgtctctgcattgccttctctcttctttaatcaggtgtatactctttccctttctttttcttgactgttttggtcccttaattcatgttgtgttatgttattttgctttttaaagaaacaacttaactttacttgaactagccaatttgcttctgttggtgtcaaacatctggcttcttgatttttgccatctgggttcttgagcaaattgcttaggacggtttttgattgaagaaaacaatgtaaagttcttgtcttttttcttttccttttattttcttaatgggatttaggtatcttactgcttacaagggttgattttgacattcatttgactgtggataacggtaaaatatcttcattcacgggctacctttattgtatcttgtttttcccgttatatttggagtttctttaattgtaattttctgcggagattgtgtgaatcaattgtgttattttcttgtttgaatttgcaatactatgttgtttttgtctttgtagcacctgtaatagcatagcatagcatattttagatataaaagcaatttaattccaagattctgtcgattaatggcttgcttaccattcatagctacatctcagaacattgctgttgtcgagatattc

SEQ ID NO: 57772 - DNA, 781 bp, Populus trichocarpa
  Intron number 1 from transcript POPTR_0001s44650.1 (locus POPTR_0001s44650) derived from phytozome v7.0 (chr-ID scaf fold_1; pos 45100719 to 45101499)
ctcgaattctgactgtttgcagtgtcttcttacaggtgtagatccttacatttttttttttttttgcattatgtcttaattaaaaccattttcctagtgaattttatgttgcccctcacatttagacagattttgtcagttttatgtaagaattcccagttcttgcaaatattttgtcttaaaattgccttactttttaatttgtagtcttgatttcataagattaatttgtgtgataaaaaaacagatagaacttgtatatctgatttaatcttatgctatacatggatcatcttctctttcaatttctctcttagtcttacaattttgatttatgttttgtactgaaaaaggggcaaaacttatatttatgatttgattttgaaaatcctcaatttaatccttaacacatcacttcattatcatttgagttacaaaacttttgattttatgcaatgtcatcctttcatccatatattattagtgaggaagttaaaagatttcgttcataaatgtaaattaaatgtttttatccagagcattaaaacaagtcctaattttccctagaagacaatttcttcaaccttaaatcataatagattctgacctaattgactagtttgtataaaaggagaagtgggaaaatcttgtttccacagtaatttcttttttagagtaaattaaagcttaatactgtcgcatatttgggactaacatcattttcttttgttgatggtcactcacagattattcctagcggagacgaaccattgggtttgca

SEQ ID NO: 57773 - DNA, 700 bp, Populus trichocarpa
  Intron number 1 from transcript POPTR_0001s43060.1 (locus POPTR_0001s43060) derived from phytozome v7.0 (chr-ID scaf fold_1; pos 43138240 to 43138939)
tgaaaggggttcttgataagagccaatatttacaggtttgtgtcgtttcttttttgtttcttttttggattttttttctggcgtttttttggcaaacgttttgattcttgtaactgtattgtttgttcatttctcagcttaatccttgtggttttattgccgtgttttatgttttacgagatgggttattgatgttttatgaaatgggtgagtagcgattgaaacccagatttggttttgttgaaaattgggattttttggtttattttttgttttatttaatgggtttttcggttttgtgataatgggtggattggaatggtaattgtagcaaggttttgttttttttggtgcttgaattttttaatctagagtagaataattgaatttgtgaatagaaaatttcagtgtttgtgaagaaaaatgaaatatagctgttaatctcatgtcgaattgttaagtaatttttctggcttttatttttaatttagttaagaacagttgatctattgttccagttatttaatctatgtagaactgaaagaagatttcttttgctgctctgttcttgttgcagtcctgatttaatggttgtattgtaggtagctcttgtttttggatttgtgttaagaccataattgttgattttgttgaatttactgcaggcaacattttgtaatataaagatattcttgctgaa

SEQ ID NO: 57774 - DNA, 508 bp, Populus trichocarpa
  Intron number 2 from transcript POPTR_0001s43060.1 (locus POPTR_0001s43060) derived from phytozome v7.0 (chr-ID scaf fold_1; pos 43139801 to 43140308)
cccaacagcagcagaatcagcaacaatagagattaggtatgccttcttttgatgtctggattaatggattttgaaggtctacttacttttcaatctcttaggcctggagatttatgtgaagttgacgggcttgtgtttatttaattagattaatggaatggatttatttacagcaatatttctttttctatttctttcatttagtaatattgtcagcagctgttactttcaatattctgatattctgtttgtttagttttgacttctgtttagactttactacttgggtaactggatttgagtttatagtttcttcgagaacagaattgttgagaacatgaacttagtcagagtttttgtgtttctattctgatgtacattgatcattcggatgtgtgcttaattagaaagtcaaatttaggtgcagtgagcagtaaaaatttcattttatacctggtgaagttagctagttataactggttttcactaatgaccctttcagtttggc

SEQ ID NO: 57775 - DNA, 432 bp, Populus trichocarpa
  Intron number 1 from transcript POPTR_0002s10530.1 (locus POPTR_0002s10530) derived from phytozome v7.0 (chr-ID scaf fold_2; pos 7618140 to 7618571 reverse strand)
ctcgcagcgaggcgacaatattgtctttcgcgattgtaagtcctctctatctctctgttatccctgatattctttaccgatctgatccttttacttgacaggcagatctcaattatttctggtaatcaattgatctaatctaatctaagacagctcaaaatctccctgcattcagtcttctagtgccatgtgtttctattccatttgatttaaattgaattcaattgttcaataggtataattagtggtgttaatataattatcgaacagacctactagggtttttagtgtttgaattgttatttgtaatgataaaatctgttttattttactgaatgagagagagagagagagattataggattctattgattgattatgatttcgtcaattgaagatcgcggtgaagttccaaaaggaagtgcagaaata

SEQ ID NO: 57776 - DNA, 783 bp, Populus trichocarpa
  Intron number 1 from transcript POPTR_0515s00210.1 (locus POPTR_0515s00210) derived from phytozome v7.0 (chr-ID scaf fold_515; pos 837 to 1619)
aaggtaaagtttgacaccatttttaaaattacagttaggactctgctgggttcgggttattgttgaggggtatttgagttttacggctttaagcttggattcgacttcatcaagagaagatggggttttgggtctgtttcttcctgtggaagatgatttttctggggtttcattgctgacatcttggtagttttcttcttcttccgtttcttcttcttgttggccctctgtgtccgagtctgagagctccaggtcttcacggctttgagagcctcccattttcgcttctttttctcttgagacagaggaatgagagtttaggtttttttgaaagagcaccagagagggattgattagagcgccaagctctaaatttgaaattggagctgtttcaggtttggcttcttatagggatttactttgtcattttttcatgatgcttcgttgatttaaaaattacaggaactttataaatgcaagaaaaatttaaaaaaaaatctattttttttttataaaattatctttatattttaattaacgattaaaatactcttacagtatccaaattacaaaactgtgttaaaaaaactcctcgaaattcataacccaatcccaataaatctcctttcagaataattttcccaacaagtcagatcttacaaaaactaaatgagatgaaattcagtgaataaatgacagatctcgctttctttttcttgtctggaacccccctaaaaataccacctttcccacaaaccctaaaatcatcaaatttaggccctc

SEQ ID NO: 57777 - DNA, 814 bp, Populus trichocarpa
  Intron number 1 from transcript POPTR_1202s00200.1 (locus POPTR_1202s00200) derived from phytozome v7.0 (chr-ID scaf fold_1202; pos 4951 to 5764)
ggtaagtgcatagtgtgactgagacaaatatagtccaaggcaaaggtagatctaaattaacccaggagttgattactgattcaataatcttaacttctttctgaatcgtacctgaagcttgagtcaatcattacagctatatatattttacccaatccccttcatctctctatctacattgaaatatatctttttcttattgtttttgtataattcttggacctgctattattttatattgtcaacatgaccatatttattcataggtttacccattccaactaatctttttctttattacatcctcgtgtgcatataagttattacaccttgctaataatatattggtgttataccatgtccactaccagaaaattgtctgagtctatcccacaaatcatgaagtgacaagaaagaattatgaagtaataaggatgattatactcacatgtatatcaaaggaaatattgttggtgataaggactttccaagagtaacaaattcctacgtaaatgataattcaacagctaaatacagagggaaattatcaagtgtagctgtcaattattatctttttatcaaaatgatgtcttttgttttttttttacatttcttagtgtttgatgcggtcagatctattgagtttgatcaggattaatgtagattggcttgaaaaaatgttggatcatcatggctaatcataattaacgtagcccatcatttgtaattataacaacagtaaatggacctgcaatttcctgagattatactgtaattagctatctaaagtggaatttggtgccttttgtagaga

SEQ ID NO: 57778 - DNA, 643 bp, Populus trichocarpa
  Intron number 1 from transcript POPTR_0007s03510.2 (locus POPTR_0007s03510) derived from phytozome v7.0 (chr-ID scaf fold_7; pos 2015040 to 2015682)
tggtcaaaacgtgaccgttcattgcactggttttggttagctagctctttttttggacaaaaccctatttttatttacttattttgatttgcaagttaggaagtctattgctttctgtctggttactgataaaatctatgaaagtatagaggcttgggatttgagttttacaatattgtgaaagtttggttttttctatatgggtttatgagattgttatcgggtgtgccttttaattcgtggaattattagggctagatgttgtaatttagggtttctcgaggtgggttttgtgagtttgagttgagggagaaaaagttttgatttttttttttttggggggtggggggcttagtagagaagcatggagtgcgaaagagcttaatagttattgggtgtgtttattgtttggtgaaaggattgggttagatgttataatataagggttttttgagtcgtgtttgtgatttgagttcaaggaggtgaagaagttctcatttttttttgtgggttagggagataatgcttgaagagtgaaatagattgcttctgtattattgaataaagaattaaaatacaggagtgatgttggttgtttttttatgcagggaaaaatcgtgatctctcacagaagttttggagg

SEQ ID NO: 57779 - DNA, 703 bp, Populus trichocarpa
  Intron number 3 from transcript POPTR_0007s03510.2 (locus POPTR_0007s03510) derived from phytozome v7.0 (chr-ID scaf fold_7; pos 2015848 to 2016550)
cgcgttcaaaattggccaaggatctgtcataaagggtaggagcctgctatcattgtgtttgctacaaataacaatcttttcgtttactttcattcagtgaaaataagcaagggtttgactataggatcatgtgtactttttaaaagctatgttgatgaatagtagtagctatttgctttctctatttcttcccctcatgattttagtggtgatatgaacatgaaaacaattgaccctgagatggaagaaatgaagaaaattctaacaattagctgatgccagtgcttgtttccctacttcgctcttcattctgccttttcttttgtggccactaactcctcttttcttgatataggaagatttgcagattttttctggctattcttttttgttgatgaaatagtacacatgttaggtgcactgagtatatttttctaaacaagaaaattcttgcattaccagaattttactgtgtgctttactgaggaaatgaaatgcctatttcttgatagatccaactgcatgctttctttgtgtattcaatttcattacagccttgtagttttcattggttataagcatgttacgtatcaactatcaagttaatagaatcgctgctttagatggccaatttgcctctgtttgtaaatgcttaataggatatgttttgatgaacttattatcccattcaatttattgcagg

SEQ ID NO: 57780 - DNA, 343 bp, Populus trichocarpa
  Intron number 2 from transcript POPTR_0010s12150.1 (locus POPTR_0010s12150) derived from phytozome v7.0 (chr-ID scaf fold_10; pos 12224528 to 12224870)
aaagaatcaggtattaattttgcttgctttcacaatatttgtaccttttttttcctggctagttagggtacacatactatatatatggttgtgtgtaactaccagaaatgtctaacattcttgtaatcttgttggtcttctcataaaaaaaaaaacaaacaagcacagatagagagaacaggtttctttgcccattcttctcttggttgactgattgctgcctttattggttttgcagtgattcaatttcttctcttgcttgactctttgagatgtcattttctttgttctgtttcacttgttaataggtccgaggaggacagttcttggagttgatcaaaca

SEQ ID NO: 57781 - DNA, 867 bp, Populus trichocarpa
  Intron number 1 from transcript POPTR_0007s03020.1 (locus POPTR_0007s03020) derived from phytozome v7.0 (chr-ID scaf fold_7; pos 1753928 to 1754794)
tttcagctccatctccagacacgccgcctctccaggcaagctcaagctctctctctctccccacccaattagtttgttggtttacttcatttgaacagatcatttgcataattgtgtcttaatgaagtatacttggaccagatacttaatgttttgtatgaaatgattggtaaggtttctgatttagttggtctttccttgagcttttctcatttgggtttcttttgtttgttatatttgatcttaaatttagatttaatttgatctcttaagcccaagtttgttgctttgatcttaaatttagagttcttgagtgcctcggatgtggatgagcaaatgggctgtccttagtttgtcaaattggcgatcacctaatgatcttgatttgcaaaaattatttcatttcattatgcattttcatgtactgaaattgtatgtgtgtttttttcttctcaaaacttagaattaattgataccaaaatagttgtttggatactgaagataaatggtctagtgaaagaacccaagaaagtttacagttggtgtgaagcaactgccaatccgataatcgttggtggctgaacagcattattaaccttggatctatgccatagattctatgtgtttgaagtaattgtttgtggaacctatgtaactatgggtcgattgaaaaaacagggttggtgactataaaatggtctctggggaggcaacagcaaaaatgttatgaacaacccttacatagtttagaaagatgcatatttagaattccactgctcaacatgtttttaatgatgttattaagcaattgaaaggttgttcaatcatgcaggctgtttagagagacttggaggtagtttttggtct

SEQ ID NO: 57782 - DNA, 944 bp, Populus trichocarpa
  Intron number 1 from transcript POPTR_0001s34280.1 (locus POPTR_0001s34280) derived from phytozome v7.0 (chr-ID scaf fold_1; pos 32451277 to 32452220)
gtgatcgttcaaacgttgttaaggaagtttccaaggtaatttcattatagattctttcgattaatgttcttctttttctctccttatcaatcatattttttggatcttgattatagaattattaaaaaagaggttgttttatcaatcttcctttcttttatttctttcaatatttgttttagttttatttttattctggtgaattaatgacatttgacgatcttattttgcacctgttattttcctttcttttgctgtttttgtagatgataatttggtgggaaaaggatgtttgcttagcgtttaagttccccattaatctttctttgattaaaagtagattcaagaagtaataaatgtatatgaaattaagcgtatcagagctaatgagaagaggtgcattgacattttacccagtacccattacagaatctttccaaattctgtaatgttgtcttgatttcggtttttctccctcttaattggcaatagcattgcatcaatgctgtcatggattgtcgaaccacctataacttaataaccagagtggtctccatggatttaatgtagctaaaaaatcaaaattccagtttttggaggctatacagataggtgcaggtccatcataattcaactttattagctttgctatatatccatgcattgattgtgtttacacttagcaactctaactaagcaggagttgagtatatatatgtatgtatgtatataatgctactcgaagcattttttttataaattatataatacattatactgtcccttatgagagaacaagagttcagtattaatcaatgctgttacatttcaactgctggataatttttgttggaaatttagttccttttgccggaagacaaacttactttcgtttgaattccacttcaggtagcactaaattttgtgtacttggcaattggatc

SEQ ID NO: 57783 - DNA, 581 bp, Populus trichocarpa
  Intron number 3 from transcript POPTR_0002s10830.1 (locus POPTR_0002s10830) derived from phytozome v7.0 (chr-ID scaf fold_2; pos 7856951 to 7857531 reverse strand)
ctgtctttgcaattgcattggaggtatggcgtgaatatggttgtttatttgcagatctcaccatgtgccaattaattcatggttaatgatgttctcatcgaatggtacttgggtaactgattccctataaataagtcgtgtcgtgtgtttctttctttgttctttttttttgagggggggtgttgtgtgggtgtatggggcttgttacaaaaattatcaattcattcatctgccatttgctgtgtttagaagagctagctagcttgtgagcaattggatttttgcaaccttcctacatgttaacaggctgtaagaaagtttcttgtgcttaaagtaactagacaaaacagttggcagtagacatgtgatattatgttattctggtcaatggtagagggattcttcattcattggactgttataacatcaactgctgccgctattgattaagtcaaatcttttcaacttgagggaactttctattcctttgcatgaggcatttgaaacatatttaataaactgaatgttgctttaatttgactgtagcctggacctgttgggataaagttgctggcgttgaa

SEQ ID NO: 57784 - DNA, 568 bp, Populus trichocarpa
  Intron number 2 from transcript POPTR_0001s47160.1 (locus POPTR_0001s47160) derived from phytozome v7.0 (chr-ID scaf fold_1; pos 47457461 to 47458028 reverse strand)
ctcggcaaggtaattctgttattgacaatgtttttcttttttcttaatatttgaatgagaattaagctttgagtggatgctaattattgattagtatcttgtatttatgtggcatgtgtttatgctgttaggatttaattatcagtgatgatttggaaagcttatgcatgtatgagcttccagctgttcctttaacccgcttgctctatacttgaagagacaatcgggttcagggcatcggaagcatatataaatgaccggcactatgtgcttccacaagtgcaagctttcaaaatgatttagtttctagttatctggttatatgcagtttaaaactgtacattttgaattggttaataggactttaagaggtcatcttagtttttgttctcatagtttcctatacccaccctcatcccttctgtgcatgttcattataagcaagcatcagtacaatgccatcattaacaatgttttgcatgtatagctgcgttgttctgtataccatttccccctgttctcgcactaagttcaacttcaatttgtttatgttcatcagtcaagcaaa

SEQ ID NO: 57785 - DNA, 464 bp, Populus trichocarpa
  Intron number 1 from transcript POPTR_0002s14260.1 (locus POPTR_0002s14260) derived from phytozome v7.0 (chr-ID scaf fold_2; pos 10561983 to 10562446)
tctctcaggtcctgtacattttctctctcgtacatattgccatatataacaatgttagattcatcctgaaatatcgtttctcgtctttcttgaatggtatcaacaacttcacggttggtgacaatggatcctatgagtccaccccatcttgataatatttgaatagctcaatttgaatggatgttttggaatgactagtattactctacatataatgttctggtgattgaaagaggaggcaggtaggctgccctaaattcctatacaagacctatctgtcacataattttcaaagaaattaattttattattagaattttctgagaattaaatgcatgttttttggaagaaaaacaaaacttgaagtgattgcatgcatttttgtgatgtagaagctggagtatatgtacttctattattgatttatctttcaggttttttggtgtacagaggaagtgcattga

SEQ ID NO: 57786 - DNA, 692 bp, Populus trichocarpa
  Intron number 1 from transcript POPTR_0010s24050.2 (locus POPTR_0010s24050) derived from phytozome v7.0 (chr-ID scaf fold_10; pos 20440526 to 20441217 reverse strand)
tgacgctactgttggttctgattataaagttacaggttgcttacaattattaatccataaaagtaacagcacactctgtttttgctttatcctcattaaaaagattctctcttttggtttatttgttagtgtttttttaatgagtgattatgtaatttgattggttaattggggttatttcattgcattgattttttttatatgaactatggatttgcaaaatattttttcaaaaagacagtttgatttgtaatatcattacaaaaaaaagaaggtgctctatctattggttgggaatacactaatcatttccttttcattttttctttaaaatttgccagctttgttgtattatggatgctgcttttcagtcaatttttttaattttgattttttttttgttttataatctttctattcggtgcaaattacgatgaagccaagtatagatgttaacctttttttcagttttgctaaagtgatcacacaatcttctttatattgtgcaatggccttttctgatatttctatctagggcaaatacatgtacgtttgtgcacaatcatgcttgattatgcgctttcaattcattgatgatgttgtcgtttgttactggagtatgcgcacgcatgcatgtgtttgcgtttggatgggcagaatctaaaatgaggatgctgcaggggtgctggcgg

SEQ ID NO: 57787 - DNA, 314 bp, Populus trichocarpa
  Intron number 2 from transcript POPTR_0010s04410.1 (locus POPTR_0010s04410) derived from phytozome v7.0 (chr-ID scaf fold_10; pos 5511646 to 5511959)
actccgttgcacaataccagccaaaggtataaagaatcatttacttgtaactttcatttattttttgttttgtttttgccatgaatattttcttgttatgcggttatgttaataaggtttgtgattgatgtgtttattgatatgtataatgagctgttatggtcattgtgctatctaaaaatagcttagctgccttttgtgttctcttttattgatatttagtttctcttttcaatcattagacacatgttgcttaggtatttattttgaatgccttcttgtcattcaatactcaggctaaaggtcttttctag

SEQ ID NO: 57788 - DNA, 952 bp, Populus trichocarpa
  Intron number 3 from transcript POPTR_0002s20240.1 (locus POPTR_0002s20240) derived from phytozome v7.0 (chr-ID scaf fold_2; pos 16189140 to 16190091)
aggtcagcgcctttgcatcttactttctgtttcttcaataaaaagaggggaaggaaaaggaagctatggcatttctttatttgatgtgaacaatagttaaattattatcctctgggaaaaaaggtgcgatggggctttgactctactctcatcttgtgaattgtgatttaggatttccacatctggttcaacagagggttaaattgtaggatttgaagaggcttgattgtttgagatattcaataaatttggtaaccaaaaccatagtgtttaaccgatgtaatgttgtgttttgcatgctaatggtgaataaaattgaaatttctgatggaggttgttccttggaaatttttgtgttatgctcaccctgtatctgttattttgtaaattgtaaccttgagatttctccctcaattggtgcttattcttggtctgacctaagtaaataaactaagtttttcatgtttttgttcacacaattaaaatttaaccaaaggcttcctctgctctgaaatctaactgacatatcatttgagatatctaaacggaagggacttagacgtttattctctttcaccattcaagtatgtctgatatgtggctgcaatctggtttttagtcatatttaaaattgaatacatagcataccaaatgatcctgcacttcagggtacggttcattgtatgtgtgaactacacatataggtacacaccactggtgagaattcaaaacacttcctttctatattggttttgatgctcccaaagaatgttcttaacactcatcctgtaaccaagtgaaggaacagaaacaagatggaagttgggtgatcattgaaagcactgcaaattagacttgctttgattatcgaatactgaatgccctaaaaattctggcttgtgtgatgcacgttccaggttattgccaatagagcagctgagatccttgggca

SEQ ID NO: 57789 - DNA, 585 bp, Populus trichocarpa
  Intron number 1 from transcript POPTR_0010s23290.1 (locus POPTR_0010s23290) derived from phytozome v7.0 (chr-ID scaf fold_10; pos 19894277 to 19894861 reverse strand)
taagtaatatacaagcaagcatttaagtttcttctcttttttattgtaaatgtctgaatagtgatgtgttatgtgtccttttattggattttggattgattgatgagaaaattgaggaaaaaagaagaaaggtgaaatcttgagtgtcattgtttgtggttgtgatttagtttataaagttatattatttggttttgaattggctgttgagaaataaagggaggatatgcttatatatttaggtgtgaagttctgttatttgtgtccttttgttgctagaattcggaggaagtaaacccatgcctacattgcaaagattgaactttgggctttctgggctgtgctagtgtttgatgatttaattgtaattggttattgtgaattatttaggaacatggtggttttagtgaatgatttatcttttgttggctcaactttagcttcctgttggtttccttgataatggatgaaaagaagactgaggatttggttcttttttcattttttatggaaggataattcaactttagcaactagttattttgggttcaattcagtgaaattgtttgatttttgcatcgtcag

SEQ ID NO: 57790 - DNA, 1025 bp, Populus trichocarpa
  Intron number 1 from transcript POPTR_0001s10970.1 (locus POPTR_0001s10970) derived from phytozome v7.0 (chr-ID scaf fold_1; pos 8502761 to 8503785)
atagacttcttgctgctgctgctggtggtggtcaggcttcctcttcttttgttggtggccttcgcttgtctgataatcctatcgtactcacatgtcggtcccgtaatttgttttctttttttctttttgaactttggtgttgtgtacgtgaatgaatgaagattatttgatgctaaagttgctttctttgaatgaatgaaatggtgaaaaagttgtaaatttttagttttgttgtggtggtgttagaaattatttgacttttttcttaccttctcagattgaaaagtttgttgttttgtgtacggtggtgaatgcagagagggagtttctgttgggttttcttttctgtgtttaatttttttttggtcatatttggtgcttttgatcggtcaatttgagcttttctttggtctgcttattgtataacttattgtcttgttgattgtattgagggattgaaatttcattggtgtctgaatttgagctaaaactttctcaaagcatgtgttcatcacagatattggaactctggaagcgtgcttgtataaaagccaagactcgagcaatgaaaatgaaacatgaacatgatctccagtgttctgggagatgagaaaaccaaaatccaagaaggaaaagtggtgcaattgatttttgtctgttttaatggtcttaattttgtcttctctcaaatgaatggtatcagtcgatacctgaactcagtactgccttaaatctggagactttgttcaagtttggtgttctttctcattatctttttggcaaaatttatatcctttgaagtttgaggtcacacagaggattttgcaagtctaagtaggctgctcttgctctttcaccagttaactgtatcatttaatttctcgcagtttgtcttctatatacactattgcagctcatcgaccactatcaggatggcgaatcatttgtttttttttcttcactgctgacttggaaattttcttaatgcaggtaatccaaattcggtaactgaaagcaaaggggaa

SEQ ID NO: 57791 - DNA, 662 bp, Populus trichocarpa
  Intron number 2 from transcript POPTR_0010s23030.1 (locus POPTR_0010s23030) derived from phytozome v7.0 (chr-ID scaf fold_10; pos 19733431 to 19734092 reverse strand)
gttcacatatcgtcaaggtcttcttaactttaaaggtatgcccctataatcattactttggttgattcttagtttttcttataatcaaacaaatgggattatcaagcattttcgaaaagttttaattgtggggggtttaaatctattattgattgttgaaatttgcagtctttcattggcagaatttcgatagtctagctcaaaattcaattttatttttttaaaaaaaaaaacttggctcaatacccctgtagcatgatggttaagggtttgcttcgaattatgttaattaggcaagtgttttaggcttgatttctggttgtgctaggtgcaaacaattccatgtttggacaaagactccaaactttgattcgttttttactctatgcatgccaccgtgacggtttgcatgtctcagaaagatctgccaggtcaaatggtctgtcttctgtctacctctgatatcatataaaaattgttgagtatgcaagaataacgattcaacagttgggtcaaaaagatgtagggattttgactagtatattcacttatagaggaatgtgcattccagatagcgggttattgtttgtgtgtgtgtatgtttgttgtttgtgaatttcttctttttatggacatgtatatggatacaattcaggttgaaa

SEQ ID NO: 57792 - DNA, 983 bp, Populus trichocarpa
  Intron number 2 from transcript POPTR_0007s02260.1 (locus POPTR_0007s02260) derived from phytozome v7.0 (chr-ID scaf fold_7; pos 1344919 to 1345901)
ggtcagttcaatcaagctatcataggctgcaggtcatatcacttgtcataataattcgtggttttcttttattcgacgattaatgatatttttataccgattttcagaaaacttagtcaaacaaaactaagtttcgcttctttaatacattcagaaaaatttaataaaatcttctggacattaaccacaagatttgaattcaaaaagttaaaccaggataattttgccaagtcattcatttgtttcttctcaatttctttcatcttgtaatgacctccgttatatattttctcaaatcacaaatctaatctttgtaactgatctcttggcccaacaggactttcttggttcgaattaatcgcaggtgaggagtatatctccccacttcttcatgcttgattccgtaattccaactagtccttactataatatctctaaatttgtttaccttctctgcaggcgtgctgcagactgtattcctgttcattggtaataactccccttattattattttttttttttgaagttgtgatactgcatcatattttattagcatatacgaatgataattcctaaatgtctactcatgccaagttcttccttagcagcactcttggggttgcctaatgtctgagacataccttttggttaagagtatgttcttatgaaacttgattgaacctgagtcctctcattttggtctacattttatatgatttttcaactcggaaaaataatcctaacgcctaacctaacccatgctgagtatttatcaatctctgatatatattaataagaaagaataacaattcctctcttcatttttttttcctctcaaatttcacacacagcactacttcaggggacaaaatttatctttgggagtccatttgtgattgcattcttgatctataaatggcgacgaagacatctatcagcatatgacacagttgaggaattcctacagactcataacaatctt

SEQ ID NO: 57793 - DNA, 617 bp, Populus trichocarpa
  Intron number 1 from transcript POPTR_0001s09410.1 (locus POPTR_0001s09410) derived from phytozome v7.0 (chr-ID scaf fold_1; pos 7178064 to 7178680 reverse strand)
gctgttgattcttcgcgatctcatgttcgcttccgcctctaacaatctctctcaagttcgagctttcattactcacattttgaccgtagcactccttttgcttctaattagggtctaatgtcgatctggtggcgaattcgcgtatttttggtcatatatggaagtgcatttgtgatttctgtgtttgaaatgaagaattttttttgctcttgttagggtttttgcaattttttttaaaaaattattgaattcataaggtagctaacgatgtagaagtaaattgtagttaacgaattttcgctgcatctgtttttctggccgaggttaattagaataggctattaaacttgattaagctaaataatactgtttagttgattttggagtgatttttattccttttttcttttttctttgtttttggtaaagtgtagggaaagaaaagaatctaaagccagcgtttttagctttttgtgacaaactctctcatttttcttgacctgagtttaaagtagataaaatctttacaattagagttgctaaggtgtggaaattaatattttgaacatttattttgtgcagttccataattaatacgtagaagcaaataattctag

SEQ ID NO: 57794 - DNA, 838 bp, Populus trichocarpa
  Intron number 1 from transcript POPTR_0001s11550.1 (locus POPTR_0001s11550) derived from phytozome v7.0 (chr-ID scaf fold_1; pos 8981306 to 8982143 reverse strand)
tcatctgcctcggagcttgggcaacgcattttgaagtaagtcaatcaccaccgatgctctcttttttatggtttgcatttttcctttctattttggataatttttagtataatttgatgaaatttatgtttgctatgaggatttattttggacgactacatttattgcgagctgtaaccagtctaaattagatgtttgttacttccaagagttatcctttcttttttctcatgtgtaacgccagtgtcaggtgctcctgattgcttcacatatatactttatattactagggaaagagtttctataatttttctaatcacatagatttcctctcatgataaaatgagcatgcagtttcttttatgcatacatgccaggtaaaattcaatgagagaagatcttgccattgaacaatgagcatctcttgacagtaggttctgctcccttgcttttcttgtcatggccattttgtagatctttaatggtatggtgattagcgaggcacactggtaaagggtgggccaatcacagtactatgccactgttgtgtgatctataattttcttcatatggatgatggttttcctcacatccaatgtgggtttgtgcaatcaaaatataattttgtgtctttttattacttgtagattttcctgcttttgcttttttgttggcgtcctccattcctttattagtgttaacttcttttatgtttctttgcagcatttttcttgattttgatgatggtcttcttattttcctgatattcttcaatttataagttcatccagcttcatgttattgttatgccctacttatactttttttttccctcagg

SEQ ID NO: 57795 - DNA, 690 bp, Populus trichocarpa
  Intron number 1 from transcript POPTR_0007s02150.1 (locus POPTR_0007s02150) derived from phytozome v7.0 (chr-ID scaf fold_7; pos 1276312 to 1277001)
tagtcctattgctaattggaagatctctagtcctggtgagatgattttttcttttgtttttggtgcttggttggttcaaatatagatttttcttgcttgatctggtttttggatgtttggaagttcaattttttaatggttcaagtgcttaatttgaatttaaactattgagctttttggcattatgtttgaatttcaaattactgaatgttttagttctgtagttcatctatgaaatgatgaatcgggctctttgagatttgatctagggagttttttcctggatcgcagtggttcatgaatctgtttttgatggttcgtgatcttcaattcataagaaagttttagttttgaggtttgatgtgatcgttttgattctttgttttgaacatttggtctatcttgctgcaaatttgaagatttatgatctgctcggcaatcgcctgatttaagaaaccaatacttgtggtacatttagcttttgccttctcttaccacaagtacaaaacatagtatatgcactctacaataagaattatctgatgttttcagggccagaaattatgtacaatgctctgatttgttgtctgtctaattgatttgatgataacctgaacttgattctattgatcagtcatttgattaactctctgcttccttattttacccatacaggtgaccaccctgaag

SEQ ID NO: 57796 - DNA, 995 bp, Populus trichocarpa
  Intron number 1 from transcript POPTR_0001s47670.1 (locus POPTR_0001s47670) derived from phytozome v7.0 (chr-ID scaf fold_1; pos 47818758 to 47819752 reverse strand)
tatcatcatcttagcctgactccttaatcaatcaggtaatcatttttaatcattctctctccttctctctctatctcctttttttttttttttgtatctctcaaattttgaaattctttttattattattattattgttattattgtatgtctgacatgtatatcttccctgccattttaagatactgaccttcagcttcataatttaaatcacctttttagtctaaatcttggactttattttgtggggtgttttttttatcttcagaatctttcttattttgcgttctttgggtaatatcaaatgccttattattgttagatcttgatgggaaatatttatgcttggatgttatgtgtttctaagtttgtgaagttttatccctttcattttattggtttcctcaataaaacatcatcaaattaagaacgtcgtcttttatcatccatttgtaatattatagaaatggttgctactttttgacagctaacaaaaatggaaaccagtttgatcatcatcactgcccatttgtccattttgttcatctttttcccttcttctggtaaatgcttagttggaattggaaatcaggctgagttgggttcaatttgaataagttactggcaaagttgttactttattgccgaatctctttttgataactgaaaatacattgtttggatgcaatttttgtttttgtgttgctttccagttattgtatactaacctcaagtatgttgcagtttgttgagtgaaagtgttggttttgtagcttgagtaaaacaagaactcagttcaaaagggcaaccttttgtcgacctttttttctacttacatgtcctttgcaactaaatttatggggttttgttttctggcatgtttgtgatttgtgattctttgaactcctggaactgtattttattgagccatgtagtaatatgtttgcttaaacctttcaggaacttagccgtccccaacgccttggctgatagct

SEQ ID NO: 57797 - DNA, 921 bp, Populus trichocarpa
  Intron number 1 from transcript POPTR_0001s32990.1 (locus POPTR_0001s32990) derived from phytozome v7.0 (chr-ID scaf fold_1; pos 31234903 to 31235823 reverse strand)
ttcctcttcaagacccttcttccctccccgcacgtgtgagaaacttttccttttcataaatagctttaattattatgtcattatatcattaattgtcttggatttccttactagctacttctgcttatttggacaacttgatgttgtcttgctcaaggtaatctgagaggtaagattttgctagtggtaagtttctcttcgtttagtaatttaattaaattttaaatattgtttttggactcattttgtttgactgtgatctagctagaacaattaggtaagattttctttgttgaaagggaaagatcaattgttcaataagagtatttatgtatcccaattaattgtttctcaaagacatgagttcatgcagagcatagaaaaactttgactggtatgtaaccaattaacttcgaagagctgctttatgtatctactttagaagcagagcaaatgccatgatttgggggattttgcatcggacagctttgactgaactctcagaactgatctgtttcacttattccagaacacatagaatttaatgattatgttcttcattaccttgcaagttaactgcttgtctgcggtttgctatgggagaaattcaatcgaaatttggaaattgaaatctgtttctaccagcttccaattttaatttgcaattttttcttttgtgatttgcaagacacatgtatttcctttattgttcttgctttggtttgagctcgtcacatattggacaaatcgttgttgctaaatgcttgatattgattagaaaatttgaccacattgtatcacttataagttgcctcttaattcatgatttgataagtttttcgagattattagttgatcgacgactccaaatgatcttatgccataggtcattgatccaaggagacttagattccttttcca

SEQ ID NO: 57798 - DNA, 751 bp, Populus trichocarpa
  Intron number 1 from transcript POPTR_0010s25880.1 (locus POPTR_0010s25880) derived from phytozome v7.0 (chr-ID scaf fold_10; pos 21342632 to 21343382 reverse strand)
acattctctcctttcctcaggtagttttttctttgcactcagagacaaagtgctttattcttgtttatatgaatcttttttgtattttggctttgattttatagtttttgcaaggttaaatgaaatagttaatgttgaattttatgttagagagtttgatgatttctatcgtccaagtggatttggaaagctaggatttttactcttgagattgaaaagaaattagcttaagaaaagcttgaatttttcgaagatgttgtggaacagagaacaactttgctcttcaccttgaggtttgtgatatgttgaggtgatatttggtggtaaggaagttgtggaaactgagttgaagagctgctaaggccagtttgaacttgagaattttacaatttcttatactactaactagaaatacgcaatcctgtcaaatatacttttgttttgttgttttaatgttgtatcattcattgatcataataagttgttaaaggctgttagggaatctgggggatgaaaccaatggtcagtttctccaattaatgtagataacaatgagatagcatgggttttgggatgtctgttttctttgatcagagttgtgttcgcatgcctatatgatgttttggaaccttttcttttctatgagttagacaataactggatgtatcaaatggctacttcggctaagtactgatggcttatctcgtgttatgaaggataacatagagcaaagtgaaagtagtgaaaagga

SEQ ID NO: 57799 - DNA, 846 bp, Populus trichocarpa
  Intron number 1 from transcript POPTR_0001s07930.1 (locus POPTR_0001s07930) derived from phytozome v7.0 (chr-ID scaf fold_1; pos 6012701 to 6013546)
gcttctctacaaggttagtttctagtcaattttgttgaaaaagttacagctttgttgaagaacaaatattgggtctctatatttctctcttggtatttatgttgtgtgttattgtgctttacatatcctgtttctcttctaagaattgagtgaagggtaactcatatgttagatgtagaagagataaaatctagttttgcttgcaaaattatggcttctgcatcctggattagcgtgactggccgattgtgtctttgtgatctttttttatgctgataaaacggaggaaaagcaatgaaagtaagcgttcacttattcgatctgttgattgacatgtcaaacaaaaaaacaaaaaactgaaagaattaatgctacgattaggccaaaaaaaatattgagttagtcagtttggcaccaaagtcttatggagagaagtgatcagttaaaagatcactcatctggttcatcttttattaaatatgcatcttgattttgactgtactcttttggcaatcggacatttatgaccaaagaattgaacttaaaatagagaaattgaaagctttcttgaacatctaacaagatattccattatacacaattcagtgggattttcttagatgattgtttttccatggaccaagtgaatcgataagccatactttaacttttcttttcccacatcttctcaccaaacaaacgcgccactagattcggctgtctatgttgtatacctagttgtcaagatctatggtgtagagcattcttaatagatggtaatgtttcaagcatttttgtgtcaattttgactaatcaggtatttctttgttttgtagttttagagct

SEQ ID NO: 57800 - DNA, 646 bp, Populus trichocarpa
  Intron number 1 from transcript POPTR_0001s38230.1 (locus POPTR_0001s38230) derived from phytozome v7.0 (chr-ID scaf fold_1; pos 37311237 to 37311882 reverse strand)
aggtatgctatcttttctgtcattgtcaatattttttcttttgttttatttcttgatgtgggttgtatttaaagttggaaatacaaagtgggctggttttatctctggatttatgtgcttgatttttctgggtttcaattagtgccttgattttttatgtttttttacaatatatgatgttgtgttgttctgtactgttatctaatgccattagtgtttaattttaactaattatatttaatctaatttttcacatgtctggacttcttttttttcaagtaaaatttttgcggatttggggaggttgaggttctctttcgttctatataaacaatcaaagcatgtcgcataaattgataagagcttacattttgatgtcattcaaattttttttgtctactgaattaaaatcttgggatactattttactgatccaagtgtgtgttgcattgggattgatcatgttttggaactctaggcttcagatggatattctaggctgcaaagaagacagactaatccccacgttccccgggcttttttttttttattccttttagcagatgaattgaacgtataaaaccttttccttttatggtattttgagtaatgttttgttctgtacccacttttcaaggtcacggag

SEQ ID NO: 57801 - DNA, 448 bp, Populus trichocarpa
  Intron number 1 from transcript POPTR_0002s04720.1 (locus POPTR_0002s04720) derived from phytozome v7.0 (chr-ID scaf fold_2; pos 2967244 to 2967691)
agctccctctcctctcaagattcaaatctcctcaggtctcccagtctccctctctttctggtttccattttgtttgttttaacttttcgaactggatttctgggcctttattattttctttctcttactgttctttgcttaaattattttcaattctgttaagatttaagagttttcttagtgggttttgtctagatcgtatttcacgtctcaattctctcgtctttccaagaatcttaggacagatctctttctttctctcccacaattacaagtaccagtcagttgttttcatcatatgggggggctttcctttcttttttgtctaattttatacataatttcaaactacattttgatgacagtgttgtagggaagcatattctttttgttttgtttaattattattaatttgagaatttgaatttttgaaaagaaaaggtgaaag

SEQ ID NO: 57802 - DNA, 1034 bp, Populus trichocarpa
  Intron number 2 from transcript POPTR_0002s04720.1 (locus POPTR_0002s04720) derived from phytozome v7.0 (chr-ID scaf fold_2; pos 2967774 to 2968807)
ggccggtctctaggtcttctcgtgctggcattcaggtaacacagtcccaataaattaagatttacctgttcgttcattattgttgatttgaatgaggttggccttaatttgaacattatctcttgataatttattcacacatcccacaattattttttaggatgatataattaactgtagttgtcatgttgctcgcaaaaagtgcccatattttgaggatgtgggtcttctcgtgattaaatagaatccccattcgatgcatgtaaattacttgcacacacattttggagatataataaattttgtagctgtagttatagttattttggtggagattgaaggttataacaggtgttgtagccagtagcatttgagtcggctgatgcaaggcaaaggaaattgaacaaagtggttgggcggggaagagagtgccctgttgggcaaacagatacaatacagtatgtttggttcgcaaaattatgtttttcataaattgattttggtttgaaaactcaaaccaaaccggacaaaccctttacacactatagggagtgcggggggtattcacagttagacaagtggttgttcactagggagagtttctaaggacgcgtgatctagaaggattgtagcctgccaaatgcctttttttctcttctttttggttgatggtacagagattttcaagggaaggtaggagtttatgaaatgaaacatttgatcttaaagatccttaagcttgccatttgtgttgatttaggttttagtgtttcagttgagcttatcagaagaatagcagtgtctatcttggggttgctgtagagcttttcatttggtcattccttgggtttatagaataaaacatgggttacggcagggcatgcgttctgtttaagaagtttctttctttcatggtggcattgttccatactcttatgatttattgatggttgggtttatctgacatgatctttttatgtcaacgatggctgagtatagttccctgtcggtcgtatccaccggcatttgaagca

SEQ ID NO: 57803 - DNA, 678 bp, Populus trichocarpa
  Intron number 1 from transcript POPTR_0001s44610.1 (locus POPTR_0001s44610) derived from phytozome v7.0 (chr-ID scaf fold_1; pos 45077615 to 45078292)
agactgattttgagttttggaagactttattccctgtaagtttttatttctgggttttgtttggtttgatagaaaggtgagagaattgatgggaaagtgaggtttttgtttggtttgtcagaaaaaaaaaatgatggaaaacatgggaaagtgatgtttttagtttggtttgggtattaagaaaatttccctttgtatgattgctgaggaaagttgagagattagtgaagggaaattatgatggcttgttattcgtgcttttatgttgttttttttttttaatttatttattctgataaatgaaaatagcccttgtttgattgctgatagagctgagaaagtaaagtttcaaatcgcctgttttaattttactggtttcaaatggatacaaattaagaatgcacttcaggtcaggatgatatttgaatttggttcaatttatggtggcttttgatgctagaattcaaattagggaaatttccaaggtctggaattcttttagcaatttatactagatttttgtttttccaaatttcttgtcttcaaaacaaaatttgatgttcgttggatttgtaatctggttatgatatgctttcatttttttcttttttttttgcaactctgtgtttactaataattattttctctttaaggttgctgtggcacatacaattgggc

SEQ ID NO: 57804 - DNA, 679 bp, Populus trichocarpa
  Intron number 1 from transcript POPTR_0010s21580.3 (locus POPTR_0010s21580) derived from phytozome v7.0 (chr-ID scaf fold_10; pos 18802975 to 18803653)
gcgcctctgcagatcgctctctgcctctcttcccggtacgtcttagataattcatggatttccaccaatcttttctttgatttgatctttataatatggcattgtcctttattttgtttttctcatcgtagctcaacagacttgagtattgcttctgtttgtgtgtgtgtgtttccctttaaagattccttccggatcgattcttgtgtagtcatgtggtttaggcggatctcatcagctctgtttgttctgttggtgatagaaaatgagaagggaaatattgaagcctggtttcttgtatcaactccttatatgccatccaaggctaacaaaagagcagttttgattaaacttgatttcttttatgttttcttttggttttttgtgatcagctttctctaaaattcgaatttaatatttttttttggttttctccagcttgttatatagcctgttctgtgtttccaatttattttctgttttctttttcttttgaaagtttgcaaataggtagaattgagatttgggtttagttaccttgtcctaaaatggctgtgattgaagagtagaaaacaaagttttgtaattgctttctgtaacacattttgtaatgtgcatttcaaaatctttaggcagtcattgactttgtccttgttaaatttgtgtagcagcagtaaca

SEQ ID NO: 57805 - DNA, 294 bp, Populus trichocarpa
  Intron number 3 from transcript POPTR_0010s14790.1 (locus POPTR_0010s14790) derived from phytozome v7.0 (chr-ID scaf fold_10; pos 14273725 to 14274018 reverse strand)
agacttggtaattacctgctcatcttcatttgtcatgttgtttgtcattgttagcctaagtttgctggctaccatattttttcctcctagtatattacaaggagaggttctactgttatattctttgtttttgtattccatattacttgctggatggattgttttttctggaaaacatgatttatcaaaggaagtatcaaaggaagtttaattattgtgtctttaagttttgttctgctacagaaatttctgaatcactgctattaaatgttgcaccttttgcagatagtgaac

SEQ ID NO: 57806 - DNA, 943 bp, Populus trichocarpa
  Intron number 1 from transcript POPTR_0001s10180.1 (locus POPTR_0001s10180) derived from phytozome v7.0 (chr-ID scaf fold_1; pos 7872593 to 7873535)
tcttggctgacccttctcctagttctcctgatcaggtatatacatatgcttataatttgtttgtatattcggtagccttttcttttctttgatgatgctgattggttgttgaatttcggggtgttatatttgattctaacttgtgttatacttattgtatttataatggaagaaaggttatgttttgggaaattatgtattgattaattatttgttctcttattactggatggttgataaggtttagtttatggagctccttctcttagttgaatttttttgtcaaagagcatagattgttagtccctgttttgattgatgaaaataattatttttagtgtcttttgacttattcaaagtttgcgtctttttctatgtaaagttcgattttttttttgtacagattggtttatatggaggagaatatctaatttatttgttaagataggttcttatcattgcttcggttgttttttatgcaatgctactctttgtttcctatagttttttgaccgtttgttgtgctctccaattgttatattttctgcagaataaccgtcaattatggttatttatgaattggcaatgtcttggtgaagaattccactcttgttatttggatattcatcttagctaatccaactttagtcattcaatacttaaaaaaaaaaaaaaaaccggaaagcctttttgagagctctaaatatttcatgaatccttaatgtgcactatatttagtgcgactccaaacttgccaacaatgaccatctttgcaaactaacaggtttgttagttaattgattttttcaactgtcccgcctgatgtgcattaacttgatcctaattttgaatctgtaacaatgcagtgctcttttctgctgctaatcttgatgtcatttcttaaccagccagaaagtgcaggcagtttaaggagacatattgc

SEQ ID NO: 57807 - DNA, 799 bp, Populus trichocarpa
  Intron number 1 from transcript POPTR_0001s15380.2 (locus POPTR_0001s15380) derived from phytozome v7.0 (chr-ID scaf fold_1; pos 12206259 to 12207057)
tttttttctcctccccctcttttctctctcctgccgtagggacttgctcttgacctttcaaaaatcaattgtcttttagtttgtatttattttaattttagccctcattattttgattgctatttgtgtttatttttatgctttttgaagatttgtttttcaatttcgtcttacaatattttattttatttatttattttatccaatttggtctttattttttattgctttttttattcatttcttgatttatttatttttttaattttgtcccttaatattttagtcaaattaactcgagctgactctagtgtttttctttgatgtttatttttttttcaagttcatcatttgatattaggttgttaaaccttgaattttatgaaatttttttttgtgcatagttattccgatctcatatctcagatcgcgtgttaatcaaattatcacaaattaatacaggttattatctcctcggtgtgcttttttatgttggtaaaagtttggcctgcccgtggcattgtgcgggtaaccttgctagcaaacactacagcttaatcactgtcccctacctgatcttctacatgtttgacctttgcccatcgggttttacttcagtttaatgactatagtgaggtgtggcctgaatgatgcgatggtctattggattactgcagagagtgattttctttggtcgactcacagattgcatctcttccattttatgtcttacttatttaatctcgttaatttccaaattgcaggagacggtctcagcacaattacagtcgaggaaggc

SEQ ID NO: 57808 - DNA, 491 bp, Populus trichocarpa
  Intron number 2 from transcript POPTR_0002s10320.1 (locus POPTR_0002s10320) derived from phytozome v7.0 (chr-ID scaf fold_2; pos 7411469 to 7411959)
tggcaacactgtatgctgttttttttttttttctatgtttgtgctagggtaaatgccgatgctatttgatttgttgggcaactattaccttttgggagactgaaatgataataatgttatatggcccgcttctgtatttgatgaactatttatgatggatatgcattcttttccttgcatgattaatgtagaactctagtcatgctctctctcttttttgttaagatgttgggttaaattccccgccccctttatcctctcctgactattaattgtggttctattgccttttgatgttttgttgcaacttgatgtttttgaaaagatggtttttcgttacaatattgttggcttcaagcatctttatcagaccttttcagcttaattgtctacacttgattgactaaatttcatgtttagccatcttctcagtgaacttttctcatttaaaaatgatttttgaccagtgaagacaggccctagttttgctg

SEQ ID NO: 57809 - DNA, 551 bp, Populus trichocarpa
  Intron number 1 from transcript POPTR_0002s09980.1 (locus POPTR_0002s09980) derived from phytozome v7.0 (chr-ID scaf fold_2; pos 7162287 to 7162837)
attatcaacaaggactttaaggtaagtgataaatagtcttgataattttctcattctccagaacttaactctgaaagaaaattgaagtgcttcctaatttccatgtaacaaactatgaaataaagatttccgactgaaaagctggcacaagcttctcttacaaaccagttcttcagtgaagcttgaaatcttcaaggtttcatagatttaaaatctaccacgatcaaatattggtttacctatcactttacttccatcaagcctaatatattagtctaaataatctgtcttggggaatttctgtttaaatattacatacatacatacataaacatgtgtgtgtgtgtatttgcactggtttcaggatgggttatacctattgattgctcacccaaattgctatctcttagcaaatcgcataggaaacttcatcatctatgtgaacttttgaggtttatttgaatcattaatgttgcatcgttcaaaataattctaatgagcttgtgttttgctcaggctatatccaaagaggcagcagagtttggtcttgg

SEQ ID NO: 57810 - DNA, 576 bp, Populus trichocarpa
  Intron number 1 from transcript POPTR_0002s04230.1 (locus POPTR_0002s04230) derived from phytozome v7.0 (chr-ID scaf fold_2; pos 2653235 to 2653810 reverse strand)
caaaggccctggaccccgcaacgccctcattcacggttcctctctctttctcttgcttgtcattaactttacttttgtttcggtttcttagccagagaaaggtgtcctatgaatcgcttgatggattgggctttctgaatcaaattttaattctttttattttttttgctgacttatcttagaaaagaaattatgattacggaatttgagtttttggagcatgtattgttcagcaatcgctcgtcgaaagaaagtaactgtctttgattttttttttaagttgaatttcttctctatggataagttggttagatacattatgggcaagaagagtttgatagcttttacttgctgctatgctgaaaaatctttggagaatataagttttgatttttaagttaaatttgtaaattaagcagttgtttttctatctaaatgaagtttattttgttttggagaataaaagttctgatttttaagtttaaattgtaaattaagtaattgttttctttcttcttttttttcctccttacctcttcagcaacaagggattcttcaagtttgctggcccacgag

SEQ ID NO: 57811 - DNA, 841 bp, Populus trichocarpa
  Intron number 2 from transcript POPTR_0002s00650.1 (locus POPTR_0002s00650) derived from phytozome v7.0 (chr-ID scaf fold_2; pos 289097 to 289937)
ctctcggtaacgaccaatgacccatctatttgtgggtctatatatgcacacatacatatgcacacatatatatagtttgttaatttatattttattatatttatcgattttttttttataaaaatcaatttgtttttcttttcattattatgaaaaattgaaaattatgaaatatgggcggtgtcaatacaagtgtcagtgacgtggggcggtcggaatgaatgttttatagaggcgacaagttacagtaggcggcggcggaggaggaggagcgtgtggtagagttgtgaggcacacaggacatgagatagaatagttgttggttttgctgttgctgagatgcaacaagtaaagaaaaaagaatattgaactgtggctactggctaccgggggtgtaaaatacaaaagggctaatctgacatgggattcttatttccaaaaattactattatgcccctttttgaattttttgaatgaaaataaatttattattttcctataaaaatatcggtgttgaatttttaattgaataagaccaatcaaattcctataaaatccagtctcatgcaacacacacacacacgtatgaaacttaaccaaaaagatgatgcagcttcatgctatatcatctcagagaataaaaaaaatttgttcgatgctgattgccgaatgcctccagcctgcatgattcttttgtattatttttttctggggtggggggcttatgtttaaaattctcaatatttttattttgtatatttcttgctgtatttacacgaatattttctgtatatcaatgtgtttctttttgcaggatcagctgggattggattcacgccac

SEQ ID NO: 57812 - DNA, 590 bp, Populus trichocarpa
  Intron number 1 from transcript POPTR_0010s23640.2 (locus POPTR_0010s23640) derived from phytozome v7.0 (chr-ID scaf fold_10; pos 20168329 to 20168918)
ccagcaggggttggtcttttgtttttctggcctttggccctcttaattacctaaaaaattataaattattcctatttaattagagacaatttaatttaatcttgatacttaaaagcccattcaaaaacatgtaaaaaaaaaacgattattctttacaatgagatacatttatttgtaatatgactcaattatatcaaaatgtctccagtgtaagagatgaagacaatggaaattctgtttttaaaatacaaaaatcattttaaaattgttttataaacatatttatattatatttctattttttaaataaatatatttttgttctcactatatttattttattcatttgttttatttcaataataaaataaaacaagctggaaaatgaactcaactatcattttaccaaaaataacgggaaaaaactcaaacgaagtctacaagaacgacgtcgtcattacgcgaaaaaggtcaaaactctgaagacgcgaataaacagcgcatcacttcacttttcaactgaaacggcatcgtattacagagaaagggcataagaaaaatatctgcgcgggtctaaaaccacacaaccc

SEQ ID NO: 57813 - DNA, 613 bp, Populus trichocarpa
  Intron number 1 from transcript POPTR_0010s01940.1 (locus POPTR_0010s01940) derived from phytozome v7.0 (chr-ID scaf fold_10; pos 2158502 to 2159114 reverse strand)
aatttatcctcaactagaaaagtcactcttgtttttttttttaattaaaatttgaaatattttcagaaagaaaaccagtaagataaagctactggcaaaaggatacaaagtttaagaatattaaaaccaagctatatagtctgtgagcgtatctaaacctttccttgcgaggctatcatcagctatacagagtttccttctcttaaaatatggctaaaagaaacctgattaagaaccttaagcatcatagagttgatacttttttttatcaaatatatattctttcagataactagaaatcaaattcatgagaagaaagttatctttatatatattcatataacatgatccttgagagtaccttgtatatatgcttgtgttgatagcataacatgttatttggcatgaaaatacttgaaattttcagggaaaaacacacacacaaacaccagccataataactaaccaaacaaatacaatgggcatttggcatttcctctttttaacaccagttttctctctacgatattatagataacggtgactctgcaagggttaataccaaatccaaagtgaagaaaaggatcgtagtaaccactgtgttgtccacagg

SEQ ID NO: 57814 - DNA, 766 bp, Populus trichocarpa
  Intron number 2 from transcript POPTR_0001s35410.1 (locus POPTR_0001s35410) derived from phytozome v7.0 (chr-ID scaf fold_1; pos 33746542 to 33747307)
attaaatacaagtaagtcaattttctttttatttctcttgagaatttaatttttatggagattgagattgatatgttattaaagattttttaaagtttattattgtagaagactttgcagtctgcttcttctggagttgactttttttaggattaattctgattatgacagatttatgtgatatgtgatagttatgaccatcacagctatgattggtactagttttcttgttaaatgatcaaaagaaatgataggtaattaaggaagtagggtatgtcttgatattcccattgtggggaaagaacttgtcttgaaaatccaatgatgtttcagtgtttagtctgagaatgagctgaaatgatgaatcgccagtgcatttcaaagattcgctggtctatttgttggagacttgagttccagctgtgttgtgtgcatgctggcttaccaacaagatttgatggcttaattttttattttgaattctgggaatttgattaggctttactgagttatgctctagttttggtttgctgaaattattgctttaagtgagttattattgatattctcaatttagcaaacaaccaatggtatttgatatgatgtttccttattttgtttttgtttttagcctggtgtgattctgatgcttgcttaaaaagtaacatcatataagaaaagattataagttactatatctttagatgttaatttgttgattccaagattttgtatttcttatatcaaagggatttgaaggactctg

SEQ ID NO: 57815 - DNA, 154 bp, Populus trichocarpa
  Intron number 1 from transcript POPTR_0001s26000.1 (locus POPTR_0001s26000) derived from phytozome v7.0 (chr-ID scaf fold_1; pos 25100919 to 25101072 reverse strand)
tagaagagctgctgcagcttctggtgttagagctggtaaaaaaaattatttttcttccttttctggttttttgaaatgggtttttggttttgtgaaatgggtttggtttggatttttaggtgttggtgggttctcatatctcttagagccacta

SEQ ID NO: 57816 - DNA, 385 bp, Populus trichocarpa
  Intron number 1 from transcript POPTR_0007s05080.1 (locus POPTR_0007s05080) derived from phytozome v7.0 (chr-ID scaf fold_7; pos 3278722 to 3279106)
tctttgctgttaagtatattgaaagaggccaaaaggtgatctttttttaacttcatgttttttctctctcaatatattcatctccgaatttctcctgttcattgagcaatgttctttcattcttttttctgaggttgggtggatggtggaatttcgtaaagacgttaaatatgtgttgaagactagattttgtctagtggatgttacgcttgtatattttgttctttgtggtcttatctgggctgggctgtgctagtttctttttctttatatattaattaatctggattggagactttctttttataattttttttcaactcggtgttttcttttatttgatggtagtagtgattttgaagtcttgtttggtttttgcagattg

SEQ ID NO: 57817 - DNA, 774 bp, Populus trichocarpa
  Intron number 1 from transcript POPTR_0002s06280.1 (locus POPTR_0002s06280) derived from phytozome v7.0 (chr-ID scaf fold_2; pos 4195900 to 4196673)
gaggagagagcatctctcacaagagattttgtagggtttcttgatgctcattgattttcttatgattcttgttatagttactgaaaaacacaggatttttagggggttttctttcttttaagagttagctgttagtgcaggatgagttttttttttatttgaatatttatattcgtgaaataatcaatccaggatcttttttttttatttgaatatatgaactatttttttatatttaaatatctacactcatgaattttgatcatctagcttactctcacaagttttatatcgcaaatcatctccaatacaagtgagttcgtgtttttggattaaccatcattttgtcaatttttaacattttcaagaaattaaaataacaaaactaggagataaggtgagtttatatttttcttactcgttttttaggatttaattcaatgtttattatatctttgtatggtatttaattttccaatgtgttctcatatcaagtttaattcgggtgattagattttaaattctaaatattaaatatcctttagaaataaatttaaaagataatcttctgcaataattatgatttttttccaagtatttttctatttaattgggttttttaagcagatcaggcccatgcccaatattgctctcgtctaagagaaagcctggctcgggcttcttggtgatagaatcagccgaaccagatttccaatgtggagtcctatgatcgtaccttgttttacccttttcttagtcaaatcaaattaaccc

SEQ ID NO: 57818 - DNA, 416 bp, Populus trichocarpa
  Intron number 1 from transcript POPTR_0007s12260.2 (locus POPTR_0007s12260) derived from phytozome v7.0 (chr-ID scaf fold_7; pos 12579068 to 12579483)
gtttctcttgcttttctcctcacttgggttgccgggtcagtcatcttctctgcacagacacacatacgttcctccgattctaagagcttgtttttttatgttaaaaattctttttaaaatttaaaaaatattattttattatattttccaataaaaaaacactttaaaaaacaataattatcccattcacaagcacagaacctcatgtttcatgttgcaacactacacttaagaagaaaacagacaaaacacaagccataaccaaattttaattttgatgatttgtatgaactgcacatatcaacatgctatattaaacaaaactttgaatttcttattgtattttgtttatttaaatatcaatcttttttcctggtgcagagacatctttaatctggtgggctgcttactggagc

SEQ ID NO: 57819 - DNA, 779 bp, Populus trichocarpa
  Intron number 1 from transcript POPTR_0007s14670.1 (locus POPTR_0007s14670) derived from phytozome v7.0 (chr-ID scaf fold_7; pos 14437097 to 14437875 reverse strand)
ttgctggtgctgccttggcttatactcttggcaaggtgctcataactcttaatttcatagcttcggttgctttttaaaagttggtaatgatggaacctgcctctgggaattatttttttttcttctttactgaacttttagcatttgcttttattacgggattttagtaatttattacctcatagaaagaggaggagactgaaaagcgtttttagttcttgagaatttcactcgccttacttttttttttttgtgtgtgtacgtcatcgtgtgttcggtgctttgcttgtcttatgatcatgctaacttgttgggttggagtaaaattaactttctattttgtagtgcgatgacgcactctctgcgaaaagcagttgtgggttagattagtttatggaatacatggttacttcttgatgatagtgatggttttgaaaatctttaattgtaacaaaaaagttacgctcacattaaagttgactgatatcgagtctatggatgcagctgagatggtttagtggatttgcaactcaactttaataacaagtattgactttattgctgagatggttaagtttcaaactagtttgattgctggtttgacattttcagttgaagttattgctcaagtaattttgtttaatagaaatagaaatataaccccacgaccattcaattagactttgatttgccttagttttgcaacatttttctgagactatatatactgctatcagggcaaagaccttgaactaaaagctcaattccaaaactacagg

SEQ ID NO: 57820 - DNA, 899 bp, Populus trichocarpa
  Intron number 1 from transcript POPTR_0001s45670.1 (locus POPTR_0001s45670) derived from phytozome v7.0 (chr-ID scaf fold_1; pos 46241270 to 46242168 reverse strand)
cctaaggggagaccactttctttgcaggttcgctttcatctcctccttcaactagtttttctttttcttgtttcttagcaatcaaggtatcttctatatattgcttcggctttcatcaccctaatcttctcgttcaacttgccaagcaagagagaaaatacaagggttctttttctgcctagatgaaatcaattttcttcttctttttgtctcttgttttattacgtactagtgcatggtggaaaactcgttttttttgttttattagggagaggcatagaaaaaaaaaaagtctagtttgttctatatgtgagaaaataggtgagaggaaaaatgacttttggatcttataaccccattttgcttggtgtttatacatggatttaaaaaaaatgatatggataatatttttggtgaataatttgcatatatcttttaattattgtgagttagaactccctcttccaacatatatatatgcccttatttatatcatttttttatatatatatatatatcaaggttttttttaagaacaaaaatttacattagctttaagggggtgtttgagtaatagcaatcaaaacgattgaaaaaaaaatttaaaattttcaaaaactccggttaggaatcctcaagccggtaagagcagggtctaaaaaatttatttggtatcttaatcaataagaactgaaacatgtttcttcttctgtttggtttcattatagaaaaataatggaaagccgactttcccaaatattcctaaccctagagaacataagaatcttgaagctatatcaatttaatgtaggtccaacatcaaatcagaatctctccaaaccgtgtttaaaccgtgtttcatctttttgctttattagactgtggagctcaaagtcagg

SEQ ID NO: 57821 - DNA, 684 bp, Populus trichocarpa
  Intron number 1 from transcript POPTR_0001s15620.1 (locus POPTR_0001s15620) derived from phytozome v7.0 (chr-ID scaf fold_1; pos 12465676 to 12466359 reverse strand)
ttgtgatcggcctcatagagaacagagccaaagaggtactgtacgctctccgtttgtttgccgagaaaatgtgcgaaaaccagaggaaaatcagtgaaacttttagtagttataagttataccagtaaaatcactatttcgcttccatgcatttatttacttgagaatctgaaccaagacagatagtagtataataatttaaaagttccctttcatttcatctcctcttcgatttcattcgctccagaactgatagtttgaaatttcaattcattagtggcttgttaaatcttgaatgtgaattccgttcctgatgtttttatcggtcggatgactctttattttttaaatatagcttattatgtctgtaattcctaacactttgatgattctttgagcttctagaatcggaaatcgttttttccctctttatgcgattatttgattgttcaaattaataaggcaaagaggattcatgatatacataaatttaattttagatgctcgaactgaaatattttaatggtaagaaattaatttttctttcaaatatttggcaatgtaaagatgactctagagttactagcaatttgataaagtgaaaattgaaattgaaaagttctgaaatatctcaatttcttttgggcgcttaataagttgatattgtgtgattggcaggttgga

SEQ ID NO: 57822 - DNA, 626 bp, Populus trichocarpa
  Intron number 1 from transcript POPTR_0001s25280.1 (locus POPTR_0001s25280) derived from phytozome v7.0 (chr-ID scaf fold_1; pos 24449815 to 24450440)
ccaactcaaggaagaaggttgcatcccttggcaaggtatatgtctaatatatattgcttatatagagaatctatatagcccattaatttgttgtttactgagcagaaaataaaccatcagcagagtcatttcaactttcaatggtcatagaacagctgcttttgttaaatttgccttgtcccaaactgtcctttttcaaacactaatacaaaatgattgatagatctatcaatatttcattcaaatccatactcttaccaatgacatccagaattttttagatttgttgcatgcccggttacaacagtactttcatgagcaggtattttaagttttaacagctcgagctcaattaatttgtatttgaactcttcttagttttttgtgtgtactccagaaataggattaatagataatcaatctctaatagtgaacgtttgattttatttggtttgcgttagagaacacaaacgtaagaaactttccaataaattatcatacaaggtaaagacttctctctatcatgttgagaaccaatatctagttattaatgatttgttcctgatctagactttgttatatattcttatttatagtattctaatagaatttggaacacagattct

SEQ ID NO: 57823 - DNA, 700 bp, Populus trichocarpa
  Intron number 1 from transcript POPTR_0007s10760.1 (locus POPTR_0007s10760) derived from phytozome v7.0 (chr-ID scaf fold_7; pos 10816549 to 10817248 reverse strand)
gctaattctgtaacgcgctctcacccttatccactttgtttcttatcctttggaaattcaatatttgtttgagatttcgttacttttcttttctttggtttgtttttatgggtaattagctgagcccattgagattttaacgaagaatttggttcttttaatgcttattgtaggggataggaatcaagtatcagtgatgcaatgcatcaattgggtttttgagaagcaccttgtttacttctattgatgcattaaagacactaattttactcgtgggtgtgtgttgtctattgagaggacttgaattttggtgtgaaagccatgttgaaagttgtgtgttgttgagtgtaagcaatgtcggtattagggaattctttaccggaaagtgtcacgcactttggtactatgatggagaaagaattcaatttggtaatttaattgtactttatgttgttggggttttagtctgaagtggcataggtcaggattagcgtatgggtctggggttggtcttaacttcaaaaaatatcaatcaaaagaatgaggatttgtggcagattcaatttggtttaatgcaattgaggttgtttcgcacttttaagtgtgatatgaaagttattcttcttctatatatgattgtttttctttgacttgctgatgtgcagccaaaaagtggggtttatacagttggtgattttat

SEQ ID NO: 57824 - DNA, 787 bp, Populus trichocarpa
  Intron number 1 from transcript POPTR_0010s16230.1 (locus POPTR_0010s16230) derived from phytozome v7.0 (chr-ID scaf fold_10; pos 15220227 to 15221013)
ctcttgctgattctgacaacaatcgggctaggtcggtgcattattttttttcattcttagttggtttatttttaatttttaagagattatgttagttttgagcgtgctttgagcgtgctttgtttttactgctctggtgttttgctgtaatgttaaaaataacactttgatccttcttgaggtggcagctgggatgcaaatagcactggcctagtaataaataaacacgttaaatcattttaatctcataaattaacttgtgaaagttattctgttgtgtacttcttttaagcaattacattgatgatggtgttgttctattatatgaaaggattctctcccgtcgagcgatttcttttaatggattttgacaatcgatcgaattcatcgacaggcactgtcacagaatcattcgatcatgtttttctttcggcatccaggaattgattagagtttgttttttaagctataaatgtgtcttttggctctctgggtgctttttgtcagccttgtgcctttatcgagtaatgtccgagtggcggcatcaagtaggtgccaacgactccatgacctctccatcctcgtttcctttctagtaaacatgctgtgagcttgcagtttaactcacagtttatatagttattcaatgatgagttgcgtagatatctgttcttatcatcatctctttaacttcgtggatttttctattgcctgtgtcaatcattggtactactagtgtttttgctaaatacaaaataattagtcttctaattactggcctttatcc

SEQ ID NO: 57825 - DNA, 697 bp, Populus trichocarpa
  Intron number 1 from transcript POPTR_0010s16730.1 (locus POPTR_0010s16730) derived from phytozome v7.0 (chr-ID scaf fold_10; pos 15591881 to 15592577 reverse strand)
ccctgttttactgaaagaaacagcagatcacaaaggtaactcttctagtctttctctgatctctgtctgcctggttgctctatgcatgcttctttttggctgccgtgttttgtacatgtaggtggtttgctgttttttgggctcttttggatgttgggtttttggcatagtgcacaattctgtttgatgatggatagatctgttgtggttgatctttgttaatttatgggatatttgatctatgcttcctctagatctaaattctggtacaggtgattttgatccctaactcttgcaagaagggttttgaaacgttggacttaattgttgtttcactaatttcagagatcttatttcttgctttatagtgcaatcttggatctgtgatttttaaggtaacggaatccataaatctaatattctgagcccttttgtctccctgatataaaccattttattggtctggcttgttaagatttaaacaaattaaatcatgatttcatgcgaaagcatgttgtagtgtgctccgaattatgaagattttagttttcaaagtgtacgtgtattaatggagttttcggagggaatatttggttttagcttggaggaagaatttgtattcaagatctgttgatgtgtgcttccccactgaattatagttttgattctatttttaggctatccattacatataaat

SEQ ID NO: 57826 - DNA, 282 bp, Populus trichocarpa
  Intron number 1 from transcript POPTR_0001s30060.1 (locus POPTR_0001s30060) derived from phytozome v7.0 (chr-ID scaf fold_1; pos 28645518 to 28645799 reverse strand)
caggtaactttttttattgggtttaatttgtgttttgtattagtaattgaatttggaccagtttattaaagtttagttggtgaaaaaagtacagaattcaaggtttttgacttttgatctcgttttctttcttgaaaagtgtcttgattaaggtatttattgagattgggatttatcgattggattcttgttcttctttgtatagtttggattttgatttgattcttcacatgagttttggatacagggaaaaatcacagccatttgtctacaatagggaat

SEQ ID NO: 57827 - DNA, 573 bp, Populus trichocarpa
  Intron number 3 from transcript POPTR_0001s01120.6 (locus POPTR_0001s01120) derived from phytozome v7.0 (chr-ID scaf fold_1; pos 877140 to 877712 reverse strand)
tctcataaacaaaagtggagctatcagtcctggtacggtggtatttgggattatgcatatgtgctatttcaacttaatcataagctatgtcaaagtagcaaagccgctacaaagaaatctatggtccagtccatttactttgaaagaaatacttggtttttttatttattgtgagttatgagttgtccagtctcgcatttgaatttcattaatctgaacacaaacctggcgtgatttttctttcatgtcaagacttgttttatgaaatgtgaaatttagtttgattagaaatataacgatgagggatgtttgatgattgtaagcaccctacaggtggaccaccaagttcttctgtggatagggtggagtaggtgtttcttcccaacatcaatgtttgagtagcctgtaatttttcaagaaacacgaacttgcttaccttctagaatcattttgccttagttatgtttgttagtgtctataggagtatgcatactcaagtgcacttgtgatatattagaattttgaaattcattttttttgtttttgtaggtgaagcactttggagcttcagga

SEQ ID NO: 57828 - DNA, 866 bp, Populus trichocarpa
  Intron number 1 from transcript POPTR_0001s06220.1 (locus POPTR_0001s06220) derived from phytozome v7.0 (chr-ID scaf fold_1; pos 4801794 to 4802659)
ggctaatttggaagctcttgccaaggctttcacaggttctttctcattcttttcatctctttcagctcgagttttccttcataaaccaataggagaacatccaaattcattgcccaaagccttgtttccatggctcataagccatttataaaacccatcttgcaacctgattgtttgcatgttggttcatgatcgcatcatcaaagttttcagcccagaatgcttcctgttttcacattttgtgtcgtcaaaatcgcttttggtggaagcattaattctgctgtaaaactgttatctagctattcttagtttattatgctagtacgtctactcttctttatatatatatatatacatacaacacacacacacaagcaatggaatatctttattgcttcaaactgaccgcatcagctctcagtaccagcacccgacctggttgcacattaccctatttctgagcactttctctcattttaatatattattatggacttgaagaacattcgtaagtgttttgtttttcactttctctcatctttttcctccaactcttttacccacatgatgcatccttactttttagtcatggttattaaattcgtctgacgggttttgtcatctcgggacgttttccgagctgaactggaaaattaaaaacccaattgacttgaacaaaccagttcagtgacaaaccagttaaatgcattagcaatgatccaagctttttttctggatcaatccccgaggttgtctaacatctattcttttgtcagctaatttcagcatactccctttttgttaattagaagagacgtctgaataaggtcatgtttattattttcttgaaacaggacttggagttg

SEQ ID NO: 57829 - DNA, 557 bp, Populus trichocarpa
  Intron number 1 from transcript POPTR_0010s17560.1 (locus POPTR_0010s17560) derived from phytozome v7.0 (chr-ID scaf fold_10; pos 16103255 to 16103811 reverse strand)
ttgtccttctccatctcccgaaaagaataagaaaggtagaaacctcagctacttttttgttatatccaatgcaacacaagtaagtttatgcttgcagttttattttgtgtttgttcaagtttaatagctcatcaatagcagttaaggtcagcttctgtatcctgatctgccagttctttattgccttctgttttttctcctctggtccatttgtaaaattgtttttatatattgcatcatcctattaatagcaattaaattccgccctgagattcctgtaattttccacttttaatgtggaaagctaaagtggtaactactttgtgctcagttatggatgaaatgaagtggatgtttacacattgatcacttaatcaaattgtatctagatgaaactttccaagtgattgaactagaagtttgtgatgtggtatctggctgctgtcgtctataccttttgtccagtctaagtctgttaaagttagtgacatggttattaagtcttctatgtggtcataactctattagatttatatgccagtggacgagttggatca

SEQ ID NO: 57830 - DNA, 756 bp, Populus trichocarpa
  Intron number 2 from transcript POPTR_0007s09650.1 (locus POPTR_0007s09650) derived from phytozome v7.0 (chr-ID scaf fold_7; pos 9157962 to 9158717 reverse strand)
tggccgcagaatcttgttcaagtttccctcttcaggtatgcattttgattggttttgataaatgttaacattaaattagttctgtttcattttgacagtgtgtgcatgtttaagaatataaaaaatatgagacaatttgtggtaagaaaatggttacacgcactttccccttagtctatagtctatatcacaagtctgctggccataaggatttagaatttgctagtagtttaagttgattgattttattctgataggttatagtcgctatcatttatttttttgatgaattaaaaatataaaagctgtacatgtaatgcaaaaaaagaaggaaagaacaaatctgtacaagagacaatgcaactacaactatgatctgaatcctactgcaactagaaagaaaacttggaaactgcagtgatcaatcccctattgcgttgctgatgatattcacatgctgctgcatttctataacagactgcaaaattctagtctttaacagtctgcaatgaactaacattttaattgattccacattctagtaaagtaagcctatcatctgatttctctccatttaatgtaactgaaccaagctaattacgtaatacctgaaatgaaacttcgcttctacaagctcagcgtgtgaatttcttctagaccttattgccttggtttgctaccaaaatagcaactctttaagttctactgcttaaatatactgtttgtatctactaacatgaaattgtagggcattac

SEQ ID NO: 57831 - DNA, 547 bp, Populus trichocarpa
  Intron number 2 from transcript POPTR_0010s09440.1 (locus POPTR_0010s09440) derived from phytozome v7.0 (chr-ID scaf fold_10; pos 10275530 to 10276076)
aggactttcaagctgataatatttacggaggttggcattttcttttcttgggcttctgcatgatgactacctttaatcaaacttggggtttttgattcaatggaatcaaagaatccactttatttatagtgcagtttctcatcctctggttggtttctgagaaaacagtgaaaaggaggaatatccttgtgaattagatgctattggcattgtgaatctcaaatatcaccaactttatgcacctctgccaaatagtagaaccaccccgagttagatggaggcttttgtttttgagttccaaggagtgaaagaaataaaaattttaattatttctatttacatttgatcctgcattttctctgcaaccgaagtgatactgtatctgctgatgacaattttacgttattatctcgttttgcttttgctatcaattcaacttctccacattcatctccagtttaccctttctttaaaaattaggatcgactttacatgtgattttctttcatcagggggtgaagttgagtacaggactagcttctcagag

SEQ ID NO: 57832 - DNA, 946 bp, Populus trichocarpa
  Intron number 4 from transcript POPTR_0007s01830.1 (locus POPTR_0007s01830) derived from phytozome v7.0 (chr-ID scaf fold_7; pos 1052813 to 1053758 reverse strand)
gaaagtaagtagattatattctccaatcaacccagcttagccttaatacctcatgtgctggtggcaagcttatcaattttttgcattggatgcatctatgtacagcttctctgttagccctatctgttcccatccaaacataacccatgctaaactttttcatgttcacaaccttaatttgtcatagtcccatacagatttttggatagcattttggtaactgcttctagttatttttggtgttagctctgttagcaaaaagcaattaagcacttacaaatgttgattagcacacagctgtatcatgttgatctgtctgataatagttctaaagggtggaaaaaacctttttttttgtggctattttaccaaaccttcgctgctagatggagagggtcatgaagggaaatcctttattttcgaagttctctttttgtatggcagttttattgctgtccgtggcagtggcaattttgatagtgttgcttaaagttgtcgctctgattcctgcatcttgcactacacctttgtctctcacttttttcttcctcttccttatttttttgtgcatgtcaagacttgtgtgtgtgcatctgtaaagcttcaataaagcaagtaatttctcagccggatgaacaattacttgcattacatctttattcaaccagatcttttgtttgtctttctttggcccttgaatttcctttatctgagatcaagtttaattccatttgattctaggtttagcccagaagctatcaattggctgtttgataagggattgcgtgactggtttggacaggatgcattgttcaaaccagccaaagcattgaattccaacacccttttttatctttactttggaaattaatttcatctgagctctcaagtttaggttttttttttcccaggtttagcccagaagctctcaattggctgtttgtca

SEQ ID NO: 57833 - DNA, 598 bp, Populus trichocarpa
  Intron number 3 from transcript POPTR_0010s01830.1 (locus POPTR_0010s01830) derived from phytozome v7.0 (chr-ID scaf fold_10; pos 2008348 to 2008945)
taattaaccgttataaggtgtgttcccttccctacttataaacttaggtattactcctagttcctatatgctttgattattattattattattattattattattattaacaagaaacctgaccatcagaaatcgagtaattagataaaatgatgaattccaattcataaaagtttcaacatgtaattaatttaatttaaagtaaaaaagaaatgataagaatcgctaaatttatgggctttactatgtttccttgctgaaatggatcaaacactagaaaacaaaggaaaacaagaggactgcaaatctgataaactattcaccatttcatgctcaatggctgtattttttttcatgattcttgtgatcatacattgatgtcatttttgcatttacacatattggctatgtaataacatcaataacttgagaatgctggccatcatcgagagatgtatcatggtgtatgcaagagccttcgggcagtgattaatctggaaataatttagcttcctcttctgatttaatccagagtaaaatgatctatctaatttttttttataatattgtcagattcttcaaaattacaaagttcatt

SEQ ID NO: 57834 - DNA, 456 bp, Populus trichocarpa
  Intron number 2 from transcript POPTR_0010s25780.1 (locus POPTR_0010s25780) derived from phytozome v7.0 (chr-ID scaf fold_10; pos 21292590 to 21293045 reverse strand)
ccagtaaagaggatagaaataagtgatcaacataggtagttgttctttttatgcattgtttgtttctagggaaaagggaggccgggggcttcttttttaggttatgataaatagttcatggcatttcatgttgcaaagtgatgttaactttatattcagtatggaaaatggattaattttggaattgggaagattatatcaaataatggtttagagaagcagccttatgggtcataattgttagatttttgtagtcaatacatggaaagagaaatgaattcaaagaaatcaaacattttgggaggcaaaagtacacctatgcgccacactatgtttattatctggcaatttctgttccaagttttatatcgccaactgttttctttgatgcttgcctgcaagttgtatccaagtcttttgtttttttggcagtcaacgagcagtcacgacagcatt

SEQ ID NO: 57835 - DNA, 994 bp, Populus trichocarpa
  Intron number 2 from transcript POPTR_0010s23040.1 (locus POPTR_0010s23040) derived from phytozome v7.0 (chr-ID scaf fold_10; pos 19736842 to 19737835)
ttgaaattggggagacgtctttccatctccacaaggtgtgtttacatggccaaaccttacttttgttcatcactagattactaaaatttgttgtgtgttatatagacaccacactctgaggtgacactcgaaggatgctcctttaagagcaacattaagcttagacgtgcatgtctcataccttatggttcaccttatgtgtgaattttgcaaatagaatagaacttaactagaacggccggcatgctcatcttgtaacactgagttattctttcgttgactatttaataaaacagaccatactaagcagacaatacttgaagttttttaagggaaatcatgttatttggatacaggaaaatgtatgcttgatgattgcactattggttcttcctagtaattagggaaaactttagctggcattaatttttagttatctctaatcatcacaggttagctaaaggatatcataactggcatttaatcttaacagttttctcttaccccatttcatcagttgtgttccgagcttggaagatattgcttccatgtgttaaattagctcatttcacctcaaaatattgaggatatcgtggatcaaaaggagatttagcaatgagactttcttttgtaccttttatctttgttgtttatgaaaattttaaagaatgaagttagtaaaatggaaataaattttggaagcaattatctccaccctgttattatttctttgattgtttccccttttcctctcattctcagatataatgatactcgtgtcttacacattggccttggtttgctctaccattcattggggaagaacaaaaaggcttccccctctgcctagctaattagaactgtggtagacaccatatcttatagtgttcacttttatgattttatttgttcaccattaaaatgaatttttttctttcgtcctcttttctttcctccagtttccattgctctctagaagtgaagcgctagcaaa

SEQ ID NO: 57836 - DNA, 466 bp, Populus trichocarpa
  Intron number 3 from transcript POPTR_0007s06560.2 (locus POPTR_0007s06560) derived from phytozome v7.0 (chr-ID scaf fold_7; pos 4955866 to 4956331)
gaagttataggttcaaggtttgaatttctccttaatcacatgcttatgcatacatgataaagagaaccatcaattgttttactctcctgaaaaaaaagaaaaaaaaaaaaactgctggtgattcatgaccaaatcttttctatgctggaaattttgattttggatgctttttttcctttcaactttatgcttgtattatcatggttaatttgtgttatcaattctatgaaattcgctcgtagttagacctgtatcaattcttttattccagatgttgataacatgaaatgctcctttccaagggttcgaaaacaattatgttatttattgtgatatcctactgttgcttattgattactgagagaaactactgatgtgtttttactgaaagaagacacaatttttgggttagcattgtcatattcattaaatttatttcagggaccttacctctccaagctgagaa

SEQ ID NO: 57837 - DNA, 455 bp, Populus trichocarpa
  Intron number 1 from transcript POPTR_0001s13510.1 (locus POPTR_0001s13510) derived from phytozome v7.0 (chr-ID scaf fold_1; pos 10589949 to 10590403 reverse strand)
caaggttagtccttttagttttattgttctcatttcttttttctgaaaaagatgattttttttcatttgttgtatgaattgtttagctgatttatttgtatattgacaaaaatgtttggttaaactgtctacatgtaccgttttgtgctttttgattgccgaatgtttggtttgtcttctgttttattgcttgaaaatccacaagatgccctttgatctgtatagcttcagttgtgataagttctgtttttttcttcttttagaaactgaaaaacaatatagaagcagagaaaagttttcagcttttaatattttcgcaagtcattttttgagatattacttggtcagtttttttttttttgaaaaaaagaatacctatgctctcttgtttgttcttatttgaatggtaactgattgtaggtgcagtggccactccagtgaccccagttgaaaat

SEQ ID NO: 57838 - DNA, 690 bp, Populus trichocarpa
  Intron number 5 from transcript POPTR_0001s37670.7 (locus POPTR_0001s37670) derived from phytozome v7.0 (chr-ID scaf fold_1; pos 36643108 to 36643797 reverse strand)
attgacacggaatttctggaaattctagcgttcaggtgtgaagtttttgttgctgctgatggttttttaaatgttactcaaactattgattatgcttaattttttagctatggagaatggatggtagtttgatttttgaacaccaattatattcttactttcgacttttagacttgttcttgaagatggtctataatggataaaccaagatatggattcagggtgattttctttgcgtagagaaagcagcatctagagtttctccttgtagattctccatgtaatggccaaacctgttccgcgttaaaaagaagccattcattcttgggaaaatcaggttgtccgatttttttgttttctcatgaagagatcacttgcatctgtccaaattgaatatcatgaatccctttgccagatttctttgaaatacatcccagtccaaaaactcagatttcctgactctgcatttaatgcatggattggataatttcgcactgccatgctctatacatgatctgatgacgatgtctctctctctatattcttatctaaactcaagtgtgcataaagatttctattttcttcctgtgatctttctggctatctggtgtattaaataaagttcattgacttcagtcagtttggtgccttgacattttcctcccatgttttggctatgacttgcaggca

SEQ ID NO: 57839 - DNA, 809 bp, Populus trichocarpa
  Intron number 1 from transcript POPTR_0001s37670.7 (locus POPTR_0001s37670) derived from phytozome v7.0 (chr-ID scaf fold_1; pos 36644399 to 36645207 reverse strand)
tcgcactggcaaatcttgtagaaactgcggttaaggtaattactctctgcttctgcgaaacctagatcaccacaggtagagacagaaatagacattaatcatctaacaacctataaccatgcttccttaaactgaattcatcatgtgaattcaggtttatgaatggaaccttgtcacatgattattcaccaaaccatctcgattattggatcttttgtgtattatatgttatattctccgcaatcaattggaggcagctgagatataatcatcccagcttcagaatagaaaatctttttgatcttttcattgctgtggcaacataggtgccgatccctcttttcataatagagcaccagccaggaagatgaacttaccttataatctttcacaaattctctcattgtacttaatatatattacatatttttcttatatagcgacaataaatcatgtccctatgtaggaacaagatgagtgcaaacatgagcctgtgaagtgataagataactaggttttgattctcagaacctggtgctcaatcagcctttttgacatgattcaagtcccaactcttaaaaaccaattctgaacataaaatcctattttttgtttttatgaagatagaataccaatggtatattcatgaaatgttgatctcacctgttttcttcattaattttaagagatttgttgtatacagtcatctcccattactccaaaaaatgttatgctagtaaacgatgaaaaatgatgacctctctttgtacctctgttgtcctgataacagaaaggattccagtaccacc

SEQ ID NO: 57840 - DNA, 446 bp, Populus trichocarpa
  Intron number 2 from transcript POPTR_0010s17270.1 (locus POPTR_0010s17270) derived from phytozome v7.0 (chr-ID scaf fold_10; pos 15926118 to 15926563 reverse strand)
ttttattgccttgcgtattaaggtggagagccctggttttgacgactcttgtgcgaagaaaagttgtgatactggtgttgttaccacaaaccccttgaagagctgtagcccaagcagagacacaccttcaggcttcaggtatgggaacataaaaagtgtgatttgtcagctgagttgcaaagcatcaatatggccttttatatgttgaataagaagcaagaaaccatggagagatcagaaaaatggaccaagaatggttgtagctgttttaagttggttacaaagtagaagaagctataatcgaaggatttttttattggccgagtttatgaagtttttgattttcctcaccccgtaaattcaaatctgcaagatattttggttttaattctgcgaaggactatagctctgtattatatgcaatattattttcaggattggaggat

SEQ ID NO: 57841 - DNA, 556 bp, Populus trichocarpa
  Intron number 2 from transcript POPTR_0010s05580.1 (locus POPTR_0010s05580) derived from phytozome v7.0 (chr-ID scaf fold_10; pos 7023532 to 7024087)
tacgtgcttgtgtatcacaagaaaatcaaataccatttattggtagaaaagatgtactcgctcaaaatattatggcagcatgtagctttgacatgcaatttatatttatttaggctaggtggaaaggcaatgcacacgatacaataatatttcttgaggcgattgacaatccaatataagattttcgaagctaccagaaggtatcgagaaataaaaaaagggggtgttgttcaatttgaataattttttttttatttgcaataggaaataagttttgaactatcattatcttgatgcagagaagtatcatctcgttgattcgggatatccaaacgagtacggttacttagggccatatagaggtgagagatatcatcttccataatttcatcgatgaggacaaccgcaaagtcgggaagaaatattcaaccgtgtccattcatcgttacgatgtgtaataaaacgtacatttggagtttagaagaaaaggtgaagaatcttgcaaaacatgcatgtgtttccttagaaaacacaagttcaaattgttgtcgcatca

SEQ ID NO: 57842 - DNA, 733 bp, Populus trichocarpa
  Intron number 1 from transcript POPTR_0010s25170.2 (locus POPTR_0010s25170) derived from phytozome v7.0 (chr-ID scaf fold_10; pos 20983813 to 20984545 reverse strand)
gctctctctctgcatccttagctccttcaggtatcgtaaaccttagcttcttttatatctttgattattgttttaatactgtacatgtttagcttagcttgtaaagtttggtctttgtagttttggttcttcgtttttatgtttagagtttgatctgattcttagtttctttggctaatgggttagggactttgtgtttctgattaaacccattttcgggttccattgacttgtttgttaaagtagagtgtgttagtctttgcgtgtaaagtttggtctttgttgttcttgttcttctgttttgtgcttcaagtttagaattttattatgtgattctggtttttttgtcaagtgggttttctttatgtagtttttctcaagtgtgttatgtttattttagttattggaattgataattctatgttttgcaaatttagcttcttttatgatttgattggcttctgtcattatgtattgcatgttagttcttgcttcttagggtttggtatcagttgttactataagttgataacattttctatctgatcctcgtttttctctgatgagttttctcaagttggttttctttgttttttagcaatttgaattggagatttggtgattgctatttaagccacgtgtaagctttgactggatgagactgagtttgtcttgtgttttgtttttgtgtagaatggatagtcaaattaagcatgctgtggtggtgaaaatt

SEQ ID NO: 57843 - DNA, 504 bp, Populus trichocarpa
  Intron number 3 from transcript POPTR_0001s19430.1 (locus POPTR_0001s19430) derived from phytozome v7.0 (chr-ID scaf fold_1; pos 17110657 to 17111160)
gctctcttccaatcacagtatcaggtacatttagttgtccgtgaatattttatacaatcaaattgagtgatgggctccagcatgtcaaattagttcccaagtcaaaatacctcaaaaagaacaagctatgttgatcatcacaactcacaatatctatatgacctttgagttttagttgataaggaatgtaaggttcttctatttcaactgcatctctcaaaagtgtttcttccatcttatgtagaagacttgcaagaggagtgatgccttcaaggttttgcaggtcttttatcttgcatctcgtcaacaagcataaaaatacagaaaaagctttctatttcttttcacaattttgtttatttggttcttccactttcagtatttctgatatttaggggttaatggccatagtgcagttgaggttttgctgcggaggattatttgagtagcaactcttgtaacatgtatcaaaatattggacagattcaaagggatatttggtgg

SEQ ID NO: 57844 - DNA, 447 bp, Populus trichocarpa
  Intron number 1 from transcript POPTR_0002s18140.1 (locus POPTR_0002s18140) derived from phytozome v7.0 (chr-ID scaf fold_2; pos 14034724 to 14035170 reverse strand)
cgccggcctatcctggtatgttttcctcctctccttacgtttaattcatggtaattgttaaattttattctttctggttccgctgatacttgctcatgtttctgtcattgattaaggttaatcaaacactgtgggaaaattaaattgacaaattgagagaatttaggaaaacatgataacatgctccgtattcattaatgaatctgcctgaaacttcaaacctcgtatgaccaaaatctgaaatttgaggtgccacaatctaaaacatgacaagccacacatatactttacccataaaaatgttttcagtgaacccaaaagaaaagaagagaagtttgcagagaatcacaggctttacaggataaggaaaagactagacaatgaaagacttggtcatagatgtgggaactggtttctcatgcaggtgtggagcacgtgggaggagat

SEQ ID NO: 57845 - DNA, 779 bp, Populus trichocarpa
  Intron number 2 from transcript POPTR_0001s02600.1 (locus POPTR_0001s02600) derived from phytozome v7.0 (chr-ID scaf fold_1; pos 2059521 to 2060299 reverse strand)
tcattacggtgaaagcaggagaggtatgtatctgtgcagctttttaatttatgttttggatgcaatgcttttttatcttgtttgttagaataaaaatgcagcaagtgtgaaaaatatagtcttttgtgtcttgtccttgattagttagattatattttatagctcaggatcaaagcattttagtttggggacagttcaagactcccgtgcttttaaattcaaccgtgtttaaaactatcaatcaacagataaggttactttattctctggtgcctatttttggttatcacaccacatccaaagtacttgccttctgctgaaaggagagctttgaacagcatattttaaattacttgcaagcaagataaagcactggacgtgggtttatttcccatgggagttgctcaaatttcagtatgttcatcctcaaattttcattgtcattctggttcttttttttttggtgaaaataagtgcaccttaatgtagtttgatgacttgcaattacaattcctgtagctaaatgaaatattgtttaaattagcaccacattatcttttttttattcaattgttgacatgcttcatagatctcaatgaataactgttttccccacctttcttattctttttttttcctgaaaataaaagtgaggatgtgttggtggagaggtggttatgaaggttctgttatccctcttcaaatgggaacctattgaaagtatgttgagtcatcaaatagtgtccccttcattgttacaggacattgcatcaaagatt

SEQ ID NO: 57846 - DNA, 593 bp, Populus trichocarpa
  Intron number 1 from transcript POPTR_0007s12350.1 (locus POPTR_0007s12350) derived from phytozome v7.0 (chr-ID scaf fold_7; pos 12674268 to 12674860)
tttttctctctgtggattttcctcgaacagataaggtgccttttaagatccatgtctctctctctcattttagattttggtttctcgctttcatcgatttaggcattttgatttctgggttttgagctggtattttgttcttgttatcattcagatttttttgtgtgtggtttcacgttttaaagtttggatcttttttgggcttttagttattgcggtggaaccctttattttcgtttcattcctggatgatttttcactcgaatataaaagattgcgatctagttttaaaaaatttgttcttttaacttgaaagcaatggatatccaatttttcaattagtgaatgactctagagaatcacgtcttcttgatgtttttggagggtccttttgtggttagagcaaatccttagtgtatttaactgggtatttgtcttctttcttctttcctgattgattggttagtagttttgtgtgcgattttgatttctgttgttacggtgagtagattatgttgatacacgtgatctttgtgaaaatctaaagggatttgatggctgattagtgctgttctttttctatgacaggagct

SEQ ID NO: 57847 - DNA, 710 bp, Populus trichocarpa
  Intron number 2 from transcript POPTR_0007s12350.1 (locus POPTR_0007s12350) derived from phytozome v7.0 (chr-ID scaf fold_7; pos 12674935 to 12675644)
gaagcaaagtgctggagaattgcgtcttcataaaggtttgccccttgtagttagtaattgcacggttttattttgttctgttttaattactctcgtttaagtttttgacgatgaatacgtgccttattgtagtgtttacatgttagttcttaaaaatgtttctcaacccaagttagcaatctcataatattttttttgtaactttgatgtacaaggagaggaagattaattagttggatgatttctcttggatgaaaagatttttgtttctcttcttgggctaagaaagaggtgtgtgttgagttgaaagttgcaagttctgttgtaatgtttcaagcaactcattggctcaaagaaacccgcacacatagcatattatttgatcttgcgttcaatcttcttgcacctcccactggacccttttacttgatgtgatatcaagtaactgggatagatcaacaacagatttctgcagatcaaactatacatgaatttgttttagtaacaaacttgatcctgaaccagtttataaaacaaacttttcttatttaagttggttctagttgtccgcttcaaggaacactatataaaatagataatcttggaagttgagatcatttcttatgtggtgttatcttattgacattctcactcatttcctacattacatcgcatgttgcagatatttctgagctgaacttacctaaatc

SEQ ID NO: 57848 - DNA, 1024 bp, Populus trichocarpa
  Intron number 1 from transcript POPTR_0007s07600.1 (locus POPTR_0007s07600) derived from phytozome v7.0 (chr-ID scaf fold_7; pos 5964620 to 5965643)
ctgaccttgctcttgccaggacccttcaagaacaggtctctttctttttctcaatgtttttatcttttttattgaaatggattggtttttaagcttcttgggtctctataatttgtgggttcttgttgttttttgatctcacggtcaggtttttttttttttttttgttaaagtttgaattttggtttcagttgagggaatgaattggttttttaggttattgggtccgagtgattggtgggtttttgttattttttgtgctatgtgaaaacttgagtgaaagtttggattttcaatttgagttttagcaggtgttattttcccttttggcttagccaaggagatgaatttcagtttttaggttcttgggtctttataattggtgttataatctcttgaatagacgtttcaatatcatcaaaatttgaattttaatggatttttcgtattttgataaatcaggggggaaatgctgtttgtattttagtttgttgcttttgagaacccaaatggagtaaactttgaaatgaattggtgcttgattgtttggcttagttagttatgttattaattatgaaaatacactcaagtttcaatcagcaaaacatttggttaagttcttctctaatgtgatgaattggctcagttgattctgtttttccgtagaggcattattatcaagttttagcctttggtttctctatccaagaaatttggttatgttctttacttctcttactatggttatccttttcttctaaccgtctgatctgatgtgcttgatcatggagtaggaaatacactcaagtttcaatcagcaaaacatttggttaagttcttctctaatgtgatgaattggctcagttgattctgtttttccatagaggcattattatcaagttttagcctttggtttctctaaccaagaaatttggttatgttctttacttctcttactatggttatccttttcttctgaccgtctgatctgatgtgcttgatcatggagtaggaaagagcatac

SEQ ID NO: 57849 - DNA, 225 bp, Populus trichocarpa
  Intron number 4 from transcript POPTR_0007s08440.1 (locus POPTR_0007s08440) derived from phytozome v7.0 (chr-ID scaf fold_7; pos 7252572 to 7252796 reverse strand)
ttggtgctggccaggtttgcctttttctttgatctatagctttgcttcaacataaactgattgttaatttgaattaattctgtgtggtcttactaactaataatcttttcttttcatgtgctgtgaaaccaaaactttgttgctatttacttgtacaaattctacatctctgattgagcttttgttttagggttatcttgcccaagttctttccttccagtacca

SEQ ID NO: 57850 - DNA, 581 bp, Populus trichocarpa
  Intron number 1 from transcript POPTR_0010s08080.1 (locus POPTR_0010s08080) derived from phytozome v7.0 (chr-ID scaf fold_10; pos 9018644 to 9019224)
ggactcaaagatcatctaaagctcaaggtatgcctacaagtttcattttgatgttttcataattcttagcagttcttgacattcagaaggttgtgagaaatgaacaaggggtagtggaattcttgattgctctgtagttcttacacgttccacatgctatgtatcatttccattttgatttatttttcacttcatgaggatcatattcaacaggacgggcagtgtataatcatctcatctcgcgttcttgaacaatcaaattaagagtgacttgtagatttcttgctgtgtttatggctacaattccacaagaaaacagtatcagataataataaaagattcaaggactgctatgatcataatccacaaacatttgcttgtctaacaatgatttttgtatttctaagattttgaaactttgtcaaggaaaggcaaagtgtgcaaaagcagtcttttggtattggtaggcttgagatgtcgaagtttgccattgaaagtcaagttatatcaccatggtcattttattaatgcgcttgtttaaatttgccaggcatttcggctaaagcgctttctccttggaa

SEQ ID NO: 57851 - DNA, 1012 bp, Populus trichocarpa
  Intron number 1 from transcript POPTR_0007s00710.1 (locus POPTR_0007s00710) derived from phytozome v7.0 (chr-ID scaf fold_7; pos 359156 to 360167)
caataccactgcttttctccgccttttctccgccagtactactttttttctttctttcactctcagttattaaatcccaggttttcttatatcagattcatcttctttctttactttttttttgtttaaaattccattttttttggcttgattgatgagaatgaaaagtgggttttgttatttgtggagggggatgggaaaaggagtaaactttgtggtgtgaaaatggttgacatgttgagttaagggcatagagaaagatgaggtttttgaggttttgtatgctgagaaattaatgaatcaaaatgggagctgaattgatttgcatctaattggtgctttggtaaatgccaaaggggaaaatagacaacacccgttctggttaagtctttattaagcttattgaagagaggagtttgttttcttttcgtttttagtaggtagttttcggagaagggaaatggatgaggggttgaaaaagaagcaaacttcgtggtgttattatggtgacttagcgaattgaggcatggaaaaagatgggatttttttaggatatttgctgtctggtttatgagaaatggaagaagggaaatgggaattgaaagagtgtataattttattaagcttattgaagagagggctttctttttaataggtagcttttggatttacaagtatcttaacattagtgccaattatacgccttcttgctaatgtgccgttcaagttgaactcaaaatatgtaactaacattatttcagtcaaaagagcagatggatggaaaattgtaaaaattgagatgacgttgttaattaaaaaaaggtctttttaagaacgtatcaaggaataaagggaactggaaagtttgttgttattgattttgcagtcttgcttcttttcaaaaagaggaaaaatataataaggctgtcatgatggatcgatatctttgtttcttatgatgtgttattattagcataaatgagatcattttttttttttcttcttacgatag

SEQ ID NO: 57852 - DNA, 684 bp, Populus trichocarpa
  Intron number 2 from transcript POPTR_0010s14670.1 (locus POPTR_0010s14670) derived from phytozome v7.0 (chr-ID scaf fold_10; pos 14199188 to 14199871 reverse strand)
gacagtcttctggaaaggtataatattctgtctgtttttatctgacctgatgaagaacttgattataaggtagtgatcaaactaaaatcccaatcaatcaagcttacctaggcaagacatcaatcaatagaaggtttctttcttactttaatgaggaatgttgggtgaaaattctcgaaagtcaaaacagagagaattgaaatttgactttttatgctttatgacaaggctcttttgtcatgtttgccttctttacacgggcttgagcaagattggtacgccggcctaacctcggatgcagggagcttagggtgcccttctaatttcttgacagcacacacggagatcatgaaagttcctgcatcacagcagacaataataattagtgatcaggggttcctataaagttggcactggtaaaatgccgatggaggctagtttgatagatttttttattattttatttaaattcaatggtgtaacgatatcatattctagcttatatgtttctagcaacggagttaaaagctcgagtaaaaaacatactcaatttatccatgtcagcaatcacaaagtatttttgaaaactttgtttcagtataatatgtccatttctttctttgaattataataaatgaaatgactgctcgatgcactccattggtgtcaattagccaagcgagc

SEQ ID NO: 57853 - DNA, 343 bp, Populus trichocarpa
  Intron number 1 from transcript POPTR_0001s34956.1 (locus POPTR_0001s34956) derived from phytozome v7.0 (chr-ID scaf fold_1; pos 33219472 to 33219814)
agttactttttggaggttgattcaaaggggaataaaaaaaaacatagggccacctagttggaatgattgggaaaatgctagaactttggtgaagttcttaaagattttttacatggttacattgagattttctggctcattgcatgtcacatcaaattctttcttcaatgaattgatttacatacatacaaacttgttataattgtgtaaaagtaaaaataatcttttaagtggaatggcaaggagaatgatgttaaagtttgagaagtattgggttgtgaagtaaatcaaaatattttattgtatgtggctaatgttttgggtccacgtcccaagttgaaat

SEQ ID NO: 57854 - DNA, 802 bp, Populus trichocarpa
  Intron number 1 from transcript POPTR_0007s05990.1 (locus POPTR_0007s05990) derived from phytozome v7.0 (chr-ID scaf fold_7; pos 4134066 to 4134867)
ttaactctgttccctctgcccttggttattgtgatgttctgtagggtcaggtgtggtggatgcccaatataatgagctcatcaatgtaagtttaacgatttaggaattctgccaatttcctatcttggttttttgtttccctgaattttgctttattgaagtaaatataccaagcattaatttcaaattgactaattaatgatagttattcaatatttgtctagatttgagtaagtttttatctgttcttgattggttcttttatgtttttctgggcaatgatgattggagaattgggtttttttttttttttgtaattttgagtctttcatattgaagaaactgtgaattaagttggataaaggactagacttaattggagtaatgaattaactttatcctctaaagtgcaagtttgtttgattcatgatcttcttcaatttctcaaaaaaaaaaaattatgttaggcagaaacagctatttttaaatgtgaccgactaaggtttctgagaccaggaatctttgcggcagtctcttaacttctaacttgtcactatgattaatgcttgttttgtggtaatggatctctattagttgtattctggtcatgaaatgttccttaaaaattcaacttgttttagtacaaaattggaatatctttttttctgttagcaaggagctatcaatgagctcaccggaaaaacaacttttgatagatagatgccaaataccatgaagcgtcacaatctttgtttttcctcctctccctcgatacaggtccgtgacactgcaagatttgctg

SEQ ID NO: 57855 - DNA, 755 bp, Populus trichocarpa
  Intron number 2 from transcript POPTR_0007s05990.1 (locus POPTR_0007s05990) derived from phytozome v7.0 (chr-ID scaf fold_7; pos 4134918 to 4135672)
cgcattggtgttggaaaggtgtgaaactattagctagaattattagtttggttcagttttcttcttaaacatacaagtgggaagattttctgttgaaatcctgatttacagccggtcatgtttgaagcttctacgactaggatctaaattacttgctaccatgtattatttgagtcacaactcaaagtgctcagtagagattttgtattacttttactgctcttgtgtcttcattaacaggttacattatctgcattctatgtttgttacttattattctttgattggattggtgatgctttattccttctcaatctaatcacgattgtgggcagaacaccattttccacaacgtcctcatgtaaggatagactagagttttcatgtgcactgcttaacaaaatatttgatacttctctgtcctggcattttctgtgaatccttctgttgtaaattgtaatgattaaggatattgaagagctaaattgactcttccattaggagatcaataattataagaaatcgacagcaacaccaattgaaacttgtatgtgactcttgtgatttgtgatctttccttcatgaagcagttctaccattcttcacagaaacaataaacagcatatgacatagtaattgatgctgtcattgctgtgtataatttcctcacatatatctacactggtcaactttattttacatggttatttatttgttaaggtcattgggagattagatcagggaattctaggtgt

SEQ ID NO: 57856 - DNA, 600 bp, Populus trichocarpa
  Intron number 4 from transcript POPTR_0001s10770.1 (locus POPTR_0001s10770) derived from phytozome v7.0 (chr-ID scaf fold_1; pos 8378833 to 8379432)
aggactcactttccaggtagtactagtagtagtatatgctttgcgtgttgttggtatttcttcctgattggggtaggctccattttttcatgtttggtatttaccggcattgcatcctcacacttaggtgtctacttttcttatcaatcaatcaaacatgatttttaagttcagtggaagcagcactgttgttgcaagttgcaaccttacaatattaaggtagcttcatattttgtctaattgatctttctaattgaaataatcacaatccacatgaagctcctcctattggagattaatttggacccctgaaagagttgtcactcagattaacaaagccattttaattataatgtttaagatccttgatccattgcatcatctattattctgtgtttatcaacattccaaataatacacaagtatgcaagttactgacatactgctatttcactctttaccttctcatttgtgattgatttttgtgattcagtgccgacatctgggtaatatttagcagcaattgagaactgaggatttgcttctgtttaggtttttcagcagtgattgattcatgtttctgttatctatgctgcagag

SEQ ID NO: 57857 - DNA, 595 bp, Populus trichocarpa
  Intron number 1 from transcript POPTR_0001s05360.1 (locus POPTR_0001s05360) derived from phytozome v7.0 (chr-ID scaf fold_1; pos 4144526 to 4145120)
ggtgaattggaagagattggagctgatatttggtaagttttttttaaaaaaaagttttgatatttttgttatgtggttcaaaaagtttgatattttttgggtttttatgtgttgtgttaattgatgtttcattgaaagatggtttgtttttttgttgaattagttttgtgggctctctttgttttgattgtaaatgcatgagatttgagttggtttgaggttttttaatggttttaaaatagaatagtgttagtgtaaagggaaggttgttatttcggcagaattattatgtttttaaattttatgagttcttatcttttgtttggtacctgagaaacgaaattgtgtatggaaaagaattcagccgttgagtgttagatttcaaatctgaagcttacctttccctgatcgtaatataactagttttcttagattaggtgatcttttccttatctttgttttgagacagtaacatgctgctttgtgattttcaaaagtttagttggtgtatttcttaatgattctcttgatagaagattgagcactgtttaatgttcgatgactgatgtgtctgacagcgcggaccttgaagctg

SEQ ID NO: 57858 - DNA, 683 bp, Populus trichocarpa
  Intron number 1 from transcript POPTR_0001s34270.1 (locus POPTR_0001s34270) derived from phytozome v7.0 (chr-ID scaf fold_1; pos 32430021 to 32430703 reverse strand)
ccagacctaattcgcttattaaagctgtctctacggtgagatttctcccactgccttttttcttcttgtttatgatttgttttctgaatttgatggtgaaaaggaaatgtagaaaaaataaaggataattaatttgtttagttttgatctgtttggattgagtctttttttttttccttatcgaatgctgcttatttgaatctcgcttctctctgtttgatgctgaggaaagagataacgtcaaaagtagggagaaacggcttgtttgttttcacttttttactcttttcaatccggtcgtgtcctttctacgatttaaaatatataaaagctaaacttcaggtgccgtacatcgaaatatcttcagaatcatgtcatgttgttgaatttctttgtaaatgtgtggtgctaagtaaatttgggaggaaaaggaaggtgtttggaacccgcgaaatgggaatgctcctgattcaacataattataattaggttttccttggtgaacttgtttattagtaacattaaagaaattgtaaggcagtttcttgaatagaatgagctgaatgttgatagttattgataaagtttgtgaagttctttttttttttttttttttttttttggaatttgcacgatttttgtgggcagccagtaaagccggaaacggagacgaagcgtagtaa

SEQ ID NO: 57859 - DNA, 945 bp, Populus trichocarpa
  Intron number 2 from transcript POPTR_0007s03560.1 (locus POPTR_0007s03560) derived from phytozome v7.0 (chr-ID scaf fold_7; pos 2053659 to 2054603 reverse strand)
tggcatactccaacaatctaacattttgcgagcaggtttgtaagattctgtctattttctcttttttcattaataattacaacctaaaacacattaagtattttaactagctagtgggatatgtgtgaatcccagtagagagaatgcattgacaaccttaaagagaagagccttttagcacagcacttaggactactatattgaaaatgtttacacaaacacatatgtgctcataaggttgctggtcatgtgcgttgttttatttgagagaaggtggaggtcatgctggcacttgttctaccttttcgtatcaacaggcaagcccaagtttagattttgctgaaaattgtcttcgttcatttgatttgcgaaattcatggagaaggaaaagataaagagtcaacgattttcatttcttatggtcaagaaatcttcaatattaatattccctaaagaaagctctattgagtgaggctcaagacttgcccaaaaggcaggccacatgatagcatgtacacagcattaaaggccactccccaatttttggtgagttcaaacttcaaagtaagagaatgccatagctagcataaataaccattgattgtgtgaaatgttataaattctacatcaagcacattaatttcgagtacactccaaattgttaaggtagaacaatataggaactttacttgttttagtatttgatgcaaacatgagacatagcaaataacaattttgttcatagccagatttctatcttacctttcctcgcgggacagttttgcctgaacgctcagcttcatctgctcaacactttaaatactgtctatctttgctagtagtctagttaaagaaacacaaaatgattgtatatgatcaacaccttcttacattaatgaagccaatgcttgataaatattttcttgatattcccaggtgaagttg

SEQ ID NO: 57860 - DNA, 539 bp, Populus trichocarpa
  Intron number 1 from transcript POPTR_0001s03620.1 (locus POPTR_0001s03620) derived from phytozome v7.0 (chr-ID scaf fold_1; pos 2881618 to 2882156 reverse strand)
ttccagaccaagccttcagcgaaagaagaggttagctttatatatatatatatatatatatatatatatatatgcagatactcgctttgcagtaatttgattatgtctgtaggttttagtttcatactcctcttcctttctttatggtttatggccatcaattgaaggctaaacacatagcttcttataattgatttggttttgtttttcaaacaaatttcaataaagtacgtaactttcagcaagaacaagatattatgaattcttgtcactgggtttcatgaaaaaatatatagaaatgtttttgctgtcatatatcatcaaaatattgattcatagaaaaaaaaaagtaactattacaaaagggactagtagccttcttaagttttagctaggaactggctggacatgattagaataggaacttatccgaggtgcttctaaaacttgcagtcttcttggagttttgaagttgaatttattttgtataattactaatttcagactggagccatagaagaggaattgaaccgagtgag

SEQ ID NO: 57861 - DNA, 485 bp, Populus trichocarpa
  Intron number 1 from transcript POPTR_0001s37110.1 (locus POPTR_0001s37110) derived from phytozome v7.0 (chr-ID scaf fold_1; pos 35922685 to 35923169 reverse strand)
ttttcgaacgtgaatctgttgttttttcttaacaggtatgcacttctgggttctatttgattttacgtttcttctaacgaattcgtttatatttcctgtaatatgtagtaacagtttggttttgatatacatatatggtttacgttttgctgtttcgttttttttttttttaatgctggctggtgcatctatatttagtgtttttgttatcttgtttattagcctatctttattttcttgtgattttgtgattctatttttagttttttgattggctatggtgcttgtttttttttatgtcttgtcatttcttctgcatgatatttgataaacggtttctgcttcatttttggcaacataattaaggatcattttggcccttcttttgttgtttcttattatgcacagagccttatttgaagtgtgtctttctgggttttgcgttttcagggacggagaagtgggcggggtcgtggcgattcagg

SEQ ID NO: 57862 - DNA, 505 bp, Populus trichocarpa
  Intron number 3 from transcript POPTR_0010s17370.1 (locus POPTR_0010s17370) derived from phytozome v7.0 (chr-ID scaf fold_10; pos 15988606 to 15989110)
caacagcaacaaccctctcaagggctatatacacggtaatgacacctaaccacgtagccgagaagccttactctgagctcaaaacttttgaagaggataggggaaggaagagaatgtttagttgcttcagataactcaaacgaccctgaatcattcagtcaagggaaatgcaatatgcaggacttctgactcaagattcctagggaagattatactatttgcatgcagtgatcacacagacacttcgtttgtatccagcagttcctcgggtaagcctaacgtatcgaatgcaatgcagtcaatgaaaaccgtgtaaaaactttggaaaatagaaaacagatgatttaatttgatatagctagagaaaatggaaatctttagccatggagatcttggttttgatatacgtgctttttttaaaataaaaaaaaaacatgacagcattatactgtttagtgaactgttatttgatgattgcaggatcccgaaggtatactggtggacg

SEQ ID NO: 57863 - DNA, 422 bp, Populus trichocarpa
  Intron number 1 from transcript POPTR_0107s00210.1 (locus POPTR_0107s00210) derived from phytozome v7.0 (chr-ID scaf fold_107; pos 5983 to 6404)
tgcttgctctctttgcctcatttctttgtgtttcttggcttttgcatggagggttttgcttctttgatgtatgatcttagtgtatattcacaagattttatagctctctttgcctcttttcttggtgtttgttgcttttgagtgtttgttaaattgagtgacatgtgaacatgcatttctttttccatgatgatatcatcagcgccttttatttttcttccttttttcttgatggggtttgctatttgtagattttatttttatttttttagtaagttgtcatttcctctttttttttttatttaacataaaatataattaattattaattttattttattgaatttgaaagtgtatatataatatattttgttctttaatggaaagggtggtgggatttcagtatatctttgcaatcttca

SEQ ID NO: 57864 - DNA, 749 bp, Populus trichocarpa
  Intron number 1 from transcript POPTR_0001s06910.1 (locus POPTR_0001s06910) derived from phytozome v7.0 (chr-ID scaf fold_1; pos 5281389 to 5282137)
ctcttaatcgaaacccaccacccaacaatctcaaggtttttttcttcttcttttgatgcttattgtgtatatttagttcggtttatagtgtcaaagttttagtctttggcttgtgagatatgcatgtatgatatgatgaatatgtgtttgtgtgtgattacttttgtttgattttcataatttttctctttgttttgttgattgtatttatatgattcttactcatgatttgaagtttgaattctttagtataattactttaagcctcttcaatttgttggtggattatgattttttttttgaggtctttgggttgatttttatgctatgtggtcttggttgttctgtttggttgataaattatgatactttgtctatgtgttgatattctatcggtttttaagtttttggttgatgggaagtgaaaggaactggaataatcaaaatcattaattgcagttcacttgcttatttctagttttaaggtagaacctgcagctccacttaactgatgaagttaaagattcaggcttgtattgtatgataaaacaagttattcgcaattgtgattttgttcaaaatcttggatttagtaataaaattaggtgtactctttgatattgaattagttatgaactgtttgtattgcttggcttttctacttttattagattttttttttatctttatggtaccttttttgacaaacggggattgttttcttttcttttttctgcagataaaatctc

SEQ ID NO: 57865 - DNA, 725 bp, Populus trichocarpa
  Intron number 3 from transcript POPTR_0010s12240.3 (locus POPTR_0010s12240) derived from phytozome v7.0 (chr-ID scaf fold_10; pos 12295157 to 12295881)
gtgcccctgaactctgcggctcgttttcctccaaggcatgtaaatatgaactgtttttccttcttactgagtttattattgcattcatgattgaaaaaaataaaataaaattgattgtcggtatgtgttatttttgaaatccagcttttaagttctgctcagtctacttattgatttttattatttcaatccagcttagtgttttggaggtttcacacatgcattttgctatgctaattaattatctgcggagaattttttgagatgagcacaagaatgtggatgaattggttttaattcgaacccctcccaccttcaatatcattaaaagaatgaaagatgtcctccacaagttcaaacggcaaagtttgcaaccctccaacatcatctatcgcatcaatgtgcagcttgttatccttgaaagttgaatttggttaagaaaatcatgtcagatacccgatttgtttttctgccgctatagtttgacatgacagattgatcaactgtggtggttcattttttgcattgtttcatctactatccagcatttcccaatgctcgataatgttttgtgcaccatggttcatttttcttcttcttttggatgtgacctaaattgcattgctcgtgccattattcatttggcgttcaagattttgtttgacattttttcttaaaatttgtgttctgcagtacactcctgccattgatatttggagcatagg

SEQ ID NO: 57866 - DNA, 729 bp, Populus trichocarpa
  Intron number 1 from transcript POPTR_0010s26000.1 (locus POPTR_0010s26000) derived from phytozome v7.0 (chr-ID scaf fold_10; pos 21397007 to 21397735 reverse strand)
gatacgttcgcaaggtagattccttttcttttcttttccttttttctcaattaattattaatctcaagtaattacttagatcgaatttttgttctggttttgattgaacttatctgatgacctgtttctgttgatttactgcgatcagatcgagtttttggatttatgtaaaattgatttcgtagttgaatttcgagccgctagatctgttttttaaaggttgtgatccgttgagatacgtaaactcgagtgattattgattttctagagatcttgttagcctagttgatggtgttaaactgttaattataaaggtagagatttgaggaactgtgaagtggttgttagcgtttcaattctgtgtgcttttatgctttttttagcttggatttagctcgatagatattgaactaactgatgtttgtttcttgttattgcttgagctcgaagaaaaatgtttatgcagataacaaatgtttaaaaaataagatctgatttgttcggttcgtatttgtgcgttggttggctcacttgcacagattaagatttaattgctatatttctaggacgtgagctactgattgtgatgcatgattgttagttcaactttggtctttcatgatttcaatctaaattcgatgctgttttctaggctcaacgcattttcctggttttgtctgactaacttgatgtggttttgacaggtatcagggccagtcgtggttgccg

SEQ ID NO: 57867 - DNA, 397 bp, Populus trichocarpa
  Intron number 1 from transcript POPTR_0001s34180.1 (locus POPTR_0001s34180) derived from phytozome v7.0 (chr-ID scaf fold_1; pos 32310121 to 32310517)
ccgactcttcactctcttggttatctttatattttgtgagtagcagcattattctttcctttcctttctgtttttttttccttttaaatttgtgcactctgatatgcatagggttttagtttgttaaattattattattattattagggttttgtgggtatgtaatattgttgtgagatattcttactgcttggaaaagggaaatttaggaagtattgtgtcttcgttgcgatagaattggatgattgttgaaatttaagaaagatgagattctttactcaaattgatacggttagaaaaaaaaaaaaaagagtgatattatgttgatttagtgtagagaatgggttactcttgtgggatttttgtttgatcttgtgtatgtgggtggcagagaggc

SEQ ID NO: 57868 - DNA, 574 bp, Populus trichocarpa
  Intron number 1 from transcript POPTR_0001s25480.1 (locus POPTR_0001s25480) derived from phytozome v7.0 (chr-ID scaf fold_1; pos 24588937 to 24589510)
ttcctgttgtcgctggttgtgtcattgctagtggggtgagaacttatttttctttctttatatttttgttgccttggtgtatgatgtcgccgaatggcgccaaaggatccatttattagtttgggattgagtcttggtttttttgttgtagtttattgtataattctctttgggtatatatatatatatatttttttttttggtgttactgtcattgagatcattattggttattgaaaattgttaatttgttggatttttacaatggagagaactagctgctggctttcatgcagcaacaagttaactttaatctttcacaggggatctatgccgggtttgaattcaaaagttactatttatgatacctgttgctgtttgaggtgttcttctttagccataatgctactgaaacaagttcttaaggaaacctctttaattggtttagataattcattgaaaattctctgtttcctttactgatggaaaaatcattaacagattcgatcttatttgtttttctcattacttgactgaagggggagccgagttttcatctttttgggtttttaat

SEQ ID NO: 57869 - DNA, 402 bp, Populus trichocarpa
  Intron number 1 from transcript POPTR_0007s05160.1 (locus POPTR_0007s05160) derived from phytozome v7.0 (chr-ID scaf fold_7; pos 3331916 to 3332317 reverse strand)
cctatcattaaggttagatccatatctaaatttttgtagtttttattctcttttgatggtttaattgtccttgttgtttaagtaggactaatgtttgttaatggctctaatttatgtgtttattttagtaatttgaatgaatttaagatgatgatttttgtgatattatgttgggggtcttttgttttcttatgattttgcttcaaggccattgactattttgagaaaggattgagattaacgatttttaaggtcaattacagaatctgattttttgataacttttgaagttacaggccatgcctagttactttatactccagtattgttattaactttatttagaggctagtggatttggaagattgaggattgtgggtttggtttttataggtgggaaga

SEQ ID NO: 57870 - DNA, 1009 bp, Populus trichocarpa
  Intron number 1 from transcript POPTR_0002s25490.1 (locus POPTR_0002s25490) derived from phytozome v7.0 (chr-ID scaf fold_2; pos 22566236 to 22567244 reverse strand)
tcagattccgtctgccaggtctctatctctgtctctctctaaagaactctctttctatattgtgtcagctgctgctcttttagagcacacaatcacttttttctgttcatcacctctctactttttcctccctttctctgatctctccttttctcttaactccctttgctcttcttttccggctctgttaaaaaaatggctgcaatggatggactctgtcaagcttttttggaagctgattagctttaaaacctataccttttcaaaaattttgactgaatttcaattttttttgactgaattgggttcttgattacttttttcaaaacaaaaatgggttttgttttgtttttgttactgatgggagaaattgacagaacatgggaatagggaatattgtttgcagtaaaagagagctgtctttttggtttgcttttctcttaaatcaaggtggcttctttgttttgatttgtttggattcttttactttcttaacaagcggtttcttttattgatttacttgattctcgtgcccatttccttttctttcactgcaaaatccaaatcattagtggtatcttctgagctctcatacttctgcagaaagagggataagaaggggaagggtaggtagtagtgagttcaagttttgataaaaacggatgtcatttggttctgattgatctaagtctgcagagggttttgcctgatttggagaagctactttcttcatgtcctgtctttcctatgtaatttccatgtcatgtctttcctatgcaatcattgacaataataagatttggggtttctgtttaactttttagaaactccacttttgtttttcccctttaatctgttaatgcaatcattttagcagtatgttgtttctctctgtgcttttttgtgtctctgaacagatgtcttgttttagagttggagtttctgttttttcacgaggtgctaaactggcaattgatctgatgaattgtgttttacagtaggtgttgag

SEQ ID NO: 57871 - DNA, 724 bp, Populus trichocarpa
  Intron number 1 from transcript POPTR_0010s25930.2 (locus POPTR_0010s25930) derived from phytozome v7.0 (chr-ID scaf fold_10; pos 21360696 to 21361419)
gccctcctctgattattttgttaaaggtaatttttttttctcatataaggttttgtgatgtgggttttgttcaaaattatcgattgctcagttggttgtcgttagtttggttatgggtgtatgcaaaattgagtctttttatgttaaattgattgaattattgtttgttgttgcttactggagatggttttacccatcaaatatgatataatgctactgtggctttatgttggatctggatgattgtgttttgtgggaaatgagtgcttttaaaatttcttttgtttccttgttaaaatgattgccaagttttagaggagatgcagaagaagaaattttgatatttcgagtgtttcacttctaaatctgatattttggtaatgtgataggttctgggttactttagatgttgtcgatttacactgctttgaaaatgagcatcttttcttgcattccctttgcatatatcgaggaagctgctatataaatatttgggaaaaaaatgaattcatgttatcttcgaatcatctataaagtcaacctggttccttgtcaattggggcatttctcataataaagtcagtaaaactgatgtatttggattactactgtactaggttttgcagaagaataatttctgtttatgtgctccattgccgattacactattgttttttctctaattacaggtgcatcttcacaactggtggaggtaaagttgaat

SEQ ID NO: 57872 - DNA, 946 bp, Populus trichocarpa
  Intron number 1 from transcript POPTR_0001s08370.1 (locus POPTR_0001s08370) derived from phytozome v7.0 (chr-ID scaf fold_1; pos 6385484 to 6386429 reverse strand)
atccgtctgttcctctcttcacttcacttcgcttcgcttgtttgcttctgaggtgagagttctcacttccatttctactttagatttctcaactttgttttgtttgctgtttgttgtaaaggtgaaggagattatttcttcttccttttcttcttgaattaggttttttttccttcgtgaataagaaaatatgtgaaaatgcaggaaaatcttgataaactgatgcttgaatatcaattcggagtttccgagccaaatgctattttgttgctaactgttttttaattttcctctaatctttctcattgaccaaacataggatttctttccttttctttttgagtgataaaacgagggtaaattgtgatgagtttttttattggtaatttcgattattggaccggagagtttagggttgaatgaaatggtttggcggaggtggaaaatatagattctgtgtgaggaaggtgaatgatcaaagagctttttatcctgggcttaacttctacaaacattgcttttgtagtacctagtaaattcgatttacggggcaagtttggaaagtgcgcattgcatttgtattcttactgctggtattgctgtttcctttttgtgacaatgaaatagacgtcaattggcaccttctaatctccctcccttcgaagattcagggatttggggttgggtttcaaaccaaaacaatatggtattggcttctgttaagtaatgtcttggtggttgttttgagtttcagcgaaagactattttattgtactgtcattgttctggctttttttggtgttatttttgtgcgtgtgctctgtatacatcttgttttctagaggcacacctctttttcggtgattttaaatttttgatacattgaaatgaaaaaaaaaaattgtggataggtcctgcattgtcagttgggacataggaggccaag

SEQ ID NO: 57873 - DNA, 402 bp, Populus trichocarpa
  Intron number 1 from transcript POPTR_0043s00220.1 (locus POPTR_0043s00220) derived from phytozome v7.0 (chr-ID scaf fold_43; pos 31845 to 32246)
actccatttccaactgtgtgcattatttgtccacaaatagtaaactttaatttctaattgtcattattgtgagtgtactgaagttgatgtgaaggacttattcaaacatgatactagaggaaattagttctttacttgaaggctggttggagtatatccttatcattagattgtttttttaaaaaaaaatagtgaagaaagattagctctgctactgcgtcactagctaaagaaagtgcatgttctttgggatttgttcctctcaaatcactacttaatataattcatcatgttggaaacattctagcttttgaattcatattaatgtctggtggacccccacgattattgtttggtgttgatgaaaaggtttggccattgaaattaggtttgccccgactg

SEQ ID NO: 57874 - DNA, 737 bp, Populus trichocarpa
  Intron number 2 from transcript POPTR_0010s25990.2 (locus POPTR_0010s25990) derived from phytozome v7.0 (chr-ID scaf fold_10; pos 21388903 to 21389639)
agcttactactggtttgggtttcttcctttttttctaaaaaccccctctttattaatttcttgtttgtaagctgttagtctttggagaggctgggattagtttcgtttctggggttgaatctgggcggtcactcccattcgtagaaaatgcacctcggttgttttttgttgttgtgcttgtgctgtgctttctgtgtgaactttcaagcctgccgtgctgctgttttcttcttcgtctttatctatgtttataaaatttaatacagatttttgaaggaaacactgtcatcgtgtgtcctgatagaactcaattaaaccaaagtttagggtgattagcagccttcgaaatcaatggttgctgaataacctcgtgtactatttctacttcttgttctcagggcatttttctaactcattggtgattatcatgtctccggagaatgcagaaattaggaagcacaatcattttggttttatttcacacacgtcatccagagaaacatcttgattgctggcttgatttctttgtttttgggttgtggtaatcttcgatttatatgaactgatgaaatatcccaataatagagctgtctctgtgaaaaagacgatgtgttgctccttattaaccttttcatgtaattcgtgttatgttatattttactgctccactttaatttcagaggatcatcgattgatgttggtatttggtataggccaaagcgtagaagaaccaaccg

SEQ ID NO: 57875 - DNA, 627 bp, Populus trichocarpa
  Intron number 1 from transcript POPTR_0001s40270.3 (locus POPTR_0001s40270) derived from phytozome v7.0 (chr-ID scaf fold_1; pos 39638079 to 39638705)
cgccaagctcgccgagcaagctgaacgctacggtcagttcctctatatctctctagatatatttacatgcgtctttgtgctttatctctctagatctgtgctttcatgctcagtttttgctcattatagactcaaagtcacatgatcgatcgcagatttatggattacattaacttgtttaacctacattttatgcttattatctttgctttgaaataattattgaaaataattcttgtctgttttttttttgggatattaaaagttaattacgtctaattaatgttacggattttaattacttttgactgatttcattttttttgctagcaagtaatttgattaggattttttttcttaatttctttcttattttatctgataatgtaggatcttgccaaaaaagaaaataataataataattgctgatttagcagttattatttttatttatttatgattacgtaaaccgtgaagtaaaatagaaatgaaattattcctgagcgtcgaaattaatttagagttgaaattaaaaaagaaagagagaaagaaatttatgatgtggatactttctttggaagttgttagaacttggaatgctgatggtttatgtgatggcatgtagaa

SEQ ID NO: 57876 - DNA, 534 bp, Populus trichocarpa
  Intron number 1 from transcript POPTR_0001s17570.1 (locus POPTR_0001s17570) derived from phytozome v7.0 (chr-ID scaf fold_1; pos 14350256 to 14350789)
aagttcttgttaaagctcaagaaccgtattgataggtaattagttttatgttttttcttttgatttttacatgtcaagacaacaaccgtattgataggtaattaaatttatgttttttcttttgattttcttacatgccaagacgacatataaatcattgggacatttggtgtcatttttagttttctttttcctggtttcgctttcatttcttgagaaatggaaacattcttgttgccaaaaaattaaaattaaaaaatttagaaatccgtaacttaactaatccagttggtaattagaaacctgtaaaacggtagttgatgtctagtgatttttatttctgaagaaaagatggggtgatgacctccaatgattctaactattcagtagatagccagttgattaattagcagatatacagaggaactctgttctgatttttgaagtttttgcagccatgtgcactgtctctcttactgataatttttagatgatggaagtacttgtttgttggttattttagagttggaattc

SEQ ID NO: 57877 - DNA, 822 bp, Populus trichocarpa
  Intron number 2 from transcript POPTR_0001s33700.1 (locus POPTR_0001s33700) derived from phytozome v7.0 (chr-ID scaf fold_1; pos 31889530 to 31890351)
ttcccatcaacaacatcattgtcggatccgtttaggtaagctctattctttgattgatctaaatataattcttttttattatttattgaaagtttttaattgctaaattgagatctgttactgaattttgtttgaattatatttgatctcttccttttatgatcaataattgaagttgcttgtttttgtttttcttaaaaaaaaattgtgatacagcctggaaaccaactagaaaatccatgttgttttggtatgggctatagagttacttataggaaaaataagcaaggcgaagccctcaatctttgatgctgtcattgatggtggtggtggtatgttacaagatatctatggtgtatgattgggtccatctgtaaagtacatagttgggttgtaatgggttacaaaatgcatgtcgttaggcttttttccctctgttaaaaatgaagcaaggcgggttatccaaaggctatatataggtattggttttagtactaggtatgaagagatgggtatattgattctttttagctcacacttgatggttttgtgcgttttttgcctatggtttcagatcagatttcacctcgctcttgcttgaatgaatggtcatttcaaaataaacagaatgaatacttatgacattattatgcataaatgttcttacacaacacacacttcattttatttgatatcaaaatgttaaacttgatgctgttcaggaccttaaaataatgtgatgaaacattcggcggatgaatttgagtgtttttgggtgacttggagttgcagtgtaacattttgttgacattgcaggatagc

SEQ ID NO: 57878 - DNA, 358 bp, Populus trichocarpa
  Intron number 1 from transcript POPTR_0010s00490.1 (locus POPTR_0010s00490) derived from phytozome v7.0 (chr-ID scaf fold_10; pos 247734 to 248091 reverse strand)
agaacagaatcatcgacctcaagatcaccgatcaggtctttcacctttaatttcttctgggtttcttcttccgtgttacaattacatctctctgtttcctgttcggtgttctcattctgaaacaaacaaaaaattcctttctttacacgttttcttttcaaaaaaacaatgcaataaatggggtgggaatatggctttcttgttaacagattgctttgattttcttagatcccatcctaaattttcatgggcagacaaattgctgtttataattattatttacgcattctttagaattgttttaattattataattactacagattaaaagggagattgcaactttgaagctcctcaa

SEQ ID NO: 57879 - DNA, 560 bp, Populus trichocarpa
  Intron number 1 from transcript POPTR_0001s22870.1 (locus POPTR_0001s22870) derived from phytozome v7.0 (chr-ID scaf fold_1; pos 21833339 to 21833898 reverse strand)
tataattaccttcaccctcgtcatcttcctctgtggcaagtacttttacaatattacatatattagattcttgcatgcaaaactctatttattatgcatattattcactttgattattctgcttgctcttacatatatattttctgtttgcatatgcaatattaattacttttcattattcaatggatttcgtgaatccaataaacatatccagaagggagtggccggttatgttatcttttcaaaagaaaaataagtgaattaatgcaagattttaaatattgaactatgtacggacgtttagtcccatagagaaaatgaaagccaagtcttagattttagtcctattctttttatatgaagaaaaaaaaaacagattcacgtaaattagcatgaaacaagactttgatgtatttgaaacttgtttatgtttttatttgataataaaaatattttcgaattagtttactcgtgaaccatgactgtttagaattttctttgaatcgaacaagatttatttattgatatcaacaaaaataaatgttgcgcagcttgcacgc

SEQ ID NO: 57880 - DNA, 506 bp, Populus trichocarpa
  Intron number 1 from transcript POPTR_0001s27950.1 (locus POPTR_0001s27950) derived from phytozome v7.0 (chr-ID scaf fold_1; pos 26783459 to 26783964)
gcctccctgtcacactggtttccgatttctcaacggtgagttttcatttccagatatgattcctctctcatttcgagtccgtctggataccgagaaagaacatagagaaaccgcaaaaagctgaattcattctgttttatctttccgatttgaacttgtggattcaatgctttgttttcttagttgtcgcggttttcatttgcttgcattttctcataaaccaaacaggctggatcggtgacaacacattgttttaagctactagtgtgtttatctccgctatttttagtaatttaattgttctttgccaacagtatcttctccttcgaggatgtgaaatttgtttcgaatttcgcctgctgttttttttttttaactcaaaatcgtacttttaaatagagtctcggatctgatgtctctgtgcaaaattattatttttttcgagagtgcttaatattttttatccggcttgccttttttatttctgcagaaatataacataaaaa

SEQ ID NO: 57881 - DNA, 726 bp, Populus trichocarpa
  Intron number 1 from transcript POPTR_0010s15160.1 (locus POPTR_0010s15160) derived from phytozome v7.0 (chr-ID scaf fold_10; pos 14507724 to 14508449)
gatttaattttcttcgaggtaccaaatttttatttaattttgatttaattttgcttcttttttttgtatgtgtttctctgttttatttttatcaaaattaggcattagcagtttaggcatggcatagtagacattgaagaaaggcttttcttttttcctttttttttttttttgtctcggaggagcaaagacacgtgattttattgtctgggagtgctatggctggtagaacaatgtgaattgattatttgtttgtaattagttatgtagttttgcgtttcttgtttggtttggtttctgctctttagctagctggagttagctacttgtttcggggttgatgggaaccttgaaggattgggagaaaaatatgggagtggaaaaaaagggcggattttgaaatggatgcatttctcagacatgtagattgtatggaaagatggtgatttgctatgaaatttcaatggctgaaaaggtgaatgggtaaacatacgagagaaaaaccttgatcatagaggttggaatagcaaatattaggattcactcaggaagtggtgttgtttgtttatgttatgattttattgcttctgagaaaaattaagatggactataatttcttgatagtctttcataaatattcatttggtgctgctcatctaatgttttttttatatgaatatttatgcttattgtagtaattattaccttgttatatgatagatttgg

SEQ ID NO: 57882 - DNA, 676 bp, Populus trichocarpa
  Intron number 1 from transcript POPTR_0001s30870.1 (locus POPTR_0001s30870) derived from phytozome v7.0 (chr-ID scaf fold_1; pos 29284443 to 29285118 reverse strand)
ctcaagagttgattacaaaggtaagcaagatgtgcactttaatttatctgtactttagttgtctttgaatgtggtttttgtgtttatctggatagctatatggggtattttggtctggatgttgccttttcaggcttgcgtaaaaggctgtatttgtagaaaatacatccagagtttcttctgttataactatggtgtctctattagttagtttcagactgcttaccagtgagttggtattcatgttttgccttttgagtccagaagaaccttcctttttattagttgcaattatgtctctctgatattttgcaaatgataggccgtatctagggtttcttatttttattgtttaatgcttacaacaacttgagaggtttgatgaatgtgcttgctttaactgaccttttctttttcgagcgctgaaagaaatgtattggtctgattcagttgctcagaatggatataaatccagaaaggcaaaagtttataaatgtgcaaatgccaattggagtttttatataggctctggtgcctatacctcattatggactacttattccttctttttcattggtgggatcttgttagtttgtgccttgttatctggtgaactaaacaaataattcatgttcattcagaagaacaagcttcgaagccgacagaagaaattgaa

SEQ ID NO: 57883 - DNA, 270 bp, Populus trichocarpa
  Intron number 4 from transcript POPTR_1837s00200.1 (locus POPTR_1837s00200) derived from phytozome v7.0 (chr-ID scaf fold_1837; pos 1576 to 1845 reverse strand)
ggcaggtaaactaactgattggacagattttttgcattcatcaaacttcaggaccagtacttaagtccaaacgtatattaacatcaatatactgatttgacgacatttttcaatttattttcattcggaaagttttgagatttatgtttcttctataaacagaagcctgcaagaccaaaacaaatttgatttcaacttttctcgtgttcctgaagtcttatcattccaataagtgcaattttttggttattttctgtcgagtgcaggtct

SEQ ID NO: 57884 - DNA, 800 bp, Populus trichocarpa
  Intron number 1 from transcript POPTR_1837s00200.1 (locus POPTR_1837s00200) derived from phytozome v7.0 (chr-ID scaf fold_1837; pos 2741 to 3540 reverse strand)
ttcatcatataattgggattctcacaaagacttaggtaaggaattctatactttgagatagaggtaaaaggagatatttctgtatttttcttgttcatttatcaaggttaacttttgagctctggcccttctttgcatcttatttcttgacttttcttgatgataagaaacaatattctagatgattcccatttctagctagtttaatgctttattaaacatgattagcacaaaacgcattgctgaaaattcattgttctttgacatggtatcagagttttattgactaagcggtcacgagttcgaatctcaccactcccattctatttgataaaattaatagcactagcatgagcccctcaaagggctttcacttaagagagataatataaataaatatcttggagcctcacctaacaataccatgttctttcttatagaacagatgtgtccatagcaatggtgctaaagtaaaatctagagcgaaggctccaagtaggattgtccatgttaggaagttatcgaatgaactaaataactgtagcatagttgatgatctatagaaaattctaatggttatggacaaagtaagatttaattttggacaccagattctgctaattgtaaccagcttttggttccaaaagtgggaatgtaaaaattttggattgcatattagtggcagtttgttacatcccaagaattctgttacttctcccagcatcttgtcttccaacttgcatctctaaagacagttataatcgtgtttatcatctgcaggagcaaacaacttaataccc

SEQ ID NO: 57885 - DNA, 323 bp, Populus trichocarpa
  Intron number 1 from transcript POPTR_0010s04530.1 (locus POPTR_0010s04530) derived from phytozome v7.0 (chr-ID scaf fold_10; pos 5639517 to 5639839 reverse strand)
ctttgcctattcaggtattatgttttgttcctgtcagaaacaaacaaacacacacacacacacacacacacacacacacacatattggttgatttaatgggatttctttagcaaaattctataaaccatgctttttattcagacatggtaggatttgattctctcctaaatatagatttagacatcgcttgatttttccatgatatgtacatgtttttctgtgctgtccaagcataacttaggcattttaacagaatttgctaacttgggactaggaaaagaaatttataacttggactataaatgctgtctctcaataggaa

SEQ ID NO: 57886 - DNA, 563 bp, Populus trichocarpa
  Intron number 1 from transcript POPTR_0001s17380.1 (locus POPTR_0001s17380) derived from phytozome v7.0 (chr-ID scaf fold_1; pos 14184413 to 14184975)
tccgaaagcagaagaaaacaaactctgcgaaaaaggttagtgaaaaaatacaatccgcgtttgattcagtgatttttggtgctttatacatcattgttttgttcttattgatttgatattcggttattttatatggttttatttattaattgatgttgaagagaaacaatttattgatagttaattttcaaatacacatcttaatttagggttttctggtcactaagcttgaatgaatagatggtttattaatcaattctatcttttcacaatcttcttatcacttgcacgttgataagattttttaggttttttttgcaattttttgtttactattattttccggtaaattttattacctcttctgtgatggctgattttatatgcagagttataatttcatggttcttttctgtgtaattttttttttaatattttttctcttgttgtagttgataacgggatttgtatgatctttctgtttctgtgaaattactgatttgttgaattgaatttttgatacggcaggttggtagaatcttgtcggtattttaatttagcca

SEQ ID NO: 57887 - DNA, 597 bp, Populus trichocarpa
  Intron number 2 from transcript POPTR_0001s17380.1 (locus POPTR_0001s17380) derived from phytozome v7.0 (chr-ID scaf fold_1; pos 14185377 to 14185973)
aggaaggtaatattcaatctgcatttgctttgttatgtttttctttccttttgattatccagtagtgttaagagtttgtcttgataagtgcacaagtatggttcttgaattggagacctgagagcagttgcctcgagcaaaatttgctagggtcaagactgtgccctaatcatctttcttaggaccctgtttatatgggattaatagctggattattgctttttttttttaattcattgcatccatttatccttctatgcaccctaaaacatgaagtcttcaatgctttgcttgattaggtccttttgatcactaaaattgtttgattgtgaactgcacttaaattgccagccaattttcctcatctgggaagtaattaaattgttgtagctcacgatcaagttgctatatgactgaatttgatattctccttttttggagtttaatctgcttaatttacatgaattttgtgttccaagtgtcacaaattgatgctatgtataattatgttagtgagttcttattgttttacaattcctaaccatcatttatatgtgtggcattttgcaacagggtttggagaattattgtgtgcct

SEQ ID NO: 57888 - DNA, 776 bp, Populus trichocarpa
  Intron number 1 from transcript POPTR_0001s40370.1 (locus POPTR_0001s40370) derived from phytozome v7.0 (chr-ID scaf fold_1; pos 39781927 to 39782702)
tacttctgccatctggcaataacaaccaaatcaaggtaagctagctaaattaatctgctcttctttgtgtttgcaaataaacttttgcatgaaaacagtagaaagcaaatatgggtttgcctccttagttcttttgctgaatggagaaataaagaaaagttaacttaccaagtcaaaagcttttattatgaagaactgcttaaacaacaaagcttgaatctttatcttctttttttaatgtcgtgacttttatgcattcaaaggaacaagaaaggttcttgttatatatcaacgcttaaattgtgcaaaatccttgtataagtttaattaatgacttctgagcttttttgttgtaatcccattatggagccatctgcttcagctcaatgaaaatcgctatttctttttctttatgtaattttttttttgtggaagtgggttttatttggtgatgaagaatctcttagaatttgttgcctgcattaatgagaagttttatcgcgagttattgagatattgtgttcatttggatgcttatttggtttctgggttcaattctcggtttgctaactactttatatggtccaattcaattctgggttcaatgcgattattgttgccatcatcattagactgacaaaggcctttataccttttccctttcgaagtgtctggttaagcaagaataggcttatgggaaaggaattttataatgacatgatttatggcttatttttgcagggctgggactcgattttggtggaggcattcattcg

SEQ ID NO: 57889 - DNA, 367 bp, Populus trichocarpa
  Intron number 1 from transcript POPTR_0010s07120.1 (locus POPTR_0010s07120) derived from phytozome v7.0 (chr-ID scaf fold_10; pos 8319734 to 8320100)
tggctcggttctggatccagtctggagttatcaaggtgagggtatcgatctagttacaagtctcatcgtctatttttcattcaactgtttctgattcctgaaatgttttagccttatctgctacttggtagggtgcagtcctaaggaaagagaaattggttccaggatttcaatttagtcctagtaattgattccaaaactaaatcattattttagttggtaaattggattgatttctcttctctagctttctcaaaaacttttaaatttttattactcgattttgtagttttattatattcaagaaataatcaaactctttggttatttagggtgctgcctttagtgcattttacctcggtagcgg

SEQ ID NO: 57890 - DNA, 751 bp, Populus trichocarpa
  Intron number 1 from transcript POPTR_0001s45830.1 (locus POPTR_0001s45830) derived from phytozome v7.0 (chr-ID scaf fold_1; pos 46328629 to 46329379)
gccaatctacaccacaaagtctgcattttgtcacggtatttcaaagactgcaattcaacaataactaatccatgaaacagaaacttaatcccagaagccataatcaaaacaatcttcattgcaaataattagaatacagctatcagtaacaactaattattccataccaccaatctacaataacttgtatccatgaaacagaaacttaatccccgattccataatcaaaacaatcttcatttcaaataattagaatacagctatcagtaacaaccaattattccataccaccaatctacaataacttgtatccatgaaacagaaacttaatccccgattccataatcaaaacaatcttcatttcaaataattagaatacagctatcagtaacaaccaattattccataccaccaatctagaataacttgtatccatgaaacagaaacttaatccccgattccataatcaaaacaatcttcatttcaacccaatcctttgggccctggaatccaagcttactgtattataagactcaaatattctactaactcaccaattacagatatttatttcatgatgcaggaacccaaatctaaaacttattcacatattaactttctcgcaactctaagatttctagcaacaaagtctaacaaaaaaatgaaaaacccttgacctcatttcttatagcatcacaccgggaataccagacgagacagaaaaaaacaaaacttgggaataaattcttac

SEQ ID NO: 57891 - DNA, 835 bp, Populus trichocarpa
  Intron number 1 from transcript POPTR_0001s18820.1 (locus POPTR_0001s18820) derived from phytozome v7.0 (chr-ID scaf fold_1; pos 16008148 to 16008982 reverse strand)
tacaaggaacagattccaagttggagattctctctgtgagtttattacagttagctcatctcaccttttagctagatatattttgggtatatattttccttatgatttttttttctacttctacaaccaagttttgttttgatgaatgacgagaatatattaaaattaaggacaaatggctctggcagctggtttctgacagaagcaagtaacagagctaaaatttataacaagcaatgaaagcatcatccctccctaaactctccttggctaaaaaatctgccacgctatctccctccctcgcaacatgttctctggttataaaatacttcacaaagtgggcaaccgttttcagtttatcgatgtatatatggtagaaggcagtttttaaaacaattatatgcaatgttaatgataacctttgtaaagtttgctgcaaatgatgcatagattttagttagttaaactattgatagaaatgggaagaccatgcaacttcattataggttgcctcttttttaggttagtggttatcgaggggaaaaaacaaagacagtatactcagtcttgcaatgtaaaattttctttcgtcatgaaaaaaagaagatgctgctgttctacttgcttatgaaagtaaacatggaaaaatggttgtgtcctatgtaaatgtcatatttctgaaaccagcaaggaatgatttatgaccacaggtgtccttgcaagaaaacgagtaccagctaaaacaaagttttctttttatgcagccagcagcttttaaattgtcagatttctgatacattcgttgtttccttctttgcagccttcgagtataata

SEQ ID NO: 57892 - DNA, 452 bp, Populus trichocarpa
  Intron number 1 from transcript POPTR_0010s17610.1 (locus POPTR_0010s17610) derived from phytozome v7.0 (chr-ID scaf fold_10; pos 16124711 to 16125162 reverse strand)
ctttatcaggtctcgatttcctctttccctctttttgccgtaactaaaccaattttaagacatgtacacagggaacttcctatgtatatcagtagctaaaccaattttaagaaatgtagacaggaactttcctatgtataatatcagtaacattttacctgtgtattatttgttacgttcttctgctcttctttagggaattcaaaaaacaatcattttcaatatcatgataattgttttggaccaccatttttcttcctcgcgttttttggcatacatggttctggtccaattatttactttttttccccagctaaacataggacttgttgaggtaatcaggacagtgcttcgactcatggaaatattaaaggtgagctgaggtatgaccgagaatgataacaattaactactgccctgttttgcaggtgttgggatactctcaattccct

SEQ ID NO: 57893 - DNA, 752 bp, Populus trichocarpa
  Intron number 2 from transcript POPTR_0010s16540.1 (locus POPTR_0010s16540) derived from phytozome v7.0 (chr-ID scaf fold_10; pos 15466398 to 15467149)
gttcagtgtctcctatttcaactttagaagtaagttttgtgtaacaaaagctattgtttatgagtgtagattgtttattattgtgttaaataactcctcagcaagaaataacagcaatattcttgtaaactgagtcaccctaatgctattcttgtcatatcgattttattccactagcttatcccttagttcatattttgtttggttggaaatgagtgctgtgtgagaatgcgatcttgattcccattcccgataagattcccatttaattttttccgtaggcttaaactcaattgtcatgggggctcgacactatctaagaattgaaatttaacttgcttagagtacaagtactcccatttctttgtgaatcaaatggcattacatgaagagaggaattgaaatctcttttcatccccaatcctatacaaaccaaacatggcatagaaattaattcatgtagtactggtgctatgagaaaaggttggttctactagtttctgccattcttttttcctccaaaaacaaatttagaactagaattgttatgcatttcatcacttaaatcttgatttatttgggactttggtttcgagttcatgaaccttggatgctgaagttttcctgcttacaccaatgtttatgtttgtttaactgtttttttatttgaaattgtggccttctctgataatgaaatttggaattttttgggtgcaggagattaaaaaattgatcctctctcttgactataa

SEQ ID NO: 57894 - DNA, 754 bp, Populus trichocarpa
  Intron number 1 from transcript POPTR_0010s12680.1 (locus POPTR_0010s12680) derived from phytozome v7.0 (chr-ID scaf fold_10; pos 12676107 to 12676860 reverse strand)
gccagcctgttcttaacactggatctccaattactgtaagcaaatttcttaaatttgttttttttatattatgtttgattttaaatttgatggtatctgatgagaaattttgggactttttattattgttctgatttgctttttggagtatttgatgatttgtttgatgataggtatttgttttgatagtatatcttagtgtctggttgctagaatttcggaagcaaatcaattgaaagttcggggtctggggaagaagaaaaccctggcaattgagatccgtgatattttttttgtttaatgtggttcaatttttagctcaggaatatgtgaaaagctgaaaggatttttttatgatttttttactggaaaccaaaaaaaaaaaaaacagagagatttactttagtagaatcaactgtggatttgcatgtttctggattttatgtaactgtttaattgtttttgggttgtgtggatcaaggttttatttgaaatgtgattgctgacattggaaggattgcatcttatgtatctatccttatgcattcttgtgtccttgataattgttttctgtcgttgactgctctggttttgttggtactataccttttggttttgatatgactttttctgattttcatcctcgtccttgtgctttgtctctgtcaaaagttgggtatctttgaagctgatttcttcatttggcatatcctcaataggtgcccgtgggcagggccactcttggtcgcataat

SEQ ID NO: 57895 - DNA, 570 bp, Populus trichocarpa
  Intron number 1 from transcript POPTR_0001s12070.1 (locus POPTR_0001s12070) derived from phytozome v7.0 (chr-ID scaf fold_1; pos 9361668 to 9362237)
tccccactaccccccactacaacacgactcaacaggtaactacttctgtacttacaattgttgttggatctacgaaaagacttgtcaatcgtttcttttatattatcttcaatgattgatcatatctggggttaccctgtttccacttttctcatgcaagcttcattgttgggtttttgattttttctatgtttggtatgatggatgaacaactgaggaaggaaataaaggatccttccctatgcctcgcttgtaatttacaatctgtcctttgcttttccttgtttttggaataacaagatggatgggtcaaaatccatcatttctccttttcatactttcattttaccgtaaccatcctaacattaatggaaagatgtattttgaggcttaagaatgaatgcgtgctcgttttatgttcatgcttagtggtagtttgctcgcaattttaacaaattcatctcacagattactttgcttgatggtagttcacgttctagagttattcatagagaattgtttgtactgttagtaagatgaatttgttgtatgggctcagaggaaacaaac

SEQ ID NO: 57896 - DNA, 746 bp, Populus trichocarpa
  Intron number 1 from transcript POPTR_0001s10810.2 (locus POPTR_0001s10810) derived from phytozome v7.0 (chr-ID scaf fold_1; pos 8407074 to 8407819)
ttgacaagctccctcttaggtacttcccatatcttcttttttttacagttgagctatatatgaatgctttagctatgcacttccatttgtttggtttccaagaattctagaattaagggataggttagctcagttgaacgaccgattagtaataggttatagttgtggatgaggaacttagaagagtagctcacatgttaatcattcatttatttagtgagcacaaagtttatcataaattatagtacttgagatgtccagctcaattttcctgtaaaatgttcagtttctcaatccatactgttgttgtgagaggcaacatagaagtggcactggggagaatttgttagctgtacaaaaggggggttacaaggagctgtaaagcatgaatttcagttcttgtattacatgctatctcattgtgagacagcatataatattgcccgccaataatttactgtgggtttatgttttttggagaagggtgggattctattgcacaaaaagggtcgacagaagttcccatttttagtagaagagatcaattctttgggctggtgaaagatgtttataaggctttgctcatggaagaaactctaatgaatgttatatatgactatgattttgagtgttttgacacattttcagtcaagaatgctctctttttgcttgccttggagaaggaggttaatggacattctttttctacagtggttgcaagggctgtgggagagaggaaatagaga

SEQ ID NO: 57897 - DNA, 687 bp, Populus trichocarpa
  Intron number 1 from transcript POPTR_0001s26740.1 (locus POPTR_0001s26740) derived from phytozome v7.0 (chr-ID scaf fold_1; pos 25764757 to 25765443 reverse strand)
ttcagagtcaactgttggtccactggtgaggttccatataggggttttggatcttgatgtgaccgggcatgcaagtttgatggatgcaaaaggatatgaaatgtgatgttcagatatataatgcaattcgaaccaatcaaagaatagaatttgtactttatgtaactcaatgaaattataaaattgtttttgcatctcacttctttgttggagaaagtgttgaaaaaaccaaattcattttatagaattataggcagcataaaaatcttttttgaaaagatatatatatattattttaatacatttctgaatgaaacgatactttaaaaagtaactacaaccatattcttaaacacccacatagttttgatgaaacaattgtagtagacaacacgccctccaacaaggataacatgtcttctcactttttttcttatataatagtatattggctcgtgctccgcaacgggtcaatatcaatttttttttaaatgtaaaaaaaatattaaaagtatagagaatattttaagtaccttggatctggcggccataccagacccatgcaacttgggtctggcggccatcccagacccaagtacctggggtctgcagccatgccagacccaagagacttgggtcccgtgcccataagccttgtgtctggcatccataagccatacctctcaa

SEQ ID NO: 57898 - DNA, 729 bp, Populus trichocarpa
  Intron number 6 from transcript POPTR_0010s02250.1 (locus POPTR_0010s02250) derived from phytozome v7.0 (chr-ID scaf fold_10; pos 2598056 to 2598784 reverse strand)
cgctttgctatcacttgttacaaagagtgcttaaggtgtgtcaagttgcatcgcaattctttctttctttttctttttttgatatccattggctggctacaagtggtagcctttgccatgcttaaatttttcatttctatttgatttgtggtactgggtccagcaccaaggaagtttactagctaagatagcttgcatccaccaagttggttgcttacccgaatttatgttcacctatttcataaacagaatacaaaatagataattgaaagttgtgcacgcatacaaatatatttgctaatctttggctcataaactttgtggtatgatttctgttagttcttcatgtcatatctggatagttttgaaacatctatggtgcttgttctggtgattacactcgattgaatagttttaagagaatatcttgttgccttaggataatttcattaacttattgtggttttgtatactcctgtgagagcacactcttcttcaattttcaaatgtgttttacctcttttaattagtatcacttgattgccaacatttttggtaccttacaaactgttgtacatgcttgttcacctattttattcaaattagcaattctttttttcctttactcaaataagagagatcattatgttagatttcagagaatttgtttttcttatgggtgtgtttttggcaggcattgcccttttgtcattgaggctatcatagctt

SEQ ID NO: 57899 - DNA, 336 bp, Populus trichocarpa
  Intron number 1 from transcript POPTR_0010s07920.1 (locus POPTR_0010s07920) derived from phytozome v7.0 (chr-ID scaf fold_10; pos 8887047 to 8887382)
tcctttctctcccgctctccaacctgtcatcgcccgtaaaatttcctctctttctcttgttttcgtttgttctagattatttaataaaagttttgatttgttttcatagacatggccttttatttttttcttggattaaacccagcattgctaatgtctgatacggggcagagctagtccttgcttatttgatttttgttcttcatgtacatgggactcggttggtgcttgctatattacagcggtttagattttgattaattgtgttatgtgattcatttttttcatttatttttggcaggtagaatttgcccctttaccgggaagaaagcaaac

SEQ ID NO: 57900 - DNA, 958 bp, Populus trichocarpa
  Intron number 3 from transcript POPTR_0010s25510.1 (locus POPTR_0010s25510) derived from phytozome v7.0 (chr-ID scaf fold_10; pos 21166652 to 21167609 reverse strand)
ttagagaaacttatttcaattgcaagagaggccaggcatgttcttgtttttgtcttctctttaattccatttgaattctttctgttttcttgtttgtgggcttttcaattattccttacttttttcgagatgatttttaagttttctttgtgctctgattgcaatgagttttaatttgattctgagcaatgttgcattgagttatgggttctgttttcacatattccttaactcaaaagttctagcattacagtacaattaaagtatcagtagaagattttgttgattagagtatagaagatctgagtaaagtaaacagcaggtgttgagttcaaatggtgatggtttattttggttaattgggaagataattgattgtatataactatatcatacgagagtttatatgaattttcgataacacttctcttgtttgttcattaaccaagtgaagtaaaattatacacattatgaattattactaatttccatccttggtttatagtgagagattgctagacaagattgtaaaaaccaattagttctcattaatttcttcatttgccagttggtgggttaaatctgaaagttacattctttttccgtctttattaagtgttaaagggcaatttcaacttctaacttgaattgagtttccaactgcaattctaacttctatgtcaatatgtacatgaccatgcctcaacacttgtgcattcatttatgtgcctatatgctgtgtgtggattattgtattaccaaatgatttaatgaagaagaataaagcttctgtgattattatcaattactaattctaagatatcttttagatggataaaagcattaagaagaatatcccataaaattttcatgaacggaaaattttttgtatccgttaaatgtagacaaacattcccctttattgacatgtcatatctcatgtttttttcaggtggac

SEQ ID NO: 57901 - DNA, 745 bp, Populus trichocarpa
  Intron number 1 from transcript POPTR_0002s02390.1 (locus POPTR_0002s02390) derived from phytozome v7.0 (chr-ID scaf fold_2; pos 1351918 to 1352662)
aaggagaagacttgtgctggtaatggatatgatgcatctctctctttcttttatgattatctcaaatttatttattttattccgctgatttaattttctaagcaattgcttgtgaaatgcaattgggtttttgtttgtgatgttaaagggtatgagtttagtcattttagttctatttgtgattgtaaagtgtaaaaggtttggttttttgagattacttttattgaagaggaccatcgagtcttttgcaggtaatttcaagctgaaaagcttagaccataaaaaattatccaaagatttttggatgatgttagggttttggtgcaatagtcacggggtttacgtcaatcttgcataatggttttaccagggtttccttttgttttctgtatatggtgtctaatcttttcatacggggaaatctgttggtgtcaagaatttgtgttgaggggtgagggtctaatgtgctaattgaggataagcagtttttattgaagaaagcaagatcaaatttctttgtataatgtatagataattgctcggtagatgctactatctgtctcgtgagtgcaatagttttcaatatcgatcatgtaactcattgcgattaagcgcatgttctacattctgtctctgtgtttcgcaccaactcaactctggtattttgttttgtctctattttggacttttctaattttagaactttgtaggactttcactgaaatcacaggacctcacagctata

SEQ ID NO: 57902 - DNA, 750 bp, Populus trichocarpa
  Intron number 1 from transcript POPTR_0001s42970.1 (locus POPTR_0001s42970) derived from phytozome v7.0 (chr-ID scaf fold_1; pos 43043850 to 43044599)
tggtgtcaagaagatcaagaccgatacgccttgtctgtttcttcatcctcataaatacatattactcttacagtcatacccttttcatgtgatggacatgcatgcacaaacataaatgcagatgttgaacatgcaagattttaatgcattttctctgatttgggtgcgcgccctctagtcgaagctgatcagggagagataattaactagtataaatggaaagtttctcagaagggcccgaactgatcttcctctccaattctggaaaaaagtttgtgataagtgcatgaacagaaagtgaaatgaaaagtaacaaaacaacaaattaattaatcattgattaatagtagagtaatttaaaataatggtatgatagcaatttgatctcaataattttgtttccttgttccttatcctgtttacagacaagtacgagtccctttccttctcctctcgctctctcaccccacactaatataatttacaaaaatgtagtaattaattaatattttctcttcatggatcttttattctcttgattttcatttccttaactattttcttcattactttagactatcatagagttggatcttgtctagactgctgcttattgtagcatttaaactgctcatgttacatgttgaacaatccaagaagctaaattattttcttgttgattttagaaggaaaagagattttgtgaagaagttagagtttcatttttgttatacaggaactggtggtggc

SEQ ID NO: 57903 - DNA, 601 bp, Populus trichocarpa
  Intron number 2 from transcript POPTR_0001s24400.1 (locus POPTR_0001s24400) derived from phytozome v7.0 (chr-ID scaf fold_1; pos 23690618 to 23691218 reverse strand)
agagagctcgcttcgctcaagccattagtaagttcctattctttgaccatatatcatttcacttcttgccatataggccattggatgctggcatccaaataaaaaggttttcctcaccaaagataacaaagtataattgctgttccatctaagcagcacctcaattttaggttcttcattggaggcaaatcgatcatgtttctcaccttctaatgtctggtatgctggttgtttgctaaaactgcccaaaccctacttataaactggtccttatggatgagctgaagagcattggttgaataacgtgcaatgttgaccattgatgcctttatttattttctatactaaaagcaccatcctgcaaggtcaacaatgtagctggttacttgcctgctaaaaaaatgattcgttttctgatgatagaaggaatggatttgaaccaatggaatatctccttttcaattgcttatgtgagtttgaattttgaaataagctgtcaacgttttagtatgtttgttccattagtttatctattttgacattttctatgttcaatttcaatattaatgaaatggatatgcaccagtatctcaggtagagc

SEQ ID NO: 57904 - DNA, 350 bp, Populus trichocarpa
  Intron number 1 from transcript POPTR_0007s15320.1 (locus POPTR_0007s15320) derived from phytozome v7.0 (chr-ID scaf fold_7; pos 14894088 to 14894437 reverse strand)
gcagtgcttttactaagtggtatttacttgctttcccattttccccaccttttttatgttaataatcctgagtttttcttatctttgtctggaggttttaaagaaatgtagctttttttaggcaaattctgtttctggttttttctttcttaatctaattccgtgtcattgacttggttctggggtttaaaattatgggttctttgaatttccgaagaaatggagaaacccagtcacagaaagtaataaattattgaaataattggcgggttctgttttttgaattgatttgatgagaggaattggattgaaatgtgaaataaatttatgcagtgaggagtgcaagaagg

SEQ ID NO: 57905 - DNA, 976 bp, Populus trichocarpa
  Intron number 1 from transcript POPTR_0007s15050.1 (locus POPTR_0007s15050) derived from phytozome v7.0 (chr-ID scaf fold_7; pos 14699064 to 14700039 reverse strand)
gggtccttgctgtccaggtctgttctatacgtacacacgcctctactttttgtttctgtcggatatgttggattctttttataattgacttgtacttttttttttttgaagatataatttataagaaaagaacctcacttccatatataatccaggaaactatgcataaattactaaaactgctctttgttgatgcgtataacatcaaccgtgagtaagttgttttctaccataaattaaaacataatttcgatccttttatgttcttaagaaaacacaatcgctcatgtttcaaatctcattattaatgttgaaatcaatgatttaattttgaaagaaataaaatattaaggagttaagttgtttttgtttttatgtattaaattatgattattcaatgattcagattctataaacatgatggacgtcatagatatcgtttaattactttcttttttagcataaaaagttatattcttttagattgcatttgttttttttttttttttgaaatagaaaaaacaaagtcaatgagaataaaaaagcatgattatattatgtttcaattctcataaaaacacaaaactagttagcgcttggtttgcctggtaaacctggaccttgacatgcctaagtctccggagatggatccggcatggtcgagtcatcgcgtcacgacaagcgataaagaataaaaaaaaaattataattgaacagtggacatattaattgcacaatgctccatatgtgtgtggttttgcaaattaaaggtttcttcgctgcaaatttgcagaccattcatgaaaagcaaaattctaacggtaaagaaggggggaatttgtatatttcatttgagcttgctgcgcgcaaaggttcacgcagacattgacatacagggctctagaaatttatgcgctttaacctcacgaactaattacattacaaactatatatattttcaggcaacacaactgaa

SEQ ID NO: 57906 - DNA, 467 bp, Populus trichocarpa
  Intron number 1 from transcript POPTR_0001s27210.1 (locus POPTR_0001s27210) derived from phytozome v7.0 (chr-ID scaf fold_1; pos 26115550 to 26116016)
tgggtgtcgagggctggaattggataagatatctggtccatgcccgccccacaatagaaggtgaaaacaaatactacataagtataaaatttaagaggtttatatatataaatatagcataaatcatatattttttttaacatgagaaatcataaaaaattaggtaaatgatatttccaacagaatataacacatagtgggtttttgattatcatcatttttttaattacgttttttcttaatttccaaagtaaaatataattgattacatgagaagaaaattataaaaatattaagtacgatgttagaaattaagcactatttttgttgtccacattattgatttttctggacaactcacttggaaagcccagcccaaaaggattcagaatactttatctgtggtatttcgaagataaactaaactgatagcgtgtgcaaacagaatccacgctaccttgcataat

SEQ ID NO: 57907 - DNA, 643 bp, Populus trichocarpa
  Intron number 2 from transcript POPTR_0001s27210.1 (locus POPTR_0001s27210) derived from phytozome v7.0 (chr-ID scaf fold_1; pos 26116066 to 26116708)
ctctacagtcccggcggccgatatattcctctaatgtaaacgctaatatctctattactttcccatcaataaataatgtgtttatttattcaactgttttttaaactatgttggtgtttctttgtctcaacgttttgcccctttcctgtttgattaaatgcctgttagagagtactttgtcttctttcattgatttgttggcaccaaaaacagttcattcttatacattcactataacacttagctccaactggaatttagtctaatggtacaaatcccaagctcaggtcttagagttatttcaaatcatttcatcactatgtagcccctaaagaactaaaatttgagtagaaaaggaaaaatatatcatttaggcttgaatgaagtaatttaatttctccgtagggaaagttgttgcagagcatatcagcttgtttgatgcgtatggtctaatatatatgatgatgcagtttctatttaatattgatataggtacctaaaaggagcaagctttctctgattaaagagagagagagatggtgaagttttctgggtattctttgatttcttcatttactccttttcattctgttattctcaaaaaacagcgcagattttcagcattagatttatatagcaacaa

SEQ ID NO: 57908 - DNA, 840 bp, Populus trichocarpa
  Intron number 2 from transcript POPTR_0007s09470.1 (locus POPTR_0007s09470) derived from phytozome v7.0 (chr-ID scaf fold_7; pos 8870485 to 8871324)
ggcattgtagcagctctgcattttttacagattttgtgagttaatttctcttcttatccaaccttcttctatcattctgttatagttgaatgagattctaatacaagataatattgtttcctatccatggtattttaaaccttgttctttatggattgagatccatgcattcaatcaagtgattgcaagagattgtttgatgtggtttgatttagttgaaaagaaattgtcgtattattttagcctgcacaattgaactttgtttgatagttaaacgcttaattatttttgcaaaattgcgtaagggcgaaacaaaagttagaaaacacttcctcaaattaggatgttaggaacgttttcttgatattaggaaattaatccatacaggtcttttcgaggtcctactgtagtcaagtaatagcattttgttcagaataagctgcaaaacatgcaaaagagcagagttctatttgaaaactgcgtgctgaattgattatggtaacaaatgtgcaaagagtttagactatagtgcatttttagaacccaaaaacttattaagcagcaatgtcatgtcttgcaattaattttgaaaagcctgtgtaatctttagcctcatacaaatatgttgcatgcatgtgtttgtcttgtgagggcttgcacaaatggatgcatgttcagtttcagtttcttaggaagaatatatgttttattgaggaaagtttgatggatcattttatacatgggtgtatgatccatgtatttaatgcagatttcatctgattgtgcctctctattgtccatgtaggaatcagaaattgcaattttgggattggtctcacc

SEQ ID NO: 57909 - DNA, 503 bp, Populus trichocarpa
  Intron number 1 from transcript POPTR_0010s19710.3 (locus POPTR_0010s19710) derived from phytozome v7.0 (chr-ID scaf fold_10; pos 17547705 to 17548207 reverse strand)
gaggaggccaagaaggtaataacctctgtttcttctaaagaatctactcagggtgcatgttcctaatgatgccattgagttgactcggtggtggatcgtccgatttttactcgaatgatgttattatgattattgttgtttttaagggttagtcttgtgattcacgttatagggaattaaagtggtgggttacaaacactccgagagcttgttagcacattaaaattatatcagagtacttgcaatgtccctctctagctagctagtgtctcatacaaatatgaagtgttattcctttacttatgcttcttgttattattaatttctttttgttgtcgtggacttgttttttttttgatgtaatcagaaggttcccttgaattataaaccgcacaacattgattagcactatgctaatcttatttgggtcatgcatgacgtctaatattttcttctggtttttttttttgttgtgatattttcagattacatttgagttgaca

SEQ ID NO: 57910 - DNA, 759 bp, Populus trichocarpa
  Intron number 2 from transcript POPTR_0007s02520.1 (locus POPTR_0007s02520) derived from phytozome v7.0 (chr-ID scaf fold_7; pos 1491025 to 1491783 reverse strand)
gaactgttgtccaggaccctgagttaggccaggtttgtttctatctatgttgtttccagaatgtccttcaaagatgttatcatgaatctgtacatagtctgctgttgccaacaaggggtgattgcatgcagtcctcagctcttttgttattcaaactgtgagaaaaatgacgtgtaaagtattttggaatatcttctttgaaaataaagctcttgtagcttttctgatattatgggtgggtatttgattctccatctcccatgcatcctgtgtggaaagttcctttacacgttggtagctatctcttgacacttctaaattccctttcttgcttataacctcagttgctttccaaatctttctctattatctagactataaccttctgcatccataacagatgatttattttccatctattcccccgaagctacttagaaatttccatcattattctcttctagtcggtttgttatctagaccaacccagagaatgagcgcttgcagcatggacctacaattctcatttggcatggtatagagaaacaccacatctgttcagacattaggaattattgtatcaacaatagtctttactagtgcattcagttgatagctgctaaggtgtgccaacatgaagagagtttgtctgcaaggacgtgtgtaaccgttaatggatccttcttgtgcttgcactaaacactgcttttgtgcatgggtgcaggtcattcaacttcagggtgatcaaaggaagaacgt

SEQ ID NO: 57911 - DNA, 434 bp, Populus trichocarpa
  Intron number 1 from transcript POPTR_0001s45950.1 (locus POPTR_0001s45950) derived from phytozome v7.0 (chr-ID scaf fold_1; pos 46454605 to 46455038)
gctccaatttcgatacgccgtaagtctactatgccattcttagcttcttgtttgttaatttcattgttggttttttattatttgtttactgttgagatgcgatgaaactcggattgaaaacaactttagacttgaccattcgttgtaattttttgaccttgtatctctagattttattcaaaagtttttaccatgataaaatggaaaggacttggtaaacatttcctcccaggtgttttgtttttgacttgttttgcctgcccaattttttaggaacacataattcgctcttcatagtctctatattgcttgtaaaaactgactagatagctttagaacttccaggaagtaatttttatgttttcttttgcaagactctatctaacctctaagtatttattgttgtttctcacagtacaccagcaaccctttcc

SEQ ID NO: 57912 - DNA, 636 bp, Populus trichocarpa
  Intron number 2 from transcript POPTR_0010s08030.1 (locus POPTR_0010s08030) derived from phytozome v7.0 (chr-ID scaf fold_10; pos 8996033 to 8996668 reverse strand)
cttggacgtctgcaaattgattttgcctgttattggtccgttcctttttttttaattatttaattactactattaatttcacattctcgtgtttttaattctggatctctttacaagttactgaactgttgtttaatatgttattaatttagaccgatccctagttaaagatatacttcctattgtgatgttagatttagagtctgtttgtcatgattcaaaaattatttttctatttttcaaaaattactcgtgaaaaaaaatgtttagttagaattatgttcgtcaaaaaatgattcatagtaacttttttgaacaaggaaggttgtacaagttagaatttaagtcaaaattttgtaaaaaccttttgatttaagtctgaaattatttctaaccaaacatatgtatgacttttcttggagtcagaagttaaaaaaacatctcgaatcaatttgcaaaagttatgccaagcggttgcttaatttcttatttcctttacgagattcttcaccataataattttatttcttatttcttttgaattatcatatcttctcccattctccaactattagatgcttggtcgcaaattgaagtccttcattacttctgatgacagataagtttggagctgct

SEQ ID NO: 57913 - DNA, 874 bp, Populus trichocarpa
  Intron number 1 from transcript POPTR_0001s01860.1 (locus POPTR_0001s01860) derived from phytozome v7.0 (chr-ID scaf fold_1; pos 1350924 to 1351797)
taatttctctttcactcttcagaagttcacatctggttttgattatatgcccttagacttaatcacttcaatgtacgtaagtcatatacctttagggattggcttcaagtgtgagcgaagactcaaaattttacttgtgactgcaggtaaatccaaatactagaactgcattatatgaattagatgacataattaagcatctagttcaaaattattgtgtgtttgtctctacatatacttactttcatacgttgcttccaattcttttgcttgtttcctgcatgcctaatcagtataccaagcatgaacaagacaagacgtaaaactatatgctatgaaattagagaataccatttgcattataagattctcaatttgtttcctttttttttactgcaccttattaatacatagcttaatttttttctcttttaaaatcatttattctcttttattcttgatggcgcaaccatttgaaatttccccccccgtctttgatcaggttatatgacaagaagaaatgtacattcccttgcaacagtaacagcttgcatttatttatctccatctctctctctctctctctctctctctcattattgtgtttgatcaggttcagacaaaaagacttgcatctctctctcattattgtctgtgctaataatagtcggagaggttttaattgttgttggcttgtttttccaattttcatgaagggtgctttgatatttccaagcttatatttcatgtttgccaattgaatgctgatcattcactggctgcaatacagccactcactaatgtgactaatcctcggatatttaggagaatatctgaagtcaaggagaaggaaactggaggacatcatttacgt

SEQ ID NO: 57914 - DNA, 467 bp, Populus trichocarpa
  Intron number 2 from transcript POPTR_0010s17420.1 (locus POPTR_0010s17420) derived from phytozome v7.0 (chr-ID scaf fold_10; pos 16000219 to 16000685)
ctctcacccgagcaggaggtaaattgcaatgcaacttctttatgtcacacttctggtttggctggcgacaagaatttataatctcccaaggcataagggttctaaatcaacaaatgtcatattatagttatacaaactgatacgcaaagtatttcttttcgtacttgattaatcacctgatgttttggattgtcacttgccacatcaaatgtcgtgtgaatcttggtataatttgtttctttgtaacgtaaccaaacgggataagaaaaggcaatcttgagagcgctggacaaaattttgtgttttggttacacgtttgacacaaatctaaactcattggctctcaagctgcttgccctggagagaaaaaataaagatttcattgatatgcaggctaagcgaaatgtaacagttttcaaaacttagcttctgacacattttgcaggaggagatcatcaagaaaaaat

SEQ ID NO: 57915 - DNA, 637 bp, Populus trichocarpa
  Intron number 1 from transcript POPTR_0010s06780.1 (locus POPTR_0010s06780) derived from phytozome v7.0 (chr-ID scaf fold_10; pos 8045899 to 8046535)
actagtaagtattactttaatgtcatgatgaagtgtgtggttgtctttttgtgctcttcttgtcttggattctctctgttctgatgctcgcctaccattcaacggattctagtaatatttatttgttttcatcttgatatattttttcatttttctctaacttgtgttgagaatattgcattttctttaatcaattctcttctcaagggttggagtactgttcttgttttcctaccctctggctctctctctcttgaaatgaactgggagatttttcttcattaattggcttttattattgttattatttgtggaggccctcttcggggatatggagtatatattataattttgagtgcatgaatatggtgggtcacatattctcaaattaacctgcaatgttgagacctgcccacgttctctatgccgttctttcttcctttcccatataagctcaacacaccattttctttctatttttgttatttcaaattcacccgcatgcattacatgattatttgaaattggattttgtttttctcttttttttttgtgtgcttgttttgagtatgtttgctgaattctgggtgtttttgtgttggcttgtaattgcataaggtttgatcaatgtacaggt

SEQ ID NO: 57916 - DNA, 995 bp, Populus trichocarpa
  Intron number 1 from transcript POPTR_0010s15620.1 (locus POPTR_0010s15620) derived from phytozome v7.0 (chr-ID scaf fold_10; pos 14774029 to 14775023 reverse strand)
agattgaggtacccgattttatttgactgtaactgtagacttaatatcttgattattagagcatttaatagtcgatggtcttattaggagactttgcctgtacgtggattatttcttttcttgatcgactgagaattttctgtagtaatttgaagctaactttcattttattcgggggagggggtttggctaaataatttagagcagtagcttgttctttatttattattaaatcaaatgttctggacttggtcaccacaaatggatatgttttactgaacgtgacatgatttatgatatttacataataatacaaacagattattttagccggatcgggtttcttaatgctgttcagccctggtttaattttattcaggtggatacgatgtgttaatgctttgttttgaagtttaaatgagagttacagagtaatcaaaaggataggggggaagagaactcttagttatgtcaatctttaacgggtatttcttagcaaatatttagaagactttgtcttgaaagactgaaacttcaatgggttcatcatagtttgatgacatcggagaccatcctgtgatgtactggtttgtgtattacattgaacatatcagtatccaatatatatgtgttttgagttcctgtataggataaatacttccacatagcatttgttcaacaacttttatttattctttttagtcatttcgtttacacatagatgtgagtcttttttctccctctgagctggtatttcagatctctcgatcgcagaattctgtgccttgctcagaagttcaatcatgcaatatttcgtatgtaaagcagtaggcactgcagcatagctattttcttggaaatttattcccatctttttgtatatcttcatttttcttgggctgttacctattgaatgtccttttcttttcaactaaacattattcttgttctgcttgacagggagaaagaactggctgctgtgaagatcaacgcag

SEQ ID NO: 57917 - DNA, 1060 bp, Populus trichocarpa
  Intron number 1 from transcript POPTR_0001s29280.1 (locus POPTR_0001s29280) derived from phytozome v7.0 (chr-ID scaf fold_1; pos 28021669 to 28022728)
gcttatcaccgggctgttttgctttccaaatacgagtaaggctttttaaatgcctgtctgtttctgtttattttgtcatttggttttactgcttggttgataatgcactgtggatgttattgttttgaactaaatgtagcgcttgaatttaggagcagtttagctaaaggaatagacttgtagccatatatatcttctagatagaatggaacagggtgtggagttttaggccaatgcaggggaagaatggatttacgtcaatcaaagaactaaactttgcatgctataaaactagtgagattacttcgcataatgttggttatcgagaccaggcataatgaaaggtgcttcatattttcttttccaagtggtattttgatatacaacactgttctattgtcaagtttcctaatttggattccgggaaaacatattttagcttcacaggtttcatacagattttgatcaagtaccctgatggattactggttgttattgatgaaattgtttgttgtcccaaactgttgctcaaagctgcgctcccctatgattgcaatatccatgtttgcttttgagagatgctaaagtctctatgggatacagttcatcactaaagaattggatacttgggattttgaaagtatatttaaatcactcagttagaatagttcaacaagaatgcaacttatgctggaaaccattggtgcaacctacatcagtttattttctgtcccttattgcagtggattttccattgatttaacttgggattgaattgggctgacagtttggtttgttcatactatgtttgtttgaactcatatttcatgtttgtggggatattaacagccttgtaagtgaacagtgattttttttcttatttagtcgtgtgcactctctgctttggttctgttttgttgatagtcatatgagtcatgtctgctataccttaatctttaaatggttccttaacttatcatttttggaaagtttgaaaatgacgactcacttgctcataacatgatcaaataaaggtggcagccaaaacagcctactgtga

SEQ ID NO: 57918 - DNA, 969 bp, Populus trichocarpa
  Intron number 1 from transcript POPTR_0001s03010.1 (locus POPTR_0001s03010) derived from phytozome v7.0 (chr-ID scaf fold_1; pos 2379240 to 2380208 reverse strand)
ggctctttggtggaaatgcacccaactgccctccattttacaaatccaatcctagttgcatccaaactccctctcctatcagccatcatggtcccgcagcttgtccgtgtgaatcagctaacatatatttccaggaatgcacatctttagtaaagttttttttatggtaaaaatgattgaaaatatattaaaataatatttttttattttttaaaatttatttttaatatcaccacataaaaatattaaaagattaatttaaaacaaaaaaatatattcaaattttaacaaaaacatgtcacaacctcattgccaaaacacacgagtggaagcagaataaaacgtgattagaaatgctcgctagacaactcttgaatttggcaaattaaatagaacgtttcacactgaatgcagtttaaataaagacttcttgttaaaaccaacgacttcaacaacaaaaggaaaagcgctatgaagtttttaaaaaaattggtttgagaaattaggtctctgataaaattacatggatgaatttttagtaaatgtaaaataaatgaaaagtaaatctaataaaaaacaattattttagctgaaaccaaagtatgaaatatataattgtgtgaagctcaatgtaaaaagtagaagctagctaattaattttttttctgagcaaaaaacacaagttaccacattattaaacagtctctgtccctgagaaggtagcttgaaaacaaccataacagaaattccactgaaagaaaatattgttttatctcagtgtcaaacttggcaatgcctaccaaactaaagaatatgggcggcttgttttgctataaataccacaaaccttgttcatttcatgcattaccccctcatcttctttgcttttattgtctttgctctttgtataccgataatggttcctactctgcagttccttttgttcctttcaggaactttgctttttat

SEQ ID NO: 57919 - DNA, 1069 bp, Populus trichocarpa
  Intron number 2 from transcript POPTR_0001s20590.4 (locus POPTR_0001s20590) derived from phytozome v7.0 (chr-ID scaf fold_1; pos 18584783 to 18585851)
gggagcgatctggccttgctgcctgtgcaattgctgtgagtgatgaacttaattattaatcttttgttagcatggtttaccgccctcttctttgtcatgtctgctgattgaacatcaaatatgatacttgctattattaaaaaatgcatagcttggaaaaattctgaaatccagccttctagcattggaataaagttttgacagagcatcctggtgccactaaggaggtgcctatggaggcgcaccatagctggtgctagtggcaggtcacttccttaatgctgaagaagttcagtggtcaacttcccgaaattgcaaaatacaaaattacccctaactaaaacaaaaatcacagaactggccctgacagttagaccccaaaaatatgccctattaactagtaaaagagtctaggtgatctctaattaggttcgatccaaatccacaagcttgtagcgatagatttccccttctatttgcatcacaaaatggcatgtagactaaatgcagtggtatccacttaatgatgtgtgtattccatatgatttttgtttatgtgtcttgtgtttatttgtttagtcttgggtgatgtgatagatttagtctatctaataatttctcctaaaagagctacaaactgagctttccaggaatgaaatagttatatacagcacaatgaaaagcaactgggcagtctcattgtaaattcctatcatttgcaagagcagtgtttttgatgggtgacagttcaaatcctttttgccgagcacatatttttcaatcacgtgtatactgtcctctcaccactgaactagactgttactgcaaaacatttcatgataggtatcaatatagctgtgtctggagactggagagtactttatcttgggagagaccagaagtttcaatgtacttgtgccaatcctaattggtgccaccagaattatgtagggttatctattgcacatgtttgtgatgaattggtgtgtttatctatttttttcagcaagtaacatgcatgcacttgtctgcaggctgtagtgttcacaatagctgcggtgatcgcttt

SEQ ID NO: 57920 - DNA, 571 bp, Populus trichocarpa
  Intron number 1 from transcript POPTR_0002s16730.1 (locus POPTR_0002s16730) derived from phytozome v7.0 (chr-ID scaf fold_2; pos 12500467 to 12501037)
aaactgttagtagatgtataaaaaaagtcattaaatcattaatttgtttgttgtagaagtcataaaacaagtagatcgataatttaccaacaccccaagagaaattgcaatgaatccaagatatatgtcatatttcaaggtaagacctaattttttttatgttgtttaaatgaatatcaattattttattaatttttctaattactttaattcttttttcctataaaattatgttggtgcaattgatggtacacatattcatgcatgtatatcatctgataatcaaatttcatttattagaagaaaaggtgtaccgacacaaaacgtcatgaatgcaagtagttttgacatgcagtcatgtttgtgtggccaggatgggaaggcagtgcacacgatacacgtatttttcttaaggctattgacagtagtagtataaattttcaaaaccattggaaggttgtgatttgatataaattaaagagctggtaattgaagttagataatattcttttatagttattgaaaaaaattagcatgttgttcttttttgcaggcaaatactatttggttg

SEQ ID NO: 57921 - DNA, 542 bp, Populus trichocarpa
  Intron number 4 from transcript POPTR_0002s09400.3 (locus POPTR_0002s09400) derived from phytozome v7.0 (chr-ID scaf fold_2; pos 6693025 to 6693566 reverse strand)
agacctagttgccaggtttcatctgacaatttctcctgacttttttctgtcttgtggtttgtgaggttgctatttcttagatttgaagagaaacttggtccatgtagatacatcactaggacatgctcttaatccagagtaagagaaaaaaaggccaactgtttggtcatgactctgacacctaatattcaaaggattagctttgggtcaggactcaggccaaacaatataatcacatgattcttctcctcccacaagattcatggtgatttatacttgaagtcgatccagtgtgtgaatttcatgcatcattgagaatatcaaccttactgcaatccttagtgacaatattttatgtgtaaaaccaatctgtttggcatgatgctgagatcttttgtaatttaagtatgtacagaaacatcatctctcagggatcaaattcaaaactaatctacttcatttttatgttggttacctgtaataacttcaagttcattttgactgcagaactccaagtcaataaaaggacaaattaagtattt

SEQ ID NO: 57922 - DNA, 901 bp, Populus trichocarpa
  Intron number 1 from transcript POPTR_0007s09340.1 (locus POPTR_0007s09340) derived from phytozome v7.0 (chr-ID scaf fold_7; pos 8733103 to 8734003)
ccgtctccccctgccttctctttcttgttccttcttttcattgaagacccactcttatctatataattagtttgtgtggtattgatttggtagaagcaaatccattggcttcattgcatgttactggttttccatttccactgctggttttgttgttttccttttttctttatggattcttggcttcgtccttagtcacttgtttatgcatttacagagaagaccagatctttgctggacaaaaggaaaatggttgcttatttatttcatagatgattttccagtttcaatccaaaaaaacaactttgaccgaaccgaaccggtttggttcgggtcattttcttatgaaatttcatatcccggttcagttggaattttgggcccaaactgaaccgaacttgactgtgacactcctagttaacacattgtgttttttacaacagtgcttgtccagtttgctaataccgaccaggaaacaatccattgtttactaggttctggaggcaggaaaagaaaatctttccttggccttggtaacaattcccctttggtttctttgtgctgatggcctatctatgtatgttaatgggtggaaatagatcaagaatagttactcatgctgtaaagatcatgcaaatgctgacaaggaattggaaatgatacctggttacagtttgccagtacaaaaaggaactacaagcagattagggtgtgcgcttgttttttactactaaagtttccatgactattgttaaaaaacacttcctttcacccaaaaaatcagatgcatatcataaaaaaatgtctacactcatgaaatatgtctggcgtgctttagcaggattatactaatttaatgggttttgatgcagctatcttattctgacatatcaaactacct

SEQ ID NO: 57923 - DNA, 811 bp, Populus trichocarpa
  Intron number 2 from transcript POPTR_0001s42150.3 (locus POPTR_0001s42150) derived from phytozome v7.0 (chr-ID scaf fold_1; pos 41911751 to 41912561 reverse strand)
gcttgatcagaagtgggacaaaatattctacacaggttcgacactagaatattttaattttgaaatgctctgactgtacaggttcatggattgaacaccaatcaacatttctccactggcatgcattacaatctgtagctgttgttaataacacctcctatcgaatcaaaaagtggaaaacataatttaacttaaccctaacagaaaacactatctagaggtcttgtaaataggatgatgtcagacaatccattaaacgtttgttacttcaatctttattttagtctaaagtacctattttgcacaagaatactcagacaaaggatacaacagttggacacttgaaatcagcggaaaagtctaggtaacttcagaaaaaccaagttcaagccccaaacctgattcccaaactcgtacaagttccagcaacataattttcactttgtgcctccatgaagattcttttattgaaaatcttgttgttccatttacttttccttgcacttgttcttcgtatcagaatacctctgctattattcatgactttccaaaaagttgcataaaaaaatttaaggaaaatgtacctttgactgttgttccaaaggcatttcataaacatgttttgaattttcattactcctaatatcgtccatttgattttgcatactaggtacaactgtgcaagtacaaagtctaagacttgatgccgctagccagctagtatttatgaagaaaggtctctacatctgacatttagctaaagtggcccttttttaacttttcagggagtccaagagtagggcgcattgtc

SEQ ID NO: 57924 - DNA, 404 bp, Populus trichocarpa
  Intron number 2 from transcript POPTR_0001s23800.1 (locus POPTR_0001s23800) derived from phytozome v7.0 (chr-ID scaf fold_1; pos 23199920 to 23200323 reverse strand)
caatcccctactgtggagaggtctaaagatcgaaggtcttgttttgctgattaattaattgattaggctagctagctagcttcatatatatactgggttttgatcaaaatatacgtgttgtgattatagctagaattataattttattacttgtgcaaaattgtgtttaatatattgcatgcatgtatgaggatttgagtgattctttaatttattggttcatttttcagtattgtatcaatgttcatatcaagaatatacagtttgaagtttgaaattagttaattttctatagaatgcgtactttaagttatgtttttttgtgatcaagctatttgatgctttaaaattatgtttagtattatatataattgaagaggaggtggtggagtaaaaggaagaag

SEQ ID NO: 57925 - DNA, 713 bp, Populus trichocarpa
  Intron number 2 from transcript POPTR_0001s23190.1 (locus POPTR_0001s23190) derived from phytozome v7.0 (chr-ID scaf fold_1; pos 22450971 to 22451683 reverse strand)
ccgctgctcccgttgaagctgcccctgccaaggaggttcctttctttcttttcataatttttgcttaataactgaatgttgatttctggtttttgttttcaattgggtatctcaaagtttggatcttttcccatgcgtatgtagcttatacactgtgatttgattagctttgctgcatataaaaccattgccaactgggagtaaaataatgtaatcgatttagaaggccatgagcttatacccagtaacacacagatagggcagctttaacttgcaaatttaacgttgcaagttgaagacttctgcactggaaccagcgagagtatagctgctgctgtcgtatgagtttaaatttaaagcttgacttgtgtttctcgctggtgtgctagaggtaggatgcgatgatagttcgatattgtttaattcagacaataatttcttgtactgttttattacatgccagggatgactatttcgtggtcaaagtgatagatctaagaataatttgctggtgattcataaatcacgctgaatttgctattcggtacagtgctttagtttcgaattaggaatgtccagtgctttggttgcattggtgcaagtcacatggcaaaaatattaggggcacttcttgacttgcttgcattgaactcagaagttttccctgttctgtttcaggctgctggtgacgacgacgacgacgacttggatct

SEQ ID NO: 57926 - DNA, 705 bp, Populus trichocarpa
  Intron number 2 from transcript POPTR_0010s05150.1 (locus POPTR_0010s05150) derived from phytozome v7.0 (chr-ID scaf fold_10; pos 6569407 to 6570111 reverse strand)
gcagtttattagtgccaacaaacttttctttggtggtatgtacactatcgtgaccatgaccatccttgttgcctttttctttttatccttttgtctttctcatttcttgaaactctagatgttatcaacagtatggtgtggttttcttccttgcaaactttagggctgagtttgatttaagctgaactgatagtttcatactcggcttggcttgcgcttatttcgttatgctccgaactcttgctggtcgtgtacattaatgcttcaatttgatgttctgaagcatttttttttttgggtaagcttggcctgctaggttgtcaacctggccaaattttgtatcttacttcattctgatgcctttacgggataatgcataaacatggaagccgtcacatgcagatagattttttcaaattttgcctacacagacatgtatcatgccattgctatttgttaatgttggattgatctgattttagcggtctttaatcaaaatgctacttgcagtagctggggtggggggggtgggcaaacaggctattataactcattctgtgattatattacttagcagaggcgtctttcttggagttgcttcatgttgataacttcctcatttatgtgatattttttggccggttttgtttcttgcttacaaaatgaaggtgaactcaggtttccagcatcaagaaaaccctacca

SEQ ID NO: 57927 - DNA, 573 bp, Populus trichocarpa
  Intron number 1 from transcript POPTR_0001s14650.1 (locus POPTR_0001s14650) derived from phytozome v7.0 (chr-ID scaf fold_1; pos 11512593 to 11513165 reverse strand)
caaatcgtggcaaaaaggaagaaactccagagaaggtggagattgaagatactaaaatagaacccaactatcaattacttatttattattattatttctttcaccagagtcatcttctaacgattttctctttcatcgttttgttttattttttctttaaaattttaattattaataataataaaaaaagagtttgagcaattcaaatggtaggccaccactacgtaccagtcatgtactcctgcatccatataaaacatgctcttgctttattcggggacaccccactccacattttcttcaccttaagagcaagatcaaccccaaagatttgggatttctctggttcaagttcaaaacatagaaaacgaaatccgggtattgattggttctagctgtttttgaagatttcttttgattcaacatccaaaacgaagcaacgataataagaggaaacattatctgggttttggtttgtttttgttgttgtttaagtatactgatccataatctatggagagtgctgatatttatagagctagtagtagtttaagagatagtttcagagcaggt

SEQ ID NO: 57928 - DNA, 594 bp, Populus trichocarpa
  Intron number 3 from transcript POPTR_0007s13650.1 (locus POPTR_0007s13650) derived from phytozome v7.0 (chr-ID scaf fold_7; pos 13675982 to 13676575 reverse strand)
ggatcttggaacttccctatctgtaagagcaatcaattctttactacatttctgatgtgagattttttttccagtatgagtgaaacgaagagttaagaagtcacttggtcccaaagaataattagaaaccatcacaatacctcaggcacccaccaagttgtatcttcaagctcttgaattgaacccatcaagtcgtttcttcatacaagttaattatagtccataagtaaagaggggattatttctttacaattgctcgacaaactcgttagaatctgttctgtcattgcctgcttatggaattcagcaaaaccaaagatcaggggcattgtacttccagagaaaaataatggttcattggtatttggtaagaaaactgaaaagtgttaaaaaggttatgatatatctgtctcaaaattgagttggtgtatgatgaattatcaacaagaaattatcagcctttagattaggaataatcagaaggcctactgtatttataaactttactggtgttggatactgcaatattgcattcacccaataatctttttgaatgcagcattgacattggatccattaataggagcaatatct

SEQ ID NO: 57929 - DNA, 854 bp, Populus trichocarpa
  Intron number 2 from transcript POPTR_0010s08580.2 (locus POPTR_0010s08580) derived from phytozome v7.0 (chr-ID scaf fold_10; pos 9488332 to 9489185)
gaggtatgtgctggttctccatataatttattgtatttgtattttcgttctggttctcctttgtttttatgttttagtgtgtgtattctttttgccagtgagcaaaataaggctcttcgaaattcaatgttggaagctagagtgtaaaagctgttggaagtattaagggaaaaatgaactggttctattctccttcatttggtggttgaactctattgcactggacttattgcatggaggttctgcaaaaagtagcttgacaccaagatgttcgaagattagccccaatgttctagttatattctcagtacaagataaaataaattttgtgaagaatctctcttatccaaacctcaatcatgaaatcccttctctcccactctcccccactctccatgtcaagaatggttccgagagaggcacattcactaactaaaatgaatttttttgacttactgctggattttgagtttttcatttagcaatcaatttcccacgcactttgtggaaagaagtgcaacagtaaagtttcttttgttaattatgtgatcgcaaatggatatggtagcagtgcatcaaggatcagattggtttgttctatctttttactcagttgtatatgtgaaattgacaaaattcagtataaatagctgcaagaaaacttgattaaatagatgttagctaactaacattagtttccacttctatagcagaagactcctaactcttagattttgtgattgcttctttagtttcttatccctctctacaagctgttatgtgggcaactctttgctaactgattttgttcttttatagggccaaaaccttctgagttatttggaaaatacaca

SEQ ID NO: 57930 - DNA, 503 bp, Populus trichocarpa
  Intron number 1 from transcript POPTR_0002s01840.1 (locus POPTR_0002s01840) derived from phytozome v7.0 (chr-ID scaf fold_2; pos 984610 to 985112 reverse strand)
accctaaccctaactcctcttcactcgcaaatcaggtactctgtctttcatcttttgtctccgtcaattaaaagctaaataacattaatttctgcacaacactatcgaatcagtgacccagcaatttttttaatattttttaaaatctgggttttacttcgtatcggccccgaatagttaagttgttttgagtgatggaaaaattgaaagtcttattaatttctttactcagctagattatagatttttcagcatcttttttgtatttttgttgctttatttttattttcttataaataaattccatgaaatccaaagttgttatattaggctaatttcgtagcaggattttgtaattttatcttcttaggttcttgattattttagttgtgatttgttgatgaatctatttgttgccggggtgtaattttttgtttagttttgttttttaaattgtctgtgttttaggatcttgaagttttctgacttgtagcctttagcgt

SEQ ID NO: 57931 - DNA, 535 bp, Populus trichocarpa
  Intron number 4 from transcript POPTR_0002s19740.1 (locus POPTR_0002s19740) derived from phytozome v7.0 (chr-ID scaf fold_2; pos 15667371 to 15667905)
tgcatcgcacacgcaaccttcttcgaaaagttcaggtactcagaaaccatcgtttcttgcatggtcatatatatgctgatgaaaacatgattgttgtggcttttgagaactttttgaactgacatgaatcggattttaggaggattagagaatgttccttgccaaatatgccgaattggaactctgttacgtcaatgctacttgtcaattttgtttttgacctgctatttgacttttaattgatgtgcaactatttatgttgttgaattgtgagctggttgcatttcagtctcttgctagttgacagtaattatcatgtatatgcagcattttttgtttcaaaagagtttctcaataatgcaggttgcaacgatttgtgttcaagcttttttttttcttttccttttcctgttattatagtttaagtttttaatagattgaatagaatcttcttattctacataatgaaagcatatgttcctgcaatatgtgagtcatatgaatttcttcctctctggaatagagcagttcatat

SEQ ID NO: 57932 - DNA, 299 bp, Populus trichocarpa
  Intron number 4 from transcript POPTR_0010s05840.1 (locus POPTR_0010s05840) derived from phytozome v7.0 (chr-ID scaf fold_10; pos 7301411 to 7301709 reverse strand)
cgaacaccctcatcttggatactaccacggtattgttctttattatcaattaggattcattcttctctcatcttttgttttctttatttttcttttgttttcatgtttttttttttcaccgggagaagtatttcttctcttttcccttgcatgcccagattgcagagtcttgcaaactttatcatcataaaaatagactagtcaggtgaaaggtctgatataaggcataaagttaacaatctaatcgatttgctatcaaaagttaatgctaaatttcaatttttattagggaggtgctt

SEQ ID NO: 57933 - DNA, 577 bp, Populus trichocarpa
  Intron number 2 from transcript POPTR_0001s14410.1 (locus POPTR_0001s14410) derived from phytozome v7.0 (chr-ID scaf fold_1; pos 11303854 to 11304430 reverse strand)
acaatatcaagcttcgtctggttgaggtattgtattgaaatttttttcggctgtatgagatacttgaaaacctcaatggctgcatatgtaattgagtctaataatttcaacggggaaaccctttttctggtttgtttgaggaattcctgactcgttatatacttttgaaaacccatcatttctgcaagttgagtcatgcaaattatgggaaagtgatttttgtttggttaattggatgttcttttcatagtaatggctggatatctgaatcaaatatagtgataacgtggatcaagctgtatttgcatggcttggtgttgttttagctgtagagtgtgcttggtggtttggcgtgaacaatgtgcaattttttcatggaatcttctgctggaagattgttctagcagtgatgattttaaattaaactgggaataaacatgatatgctggaggctgtactattattagaagttcatggaagatagtcaatagaggatgtcctttagtgattccaaggtttcccctctgtgaagctggttgctaaacttattgtgttcttttgtacctcctgcaggtag

SEQ ID NO: 57934 - DNA, 981 bp, Populus trichocarpa
  Intron number 4 from transcript POPTR_0001s35160.1 (locus POPTR_0001s35160) derived from phytozome v7.0 (chr-ID scaf fold_1; pos 33419863 to 33420843 reverse strand)
ttcctcaagtggaaactaggtcaagctcagcggaggtgagtggtttttattttttgttgggatttttattgtcattttttgttttttgtgagtcaaatgggaaaattacaaagaagttattgcaatatagagaattttattgttgatttcgaaaaattggtgccatctgggtaacaatatgtttttttgccattgaagaattatttgatgaggccactgtttcatttattgaatgttcttatggattgaatcctgctgggattaattgtatagttggtccatgtacccttgacattcttttaatgtggcctgcctgtcttctcttcttatttaatttggccctctactcaagaaaatttcttaatgtggtccctttgtccaacttccatcctatttaccttaattcttgacaagtgttcacttttatgacatgttattaagaattttgggtaaattgggagggcccgtattcaaaaaatttctagagtagagggaccactttcagaaattttctagagttgagggaccaactaaataaaaatggagtagtggagccacattaagaaaatgtacagtgaccagatgtaagattaatccttagctgaatactggttgaatgtttaatgttgcttacatttttcatttgcatgtatggatttcacactcatgcatgttataaggagatataatctgtcttgtttgacatatatcttacaaaatctcaattcctacaaatttctgttttttgtggaggaatatgctctctaaaagtcatgcacccgcttttttatatatctagttagcctctaagttgtgcaatgatgttacatggaaattgctggtggttttgaggaacatttgtatatgtgtatgagtttatttggtttatatagacaatgtaggtactcattgcataactaacatgtaattcctttgttgcctcaaggcaagctcatctgtaggttcatcttctggttccaa

SEQ ID NO: 57935 - DNA, 926 bp, Populus trichocarpa
  Intron number 1 from transcript POPTR_0002s08160.1 (locus POPTR_0002s08160) derived from phytozome v7.0 (chr-ID scaf fold_2; pos 5649684 to 5650609)
tcggggcaagaaggcttgtttttggatagtaagaagtgagtgagggagtgactctggcatctgcgttgttggcgtggcgagcgaggcgagctgttgtgtttgatttcaagcattttgattgtggtttgtcaattccaagtgttttttcatggaagatttattgtcattcatgcgtgtatttgtgcacataattttaccggtgtagttattggagagctgaggatgcataaatttgtagaagttggaaaataatggtaggtattggttttctagttaaaaaatgaactatgggaacgagtctaattgggattttgtgattttcttgagaaattttggttgttattattatttatttattttgcgtagtgggtatttactctgggtgatcttcagaattggggttgttttcttgttataaatttggggattttagctcaaaggagttagtggtcggtgtgcctattataaatgaatttgcagaagtttattagttgagacactggttccacttattgcaggtggcctagaagaaagctgaagtgacgtgctggtgcaaatgttaaagtttccctcctccaaaccagaagaatatacatcctcatctacttctgagactaagttagtatccttctctcaagttaagttagctcataaactctacaccactctgctaatattttagtctcgggttaactttttattcccttcctgctatgagaaacacactgccataactgtgttactactgagccaaaaagaaaggtaagtgaaatgaagttcaaaacaatctaatttaaagaatatatcattgtgttaactgctctaacctgtagttcttgagaattaaattctaattaattatgagctaatggattggctgattacatgtagggaatcaggtggaagatacgattgctgcagttgct

SEQ ID NO: 57936 - DNA, 720 bp, Populus trichocarpa
  Intron number 5 from transcript POPTR_0010s13120.1 (locus POPTR_0010s13120) derived from phytozome v7.0 (chr-ID scaf fold_10; pos 13001369 to 13002088 reverse strand)
caaatccattgtgggttgtgaaaaccagactccaggtaagtcagcatggttatgaatctgatttcctctgaatatgtatatttgttaagatcacaatggttctatcacatgtcaactataattgctgcctgctaaattgttgaaggcttctatcaaaacttcactgtagtttttgatttgacaaacgtgtatgcacatgtttttagtggaatgtactttctagctgcacttggcttaagctgctgccttgccagagttcatagctgagttgggacaaccatgtcgctatatattttagtctcgcagaagtatctaaaccaggtcataactggagagtgggtggagttctgaggatcaaactcctcatcaattctagcgggatacttgacccaagcaagcatacatcttcaaacttcaaaataagagaagaaacttcagtcaacactatttaacattatgtttcccttgtatatttagttattcttagaccctaaacagtcaatgtgcacgaccatattgtgttagagaagaaactttcttttctatattctgattagctaggatgcctgatgattctttgcttggatgtctgggtactctgatattacatgtgaacaacaactgttactctgcatagcttataatcgattaataattgttgcaccattgctgttccacttcagatattcatttgtttttcttctcttttagacgcaagga

SEQ ID NO: 57937 - DNA, 189 bp, Populus trichocarpa
  Intron number 4 from transcript POPTR_0010s13120.1 (locus POPTR_0010s13120) derived from phytozome v7.0 (chr-ID scaf fold_10; pos 13002164 to 13002352 reverse strand)
agcaacttaaaggcatcctttcaagttggtttttctaagagtttcttacttgaaaattatgcgttggtcttcttttgagttcacatgagaaaccttgttctattaataatcgctctctgagattgaagaatgtcaagtactgttcttattttgatttattctaaaatcttatgtctcatattgtagagg

SEQ ID NO: 57938 - DNA, 689 bp, Populus trichocarpa
  Intron number 1 from transcript POPTR_0001s15430.1 (locus POPTR_0001s15430) derived from phytozome v7.0 (chr-ID scaf fold_1; pos 12264921 to 12265609)
gaaaacaggctgtcccagcatagcacaggataaaggtaaagtcaacacctttcgtgatctttacattttcttcagatcctctctaacatagcaattctgtagaatggccatttcagtttttgtatctgcagtcacaacacagtaaatagaacaggattgatcgttgaatataacgttcgctagcttgaaaaacacaacaaaaacattcctgtttgtagtcaagtgtaaattgtggatcaacagtataaactgcttgtgttaatcctggtccactgctagctactagacattgctgactaagaggctactgatctgatgcctggaacaggttggtcaaattggcaatgactttgaattgtaaacaatactaggaaaaaccttctgggtatttgatgaagtgtcctgggcaccagagagaacacccattttctaaaatgtcacactcactttttttcacttataagtattatctacagtacccacacacatttttcacaattactaagcacttatgcccttttcatccttgagaaattaaaatattaaagtttgttgttttccatttaggtcctctgctgccatttttagatgcaactgtgtaaataatttgatctggagatcagtttaacattcaaatcataattacttgtgcaggtttttcaattgtacatttattgtcaagtggaact

SEQ ID NO: 57939 - DNA, 976 bp, Populus trichocarpa
  Intron number 2 from transcript POPTR_0010s15590.1 (locus POPTR_0010s15590) derived from phytozome v7.0 (chr-ID scaf fold_10; pos 14747205 to 14748180)
ggtcaagaggaaattgcaatccctgtgcattcgacgtaagctttgattttcttttctctgttttttcattcctttcacttgttttgtttctaatttcacgagtcattgcatgatttgtgtacccggttgtctattttggaagggtttgttagctatggtgcaataacaatcaatttggtttgatttggtgaggttgagtagggtgtgacactattggatcacgatccatgtcaaaattacatctaactcttatgatactttaccctttggtgtgccggttcatttgagcatcaactccttgatggcaaggtacttaggtctactcaaatgtgattggattatgagttgttgaatgtggatcgtgtgctggttttgtttctagttttataagccagtttgtgattcaagtaccagttctggaatggttgctagtcgtgattagaaaacagttcatctgattcattttggtgaggtcgagtggtttatgatactagatcatgattattatttagattacatttagcttgtattatatttcgctcttctgtatgacggacggttcattagaacgtcaaaattgaccacaagactttagtttaggtctgactcaaatttgattccgtgattagttgctgaatatggatcagggagtgttgactttggggtcataaacaattgttgatgaatgtataagtcaaacattgacactgcaagagtcaaatgactttggttgactgtcttgcaagctatatactgacaaattcctatatactgacaaattcaaagccaaatatgtatatttccgtatgctatctgctcagtgatcaatataatttatctgtcctgtacatattttaaaaattttctactttttagatactgaacatttattttttctgaggtttattttctcatatttggttcgttatttttgtttacagtgttgaggcagcttgcactgctcacccaactgctg

SEQ ID NO: 57940 - DNA, 1005 bp, Populus trichocarpa
  Intron number 2 from transcript POPTR_0010s12480.1 (locus POPTR_0010s12480) derived from phytozome v7.0 (chr-ID scaf fold_10; pos 12510547 to 12511551 reverse strand)
aagggtacgaatcttaaacttaagctatattcttcattttctttcccctacaagttgtccatgcataatacaaatatacaaagagaagagaagagaagggatttgcctgaaacctatcaaagggtagctaatgaaacgatacaggcaaaaggcctatgttgatcttctttgaaaagaatacagtatataggagtacttcttttctttcaattttcattaagcaaaaggttcaaatctgtatatcatttcagggtgttctttgtggctaaagtgaaggcatgcaagagaagatccaggcccttttaaaaaaattatatataatcaaaacaaagaaaaatagaagtcaaagaaacacgattagactttctcagcttcctcgtatgggaaactggaagaaacctaacaagtcttttttgactctgttctgtctttgaagtactctgacatgcaattttttttgcagagagactgctatttcctgacatctttttgtcacttctattcacttgaaataaatgtttttctaatatgtctccaggtcaaaatttatggagtattttttcattgtgctcaaagtaatggtatccctgaaataagcaaaattattgttggaaacagcaatagtattttccctttagagattctggaagcctttttccatcacttactcgcagaaaaagacatcatttagagcccacttttgcagctcagtgcatttgccatattaaatgccaccaaccagatgcatatttgtacttttaactgctcaaaaggtttcaccaaaaaaaaaaaaaaaaaaaggaaagatagaaaaccgatcataaggttctaaatgaaccagccacataatttctagtcatttgagacaataattatgaactcttaactacgataagtacacctattatgaatagttactcaattaattacctcatattaatataattatgttcttccttttcaatttcaggcgttaaatcagtagaagtgaacagaaagcaaagc

SEQ ID NO: 57941 - DNA, 748 bp, Populus trichocarpa
  Intron number 3 from transcript POPTR_0001s22680.1 (locus POPTR_0001s22680) derived from phytozome v7.0 (chr-ID scaf fold_1; pos 21566947 to 21567694 reverse strand)
aaccccaggtagatactcaccatccatgtttctatcatgaagattatattatggccaaaatcctgtattttgatgatatttttcatgaaaacattgatccaaagggacatatatatatactcaccacgaccttagttttggagtctatagagtctttttcttcttgttttttttaattgtgagtgtttggtgagtttatacgaaatgttaaaattagtaattatataagtttttaataattttaagatttataacatttaaattaataattttaaaaaaataaatttaaaacttaatcagttaaactatacccttcaaaaattcttttttagattcaatgtcaaccattaccgatgatagtggcatgcatattgtggatattggcatgaccagccccaactagctagctctcgaagggacaatgcaatatacatcctgccggaatttccatctttctaatttagaatataagattttggatttctaatttagaacccttttcttttttttgcggtgcatcgcacaaacaaacggatatttcaaaacaaatggattggaaaataaagaaggtgattactatgttgctttaatttgtccatggtagttggtagactctgttaactttttgagtccaaaattcaaaaggagggaataaaaaggaaagcaggtaaagcaacatattaattaaatatatttctcttactcgttttcttttgaaaatgatcatatcttcaggccctacttatca

SEQ ID NO: 57942 - DNA, 417 bp, Populus trichocarpa
  Intron number 2 from transcript POPTR_0010s18740.1 (locus POPTR_0010s18740) derived from phytozome v7.0 (chr-ID scaf fold_10; pos 16889811 to 16890227 reverse strand)
tccaaaccaaaagaagggctgcactgaaggaaaatgtatctgaagatcacatcaaggaggataaaatttcccaaggctcttgatttcaatgtgtatgccttagagctgttgatgaaggacagaaatctggtaatatcaattattgggagggagctcaggacattgatcatatgccttggaacaaaatactttgtgcatattagaggtactcatttctatttgagttctttgcacttatataaatatctctgtttaatttgtatttttttttaaacaagaatcaatatattggttcaagaatcatagaaacccctacacatcacacctgtttgaggaaaatgactagtcacttttctgtcgttttagtaagcaatgttgctttgagtgatggctctagctgctgtataattcagtttt

SEQ ID NO: 57943 - DNA, 649 bp, Populus trichocarpa
  Intron number 2 from transcript POPTR_0007s13400.1 (locus POPTR_0007s13400) derived from phytozome v7.0 (chr-ID scaf fold_7; pos 13509877 to 13510525 reverse strand)
gaagagctgatcaaagctagtgatttagagagaaggtaagctactattttctccctttttctttcaaaaaagtttacttctttttgtgtttcaatggctattagtcgttgaacatacggtttttttgctatacagtttgttggctgattcactttttgtgtattttcaatgctgttaataattgaatgggaggactaggcttaatggagcattgtaatgttgattatttgagtgctaaaatagctgagttttaaatcaggaggtgttgattttatagtaaagtgtgattgggtttgagtttttgagacccatttgatgaaaaaacaaaatttaaatctttgttacaaagggtgaatggatatatgggttatgtgaacttggtggagttttggtatcttattgggttgtatcagtcttcaagttatgcaaattgatatttcgttgtacatgtttttgtgtgatgaaactatcaatctctggttctggattttgtgattattgcttttattttatgaacccgagtttaacatgactgttgtgtcaaccatcgtgttctagttatactgtcaaatttctgggttgttgattaatgtgattgttttttatgttcttggtttgtccagtggagaagatagtggcagcgaggaag

SEQ ID NO: 57944 - DNA, 848 bp, Populus trichocarpa
  Intron number 1 from transcript POPTR_0007s13400.1 (locus POPTR_0007s13400) derived from phytozome v7.0 (chr-ID scaf fold_7; pos 13510610 to 13511457 reverse strand)
ctctccggcggctttctcttgtcgttgccattcaggtaaacatccgcgttgtctgtcaattataccaatttctatctcaattctcacccctttctctaatgtttcctcgcctctctttcagtgtcgaaatagttttcctgactcaaattttcacaggtaacgtacagtcagtgtatatatatataagcaaaatgatttccagatacaaattattagaggctaacgcgaaatccatctctaatacatcgaaacgtcaacgtttagatatgatctaggttttttttttatcgataatataaagtccagcgacagtattttaactttttcacgtgtaaaaagaaaaccgatgtgatatatagaaatgctcaatttcgcattcataaacatttgaaatacatttagtggtggaatatttttgctgctctacaagtatataaattacactactggaatattttgcattcataaatgttgggattttctcttccgaatttataagccgaattggcactgaagtcaatcaacctaccaagtcaaaggtacagccttaattagccttacatctaacaccttcaataaaccctgctgcacccaataatatcctgcaattagggttttagggtataaatataatataaaaagcaacgcttgaaacagagcatccagcataaaacccacaaccaaatttctttcactcattaacatataatcaacaaggtacttattaatgaatcaacttccattctcatatgatttttccctgaattcaaaatttgttcttttatattatttattttgttgtgtgttgataagaaaaggtaaaacaatttgagctttgaagaggaata

SEQ ID NO: 57945 - DNA, 370 bp, Populus trichocarpa
  Intron number 2 from transcript POPTR_0002s25090.1 (locus POPTR_0002s25090) derived from phytozome v7.0 (chr-ID scaf fold_2; pos 22291970 to 22292339)
cgcgtgcagcagtctgcagatcacgtacctcacaggttcgctttttttttttttttcctttttaattgataagataaacaaggtagaattatttgttttcttatgtatgttgcacttggagtttttattattttagtgttcaatgcaacctcaagctatccttagagcggtgtaaatataatgggatttggatgaatcggagcgtttctgtttatgtagaatttgaatgaggttttgactgtgcctatgtgggtgaacatttgttcaaggagtgcttgttgattttgggcttatgttatggcttctttgctttttttttgggggggtttgtgaaggtacttattggcagaagcaggcgacacgctatttg

SEQ ID NO: 57946 - DNA, 703 bp, Populus trichocarpa
  Intron number 2 from transcript POPTR_0002s13380.2 (locus POPTR_0002s13380) derived from phytozome v7.0 (chr-ID scaf fold_2; pos 9924348 to 9925050)
tgggtttttctgcttcagctgtttttttgttagtggtgagtcattcttccactatttgattctttctataccataccttttcctttctctttagaacctgaaatcaaaaggttatgtgtcatgagtttgatgggcatgttgagctggaagaatcattctttttatctccctctttctctcttatgttgatttgagcttgtgggcattggagactcttgatgttcaattacatattttgtagctgaaactttctggggcattacaatgcctggttggtgattttgctcaatataatttattcatgtttgtgcattggttgttgaataggaaagcaatatagttacagagttggttatcttagtactggaattaagtttcctggaaacattaatcactgggttgcagggatgcttcgctgtcctagtcatattgaatattagtattgcttgcaatgtagaatgtaaaccaagtttggaactttcatatcaagttggaaattgcttgcaagcttacccttttcttccctctatcttatgaacaattcataataaagaaagagaaacatagaatttttgcagtttcgtggcatgccagtataattgtgtgaatgcctcttgattgctaagcccactgcattttgttatatatattttggtttctttggtttacttattgctttcttttgcagttaagaaatttgttg

SEQ ID NO: 57947 - DNA, 576 bp, Populus trichocarpa
  Intron number 1 from transcript POPTR_0001s04180.1 (locus POPTR_0001s04180) derived from phytozome v7.0 (chr-ID scaf fold_1; pos 3309994 to 3310569)
cctaggtatcttttcttttctgggttttcaattttgtttaagctttttagtgatcgatgatcaagcagtgaagtgtttcgctctttctttctttactgttctattcttgtttctgttttctttgatcttttgctgttttttctgtatgtttatgctactagaatttagtggggtagtttttatatatatacttttttgtaatggcgtattgaagtatgctttttgatgggatcaagattgtttattttgagtgttcaaatcaccagatcaggcatcttttttttgtcgaacaattacatggttggtcttcatagattttgattctaacttttttgcacacatcatctgtagataaaccattttttctcaagaatctgtgatgatttgacactttaagaaggtgcattgaaagctatggtcttttgataaatgggtgaatctttagacatccatagttgtacttagagtattgtgtgtgtttttgccctgtttgtggtcttgattggagtcgtggtgtggtgtgctaacaaaaaaagctaatgtctttttgcagtgacacttcaccgggtgctgcac

SEQ ID NO: 57948 - DNA, 505 bp, Populus trichocarpa
  Intron number 4 from transcript POPTR_0010s18020.1 (locus POPTR_0010s18020) derived from phytozome v7.0 (chr-ID scaf fold_10; pos 16419191 to 16419695)
attgtctcgcgactttcgacgccctcctttaaaaggtgggtagatgggcattttggtcacatctctatgttgctatgatctgtaggctgtagctatttattttggttcaagtctggaagtttacatcgataaggaaattttggttttattgtgctgccatccttcgtatttcatgttaccctctagggttcaagttttacctcttctgttgtctaacaccctgtgaatgtactgaacatgatatagtatgatttaacttctcaactgcttatgcttatgagcatcactccagaaagtcaagaaacaaattacatacatattacccagcccttatttttttgtttgtcacggcatgtgatctgtcttctctactctccatgagagtgctctgttgtgttattgttgtaaatacaatgttatgatgtcacactccaatcgaaaataagatatgcaaacttattatttgacaggtagatccccagaccaagaatcgatagggtctgaa

SEQ ID NO: 57949 - DNA, 432 bp, Populus trichocarpa
  Intron number 3 from transcript POPTR_0002s14910.1 (locus POPTR_0002s14910) derived from phytozome v7.0 (chr-ID scaf fold_2; pos 11037124 to 11037555 reverse strand)
gcgattgtatccatggatttttctataatacttgttttggaaatttatgctctgtgcgggtgatttgacttgtttttcctacgttcttgttatctgtgttcaccttctgtttcctggcattactgcctgcctgcctctatgcatttgagctcagtagaagggtctttttctttgttttctcagctcttcctggggagtttctttgtaaataaagaatgaagtgagctttgataacatattttcctctggccgaattattagaataggcctttcgagcatgccattctcatctgacacgtgcattgatttgtattagaggactacctgtattcattttgttaagcccaataatatggtatggcgctacattttgtctcttcattaatctgatcaatgcttttataattgagtacttaactttggtagatcttg

SEQ ID NO: 57950 - DNA, 594 bp, Populus trichocarpa
  Intron number 2 from transcript POPTR_0001s13160.1 (locus POPTR_0001s13160) derived from phytozome v7.0 (chr-ID scaf fold_1; pos 10244893 to 10245486 reverse strand)
gtaaaaggtagaatgaataacctgcattagagaaatagaacattcacatgtagtctgctgtaactgtggatgttcaattctattggaattcatttctttttgtcttattttattggaaagaaaaaaagaaatatggatttcctagtatctatatcaactttgtgatactggtcattttttttcacttattagaatgcgatggcatgaaagttaatgtaacatgttttttggcttaaggtagaaggttgaaggtcttttcttaatgcagtctagtcaagcagcatgtgattgatgtgacatggtttgccttgcataacccggtaaaggaataccttgcccttgaggtgtagctaagaaatttgcctagccttggttaggccaaactttgaagagggatagcaaacaaaatgacacattaatttttacaaccaagttccatctagctcgagtaatgtctccttggtactgcaacatgcatcccctatcaaggccaatgtttagataaactgatctttgactgttcaattaaggatgcatggtttatgatatgacaatttggagatgtgaattgtcataattgcagattcttgtcag

SEQ ID NO: 57951 - DNA, 796 bp, Populus trichocarpa
  Intron number 2 from transcript POPTR_0007s09915.1 (locus POPTR_0007s09915) derived from phytozome v7.0 (chr-ID scaf fold_7; pos 9467974 to 9468769)
tttatgtaagtaaaatggtcaagaatatgatgcaatgtataaaaaatattggggggatcaagatacacaaaactttttgttgtatgtggctattgtgttagatccacgtttcaaattgaagagggtgaaaattttacaattaaggttaaagatactttgctaaggttgtttgagcattatatgaataaagatactttgctaaggttatttgagcattatatgaatattaatgagaatgttgaggttgttcatagtgttagaactagtataaatgaagatgttaatgttgatttaatagtggtaaatgatgatatgttagatgacttagcttctcaattcaaaaaacatttagaggaagaaggcggtgtctaaaaaaaatgaggttaagaggtatttgggtgatgattgtgaggatcctaaagattttaaattagatattctgggttggtggaggtgtaatgctacaaaatacaagattctttctaaggtggcacaacatgtgttagctatcctggtatctatagttgtttctgaagcagctttcagtactggcggtcgtatattagatctatttcaaagctctttatctccatcgacagtgcaagcacttgtttgttgtcagaattggttgagtttagcatcaatttcaatcaacatcagaaccttcatggattatattgaaaattctaagatgattgagtcaggtaatttcttttacaaatttaaatgtagttattttataatatcatttatttacatatgtttaatctaacattttaatttatgtttttgtaga

SEQ ID NO: 57952 - DNA, 817 bp, Populus trichocarpa
  Intron number 1 from transcript POPTR_0001s22330.1 (locus POPTR_0001s22330) derived from phytozome v7.0 (chr-ID scaf fold_1; pos 20950299 to 20951115 reverse strand)
gtcagcgaagtcgagcgagataacgaagtcaccaggtctctctctctgtaattaattaattctatttatgtatatatacatgcatttgaatcgtaattggcgttttaattagggtttatgattttgaaccaaaactgtatctatctacttgcctgtgatttggatattgccttttcttttcgatcgattgattatttgatgtgctaattatagagattaatttgtgaattttgtgcttgaatattatttttttaattcaatttatttattcactcatataatattaatttttgagaaataaacatttgatttacttgaattcatttaattaatttttaaagatcgatgatattatttgagtgattgaatgatctttgaacagttaatcatatcatcgtaatctgttgtaaaataatgctccattggaatgtttagaaagagatggtttaggaaatttggagaatttgaacaaaaaagagttgaaatcttctacattgagaaacccttgaaacaactcagggtttttgtaaagttttcttcttctttgtttttgtttttattcagtattttgataagtatccattggttgattcatctccatccttcatctcaataagttatactgatttgcattatcatagaagcaaatatgtcattggagaggaagggaaggaaaggaaatccatttgatagcatttgatgctatttagatactatttccttgtgtaatgtttaaaatgcaaacttctcattcgatttctgttctaatttatttttgtctccttggaaaaattttaaaactctttaggattctttc

SEQ ID NO: 57953 - DNA, 608 bp, Populus trichocarpa
  Intron number 4 from transcript POPTR_0001s41350.1 (locus POPTR_0001s41350) derived from phytozome v7.0 (chr-ID scaf fold_1; pos 40978979 to 40979586 reverse strand)
ctggtatgttaattttttatttttttgtgatattttttataatcatgttttttaataggcttgcacttattatattcaaatgctaatgtttgtagcatcacaattttaacacatgcatttaatggtattgggaggtggaagatagcgaaatcttcatagagatgtaccttgtctgctttgactttgagtatttgtgtggagtaaaatttgaaaatctcaaaaattctctatttttaagcagttgttatggtctagaatagtccttctgacttcttgtggtgttttgggttgggcattcgaacattttccttccattagtattcagtggcactggagagccatttcctgattttctttgatccaatttcttgcactctactatggaggataccctgcagtcctttttgtaattttcttctgttcccattctgatagtataatctctttaaccaaaaaaaaaaaaaaacagaaacaggaagaaaagaaaaaagaagctgctgttgtgattaatctaataaattgatttgttcacatggttagctcttttcttgtattatgactaagtagcctaaccattgcaacctgtcttgttcattttagtgcacaca

SEQ ID NO: 57954 - DNA, 771 bp, Populus trichocarpa
  Intron number 3 from transcript POPTR_0001s19490.1 (locus POPTR_0001s19490) derived from phytozome v7.0 (chr-ID scaf fold_1; pos 17169302 to 17170072)
gccaaggctgtggaaaaccaggtaattagaggtctttcattattttgtaatgctttgaatgttttttccttgtcgctactaactgatatatatggccagtggtgcctagatacatgtcatgtgcttagattcatgtcacattgtactaaatgaagcagcatcttctcattgttttaaccacttgcataattcagagaattgatttgcattttcaagttgccttttcttttattaacacactcgattcattcagcaggaatttatgactaaagtgggtttcacttcaatatttaaatccgattttaaatacctgttgaaattccattttagatgctgcttggttttcaggttgtcaaacatgatatgttttagatgttcaaaaaagtgtatttaatcattgttttatttaactatcttggtccaagtccgagatttatatgcagtgatgagataacatacaagagccctttatttgaaaaaaatgtacctgttacgcttggctcctgacctttgtccaaataatgattttttgacatgtagtatatatttctacttgcccgcacaatacattggagtgcaagattttacctcttctgtccaatttaatcattctgtgttcacacttatcgattgccatgccaacctgtcttttgcagtgtctatagtcatctttcttccatgtttttcaatgacattgagcttgttaataaatttatctgtgttttgctaattgcaggttgcagataacaactacaggcctgatctgaagag

SEQ ID NO: 57955 - DNA, 674 bp, Populus trichocarpa
  Intron number 1 from transcript POPTR_0007s14710.1 (locus POPTR_0007s14710) derived from phytozome v7.0 (chr-ID scaf fold_7; pos 14472983 to 14473656 reverse strand)
ctggccgaccggtgtgttttagattgtgcacttgattttagttcgtgtatgtcttcaagaataatcatttggcaggcagcattcattaagctgatggtgtttctttaaagcatgtcttcttgaaaaatatgaaatattcgaagttaacattctcttggattcctggacactcgatgttgctcgatttcggatgctgtagtattgtgtcatgatgttttcttgcaacaatggcaagaatcataacacaagaaaagaaaaatatttgtgattttgttgtttgatttggcatgttgctttctgctccaaagctgcagcaaatcatcttccgcagccatctttcccaagactggagatgcttacatttctttactgtgccatttatcatcaatggacagttattcaataaactgggaggtactcctttactctcacatactaacggggtgcacggattgttattgtggtgggtcgcatttgcatgcgaggggcttttaatatgctgccagaatgttgaataatttccatcatcaaccattttcctagcaaattccaagccatcattgcatttctacacttgttattgttttttcatgttatgggccatttttctttgggcaattgtcgtaactgaatgatttctctcgctgatgatgtttgatcagttaccatttcca

SEQ ID NO: 57956 - DNA, 992 bp, Populus trichocarpa
  Intron number 2 from transcript POPTR_0002s08340.1 (locus POPTR_0002s08340) derived from phytozome v7.0 (chr-ID scaf fold_2; pos 5816416 to 5817407)
ctggtgctaataatcgcaggccttatatctctccaggcatgcttccatcgctctctctgtctatccttttcttttctttatcttattacatgtttgtaaacgggattttcaatggagtctgtgtaaccgtgcaagcttaaagatgttatcaaagaaaaacatgggcatctcttgggttatctagaacgcaccagagatatgtaaaatcggtatccagatacggaactgtttgcattttttttaaatggctttgattccttagcaaaggaggccttttgccggggctttctttactgcgaagtgtattcaaggtaggtcttgttgtttcagttgggtctatgcttgctttataaagttttgctttttccaaacaaggatgcaagctgttcttttcgtcgaatagtctggtgtttctttctttctgcttttcctcttggtgcttactttctgcctttatgtttgattttttcctctaattattattagttttagcaccatgagttcgttaccagaagtcttgcttgtatgttccagtcgctatatactgaggaagtaggaatctcctcactgatctagtgacgcgggtaatgataaacttatctgtccgagtcccaaccatctcatcaagggaggtctaactgaacactatcaaaattgaaatcagaattagaaagcgatgactgtgagctcatcaccgtatagtgcttgttaacataacaatttatgtggtttggattccaattcctttaacaacatggaatgtgggtttgttagagattatgtcaggcagatttttggtgctttctgaatctgaagaaaactgtcctgtaataaatgagtttgttgctccttctctgagcaatattgtgaaagtaaattctgacagattagtaaatgtttattgttcttggaaagaacctagttgttgaaatgagtgtaatggttattataaaaggattcctgtgacactgaattgtttcatgctgcagttc

SEQ ID NO: 57957 - DNA, 975 bp, Populus trichocarpa
  Intron number 1 from transcript POPTR_0001s38990.1 (locus POPTR_0001s38990) derived from phytozome v7.0 (chr-ID scaf fold_1; pos 38232454 to 38233428 reverse strand)
ccaccgcagcatttcctgctacaatcatcaaacaggtttggaaaacactgccttttttctcgcaacattgtttgttcctgcatttaggtattcaactgaatcttcaagtttattgcaacttctagcatctattcctatcacttttaagtgtaacccaggtttaaatttttgttcttttgatgggtttagtgtattttagtggtggggcaaagcttgtatctttttcaatgtttggatgtaatcataggcaaaatctgtgtacatattcggtatgttgtcaattggagtggcatctaaatcctgaattttgtgtctttttgatggacttgtgatgttggtattggtcaagtacattacaaggtttttgctggctcgttattttgtatggtttaaatgtaggaaagcttagttttttctttatggtcatgagccggagtagtgtcattcctcgttaaatttgacaaattatctgcttgagagattttatgatttccagaaatcaggcatatagctaatcactaagatgaagggaattttttttggcattgccacggctgatatcctttttgtttgaagatttttctaggttcagctctcatctacgtatagtgaactttttccaaattcaccagctcattccacctctttcttatagccctgtagtcctctgtcaaggaagtctaattagtagatattaatgagtaagcgagctttatcagctctagtagagtcagtcagcaaaaccaaggagctgaataatgtttttgatttttcggatattgacaatcatctttaatgctatagcataagggtggcaaatctgcataatccataaatatttgttaatcagtgatttatgttttaaaatgtggtgtacaagtgtgttttgcttgtttgacaatttttttcttccttctaaaatgaaatgctgaactaaataattctgtttgcaggtttactcggatattagcagcg

SEQ ID NO: 57958 - DNA, 794 bp, Populus trichocarpa
  Intron number 1 from transcript POPTR_0010s11550.1 (locus POPTR_0010s11550) derived from phytozome v7.0 (chr-ID scaf fold_10; pos 11770038 to 11770831 reverse strand)
ccaaaaactccaccttacaggttttacttcaaagagctggatttattattaatttatacttctataacggcatgtttatgttgagtttagcggagctctaataccacttaattataattagcgcagcgcaatttgtgtactaaaccaaggttattataccactaattattgcacaatagtagtataaatatactagttcacacaacactcgctacaaataattatatcacactcactctcattctcacacaccacaccctaagtttaataaacccgtataggagttatttctagctctcctcacttggtgttctctgcaccactctgactcgattgatggatgctaaaaaggggagagggactacctatttatactagctggttaaaatataaaacagaagtaaaaaaaaaacggtgtattaagtcattttccggcaagtagaggtcggtgcactaactcacctctcctgagtccatagctacaattagtaggatgagattttgcatgtcaaaaagtttacaacattgtcatgtgaaggcaaagcttccatgacaaagttgctggtgcaatttaatgcccgtgttgaatttcaacagcttatgctttcaaacatgtaagcaattcattgatatttaaggacctcaaattttggagtcaatttaaaattggcaagtgttgtatataaaacacaaaatttcttttcataaatatgaagtaaaaattaaattcaaaattatatattttgatgaacttaagtgcctcaaaatcttacttctgcagagaaaatcagcaa

SEQ ID NO: 57959 - DNA, 561 bp, Populus trichocarpa
  Intron number 1 from transcript POPTR_0001s26390.1 (locus POPTR_0001s26390) derived from phytozome v7.0 (chr-ID scaf fold_1; pos 25435553 to 25436113 reverse strand)
ggattctaagatctgcagttcgagctctgctttctgttagtaattcttttatcaactcataatcttagtagctgctttcgtttggattcttaacatctttaatgatgtgattggttcttgaaaaattaaaggtaaagaaaacaacaatacataatggtatgagagttcataattttgattcttgacaaattctagcaaaagacttgagacttgaggctaattctgcctcaactcaggcaggcctggcacagctattagtctagattttttttattctctcttcccgtgtcaggttcttgattaatgttgactaggccttatatctagtttggatagttttgtgacagcctctctgcagccaaacagagtgctctgtctggaagccaagaaagcatgggcaaggcaaatgtaatggataccaaacaacagtaaacacatgaattgttttttaaaggacataatttaggggctaactaaattgtttaaatgtacaagaccgttttcttttttcttctgagttttgtttggtgatttgtttgcaggtgagaaaagggatttgtg

SEQ ID NO: 57960 - DNA, 734 bp, Populus trichocarpa
  Intron number 1 from transcript POPTR_0002s14740.1 (locus POPTR_0002s14740) derived from phytozome v7.0 (chr-ID scaf fold_2; pos 10943026 to 10943759)
caaatcggatactccttcttgctgctctctctgaggtaatattaaaaaatgtatatatgatgcttgaagtttttcattgctttttcggttttgaatcttgagctactataggaatgaaatcaagtttagatttagacttttggattttgctattttgttagagtgcgtgttgtccttgttacagtctgagatgtgagttaaatagaataaattgaaagatcgaggctttattggtggaaatgatatttggttggtggattgttatagagatttgagaaaatgtacttgaaagggaaaagaaaagatatatatatatatatatatatatatatatatatatatattatttttaatcgtttagtttcacaaagataatttctttggtagttgtttctagtaattgtttgtatttttcacctggaattgaaattgatttatttttatgctgctgacaatattcggtagaaatgctatagaggagaatggcttctggtagtgacgattatataatgaaattcataaaacaaaaagattatacagtgaatgcttttgacctttgtttgtattactttcatataaaaaaacgttactttgaatactgcatacatgtggggagttatgtgtttcttgtctcacatttctaggcctgttaattttgttggcagttattaattttttcctttcatctctttcattcagggtacgactgttgttgacaatttgttgaatagtga

SEQ ID NO: 57961 - DNA, 639 bp, Populus trichocarpa
  Intron number 1 from transcript POPTR_0001s21810.1 (locus POPTR_0001s21810) derived from phytozome v7.0 (chr-ID scaf fold_1; pos 20310192 to 20310830 reverse strand)
ttgactgatattgtgagatctagttttcattggagttaacaacttatatatatatatatatatatatatatatatttcacttgaatgtaaaagatctgattctatatcaagcttggaaacgtttttattgttttacatttctgattgctctcccttcgcatggctcatgtttcaccagactctgtattgagagattgaaaacaagcctgctgtttagtcttcaatgaaaatggtgattgcgatatgttttaagatgttatactggccgacctaataattatatcttgtccattgctttatattgccttaaagtttgctaaatttgattcaatttttggctttgctgcgatttaccttgttttctactttctattctagaacaaattcttctgaacaatgtatttaaaaaattagagaaaagaaagatactttgaaatgaaccaaggccataaatttccggtttattttcttgttgaaatgcaaagattttgtgtttgcttattgctgtatttctgttaaacttgcatctaaatgaatttatttttatcaagtaacttagactgttttggccatgctgtttatgtcatttaattcttatttacagctacagtacaagcatacttcagacttctaaagcca

SEQ ID NO: 57962 - DNA, 764 bp, Populus trichocarpa
  Intron number 2 from transcript POPTR_0007s14930.1 (locus POPTR_0007s14930) derived from phytozome v7.0 (chr-ID scaf fold_7; pos 14612499 to 14613262 reverse strand)
acaaggaacgtagagattgtaagagcaggtaatggttttggtgttttggtttttgtttcaagaattaggattgtgtccttaactttgtggttgaccaggtatgttatccacgtgttaacatctcttccttgtgaacttttgtggaaaattattctattgagccatatatggttctcaggttaacaatagatggaggaattttgaactataggcatgctggattttccaaacttgggtctcagctatttgttcctgattccagaattgactttgttgcagctagggcatttcataagtaggagagaagtgtagtataaaggtaacctttacatttggtgtgcgggctggtggcagtggaccttatctctaacgagttcttgggacaacagacatgtgaattgtgatctaagattagattttaacgtaacctgacatatggttttaggttttttgtttgttcaagtgggttaactgtggtctttctgttacaattcctgaaaatatacactagatttgacaagatgcaactcgatatgctctttctgtttttagtcattcagatatagccaaagctttttttttctctacatgcttactatgcttgtgagtttttttaaaaactggtctttgcattgcttgaaacacttcacaattgtaatgttttttatcttgccagagactctaaaaactatatgttttatcatataaacaaatcaatgctttttgtaggtttgtttacacaaaactcttgtcagttcttggga

SEQ ID NO: 57963 - DNA, 719 bp, Populus trichocarpa
  Intron number 1 from transcript POPTR_0002s03800.2 (locus POPTR_0002s03800) derived from phytozome v7.0 (chr-ID scaf fold_2; pos 2362191 to 2362909 reverse strand)
attgtcattttcatttttctaagtgtgagtttatactgtattaatacaattacgcagcagtcttaaagtttgtaactttctttatggtttgaaacattgccgacatttgtttttgacatgggttcgatgatgtggttacagtaattaaagacacaaagtattcaaagtgttgaaatttttgtgatctgggtcttcttaatcaatctctttcaatgcttaactgtatcacattataactggcaaccagcaacttggcggtgcttttcgtgtgtactgttcttttttccccttttttcattattgcccccttgtttatctgacaagatcatgctgctgcttcattcaactgggtagatttgatttggttatttcatttcaatgtttttcttagatctactgttcttgctaatctcatgtaagtgcaatagcatgccacattctcgtagatggaatgtagttcttttgtttgttttgttacatttgctatcttctttttaatctctgagtagtgatcttcttctgtatgaatgattgacctgataaaggtgtgatttcactttttgttaatgttttgacattggattgtatgagttgaatgtttgcaatttagggtttgttctgtgatttgctagactattgtgccttgtgttatggatgctttagtcctaacttgatttatttttggaatcaaggctagtggtgacaagaaatttgaggcc

SEQ ID NO: 57964 - DNA, 1036 bp, Populus trichocarpa
  Intron number 2 from transcript POPTR_0001s44640.1 (locus POPTR_0001s44640) derived from phytozome v7.0 (chr-ID scaf fold_1; pos 45095979 to 45097014)
tttttaagggtggtgaggctctgagtaagtcctgcatatgacatgttgtatatgtatatgtttctgggagacctggaaatccataaatcagacatcatccattgccttcccaaatcatgcatttttactgtcatcaaattaaaatgtgtctggcttgctttgatgctgggttatcagactgtatagttgaaacaaatttctatatagtagctgcaaaatcttagtagaattcagggttacatttcaatacatgtgtaagatgccaggatacaggtcgggagtggaccttttggttaagtcttgaagctttcacttcttaaggggagattttaaatattttttgaagtcttgtgaagaacttacatgacttcttttgttttcctgacaatttctttccctgcttctcaaggacagaactgtactttattatgagggggccaccaaagtcgtagaaattttaaattttagtccttcaaatttgaagatttttagttctactcctccatttaaggcttatttaataggaatacatgttttgcacccccaagcaattatgtattattaatatggatttttctttgttatttaattttcaagtctaccctgattgctttcatattgcaccccctttcccattccaaaaactcaagttctgccccctgcaagctgtccttgaagagctctttaaatactttaatgctctcaaaacaagagtgtataaacattgaacaatttaattttccaatctaaacaaaatatttttttttcctctgaaaagagtgcacaagcctttagtccttatctgaaaggagtcaatagtcaattaatttccttctgtttttaccagagcttttctgtacttggtggtgttgacattgcatgtggatttatttctcttatggtcagtccttgttcaggatggaatttctgattatggaagaaacctgttaactcaccctctggctgatgtttatgtttctaacaattgtattggtgaacagaacccctttatatacatcgtcagagctgttacctt

SEQ ID NO: 57965 - DNA, 711 bp, Populus trichocarpa
  Intron number 3 from transcript POPTR_0001s27870.1 (locus POPTR_0001s27870) derived from phytozome v7.0 (chr-ID scaf fold_1; pos 26736969 to 26737679 reverse strand)
ttgaggtacttccttttttccttctaaattgcaataaagataatgttttttgttgatctaatataagttgtaattgatggtgttcgatgtttgattgcatgatgtatgctgtttttaagtcactgaaataactaatcagaaattggcggtgaatgttgctcggaaatgattaggttaagagtaatgacacacgagacttcattttgtgcaaactgtttaaccaaacaattaaaactataatgtgaccttgaaaaaagaccgttctatttgtttttctatatcaactatagtcacaattcaagtgatccatgtgacatggacttatggaccagttgccgcctgggtatgtatccaagtgttggacttgctgatgtttagaagtgtttctcattgcagaatattcagcatctggctgttatttgtcccaaagtgttttgcttcaaaaaatccttgcagtgttttgaactcaacactgaagagttttaggagataaaaaatggttgttgcattgcttggtttttctgagtgttgagatgaaaatctctttataaacttcccaagtttttatctcacgtaacttttatcctcagtaattaaagctcacggcacagtgacatgccattaatttctagaagccttcttttgtcacctgatatgtctcgcttactaaccctttttctgtgatttgtgaatggtctgaatagcaacaaa

SEQ ID NO: 57966 - DNA, 763 bp, Populus trichocarpa
  Intron number 1 from transcript POPTR_0010s07710.1 (locus POPTR_0010s07710) derived from phytozome v7.0 (chr-ID scaf fold_10; pos 8696851 to 8697613 reverse strand)
ataaaatcccaaagccttgtaagtcgtctcttcttcttcttctttttcaagtcattcttcactaataacatgtgttgtggataaatttcattatgtatatatatagtaagtgatttcttagagaaagaaccactaattaagaaagccatagtagcaggttgttctcaccattgcaatttgccttccaactaacatgtgtgttgtgattctgccagtcatgaagggaaaaaacaaggcttgtgtttctttatcaatctttgctctatttacgttgtagtaaatcaaaattgtttgataaaaaaatgaaaagaaggagatttttttcttgtcttggaaactggtatgtttgatttgaagtatcttggactgattgtctcccgtcaagaaattatcatagtaattattttgaataatcgagggacatgctttatatcacatactctgtgctaagaaaatttgcatagacagtaacatgtgagccatgtcatggtagaatcaagaggaagggttaacaaaattgcttacagaattgatgtctaactttgactttccttgatcttcaccctttctgataactgatttgaggccaattttgggcaatggacaatgctcaaaatggggagtgtagatgaagttatgagctgaattcactggtagaagaaataaggaggggaaaatgttatgcttccatggagtaattccacatactattcttagtttctggatgaaacttttgatcttttcctttggtgtgaaaacagac

SEQ ID NO: 57967 - DNA, 399 bp, Populus trichocarpa
  Intron number 3 from transcript POPTR_0010s03980.1 (locus POPTR_0010s03980) derived from phytozome v7.0 (chr-ID scaf fold_10; pos 4771988 to 4772386)
aagtcattggaggtatgtgccttcctactaactggtgtgatagtattagtaattctctttcactggcatacctcaagtgatgatttctttaacaattttcttttttcctttgttttccttgcatttatttttctttccccttttttttcctctctaaggcgctacagtctgctctttgcatctgatgtattatctagttgtagctgaagatctctgtactgtaaagaagactacttgtcaaacccacaatcttgttgtaatctctccttgctttgcatcagctttccatgtttaattctctctctcattcatatggagcttgtgatggtttgcaccgcttctagaactcaaattgaccaactctttgtggtgtttcttttgaggtagtcacggatagaa

SEQ ID NO: 57968 - DNA, 633 bp, Populus trichocarpa
  Intron number 4 from transcript POPTR_0007s07250.1 (locus POPTR_0007s07250) derived from phytozome v7.0 (chr-ID scaf fold_7; pos 5562989 to 5563621 reverse strand)
tggattctgcccctgttgctgcccctgaccctcaggtaaatgctggttgcagttgtctttgttgtttttgacagtaacaagaacatattattggtatcaggaaggggatggaattcttatttttatcctctctgcatgtcttgtattatttcaagcatgtttagctgcgcttaatgaaactgttggctgtgattatggttgttgtagctggcaaacctttgaaaaccttgaatcgtttctttttactcattaagttcatgaattaactgtcattttacactttacagccatgctaccgataatcacacactctgtaccacctccatctttgctttgtgggtaggagatggtgttttgatttgcagactaatttatcagtagcctttttgtatagttattgaactatcatttggctgattatatattatctgcagggtctgtgctttccttcatgtgaccatgttattggtgatcaaaattcaaatatatgatgaaaatgttattcatgttcagtttaaatcattatttgggatactctctttctccttctgtagtcttccgggtctgagtccataaggtttttttcccctttgtttaggtttgggcatcaggtttctctgcagcttttctgaa

SEQ ID NO: 57969 - DNA, 919 bp, Populus trichocarpa
  Intron number 2 from transcript POPTR_0007s11170.2 (locus POPTR_0007s11170) derived from phytozome v7.0 (chr-ID scaf fold_7; pos 11431237 to 11432155 reverse strand)
ttaagagaagatattcggattccaaacttaagtttgtaagttaagaaattcctgttatgctgttgcttagctcctctagttttatgtgaggattgtaatgcctgcctgacaagtaggggagatggggtattttgtagttcttgctgatagtatcactacattatggattttccatctaattgtttgttgtatgacaaggtgttttctctagtgttttttgttttggacatggatatgagccttttcctgtcggggcagttgttgtcccgttttgttttccatttcctttccttcttctcagatgaaagacattggctacaatatggctacctgtttaactagactgattatagataaagtctttgtctcatcctgcaatgttttttttttcttacaaaactattacccatctagtcatctactgaactcaactaaatcactgacccctcatttgcaagttaattggaacccatacgtctatgcagctgggattttctgcaactaatataattcaggtggaattgacttctggaactttgtttcctgccaatatctgacctttggtttttagcctttcttgtggtatgttttatgtcattcttattttgtcaaccaaaattaatctagatgactttagttctctattacaatgagtgtagtgatggtattgctcctcaagttgtacatgggggattgttagtcttgggtttgcaactgcacgaatgctgattagagacttgagagcacttggaaatacttagatgcaggattgtttgtaaacttttccactcagtatctcgcttctttaggaccataactagctagtgatatatgttgctctctcagttgtatactaacaagaactgtgataaattcttgaacaggtgatatcaggtcaggcagggaagtgtatctggtc

SEQ ID NO: 57970 - DNA, 530 bp, Populus trichocarpa
  Intron number 1 from transcript POPTR_0007s04270.2 (locus POPTR_0007s04270) derived from phytozome v7.0 (chr-ID scaf fold_7; pos 2586939 to 2587468)
tttcatcttggtttacaggtttatttcttatgttattcttaggttaagatactgtcctagcatcagcagtttcaagggttcacttgtttgatgattctgctgaatctctgtctttctatctccctctccctctccctctcacgagtgttaacaagacatttcacatgtttttggaatttactaaagatagcagccaaagaaattaatatcaaaataataaagaacaaattgtatcatcatcatgagtcgtctctgtcttattctgccattatttcctgttcttttactttctttgagcacagtgatagctaaaaacaaaatacaaaaaaaaatgatgtcattgaatagttcacatcgtattgaacccaggcgtgtactggaataattgcaaacttcaggagaagctgttgcttgtgtgagagtgttgcctgtctgctgtcatagtttcatagtctttcttctgtttagtggattgataaattttccaaacgtaatagacccttgtgtccattggaataaccatgaaggtt

SEQ ID NO: 57971 - DNA, 680 bp, Populus trichocarpa
  Intron number 1 from transcript POPTR_0010s23890.1 (locus POPTR_0010s23890) derived from phytozome v7.0 (chr-ID scaf fold_10; pos 20334791 to 20335470)
ccagggggtttgctggtatataggctttgtggaattctcagatgattcacgttttgttcatgtttaacttttgtcggtggtggatcatgctgggctgcaatggttgtgctatgcggtttatgctagtcctctttctgctctcaatgataaattatggactcgtctccatgaattatactgctgatgttcgattggatacaggggtttgtgtgatgagaactatcttccctgaagcattttcagtgttaattttaatgagactattatcattatcacataattgccaagttcttgaagacgacagtacctcctgtgaataaatacaaaggaaaattgttacttgcttttttcggtgatattttttaaggattatttttttttatttgaggatactacaaagaacagaaaaaatgtttttttgaagtaaagagaagagagctaaatatatcttttgtaatatagaataaaaataaataattttctagtccagttgaaaaggaaaaataatcaaaattattaattaaattaaattttataaattttataaatattttaatttaatttaattttacatgtgatttaatttgacttgatgaaataatgccataagacagcctagaggagggcaagcagtcgccattataggcatcaaaccaatacgaaagataccccaggccgcc

SEQ ID NO: 57972 - DNA, 981 bp, Populus trichocarpa
  Intron number 1 from transcript POPTR_0001s37980.1 (locus POPTR_0001s37980) derived from phytozome v7.0 (chr-ID scaf fold_1; pos 37041650 to 37042630 reverse strand)
atactgcgcaaaagctcctttatttaggtatatttctgagagcatgcattaaggttttgttttaatgctgctctatttgttcgtgcattaggctttactgggttttatttgcttttgtttttttctgtgtttcttagttttttgatctgttttggttgttattgtaaaagggtgtgcttggttgaggataaaagagagaggtttgggtcttgtttatgtgtcattctgattgttggaccagtaaagctgtgaacttggcactatttgttttcttggttttaagattgtgcatgggtgctagtgttgttttctccatggactttttgaacaagcaaattagcacttattattatctgggcattgctgggtttagggtttattttgggactttgttgctgttgtttatttattttctttaaaataaagagaagaaaggggggattttgacccaagtatttatttttggattataggttctggaataggttttctaggttgggtggaaatactcattaggttgatgcatgtgcgattaaagttctagttttccaaagtctgaccttaatattattttttatttgatgcttgaaagaatatggaggaaggaaataaaacaattaaaaagtttattaactaatcctaattgataaagccccctgttgattttcttcttcttcttctttccaagcaactcagttcctgagtatgataagtgaaaacccaatatttgagtgttgatttgtgtcccttcttttcctctttatagtaactcagtggagctttattgaatttaattttcacaatatttatgtagcttttgattgcgtgcacaattttctctaatctgcactattcttacaagttgagtggacaattttaatgttcaatctactgcattcttaccaaatgagattatcatgacaatcatacctactgaattgtttcaattaaataataattgttggctggcagatacatttc

SEQ ID NO: 57973 - DNA, 635 bp, Populus trichocarpa
  Intron number 2 from transcript POPTR_0007s03860.1 (locus POPTR_0007s03860) derived from phytozome v7.0 (chr-ID scaf fold_7; pos 2282425 to 2283059 reverse strand)
ttcttcccttttacggtaacttattacttcttagtttttttccttttttccattttcaagttagcaagggtagcactcacacttgaaaccttccgtaacccttttggaatatgcaagactttcaagaatatgaattaaggctttgtttgacttgaaattttgtccaataaaaagaaaagttaattcccatcaggtgatttgtatcatttacttgttttcttgcagctatcatttgacttggactaatcttttctcactttttttatgacacaactctatcttctgttagtaaagatgttgtcggctattttttttttcttatttcattttcccatttctatcttaaaagtagctgatagtatctcctgctagttaattagtttgctaggtatgctatatatggaggcctgatatatcatccaaattaatgtcaccggtttggttttgaattaaattgatgaacatatatataatttaatagcaattggaattctaccattaatttaaataaattaaatatgtagtgatccatactctgcaactttacaactatcatctcagtataaattaattttcttcggagttgttaacttttagggattaacgtgcagggaatacacatactagtgacagtc

SEQ ID NO: 57974 - DNA, 975 bp, Populus trichocarpa
  Intron number 3 from transcript POPTR_0001s26020.3 (locus POPTR_0001s26020) derived from phytozome v7.0 (chr-ID scaf fold_1; pos 25113675 to 25114649 reverse strand)
taccaacaacttggctaaagttagaaaaatacttggtaagtgtgtatgattaacgcctatcagtggcaaaccttagctgcaataataaagtgcctcctcgtatgaatccctatgtatgttaatatccttgattgttatattgcttgcttagatttttctcaggagaaatcaaggatcttttccaacatagactagctagaatatgcgttgatatcaatatataatcctataactgtcgttggcatattgtgtttttctaagttctggatcatgaaagctacacctgcatcagattcagttgcaaggggaccgactgaggcacctatatatatagagaaaaatccccaactactcgagagttttgggttgatactcgaaagtgctgtcccacttgtattctgatcttcaagcatgatgtaggttcccccgaagcaaaatagcacttcttacggtgggtatattctaatgcgtattacgtttgctccagtgatgttgcgcttcttctacctatcccctaataaatgcattaatagaattagataatgcattgtacttggatgataagttcgactacatatagatcaaaactgaattgtgatccttgcttaatattgtccatctagctagggatgagaagcttttcatagcacttataaatcaatagagttcaaaatgctcgagtgaggcatactccagcgtgctttgtgctggaattttatggggtagagcttatgaagtgccaagatacatggaaaatatcgtgttcctcacccatatattgaaaacgatcaattctaaacttactacttattttgattgttatgctttatttgacaaacaacataaagttgtgtgtcagcattcagcttaatttttcccgattctgtggctttgggacatgataattcagttctttcatcgtttaattttaatctccatcacttaaaatcgatcacatgtttttttatgattcag

SEQ ID NO: 57975 - DNA, 979 bp, Populus trichocarpa
  Intron number 1 from transcript POPTR_0001s26020.3 (locus POPTR_0001s26020) derived from phytozome v7.0 (chr-ID scaf fold_1; pos 25115356 to 25116334 reverse strand)
tctactaacttttgatcaaaagtcaccacaatcaggcatgtaatccctgaaagcagtgctctctcctgttattcccatccttttgtgcctatgtttttgtgtatatctgttgtatatatcatcatatcttttatgtttctgttcttagcttagcagaggtatggttttgttttgattgctcgtgagttgcactaaatttagacactgacgcaagccacacaaccacacaaatacacccactatgttactgctttcaatcttgttttggttcctctacttccactgcaaaaaagaaaaaaaaagattgttttctttaagaagttgaaagctgattgagtaaaatattggcatgatatgttttcattaattgttataatatgtgatagcatgaacgtgttgatagaaattatctgtatttcttgatcattaagcacgcagcatgctttacatttccatgtgcaatcgaacttcttagaaaaaagaaacgcttgattaagacatgatgtgctgatgcactctctatttgaagaaaaactcaatttgtattggaagtagaagaactagaggtagatacaagatgtagttaagatcatgttgtgtttcaaatttaatgtagtgtctattttttaatgattttttttgttttttttatataagcaacctataagaagtagacaatgatatgccaaggagtcatgcgtgtggtttaacttgaaaaatctacttaatcgtctcaaatttaaattgttggatggctggctggaaatttagggaattagaatacggttattttcctattatttgtctagatatatttaatgtcttggagttaaaatcagaccattatgaatgaacttgcctattttgaagtcaacagcactgcatgaattgtccaaatgaaactgcctagaatgaaattctaaaattttagctcgttgacacaaaaatagtttgttggtgattttccataggggggaag

SEQ ID NO: 57976 - DNA, 455 bp, Populus trichocarpa
  Intron number 3 from transcript POPTR_0002s18320.1 (locus POPTR_0002s18320) derived from phytozome v7.0 (chr-ID scaf fold_2; pos 14283797 to 14284251 reverse strand)
aagtgttcgtatctgattcaaagctctctaatctggtaagtgcaaattattattattattattatttttatgtaatttagtgacgctgtgtttgaagagtagtttattttgtaatggtagaggtcttagtcttcttgcaaaaacattagttaattgctgatttgaattaatgtgttacgattcttaaatggggaggtaaaaataacttagcttaatttatggctatcgtttctacgaaattggaaaccaggatgttaattggttattatctcgaggtgtaagaaatagtcatttgtgcataggcagtaattctggcttcatgagttgtgttttttcaaatttcgtttgaatgctaggttgcttttagaaatttggttttgctagtgtatgctctcatgtgcagataattcactcaatgactcgaggttttcattttcaacatgtgcagggggaat

SEQ ID NO: 57977 - DNA, 511 bp, Populus trichocarpa
  Intron number 3 from transcript POPTR_0001s12260.2 (locus POPTR_0001s12260) derived from phytozome v7.0 (chr-ID scaf fold_1; pos 9491987 to 9492497)
ttttgtctcaacagcttgatccatcggtaacattctaatcctcttcggtaccacacatgacacatgcgttaagtttccttatggccaccgggacattatcatctcacgtgactgtactatgatggttaaagacgtggaaatggtttgataaattgataaaagctattttatcctgaacctcacgctaaaaccaaaccgaacctatttgctcaaattgcgggacctttatatatgagggttagcaatttgacagactgaaaatgatgaaaaaggaaaatgattctgtttctgaattttagttttgcatgctgagtgctcaaactgcaagtcgtatagtaagttcggtggctttctaccgataagtttaatgtcattttaaagatcatgaggcacatggaacataatcacaaaaaattggagccactggtcattattgacctttgtcaatcaactgtcttacaatttctgaaatatatgtggtttttcttttgctgcaggggaacgtcgtttt

SEQ ID NO: 57978 - DNA, 684 bp, Populus trichocarpa
  Intron number 1 from transcript POPTR_0001s05970.1 (locus POPTR_0001s05970) derived from phytozome v7.0 (chr-ID scaf fold_1; pos 4685303 to 4685986 reverse strand)
gaaattaacttcttgaaggtatatggtgcttgaatttttagttttttcttaacattagtttgcatctttattaatattggcattgtgctctctgatttgttttgatttgttttactctttgttcaaatatgtttagcaagggtataggatagtgtgatttgtgaaggtatacagtagtttaattggaaatgttgtagttgaatgcaaaatggttagatagttgttgacaatgcggttcaatttagtcttcatttttctagttaagtaatgcagctgattgtactgctccttgacaattgacatttctgcttgcctgtttccttcttagaatatattggtatattctatgtttaaaacttaaccattgaagaagatgaaacaattaccacataagatgtcatagtgaagatgaataacctcagccctttatgaattatgtaatttaaccttgatagatccaacatatttcctgattgtcaactcattttatcaggagagatgcatgctaagattttacagcgatgtcttgtacagatgtattgaatccgatcatattttgttaactctatttaatttggtttcctttctacagtacaattgtaacccttttgctctctgagttctcactgaattcttgttcttttcataggtggcaaagtcagtggtagttctttcaaaggtaat

SEQ ID NO: 57979 - DNA, 685 bp, Populus trichocarpa
  Intron number 2 from transcript POPTR_0007s01360.1 (locus POPTR_0007s01360) derived from phytozome v7.0 (chr-ID scaf fold_7; pos 761077 to 761761 reverse strand)
acgtggcctgaaacaagattaattaggattgaaaggaaaatcaagaaaggtgttgaacgaaaaaggcttgaggaaaaaaccctagacgtcgtagaaaatctacaaaagaagagaagagaagaaatcataatactttggttgtagaaacagtagtctagctgtgtgtggctgctagttttatacatatttgctatctgtgtatgaattttcattggatacgagctgtgttgtaattgttgcactacataacagaaacaatctgctctctgatcttaacttttcattaaatccaattcatattcacacacaactagcatcctgtaaaactacagaagacgaaagagagaagaagccaaggattacagacacttgtcctaagaataggaaaatgctaaggcttagcatgagagcataaatcaggcactttgaatttggacttgaaggtctgtgtgtataaccttctgtaatttgctgattactatcatatagtagcctttaatttcaagaagcttgcagaaaacagttctatgtcttttcacatgtattttggatgcttcatctgcttatgcaggctgctcaagaagagatggagatatgatttggaatcatcagctctgaggattaaagtcaaggacgtggcttataagtaggaatctgtcaaatctgctgctcgagcattggagag

SEQ ID NO: 57980 - DNA, 667 bp, Populus trichocarpa
  Intron number 3 from transcript POPTR_0007s15060.1 (locus POPTR_0007s15060) derived from phytozome v7.0 (chr-ID scaf fold_7; pos 14716159 to 14716825)
gtatcactaacttcttcctcatttgcttcactaaagtcattatcaaggctcaagttaattattaattaacaagcccctgatctcatttttatccatgtaattgatgagtcaatattttttgttatagatttttataaatataaaaaatcttaaaaaacaaaaatggatttggcaaatatgttactcaaagaacttggacttggtagtcagtcaagcttgagtacttagatttcttctctttaagattgggttagacccatttgattttttttaaaaaaaattctatttataaaaatcttaaccaaatattttgactcatcaaaaggaattattcacgttgctttccatataaaatggacgattatggttaatcttctccacacattaatcaacattagttagaagtacatcattttttaggtttcttgtcattttatctactagattgttggaggcaacaatacactcttcatattgtcctttggctatctggataatggttgttgttgttgtttatttgtttgtttggtttcatcatcaaaattgttgcaccctaatttttgaccattttgtttttgaaatttttcaaaaaaaaaaacaacaaaaacctaaaaaaacatgttctggcatattgcatcattttcaatgtctttttcaaagaatttaa

SEQ ID NO: 57981 - DNA, 524 bp, Populus trichocarpa
  Intron number 1 from transcript POPTR_0007s10200.1 (locus POPTR_0007s10200) derived from phytozome v7.0 (chr-ID scaf fold_7; pos 9955524 to 9956047 reverse strand)
ctttctgcttctccaaggtatgttcctcgaagaatttttaataattgatcatttttttttgtttcttcataagtgctactacttttaattttaatcacaaaaaaaagtaagacgcgtctatctaaattagtctgcctagatttaatttcgttaagtcactttacctgttattgtagcggtgtttgattgttatgcatcagttcatttatggattatactgcccatttttacttctttaatatttgttgctaacttgctatggatcgctctcttgtttttcattctttatattttactaagtatcaattttaaaattaacaaattattagtttaggtagttgaaagaggagttgtttatgatgattttatattatatttttcgtggttggatttgtgggctattcgccagcacttgcctctatgcaaattaggtatctgtttctgtaccacaatcacactacaaaaaaaaacgaaatcgattgtgaaattttggcttgtcaattttcttctcatcaggtatttga

SEQ ID NO: 57982 - DNA, 1008 bp, Populus trichocarpa
  Intron number 2 from transcript POPTR_0001s14790.1 (locus POPTR_0001s14790) derived from phytozome v7.0 (chr-ID scaf fold_1; pos 11643739 to 11644746 reverse strand)
ggcccgaacagtttgtcagggagtttagggacaaggtaaaatagtttacttgctgtgggcgtttttttaaaggtttttttctttaatgtgcgctggttgcatgtttgagtacctgtgttgcataatacaagcgaaatttgaaatgtcgacacattttgataaatttgatcctatcatcctagacaagcagaatggttcatctttaggtcaattgttgtatgctctagttattttcaaatgaaatttttgctttcggctcgattccatttacctaatgcatgtgctaatgtgcctgttgatcccttttttcatttgttatcattttgctatagtatttccatcttgaaaccagtaaaatcattagggtaaccatcaaatgacaaaaagttcagtctctcatgctctatatggtgatcttcttgtttttcattaaagtcttaaaataaaatgtgacaccagtaattcttggattataagaattgaagtgtgttttgaccgcttgtccaagtgtcgtccttttctagatcttgtattgtgtatgtgctgttttctggtaacatagaagttaggaccaagactttttgtacctgcttcttaactatttgaccagagtaccttaggggcatgtttattgtggttcgtatatgttttgtcccgtgtttggaagaactattttatgtttcggggcattccatataaccatatatcattaaagatttcatgtgtgaagtcttcaaaaactagcctgccaaaataattctgttagttcagcctccccaatgtgatgttcgtctaattgaagaccttttctggcttctcatatttgtaaaaatacttgatgattgcatcataaatcttctttaactcatgtagctgaaaatactataacgcagccccttctattctgtgcatttcccaagatattctttagtctgtaaaacctgacagtattaatttgtaataattttaaacttggtgctttccatgcaggaattggatctcatccgt

SEQ ID NO: 57983 - DNA, 447 bp, Populus trichocarpa
  Intron number 1 from transcript POPTR_0001s14790.1 (locus POPTR_0001s14790) derived from phytozome v7.0 (chr-ID scaf fold_1; pos 11644925 to 11645371 reverse strand)
cttgttctccaactcacctctctttcagttctcaggtaataattcattaatctccataacccctctttcatcgtcagtttacccgttggtttcgttgactcctagacgattacatatttctggtttttcatgtttttttttctccgagaccaaacagagactaagtaacggtgttgtcgagattggtatagttttgctttgattttaccttttggaaacattaaggtgttgtttttctatctgagtttctgctcgctcgctaagaaatacagtttttaagtaatgaaaaataaaaattcagaatccacatgggtattagtagtcagagtttcacttgtttgaatttcaatttgtcttcgcgatatctcagcaagaaaggagatgctaacttcattgttttatgtgattgtaggtggagcggagtttatttttttggttggataagga

SEQ ID NO: 57984 - DNA, 335 bp, Populus trichocarpa
  Intron number 1 from transcript POPTR_0002s03990.1 (locus POPTR_0002s03990) derived from phytozome v7.0 (chr-ID scaf fold_2; pos 2502107 to 2502441)
tctttcaggggagcaagtcgggtaagcccatctccttctctgtttatttctacaagggcttgttttctctttttaacatgagattgctttgactgtctgtggatgcttggttttgctcatctatgttaactagggatatttctatgccaaaagttgctccctttcttctctcttgttaataaagatttgatctttagggataaaaaagagctaaattgttgttgggttgaacccatttcctatcattcttcaaagaatgaatttttatactttcaagttgtgttttgatttgacaagttattgtttttattaatccactgtaaatttctagccca

SEQ ID NO: 57985 - DNA, 609 bp, Populus trichocarpa
  Intron number 1 from transcript POPTR_0001s38260.1 (locus POPTR_0001s38260) derived from phytozome v7.0 (chr-ID scaf fold_1; pos 37354012 to 37354620)
tggtcgtcgccatttctctacgcctgaagaacttagtcagtactctcccctctcccttcctctcttatttaaatgcattttatgtcattttttcatgtttttatttatttatttatttattaatgcattttagtgtaaatttattaactttagaatctagttttgatttcctcagcctctcagtttctatatcattacttctttagaagcccaatcttagaactttatggaaattgataataaccctcgatgtcctgtcgtttcaatttgaatttggagctgtacttttcaattctacaattagtttagtagatataaatggaatgaaatatcattcaatttactttaaggaattctatacatggtcaaatattcaattcactttaaaaaaaatatccaaacacagctttgttcttttttcaaagcattagcttccatggatgggatcatcaaatattttgaagaatatggtcttgacttatcgttgattgaacagtcttgattgtttgtaatactttcatcttatgtgaactcactttatgatcttttgcatttattttttaaatgattgcagttgctggtaccaccgccactcgccctcgcactttt

SEQ ID NO: 57986 - DNA, 591 bp, Populus trichocarpa
  Intron number 2 from transcript POPTR_0001s38260.1 (locus POPTR_0001s38260) derived from phytozome v7.0 (chr-ID scaf fold_1; pos 37354592 to 37355182)
gtaccaccgccactcgccctcgcacttttagtcaggtatcaccctccgagctgctgtactcaccatatagtaccccatacttcagaggtttttatgactacgaattgcataatagatttaagttttcaattttagatattaggtcttaaaacatatttcctagtgctagtcagtagttttatggttgttccactgttttgtcgaaatatgatctgtggtttgttttggtatacttaatagacaaatttaatgtagctccatatctatgaaagttggatgagatggtagagagttattatcttctccattttatgagtttgaattttttgacaattatatttgataccattaatatcccaatctctcattttttttcttttgtatttgatatgtctatatgatcctatttcaaattgtttattggaaaacaagtcaatgaactaagaattttctgtactcggttgtttatagtggttctctcttctctacatatatataagcatgctggattatacatattggaagttgtaaatgtgcttcagtacatgatatagaagtctatttgaacatttcaggaagaagcagcagaga

SEQ ID NO: 57987 - DNA, 446 bp, Populus trichocarpa
  Intron number 1 from transcript POPTR_0010s13420.1 (locus POPTR_0010s13420) derived from phytozome v7.0 (chr-ID scaf fold_10; pos 13270725 to 13271170)
tttaagcttgagttgtacagttcaagcaaccaaaggtaatacacctattagctaccagcctctctctcttttgaatctcccctcttatcattttctctatttaattatgttttcacctgcagttttccagttttttttgtgtggaattgatagatccacaaatatttcagatttgacatcccataaaagctctgtttttcaattttttttaaaaaagatctcgatttcttagctcgtgaattatggatttttgtttttgtttttattttataatttcagccatgcgtgtaacgccggcggctttttgtcttctttttatttgaaaaaaaaaaaagagttttgtgagatctgttaataatttgtataattttactctaaagtctcaatttgttttactggttttatttgcagggctttgttcatagaaaaaaaggcaaaaaaacagc

SEQ ID NO: 57988 - DNA, 253 bp, Populus trichocarpa
  Intron number 3 from transcript POPTR_0010s13420.1 (locus POPTR_0010s13420) derived from phytozome v7.0 (chr-ID scaf fold_10; pos 13271467 to 13271719)
agtttttggacataatcctcgccaaggtaatagtttttttcccctctgttcattcaacttattttgtgattataaatttcttataaggttaaaaaaatctgaacgtggtcccatgaacagcggctaacatttcaaccgtgaagggaaaggaatatattacagatgttcttggaccatccattaaccttgtcggtgcctatttcttctcttgtttgattttttgttcaataatttgtttctttgtagggtggtt

SEQ ID NO: 57989 - DNA, 882 bp, Populus trichocarpa
  Intron number 3 from transcript POPTR_0001s33400.1 (locus POPTR_0001s33400) derived from phytozome v7.0 (chr-ID scaf fold_1; pos 31586495 to 31587376)
gaaccagttcaccaagacccttgacaagaatctcggtatcgtttctggcatatctcctctctttttaagtgctaattagctctggttttgttgcatagaagcataggcttagtccaggagtctttatgctaatcaatgtcattcataatttgttaatgttaaatgtttgacgtggtttctgaattatgatttttgtcatctgtgcatgtaattggtattgtggttattgttattctttatttatttgatttgatgtataccctaaagtctagttaagagtataaggaaaagaaaatatagcgtcattttcttcaagctttatggatttattgtatatcatcaaaactgagataatggtcagctttataggtttatgtatagtttttttggcatgataatgtttgaagcgcaactcgtgaaaaaaagtttaatcaactggaatgcttagcagtgattatgcaggtttgctagaaaaaactggattctattctatccgtgcaatttgttttggttcccttgtttccttgagtcattctgtggtcctttgtgatttcaagtgtcatgatattgcttaagaactagggtctctaattttctttgctcttatgcagcaactatattgttttgttaatttgcttgatggtaaaagttaatgttctgttcaatcttcttttcttaactaagatgtgaaccatagcttgtttgttgattgcttacatggtacaaacaatccaacatacaagtggtgtgatgataaatatcgtagctttctggcttagtttcttttctttgttttgacaagaattttttatcccgttgagatatttatatttaatactgttccttttgtgaactccttgcgcagcatcaaacttgttcaag

SEQ ID NO: 57990 - DNA, 565 bp, Populus trichocarpa
  Intron number 4 from transcript POPTR_0001s30010.1 (locus POPTR_0001s30010) derived from phytozome v7.0 (chr-ID scaf fold_1; pos 28588351 to 28588915)
aattggccaaactacaccaagcagaggctgcaaaggttggtctatcacactctctgtgccggtttatctgggcatgccctcttatgtggtgtcaatctttcttttcttgagattattttcatcaaacatctaccagagggaattaatgaatcaaacactaccaaatggcaacattgaccaagtaggagagaatagacaatacttcagcatcattaaaagcaacatttgatcaaatgaaagactcataagctttgcattcaagattcttttgtctttcaattgtcatttcttgtgctttattgaggatctatcatgattgattaccatattttcttttggaggagatactaacttgatgacaacaaagttatgacataggtttcacctacaagcaatttgtgctggtgacaggattagctgtttttgcaagctatgatgtttgtggaatgcttctattccctttattgttttcttttccaaaatatttcatgtgtttagattgcagtggatggaattttgctttcatcattagtcctgacttgtttcatttccttttttccagaac

SEQ ID NO: 57991 - DNA, 512 bp, Populus trichocarpa
  Intron number 1 from transcript POPTR_0001s16530.1 (locus POPTR_0001s16530) derived from phytozome v7.0 (chr-ID scaf fold_1; pos 13312234 to 13312745)
tcacccatttaagatctcactgattggtctttcaggtatgatttaacccacatttctcatcatcttttttttcttctttttttctgggtttaaaaagttggattctttacatgcaaagttagtgcatttttgtgtttgtatgagtatttgtctgaatggttgtttggcttttgaatttggtttcctcttgggtcaggcattcggggttggattttgatggaatcagatctgggttttgtttgattattctatgtaaagtaatagtttctgtttttgagttatggcttcgcaattaataaattttaagtcttaaccattggatagtaactttatgttttgtcccatttggatttgcaatgtgggtactaaattattgttttcctcgtttgatatgcatatgtggagtttaaatcggtttttaatcagtttaaactgcaaaattggtaatccatttattggttttgtttttactttcagaatttgcattgtgggttgggttccttttggactga

SEQ ID NO: 57992 - DNA, 731 bp, Populus trichocarpa
  Intron number 4 from transcript POPTR_0001s16530.1 (locus POPTR_0001s16530) derived from phytozome v7.0 (chr-ID scaf fold_1; pos 13313324 to 13314054)
ctcagttagaagcagcccggaaaatatattctcaggtaacgactaccattttatcaagtagggaataatcatgataattattggaaaagcagttctcactgaatttgaggttcctttgattcaggggtctggagatcaactttctggtgctttaggtgtgtatgtttctctcattttttttcggtttcttctgaatacagtaatgctaaaaagataatatcttccatctaaatacatactagataactgattttattgccatcaacttggggaactatataatataccctagaatcctagttctcacacatcctcactgacctctataacaattcatgaattttcaattgcttggaaattgtttaatgaacttactggttttcttggaaagaaaatgcattctcattaatgttttttaagataaaataagaattttattgtaaagaaaatgacttagtagataaatcaggagacagagatatcatctcatgaaagaagtacgagtagaacaaaataaaaacagtaaagcgctcctatcccctgaatatcagctggggaactaccttgaaaagcatccagcattgcatcacagggttgtttgaaacacaatcctggtgaaaacagtttacttgatgagaaatggttttcgaaaattgtcacatgactctccatcaaaatacaccaaatgcccctctttcagaaattttgcacttcttcctgcttccaagacc

SEQ ID NO: 57993 - DNA, 725 bp, Populus trichocarpa
  Intron number 2 from transcript POPTR_0002s09590.1 (locus POPTR_0002s09590) derived from phytozome v7.0 (chr-ID scaf fold_2; pos 6872927 to 6873651)
gttaccgaggaggagttcgagagcttaaataaacggtgagatctgtggatcttaatagttcatcataaactttctaaatttggctctgataagaaatgatgatggtttcgattgtctaaatttggaaaatttaaatctctttgtttcacacaatggcgttactgttggtttgattttgaacattttgtgcctaggtaatccatccagttgtccttagatctgttgaaacaaacattttcatcagattcttgcaaaaaataaaataaaattatgtatactcttaagttttgttttacattgtcttactactcgtatttgatctttaactcataattctctctgattttaccctactcgtgccaatatcctagtaaaggcagtacagtttctaccaaattttttttcttggtcaatgatatggcttttaaaccatgtttccttggtgtagaacatgactggttgttgggtcagtttagaaatattgaaacaaccattttcaagattgttttctcagtagaaaattgagtgaagatgagtttttgatttctgtgggattgccaaaatctttgttctctgatactagaaaaccacagttgtgtatgctaactagatcgttttgcgtttgtttatttagcaacttgctgttcattcttttgaggtttccatgtaaggtctttgactagattaagtttgaaattctcaggaaaccttgttctgggtataaa

SEQ ID NO: 57994 - DNA, 626 bp, Populus trichocarpa
  Intron number 2 from transcript POPTR_0010s13260.1 (locus POPTR_0010s13260) derived from phytozome v7.0 (chr-ID scaf fold_10; pos 13123274 to 13123899)
attataaggtgccggagttgccggagagcggaaaggtacagtctttgtgtttaattagcatttccagtggttgattctttgatgagagaatgtaggatgatggaaggcagattttgaattttgtataaatttttgtgtttatttgattcttgaagacgaggttggtgttaaatcagtcattttttttgtataaggctcaattggttggtggaatttagttttcttagctctgcaacagtgaaattcaaaagttttgttcttgtctgccttttcctgttctttctcaactaccatttgaagcttgtaaatttacgcagttctcgtgttaattagtttaagaagatgaaatttgctttaaatcagctaattagttgtttaaatctcagtttgggtgttgggtttggttttgtcttcattgttattggtgaagttcaaaacttctgttctttttttccgccttttcccattctttctctactaccaaactgggtattttgattttgctacatttagtgaatgattattttgattttgattattttgattttgcttgtgtgatttgattgatttcttcaagttattaagcttaacacttctgtccttttttttttattgcagaggtagca

SEQ ID NO: 57995 - DNA, 516 bp, Populus trichocarpa
  Intron number 1 from transcript POPTR_0010s02850.1 (locus POPTR_0010s02850) derived from phytozome v7.0 (chr-ID scaf fold_10; pos 3342042 to 3342557 reverse strand)
aagatttcaggtaggtgcacttttcactgttatactaaacatgcaaataaattctgtttgaaactactagactcttttttttatgaaggcaacgagtttgcatttgaaatttctaatggatatgtagagactatcagaaattgatcatggaacacgtcaaagtttcatgctgttcttatcaataaccaacttggaattataattataaagtccgggagtcaatctgattcaagaattggattgcagcaggtttacctcctcaacccattcaaacttaaaaacaaaaacccaaaattatatctttttattgaaaaaaaaaaaaattccccactaacctgggccgagtgaaaagctcctctgcctgaatgttctaggacgtgttgtcatagcttgaaacagatgaattacttctctctgcaagcatcaacttgatttttgagaaatgtattggcaaatattcttcctaagaatctcgaacttaaagcacaaaggcaaaaccttgtgtttaatgcagga

SEQ ID NO: 57996 - DNA, 396 bp, Populus trichocarpa
  Intron number 1 from transcript POPTR_0002s11580.1 (locus POPTR_0002s11580) derived from phytozome v7.0 (chr-ID scaf fold_2; pos 8645468 to 8645863 reverse strand)
ttattcttgggagaacggtcagttttttgctcttttttggtcttgattaattacgagtgttagttgcgtgtttaatgctatattattaatttacaccttcttttttcaataaaagtggaaacagaatataatttgtggtcgtttttgtttatttatgtgatttgtttcgtgcatgaaagtttggtttgaatcctggatgttattctccattaaaaacactcaaaaaggcatttattgtttgtgtttcttggttgtttatttcgttgatgagtttttttttctttccaggtagaagtgaagaaagcactacctaaaattgaaaaacaccagcaccagcaccagcagcaacggcaacaccacccccatggtaatcaggaagctagcaacggattgggt

SEQ ID NO: 57997 - DNA, 748 bp, Populus trichocarpa
  Intron number 1 from transcript POPTR_0001s01890.1 (locus POPTR_0001s01890) derived from phytozome v7.0 (chr-ID scaf fold_1; pos 1378627 to 1379374)
aataattttgcaaacattcgctcgggaatttccaggtagtttttaatcacaatctcattttaggcttaactttcggttcctttgcatattcttagggtttcttgatgtatttcccaccaatgaagttgatcgaggtagggttttgcagtttgcgttatatgatacggcttgtttggggttatttcagtagttctgttgattttctctgaaaccttttcattgattcaactaatataagcaaataaataaataacgagaattgtgattgcaatgcggttgttctagaataaatatgtgatcgaggattgtatcttaacatgatgttacagcggtgcatggacatagctctgatttttatattttctcattttctcttggattttagcaaaagtttcaaaacattatgaatgagaatggttttctgagtttgatttaatttttgctcaattaatgaagttatatatgaatttgtatgacttactgcagccccgtcggcatgtctgcgtttttagtatctgatgtttgaagcctagaaataagcatgtgcaaatgctcgttaattatttcgtttttggtgctctggatgctgatagaataaacacctggctgggataaaaccattcctattatatgcaaacgtgcaaaatattgcttcttttctttttatgcatttgatttcacttgaagaaaatgaattttctgttaaattggcgtggtttacttacccgtggcagagtggagaggctca

SEQ ID NO: 57998 - DNA, 680 bp, Populus trichocarpa
  Intron number 2 from transcript POPTR_0001s15780.1 (locus POPTR_0001s15780) derived from phytozome v7.0 (chr-ID scaf fold_1; pos 12602823 to 12603502)
ttgctgattcggctggttttaatttcttttggagggtaaggcaatgattaggatatccaatgagtttttgagatttcatgtcatcaattgcaatatttacaagcagtactggatgttaaagttagagagctatatatactgcctgcaaaactcaatcttcttagccctctgttctgttcatttattcgttcaaaaatgttctcttaattggtaagcctttgttgtctataattaacaatatatatatatatatatatatatatatatatatatatatatatatatatatatatatattatttgaacaaaacacgatgtatgcccacatcagaaaatttgtcgacatgaatatccacttgcgagtcactcactaccacatccactcatgagtcacttactatcactttcggatgatgatgagagatattgatctttcaagagctatgggtgtctgaatcctaacatgttttgttttttatatatatatatactatacatctccattgtcatttcatccatggatttatctattgtttgtagatattgttactttttttctgtgactgtgaccaaaaagcctggacactggacagtgattcatggagcatgcactcaaatggttttctttctttatttcattttcagggttactttgtttcagtccttattccttaagggga

SEQ ID NO: 57999 - DNA, 388 bp, Populus trichocarpa
  Intron number 1 from transcript POPTR_0001s06740.1 (locus POPTR_0001s06740) derived from phytozome v7.0 (chr-ID scaf fold_1; pos 5173787 to 5174174 reverse strand)
ttcccagagatccaaaactgtaatcaaatcatcaagtacgtcttctaatcttaattatcacttcggtcgattcaacacttcaattaattttcatcattaattacgtgttatgtagctctcactacttcattacactatcaattaattgcctctaagtaagtcaattaagttaattacttctgttaagcggccatactattttattttatttttaattttcttctctatttgttagatttgaagtggtagatcaggatctaagtacttctctctctctctctcttttaaatgtagcatttttttaatattttaattagttttaattttgttttttgtttttgtttttttatcaggtggtggatatttacttaattacttcaattggcca

SEQ ID NO: 58000 - DNA, 811 bp, Populus trichocarpa
  Intron number 1 from transcript POPTR_0001s01350.1 (locus POPTR_0001s01350) derived from phytozome v7.0 (chr-ID scaf fold_1; pos 991973 to 992783)
tttgtaattgatagccgcccttctctcgctaacaggtatctcttggcatctcctctcctcttttacttcgattttgatttttgatttttttgtattttgtaagtaacccagaacttgggtaatctttgccttgtattctgtttcctttgcgaaggacgttgttggatctgatcacttttaaggatttcttactgttctgtttatgcttttgtttctttctgtaatcgcttatacatgtttgggccctgagaaagtgaaaggggtaaagagctataaagtaaactatgatttacttcttttatttgtggaattgtgttcactttattttcaaactagtcgatgtctgttaccttacttttcacaagagttaccaagtgattttctgttctgggttgtttcctttgtttagtctgtgttttccatcctgctgcttcgacgtgtagctcattttgtatcgaatcgctagtgtcaccacgatatttaatttctcaattttttgaatgagtctataatgctttggaatgattgagtcattgccagcctgccattgaatgcctttttttttaagtttcttatttttatttatgaatgaatttgaagacctttaatggttaccctaagtgactaattagttttgttttcagaaggtagtgcttacagtgtttcggtatgaacaaattgaaattactgtgattgtgttattattactttaagttctgccatatcgatgttgccagatccattccttttgcatcagtagaacaatgtcctgtttctaactcctcaactcacatactgtttcaggtaagac

SEQ ID NO: 58001 - DNA, 789 bp, Populus trichocarpa
  Intron number 1 from transcript POPTR_0001s19180.1 (locus POPTR_0001s19180) derived from phytozome v7.0 (chr-ID scaf fold_1; pos 16623796 to 16624584 reverse strand)
gatttgggtacgtacgatgcacaatataccacacttttttttttttgatgatttgatgttaattacaacccctcaataataataataataataataataataataataataatataatagtacatacattattgttttattgcacaaaacacacacatatataattaatcattcatcatgacaaaaaaaaattatttttagtgttaataaattttatttgacgaaaaaatttaattgagatcttgttagaaaaagtttaacttaatattggttttttaaactaatttatgtgtgttttgtgcaataaaattgatgattctagtattatttttagattgaaaaaactgctactcgatattttaattatttttttagtggttcaaacttgaaaatgcaaatgagacgctatcctccacacatggaggataacaaaagcgagccaataactatagctacctgctatttgataattaagtgcaagaaaaaaaaacaaatgaagagatcaatacaacgagagaagcaaaaacgataccatacaatttgaaattattaaagatacaatgcttgcagcgactgcatatttaatttaatttatatgataatgacgtattgttttgatcttttaattaattagtatataccgcaacaactccagcatatcatcaattttcaacaaattaataattatgctttgttttctttaatttgctgttgattgacgtgatttgttgctttggcttgacaaaaataacagggcggagccttacaattccacggcgttcaaccaat

SEQ ID NO: 58002 - DNA, 350 bp, Populus trichocarpa
  Intron number 1 from transcript POPTR_0010s06970.1 (locus POPTR_0010s06970) derived from phytozome v7.0 (chr-ID scaf fold_10; pos 8204805 to 8205154 reverse strand)
gtgatcaggtactgcttttagcatatgagttcctcgatctgatcttattcaattctacttcttcttgtcttattataagttgacgtctttttttatatgaacttgtaggtttttctagtaattaagatgaatatcatgtttaaattagactgcaagccttgctgaagaacaaatttatgaccaatttctgaagcttttatgattaagaaaaggctcttttttttgttgcttctctcactggcaagagaaagaaaccatgaataagattttgattcgtcaagggctgatgtttttttctgataacttaatttttaggtcaaggtcagcgatttggttgggaagattgtggg

SEQ ID NO: 58003 - DNA, 593 bp, Populus trichocarpa
  Intron number 2 from transcript POPTR_0001s43030.1 (locus POPTR_0001s43030) derived from phytozome v7.0 (chr-ID scaf fold_1; pos 43089445 to 43090037)
agaggatcgtaagtgccacatgcatatatttagctaaatcaagttatgcaattcgataccctgcatatattttccagtttttcttctcacttattttttcaatgagtaattataggtgcaaaacttatttaatatttgatgagcacgtataatcaatgttattaaacatgatcttggatgaatctagttacttgatggcctgatttctggctcgggttgaattttaaattaaacgagtttggagttgacttagtataactcaattaatttgataggtcaattaacgatgttgtcaaaaatcaatttaaattaattcatctaatttataatccatgtcttgagccagttcataaactgaaccgggtttaataattttaaatataatatagaaaaacacaacaattatatacatataaaaaaaaatgaacatgcatcatattttaggacaaaataaaaataaattactctttgggataattagacgacagatttaagcatcatttgtcaaaagatgctgattaattcttgttttgaattcttatctgcttccctttgcagcattgaaattcagtgttgctgctttgtctggagca

SEQ ID NO: 58004 - DNA, 571 bp, Populus trichocarpa
  Intron number 1 from transcript POPTR_0010s12640.1 (locus POPTR_0010s12640) derived from phytozome v7.0 (chr-ID scaf fold_10; pos 12617398 to 12617968)
tctctctctcaacctcctcgattccattcctcttggtgggttctctttctctctcgcgtcaatcttgataataaaaaaaatatacctgttcaatcgaatgttgggaacttgggattttgtgcttgttgatcggaaatttgaaaagggttgtgataatttcaatgacccttttgttcttgagcattaaatctcttcgtatcttttgatatgggttctgaggtggctttccccccctctcatggaacagtgcttgttggaaaatgttccttttctttctcaatttaatgaactaacaaataggaaacaagtactggttagtgatgataaagactgttcttttgcttgcttaaataatgtctcctagtttgatgaatgtgcctgcagtttccacttcttttaagaccttctgactcttaaatttttcagttcctgtggagttgatgcatgtttaattagttgttgttggccttcattctgcaaagtgtatcttaatttttttactgatatgtttggtgaaaaaactgtttttttcatagaatataggaaatcacctgtgcaacgagcgacatat

SEQ ID NO: 58005 - DNA, 1018 bp, Populus trichocarpa
  Intron number 1 from transcript POPTR_0007s03620.1 (locus POPTR_0007s03620) derived from phytozome v7.0 (chr-ID scaf fold_7; pos 2082889 to 2083906)
aaaggagattgctggtcttgggtcccgcctttccttttatatttaaagggcttgaatagcttgtaatagcctccatgtgtcaagaataatcaatgacatcttgtcaatgcattgctaattataaaaataaatggagatatttaattcttgactaatattgaatatatagcttgggcaataaataaaggcttttgagtttagatgtatatgataatatataattattaatacttactattattaaattatggtatatctaaatctctttctatacacatatgtatattaaatatactttttgacacgatttataaataaataaccactctcaagagctaaactatgaagaaaaacttgtcaactcgagttatcctatgatcgcatatatacttacatgtaaattaaaaaatacaaataaaagaattagaataaaaaatgtaatctacctcttgtatatctaaatgatttcttctttaaaataatatttcaatcattaattttattgtcctgtgagggctgtgactattgtacatgattaggatgaagctcgtatgcaaattgtgctttataaattcatatcaaaacttcaattgttgcacatgtataattaggaccagattgcacatacttgtcttgtttggggatcggattttccaacagccatgaaatcatgttagaagtgcagtacatgccaaactaatgattgaattttttctcttgccaagttgactgagaggaactgctcaaacaaacatgggcccgatgtggatatggatctgacctatgataacgtgcccaaatgggcaacttctttcgtgggtcaattatggcggcccaagtgggcaacttctttcgtgggtcaattatggcggcccaagtgggcaacttctttcctggtcaattaaagtggcccaagtattgcaatttggcccaaatacgaaatctgaatttggttttgttacaagttcctaccacctcgctagaattagccgaacacaaacttgataaagcaacagat

SEQ ID NO: 58006 - DNA, 441 bp, Populus trichocarpa
  Intron number 1 from transcript POPTR_0001s10790.1 (locus POPTR_0001s10790) derived from phytozome v7.0 (chr-ID scaf fold_1; pos 8396368 to 8396808)
aaaatcaaggtgagattttgtttttcaagtttttcatgcttgatttttcttcctttttgttataacccatcattttgtttaggatttctacaaacccttttcttctgtctttatatgcacgtaaatgtcttaattttctactatcctgtgtttggttgcctagaagattgatggaatggaaatattgatgaaattgttgaggcctttgagtttctgctgtttagtttctaagataatgaactcaattaaccaaataattatgcaagacagtcaaactaacatctaacacttttatgtctatgttctgttcctatgaagatttatttatttattttgtctaaaaggggtgccaaattggccctttttatgcatgatattcaattgatattgattatacattttccagggaatttgactcctgacaacagtagcatacctttt

SEQ ID NO: 58007 - DNA, 454 bp, Populus trichocarpa
  Intron number 1 from transcript POPTR_0002s03340.1 (locus POPTR_0002s03340) derived from phytozome v7.0 (chr-ID scaf fold_2; pos 2060253 to 2060706 reverse strand)
ttttggacaaggaagatcgcataagaccaataaaggtaagtccttttttaaatgttccctttttgtaacttttgaattattcaagtttagacttttttctcatgatttttctgatagtgttatcggcaaagtaaaaatttaattgctcaattgctttggcgtttctagatagagagttagaaacccatctttctttgctggtgcttttggaccgaaatgataagaagttgattttttttggtgcattgaatgcttatctttgtaattgatctttacctgatattgcggttatgctatgtgcccttatttttttgatgaagacagcctcaatactcacaagttgggttaagatataatggcccatttttggcctttgaaggaatccctgtagttgagaatgtttttagtgttttttgagcgactctggttgaattgaatgaatgtattgcaggga

SEQ ID NO: 58008 - DNA, 511 bp, Populus trichocarpa
  Intron number 1 from transcript POPTR_0001s01560.1 (locus POPTR_0001s01560) derived from phytozome v7.0 (chr-ID scaf fold_1; pos 1166055 to 1166565 reverse strand)
ctgtcaccaagcttggtggccctgacagtaagttcactctaaattcatcatctttttttttcttgtttaaactttatttaatttctagctagctaggagggatttgcaagattgatgatttgcttgattcagttgcccatattaattgaaatagccatttttgcacgcttagctcatttggaatcttccaggaaatatgattagagctggtgcaaattttttccttggtcttgactcgattttacagaaactatatcagaaataactgctcccagtgatagaaagacacaggctctgccttgactatagcaatgccgttggcacttgaaacacgataatgacaatacagttcatatatctggtctattactatcgaattcttcttaatatttgtatgaacttaatcaacttgagtctacatttgaatgttttctctttaatctcgtagttaatctaattatatagactggatttattttcagaggcaactccaaagtcagtattgaggtta

SEQ ID NO: 58009 - DNA, 679 bp, Populus trichocarpa
  Intron number 1 from transcript POPTR_0010s07570.1 (locus POPTR_0010s07570) derived from phytozome v7.0 (chr-ID scaf fold_10; pos 8600321 to 8600999 reverse strand)
agggtggatcccctactgctggcaggtggctactccattctttgttatctgttatttttcttcagattgaatctactttgttcagttactagaaacgttaggtgaaatttgcatattttgacagtattttctttcctggtgattatatgttgttgttgtgtctaatagtacattctttttctctctggtctaaggggtttctttaatcttcttattttctgaccactctatcctagaactaaatatatatgcataaagtttcaatttttctttatcttctttccgttgcttgcttctatattttgttaagcaagtcgttttgtaaacgattgcttcttttacaatactgaaacttgatgtgttgtatcgtcccttgtttagttgttttcccttgtatctgtttgtttgctagttgataatatttttttcttgtttgcctacgtttcctgatttatccatgttcatgtcctttctcctcctttgacatgaaagaaaatcttgaattttgtttttgttacattacaaagcttgcttatagggaattgatctgtctgtgcgaactttctctcttcccttcatacttcattaatttctcctttggtggtttaagtttctgattatattaaatttcttcctgggagcagtcaggttgtggggtggcctcctataagggcttatc

SEQ ID NO: 58010 - DNA, 763 bp, Populus trichocarpa
  Intron number 1 from transcript POPTR_0001s06930.1 (locus POPTR_0001s06930) derived from phytozome v7.0 (chr-ID scaf fold_1; pos 5291098 to 5291860)
aacttaccatagaaagaaaaataatcgattaaaaggtgaattctgttttagttgatttgctatttttttaattatctgttaaacaatctttgcacgaattatagtatggtgtagcaacgattagattactgaaaagagggtttaattgattgattaatgattttaaagacaggttgattgaaacattgattttctggttgtaaagaagagaatataatctgttgaaaacctggtaattataattgtttataggcttaaacatggaattttgtatttgtttttctagtctgcagcttgtgcatcaacagagagtaagtgcgtttgtctaggaggtcatgccgcgcttcaaagtaacgtttgacttgaaaaaacgtcattttttatgccttctcaatttggtttttaaagtttaatttggatcaatattcttgaatttaagataggatcttccaattttgcttgttatgaattattgccatcttttttttttgtttcttgaattcctgcacaaattttcttgaattcgtgtgctgttggctcgtgcatgtgtaaagagaagtctgattgaaaagtttatcctcttttgttgttttttttatttttattttttatgttaataatgttttatacattatatgtctggtggggatgatttcatgagcatgggtcttgaaaaggaagttaattgcccttggtaatttgggttgtttctttctttgtgttttcagatcagacgttttcccgttaataaatttggtttgct

SEQ ID NO: 58011 - DNA, 457 bp, Populus trichocarpa
  Intron number 2 from transcript POPTR_0001s06930.1 (locus POPTR_0001s06930) derived from phytozome v7.0 (chr-ID scaf fold_1; pos 5292258 to 5292714)
cacgggtactttgacgttcacctctttctgtatctttgctaccatgaatcttgaatgcatgttgttttataaaattgtcttgatttaagagattggcagttgagttaatcaaatgatcggtcttaaaggaatctcatacaacttcaattttattattagtgttttttgatagtttattgaacttcaatttgcacttctaatatttctaatgtttggaaagtattgtgttggtgtctactgctcaaatacagacatgttaaattaattattgaaatcgtgtatcttctaccaggaaaaacaggaggaacaagtgctggttaataaaccatagtttgccttttctttctaatttctataaatcagaagttaatgtgttcgatcataacttttcccctccttaaccaaacatttcctacatttccatatgaatttcagacactatcagcctctgatctgc

SEQ ID NO: 58012 - DNA, 891 bp, Populus trichocarpa
  Intron number 1 from transcript POPTR_0001s10930.1 (locus POPTR_0001s10930) derived from phytozome v7.0 (chr-ID scaf fold_1; pos 8481135 to 8482025 reverse strand)
aaagactcgctcttacacagaagtacgaggaggtaaaaacaagcatgtttaatattttttttctttcttttcaatgtagtccttgaagtatgaaactttacaatgttttgtttgttgttaatcctacagcgttctaaaaatgctggggttcttttagtttttttaattttaataattagttttcgagtaattatggcaagtaaattttaaatattgttaaataggtacctgtgttgttaaacgttgagtgtgctcaagaaactgaggaggactaatagggtagtgattggggccaaatgacattctttaaccgtcactgatggatagaaatgcttttagttgaattgcgattcttgttgacaaatgaccaagattctaagcccaattgcttcgagttgaaatgtatctggccagacgattatgatttttccttgtatctgttactttgatttagtgaactagcagatgcttcagcttgatggtattgcatgccaatttgtttcaatgccctgctgattatgattttgtgttagaaagatcttgcaatagatggcctgaatttttcagtacttatgcgcagttgacatttacgtccagccctgatatctggatggtctgggctatgcaccttataagcaagatcacgtcaataaagtcatgcatgttacgagatgtgcattcaatataaattgattatagcattgcattttgtgtagatatttactttaggagctaagcaagggaactatttaggcaagtatgctagtttgtaacttaaaattaaagcagtgtcaagtagcataatggttaattatacacttcctctgcacatcttcttcatcgttcttgctgatggtgatcatcttgcagttgcttgttgctggtggtggc

SEQ ID NO: 58013 - DNA, 1021 bp, Populus trichocarpa
  Intron number 3 from transcript POPTR_0007s10970.1 (locus POPTR_0007s10970) derived from phytozome v7.0 (chr-ID scaf fold_7; pos 11202569 to 11203589)
aaggttagcccattatttttttttttaaaaaaggtacaggctttatgcttatgatcctgcttcttctttttttcttttgaattcatggaaaatctaatattgtgggctgtgtgattataattttattatgtcacaagaaatttagattgttgtgatggtttggtaatttctatttcttactggctttcccattcgtacatcagattttgtgtagtgccagtattaaaaggtttgtacttcattaagttggatttttggtgtgagaacattttatgctgtttggtgtactgaatttagctaaactttatgtttccttggtttggccaaagcatctcataaagattttaaatttgcggatgcctgaacgctaacggtggaaatttgccggttgattttcactttaagcgtcttgtgccttgtgtaaccttgctgtgtgcatacactagcaattcatggcagatcttatattgtgggctttctggcagtattcgcagcactgcactggacctcactacttatgtgtaccattttgccaaataaaagtggttttttcttaaacccctctgcagtatatgaaagttgaaccaatgttttggattggctagattagtctttatcagtttctagttttcttgtcttcccaaggtgtagtttatcatgaatattgaacaccattagttattgtttgttacaattagaagttgtaaatgtgagaaagggggagatgaaaatagcattcagtcgaactttaggtctaagagtaaaaagattatatttaaacactcagacttcttcaactttctactgcaatgtgcattatgcaatattatttcctattccagtttattttgtataaatgtgtgagaggtgcacaatttggttactatatttttccattattagtgaggaatctttatcttttcattttcttctgtgtatctctataaatccctgacagtgttgctgttatacttctccatgtttaggaacggtcatcaggtcgatctcgtggttttggata

SEQ ID NO: 58014 - DNA, 252 bp, Populus trichocarpa
  Intron number 2 from transcript POPTR_0002s16770.1 (locus POPTR_0002s16770) derived from phytozome v7.0 (chr-ID scaf fold_2; pos 12530895 to 12531146)
ctactgcattgcaagagattggctacacaattcatgtatgtattttggtgcttcaatttttaatgccgatggtttagtgaaaagaaaaaagcgaactgttcgagcaacaattgtgcatatttcttttttttgagttttttaagtgcttgtggttctccattaagttgtataagaatttgttagattaatgatatttcattcttcttggcatcaaattcttgcaatttgtttggcaggtttatacactacgag

SEQ ID NO: 58015 - DNA, 561 bp, Populus trichocarpa
  Intron number 1 from transcript POPTR_2088s00200.1 (locus POPTR_2088s00200) derived from phytozome v7.0 (chr-ID scaf fold_2088; pos 435 to 995)
tatcagcatcaacaatttttgcttcacaacaggcggtaagccttcctactgaaccccaatggcgactttcttctggactatttgatcgggacaggacccccgttgattcagttagcccataaccctttatacaggaaaatatatgaaaggcaagtttgcattgaaactaataattatctcataaaaaaataagagaaaagggcttttatgtattttgtagatcataatttctaatttcgaccacgacagtatgttatccaatgataaagtactgctgtttctgatcaactgttgaaaaaaaatgtttgacactaataatatcgatcacaacattcccaaaaaatcagctcatgtaggataaattaacaattaaattgaattttttttaaaaattttttttatcaaattcaaatctcaaaatgtataaagataaaataaaaaaattattaaaagaataaaaaaacactaaaaaaaacttttctcttgcttgcattaattctcgactgatcttaatttgtgttataagcaaaaaaaaataatcaaactgcaggaactgaggcc

SEQ ID NO: 58016 - DNA, 991 bp, Populus trichocarpa
  Intron number 2 from transcript POPTR_0002s20070.1 (locus POPTR_0002s20070) derived from phytozome v7.0 (chr-ID scaf fold_2; pos 16003768 to 16004758)
agagctcttccactcccctggtttgagaaattgcagtaagccttactctttaccatcaatttcatcttccagagggtgtttggtgcaggaatgattagatgttttgatggaatgtgattcttgagaatgtgattcttgtatttgattaaaaataaaaattattaatattggatttttaatatcaacacaagtattatctaagtttaaaactgaaatattgaaatgaatcaataataaatttaacttcataaaattgattaaagttatcgaaatatataaaagtgtttaaattggtttcttgacaaatatatattacatagactagttacctaaaatatttaaattattatcaagtaaaaagtaaaaacaagggtgttcttgtatagtaaagtcttgagatttcatgggtagcaaatgcaaatgcaaatagatgaagatctcgatatactttaagcaactggacttgctaaagatattgtggttatttatgggctctaaactttgactcctgcagctgacggggatcttgagtctcttgacgaatctctcgataatatatcacaatagaaagagaattttgttttctcccttgtattcgagtacaactagtcaccattagtagactgacagatgttgaataccattccattcattacctatttgaatatgcaaaaatcttctccagatggtgtcgatagtcaagatatttcaatcattccccccccccccccccccgagtcttgactcagaagagttccaattcattctgcagttttccttgttcttgcctgcttgcatcagagctttattgcgtttatttttctgatcctacccttgtttgagtattttttaatcatgcatgtgtaacataactatgctgcaatgaataaagcattgccatagacacagaggctggttcatttggtcgtgcgtatactgtacattcatggtaaattctgaaccttttgtgttggctccattttgcttacag

SEQ ID NO: 58017 - DNA, 683 bp, Populus trichocarpa
  Intron number 1 from transcript POPTR_0001s27670.1 (locus POPTR_0001s27670) derived from phytozome v7.0 (chr-ID scaf fold_1; pos 26527207 to 26527889)
caaattgacatcaacgctcgaagtaaaccattcaggtactatttattcacttatttcagatttcatctttttttttgccagatttgatttctagggtttccgattctttgtttgaattgtttaattttttccgtttgaattatttttctctcatatctcccgtacctgaattgaattcatgtcagtttattagagttagtgattgattgtatccgtcaaaaggattgggaaaattcgtttttgtatcgattatagaatttctcaagtatttgggttttttccatgattgggagtcagattattttcttgcaatgagtgaaagtttttaatcaaaaaagctaagaatcctttttttttttttaaaaggatcataaagatgctaaaacaaatatgagagttaaaaaaaatgggatttgggcttgcaagtggttgaagttgaggggttttagaagcgacagagtggttgggcaggtttggtctagtttctgtggattgttaatttattgctagcagctttgtatgattagtaatttttagtcccaatggagtcgcagaagatatagtttttgtgaattaaggatatgggtggattatcagtaacatagttgtttatttttcctttttgtttattattattgtgatattaagaaacgcaagatttacagtcgcaaagatcaggccta

SEQ ID NO: 58018 - DNA, 1004 bp, Populus trichocarpa
  Intron number 1 from transcript POPTR_0001s40960.1 (locus POPTR_0001s40960) derived from phytozome v7.0 (chr-ID scaf fold_1; pos 40534589 to 40535592 reverse strand)
gttcattatcaagtaaaaaattacaccttgagaaggtagttaatggggtaaagctcaccaaaataaaatcttgtggtactagagaaaaccagactctcactgactgagcaatattgattaaacatgcatcgaaaccttttacaggaggctacataaaacctgtaatgtgaaaactgctatagtgcatgtatgtggcggcactacagccccactctaataaattggcattactctatttatgaattttctatcgctatagcagaacacatgacttgctacttgctagattgtttttatcttgtttcatgacaaactgtaaatacttgttgggcctagttttaaaatatgtggtcagctggagtttttaacctggttggaacttggaattaaattattttagttctcaaggactatttttttgtataaatggtaaatgtatcaggtttacagtcaatagattgttggtttgagaatggagagcagttacctagaccaaatatgttgagctttgttggatagactagggccagctggttacttttacctgatttaagctgcatatttcatagttttcaaataccattatctaatttacggtaaaatatctcgagtttgcaaccaacaagttgcagttttggggcttgagagcagtcacttcatacatgcaatgtaggatattctcagagttcctttcctagttcctagaatcctactttgagaaacacagtgggcttcttattttctataattctgttcttcacagttgcctcttcaccaatcttacggagattattttatggtaacaaagcaaatatgcttgtagcaaaagttatttttgattggcatcattaccattaaagcgtaatttactcttttccaatgagttctgtaactgaaggtatagtgctcttgaattgatcatgtcccctttgtgtttttatttttttattttttccccccatcttctatggatacttttgcagtggtgagaaggctacagctga

SEQ ID NO: 58019 - DNA, 725 bp, Populus trichocarpa
  Intron number 1 from transcript POPTR_0001s47510.2 (locus POPTR_0001s47510) derived from phytozome v7.0 (chr-ID scaf fold_1; pos 47671530 to 47672254 reverse strand)
aagggtttgtcctggttcttgatttcttgcttttagtgagtttctggttagagtttatgcctcctttaaatttcattttgaagctagctctgatttgtaggcgttgatttcagaactgcaactgatagaatatatattacagggagaatgatacttgcgatttgattatgaaagaagttttcttgggtatcattccattaccttgtcaatcaaattaattagttaatgctagatgtggctctatttccttcgcaccaacataaatctggctgtataaagctgtgatattgctcatcagttcaataaggttatcatttataatcatggatcaggtgttctgctacatgcattaaagatgtgtcttgcatgcaaaacttattgggagaaggatagacttggtttgttaacaggtcagattttggaatgttcatatacatgtaaagcatacaactcttgaatgatcgtgaataaaaattttattttttctgggatctggtctttgataggcaaaggatcatgtgaacttgttttggtcaaaggaacagtggaggtcacgaacatctatctagctctgtattttccttcctgacgtttttctggtgttcagtttccctagtggaagagctgtatattttgctgtgctaagcttgctcgaacacgtctaacatcttcaattgattatgtgaccagccagaaacgcactgaatttcctgcgtcccgtttcg

SEQ ID NO: 58020 - DNA, 506 bp, Populus trichocarpa
  Intron number 2 from transcript POPTR_0001s44100.1 (locus POPTR_0001s44100) derived from phytozome v7.0 (chr-ID scaf fold_1; pos 44576998 to 44577503)
ggttcagtttctgggatacctgtgtattcttacaagtatgtttttcactaatctatttcagtaatgactttatctgttgattttgaatgaaattgctttttgcttttcataggatagggtgatgacgctgattgcaactgactggcctgcttgtaattattttgattttagagtttattatctgtatcttgacttcagctcatgtagaaggtcatttgatgcatggaacaattgatgattgtgaatggataattgtgctttcaaatttagaatcttcaaaatgacctgctttgaagttgaattattactgcaaatagctgatttttggtgtctaagctagaaggaaaaactgctagagctttttaatttcagaatgggtttaacaccagatgattactctctcttagtttataattcttctctttcattagtttcgtgtttaaaattttgttcctggtgttatttctgaagggatctacaaaaggcaacctataattttacaacac

SEQ ID NO: 58021 - DNA, 1003 bp, Populus trichocarpa
  Intron number 2 from transcript POPTR_0007s10280.4 (locus POPTR_0007s10280) derived from phytozome v7.0 (chr-ID scaf fold_7; pos 10112643 to 10113645 reverse strand)
agagctggcaaccattgtcaagcaaagtttattttgtaagttttcaactgtatttttgtgattatagacggcatgtttgttctactcatggattttcagggtggtatcaaagcttaccttggtttagcttcttcatgattagttcctgtttgaccttttcatatgctgttagcttatgtaatgatattgaatccctttctttatatttctattaccaacttgccattagtcatggtgacaaaaggtgggaatgtagcacggatgtttgagttgaagaatagcaaaggtggagggtagtcacgttgataggaatttctgctttggttgttgaaaacaagatgctaggttgttgatttaacagtgacagatgcagtgctggtggtgccagtgatcatctgttcactgcatttatttcatttcctgtgacggtaatttcctttatatataagatttttttctctggaactgaaatgcaataactgcaaatgctggtaaataaatgtgctgggggccaggttggagaaagcttaaatttgcaaatagtgggagccagcagtgccttggaacaggcttcactttgtttttagatctctggacctgtgaaattcctggaagcatccatctgtggaacttgattagttgaagcttgggaattgttgccattgctgtcactatcctcatcttcattcttgctgtcatttcttcatactttgtttcttgaagttgaaagcaggcatttaatttatgatattcattcatagaacaatgaaagttgaaatcttgaattatatgccttcatttagttttcattatgaactgttatcttctttatgtttgtcattacttgtgcataatgtatagagctacttactgaaaataggaacaaaaagataacgccaaatgtttgctacccttttaaaaagggtcaggtttgttttggctaagcttctcctgtacatggtgtctaggttctgcaaattgaatcattaacattgaagattcg

SEQ ID NO: 58022 - DNA, 912 bp, Populus trichocarpa
  Intron number 3 from transcript POPTR_0001s28150.1 (locus POPTR_0001s28150) derived from phytozome v7.0 (chr-ID scaf fold_1; pos 26926133 to 26927044 reverse strand)
tattcttctaagtggtgttcctcctttttgggcaggtaaatcatgcttttcgtttttcgcttttaatcatggatatcatcctaagatgttttttaaaaaattcaaataggctaggaataaggatcctaggtgtataatcaatttatcctaacaattttattcactctttttataacaaagataattaatagcttatacttagtgcttgataggtcaatataatttgtatttaatacatgtaaaagattttttttgtggaggtggagattttccgattataaagtaaataactttatagagagaaaatgcaataatattatagagagagatgctctgaaaatatatatgcaatagaaaatgaagagattgtggacctttgttctgaaggttttttggtgtatttataacccatgagtcttgtctttttgtgaaaaggagggtctggaatgtaattttacttttgcgatattttaagttgtattctactcaaaataatatgtattgaatcattataaaatactaagggacttgcgtaatgttcgtaaaaaattccctagtcagtgttgagctcgggtaaggtgtttgagcccattagaggttaaagtagatttagacatgctgtctgaattcaaatacactaggtttggacatgataggccaagcctacaaggacgttgaggtgcatgcccaacatcagttgagcatatgcccaatatactacatagcgcccatataaagagcaatcgagcctatttcctttgatgttttttaagttttttttaagacaatttctttagatttattttagaaattgtttttgtctttttttacctggattcatcgttataagattttttatgctaagaaaaaaattattggttaatttgtcagaatcggaacacgggatattca

SEQ ID NO: 58023 - DNA, 975 bp, Populus trichocarpa
  Intron number 1 from transcript POPTR_0002s18540.1 (locus POPTR_0002s18540) derived from phytozome v7.0 (chr-ID scaf fold_2; pos 14432669 to 14433643)
gctacgattctactgaaggtaaccgcgctatgcatattacaatcatgaacgcttatttgtgttttgtttttttatccgtagatgatccgatcttgttttagcttcacgacgttcgagatcaatcctagctctaagtcttttcctctctcgatcagaaaaatacatagataaaaacttgtttgttatcataaattgctgatattacttccaagtgttgtatagtttaggtttttgtttaccatttctgcttcaaggaattgactcgcattttaattttctcttcctttaattatctagtgatcggaagagacataaccgcacgttttctgataattataccaattactgtggatatagctgcgtttagcttgaattagaaatgttgacttttgtttagaggattttgtgaatcaaggattcgttggaagatgctatacctcctctgttattgataatttgatgcttgtaaagtttattgaaataaaggatactgtaatttctgtaattattttatcctggtcgatttttttcttcatcttcttgttttttttttttggtaagacttgtaaaatgcatatgccatctttctctctgcctggatcatgtttaaatagtgtttagttgttgatcttatcggcttcatgtgattgatttcaagattgatgctccttgtgttccttttttctttctacccgttgtgaacttctgttgaaatccggaacttctccctgctatttgctacaggaagcaaattatttaaaaatgtcattaacaagtagcaaatattcttccaattttgctcatgaacagatactcactgacattttctatgaccttcaatttttgtaacgtgtccaatccttttttttttcctgtttctgtgatcttttgtaattctttcaaatttttttttccagaactgaggcaatgtcatgattttcttgctttctgcagctttgactagcaacaactgag

SEQ ID NO: 58024 - DNA, 512 bp, Populus trichocarpa
  Intron number 3 from transcript POPTR_0001s20470.1 (locus POPTR_0001s20470) derived from phytozome v7.0 (chr-ID scaf fold_1; pos 18422559 to 18423070 reverse strand)
aattcaaaaggttaggttctaattatagcttactcaaaaagagtcatgcatgtgtacttgttgagaagatacattagaaaaaaaagcatgcattgtaattaatgattgctataagatgaaccaacttgaacaaaaaaataaagctttaaaggaaaataagttgaacactatactagctaaattcacttaaggttctaagatcttataaatcatgcttgccgcttaaagatgtgttttcaacaaaaaaggcttaagctatcaacccaagaaaaataaaaagtatttaaacaactattttgttaaagttaaacaaacaatcatataacacaaaccaaacatgcaattattgtaaaaacattggtcacttgatttatgtatgtcccataaagaaggacaatgttagtaatatgacttgggttccaaaaggaaccaccactaaccataaatgacccaagaagttatgggtaccaaaaacctcatcttgattttgtgtgtgtcggaatcgagagaat

SEQ ID NO: 58025 - DNA, 929 bp, Populus trichocarpa
  Intron number 1 from transcript POPTR_0007s14470.1 (locus POPTR_0007s14470) derived from phytozome v7.0 (chr-ID scaf fold_7; pos 14236300 to 14237228)
attttattcttgttggcactttggataacaatttggtatgtcaaaattcttcctttttcgttgttctaatataataactgttgcttttggaacttgggagattagtctttgttttggaaatttcaaacatttgattagtagtagctgttttcttccgaatgatatgtcaatgtagcttatactagaattttctgctaattagcaggctttcattttaagatatagagcctacttttcccttcttttatgttttgtcaatccatattgatgaattcatgttagtttctgtctaaatgatttctcatggtggagcatttagccggttttcatatagttccttgcaaatgcagtcgaaattgttgtaagcattgttttatttattcttttgtatggctgcagttctgctatcttgaataacagtgtgcagataatatatagcattgtcatccttaacttttcacctcactttctcgttgtttttccatgttctgtgtgcttcaaatggaattttttgatgttacgaagttgtccacatcttgggataggttctagcttccggaggctttgtaaataattttatatggaaaatatgctgagtaaaaatcacattaaactgggctcagtggttttttttttaattaaaaataaatctcatagatgattcctgttcttcgctgaattcgtatttgcacatatacctcgtgtacatttattgttttacatagaaggaagaatagttagcacatataaatttcatttgatagcttattgttctagagaattcatcattgtaattttatttttgagggtccagtctttctatatctggtggttttcatttctctgagatggtctggtcttctcacctggatttgctatatgatacacttgcagaggctttggaatttttcaactgggaaatttctgaa

SEQ ID NO: 58026 - DNA, 771 bp, Populus trichocarpa
  Intron number 2 from transcript POPTR_0001s18790.1 (locus POPTR_0001s18790) derived from phytozome v7.0 (chr-ID scaf fold_1; pos 15924999 to 15925769 reverse strand)
aaagctttgcaactcacactgtcattcctcttctggtatgttttcttaatgaaaatgaaataagatatgaattatgacgattgccaaaatacagaagacatcttttatattagaagctgaggatcataaatctttcagattctatttttgaaatacattatcatactacacttaatactctttgcaaagtttaagaaatacaaatagaaaaataatgcttgtcgaaacaaaaataagaaatttcacgtgcacatatatgtatatatattggactcatcctgtttatgtaagactaaatatatggttggtagatttgcttactttgtacaagaaggggtaactgtttgcgtcagcatccggaagtacagagaacagcccctcggctagatttaatgagatcacactttcacttatttgcgtcctgttagagaactaagtgggaaaaaaattaaaaactaaaacaaaagacatttctctgccttgagaaataaggcaccttctgcggtaaggagggtgttcatatttaaagttttaccattgcatctttatcaagtttactaaaatacaaacaaaaacatatattcttctgaaggttaagggatgttgtccagttttaccatttcatttttcatggatgttagatcaagtagagaatattaagtgcttatgcttctacttcttctatttcaacttctgtgaaattctgttgagaaatttcatcttaatattcaaatcatcattttgcaggtattcttgcttttatcatcagat

SEQ ID NO: 58027 - DNA, 1025 bp, Populus trichocarpa
  Intron number 1 from transcript POPTR_0001s40870.1 (locus POPTR_0001s40870) derived from phytozome v7.0 (chr-ID scaf fold_1; pos 40464682 to 40465706 reverse strand)
cagcaggtatttctgtttcatgcgtttttgttcagctatctttctttcagtaggacgtattttcttttactagtatggatacatagcatgcgacttgacaattaaaggggtttgaggagaaatatgctatgttcacacacaaaatttcttttcccttgtgcagcttcttcataagaaaatagtggcaagttttttgcatttgtaacattactggcctgaaagaaacttgtttgagttttgaagtcgggcgtagttatctgaattagccaatgtaagctcagcgtgaagaagattgcctaacccatgcaaatatgcaattgactgaagctaaaactcagtaaagtgttagatttacaagttccaaatactctggagactcatccatatacaatctcaacctttttcacttgctagtagagctcaaaaacagaaggaagagtgggatttatttagtatcgtttgaacggtaaaatttctgcaaccttctttggttggatgacaaatattggattttcatcaggattccccaaaagaaggtttgacagagttagggtacataaatgtaggttgtgaatataatggtccaagtgttaatgatacaatttacttcaacagtatgaaaagaaatggtgctaattaggcttgaaagtttctaactcgagacaagtttctgctggtcacgaacacaaaatcagctgactggttaatatgatcaaaattgatgttcctaacatcatggaatgtcagaaaattaatggagaggctgtttccgcttaagagattttgttagatatatgagcttttgccaagtaatatgtgttttccctttccatgcatttttccacgtaatgatactttcgacaagaggtgtttttaccaaaatttacttggaagtcaatttcagctcattgtggcttctctctgctcatcttccagtgacttgctatgtatatggttctgtttaagttgctttcaccattctataattacgagcctttgcaggttccacgagctagtggagtttg

SEQ ID NO: 58028 - DNA, 869 bp, Populus trichocarpa
  Intron number 3 from transcript POPTR_0001s00880.1 (locus POPTR_0001s00880) derived from phytozome v7.0 (chr-ID scaf fold_1; pos 727092 to 727960)
ttgagtcttccttggcggacttaaagaagaaagaggtatgagcttcaatggctttaatgccttctgtcagttcagtgatttacaattgctgttataagactatccaaccactttatcgttatgattattacattattggtaaaaataagaatggtttatcaagctatacgttatatgagaacaattctggcatgattaaattgatcaatcgttatcacttacagtttcaggtcatgggattttcatcatgttatgtggatttataggaaagtaaggaagacaatgaaaaactattgtcaacttattcattcattcatttattattttcatcttttttttatcccctcgcttttgggagggaggggtgtgtgtcgtggagtaatataaaattatcttaaggctcacctaataattatcttggggcttaagctattggattgagatgattttttgacatggtattagaacctcgattactaaacggtcacaagttcgaatctcaccactttcattctctcttctaattaatagcagaaagtattgtaggcttgtgcaagtttcaaactcaaagagctttcacttaaagaggtgtgttagagaattatataaatcatattttggggcctcacctaacagcttaagatattaggtgaggttccaagatagttttatattactctctaacagggtgcttgcctgatcttgtcacgtaatgaaaatccatgaaactcggtttgatttctaggaaacacaatgctttgttttaatactcttttgaatgtttgggatattcaactgaaacactgatgcatgcttgttcttaatatatgctaggattgtcttctttgtcctacagggttcgctgccaa

SEQ ID NO: 58029 - DNA, 759 bp, Populus trichocarpa
  Intron number 3 from transcript POPTR_0002s11780.1 (locus POPTR_0002s11780) derived from phytozome v7.0 (chr-ID scaf fold_2; pos 8727640 to 8728398 reverse strand)
ttaaagaggttggttcagtaaatacttttctttatatacatttgcatctttgttcctgttaggcaaatgattttcctggtactatttgattgagcattgatttctctaggaaaacaatgtggggtgagggagaatatagctcgcgttatgcgtattgcatcatttttttcctgcattgatagaaaacttacttactttgatgtttcaaagactgtctgacagagattgacgaatgattgccaaggatgtttgtaaattcgtaggacatgatcttataactttatttccctttttagacttggtttcttatcatacttcttttggaatacaaattttcctaccataaaagtaccattaaatagtaagttgtgatgtttgggggcatgtttatttactttcttactcctataatgttgatggctaatgtatgtctatgtacaaggtaagaacatttatgatggataaaagatacatgtatttatattctatttcaccatattcttatccggctgttaatgaaatatgatttttacaattgctaaatttataacaaaaggtttggcttctctgtaaaacttactcacacctggagctcatattattgaaacttgctcatattattgaaacttgtcgtcactccgcacaatgaagttctatacctttatttatttttgtttatgaataaacttcctagagataacatcttttgttattgcaaattcaggctgttagaaaagataataagcagcgacttagcct

SEQ ID NO: 58030 - DNA, 970 bp, Populus trichocarpa
  Intron number 2 from transcript POPTR_0010s04890.1 (locus POPTR_0010s04890) derived from phytozome v7.0 (chr-ID scaf fold_10; pos 6070574 to 6071543 reverse strand)
agagcaggcagattactcaagtgtaagattttgtttttccttcttgatggaagcttgcctatgattgagtaatatgaattctgatactgctcaaagagcacaatgagccatttttgtatgattcttcagtaagagcatatttctttcatttctgtttttctttgttagattttttgtttgtcttgaagttcctgtcataatgatacagtagtaaatataaaatatctgcacagaatattgtgttattggctgctctgatataaagatgtaatactctatatggagaccacttccttctcatagtacccggccttgtgagttaagttaactccttctcattagtggagcttttgggttccattcttgtgagtccttagattgttttatggtgatgtgtgctcatacagttataagttggtttcatctgaaacctttctgtaaagaagaaatttttttgttccttgactcaaaaggaaacgctatggagccacatatatttggaatctttatgcaaagcaattttcgtgtctcaagtcataaggcaggctacacagatctaggatgatgactgattttgtttttcagatacaaaatgttgttgcaatggtttattatgtcatttgatgatattctggggacttgctactcaacaatcaactaagtgatgaagcctttgcagttgtctcttctccaccatactcagcaaactttaagttcacttgtcctcccttccaaaagtatacgctgctaatatttccagtagtctgagacctgttctttgcactatagacattaaacccacttgttttttcccttccaaaagaacatcttagctagcatcaccttgagccctcccctctctctctcacatgcaggcataattgcacatgcatatgcaaacacatgctggtaatcattctgttaactcactttgattacttatgtgctttgtttctatttgttttcaggt

SEQ ID NO: 58031 - DNA, 515 bp, Populus trichocarpa
  Intron number 1 from transcript POPTR_0010s04890.1 (locus POPTR_0010s04890) derived from phytozome v7.0 (chr-ID scaf fold_10; pos 6071602 to 6072116 reverse strand)
ggagattacgtaggtcagtctctcttcctttttttttttttttctttctttcttttatgttattaaaattgatttacggctatttttaattgataccgattatctctttgttgggtctgtgtgtgtgtgttgctgataacaaaattgaatgcatttctgattgagctgcaaattttgactgttaggacttgaatttcattagcatttgtgttaactaagttgtatgcttggtcgaaatccgggcggggctgaatttccgctgatggagctagggatatgattagtttatgatagaaatactgaccattgcacattatgtatgtggttaggttttggggttttttttatatatagtaatcacttccgttgttaagattttctttttatgggatgttgaatgggaatggtttctggcattctttcaatgttttacacttacaacacaatcattttctaatattgtcgattacatcaatgcagatcgtgggtactattcagtggagacggtcacgctc

SEQ ID NO: 58032 - DNA, 878 bp, Populus trichocarpa
  Intron number 1 from transcript POPTR_0010s23910.2 (locus POPTR_0010s23910) derived from phytozome v7.0 (chr-ID scaf fold_10; pos 20360889 to 20361766)
gtgttgggtcttattcaaaggtttgatttatttttttgttttttcttacgtgggttttgttggtctgttttgtttcttattctagattggtggtttgtgttgtttggttataattatgactaaagtttgtatcttttattcattttttctctcatgggaatgtctttgatttataagcctatgctcgtactatcatgatctgatagcagcttgtaaatctaatttgttccctgtataatggaagcttatatttaggagcgacagatgtatactttcgagttgtatgaagaatgtttttggttctggctcgggggagaaatttcatttgaaggggatgatggtttggcgaatttgaatttcttttgtttggtttccgggaaagttgaatgaagatgagcaaacgaaattttaaaactcacccttaattctgtctctacttctaagaaaacgaagctctaggttcgttttgatgctgatatcgttttctttttctcggaagccaaatggaacatcagaagtctaagaggtttatttaattccctctgggagcaacagtcttactcttacaagtgtaagtagggccttttagttgcttggatggttggttttgctcttgttataggtgactggagagagccttagcatactgaccctttagttgcaccatataatgagctaacctccccctccctcaaatgcctcactctgaggatttctgatgaacgttcaatgggaaaatgaattttgttgtggatattatgtagctcttatattccagctcccttttttgcttttgagcttcttctaatgaatgccgagtatcaaaactaatggacttatcaggtagtgagagcaaagaagaaggatacaggaacagt

SEQ ID NO: 58033 - DNA, 935 bp, Populus trichocarpa
  Intron number 2 from transcript POPTR_0001s26940.1 (locus POPTR_0001s26940) derived from phytozome v7.0 (chr-ID scaf fold_1; pos 25921744 to 25922678 reverse strand)
ctgatagggtatgatttctcaattttgtaaaaacattaccgcttaatatttgtaataaataaataaattttactccgcatttttttttctctaatttccggtttcgtaaaatgcactttgatttgctgaagagtgtaaacccaagataaacttagttctttgggtgataattatgcgtcaattactgattatcacagttggcggtgagtatgagctgacgctataacttctccagtgttgtaagtgtggctggctcagctattcccttcatgcagccgtcgaagaattttcattatgtcatgcaattagttttttcctgctgcccaatctgattgttgctgagatgtaaagaatgattatttcccatatgattaactgagatcgtgccatgcgactgttcttttagaatccaagccagttgtctgttccatctttgtattcccttgaaacctgcattctgttatggtgaaatgccttgtgctgaagaattcaaattatttaatcaaggattttctcttggatgtagtagtaaattctactgtgaaatattgaaatggccgttgtatgttatttccatgatccctaaggtggcgatcattcaacttcatttgattttaatatgagcttggatcatataagattacctcaaagtttgtaacatggcaagtaggctgaagttagcctctacctgcttattttatagtaaatcagtaaaaatagattcttttattgctcctcaaatgtgtacaagttggttttgttttacagttgcatgaggagaatcacgactattgccgtcaaagtattgtgtaactgtatgttatgtgcatgatgaccttttgttggatgcatttgaatcttgttatgcttcactcattgcttgtctttcttctctgatgctggccaggagctaagcaagttcatcaacaactgca

SEQ ID NO: 58034 - DNA, 812 bp, Populus trichocarpa
  Intron number 3 from transcript POPTR_0001s13470.1 (locus POPTR_0001s13470) derived from phytozome v7.0 (chr-ID scaf fold_1; pos 10547424 to 10548235)
actgtattcaggttgaggattatactggatttttagttgatattgtggagttcattaccatgcttttctttgatatgttgatgtgtgcttatattacggcactaatgtctgaacaaccaggcttgttgagttgattgagtagtgaaaaatgcaaaccattgatgaatatatgacgggctttgggtttttgcattttcgaatgttattacaattttcttcctttggaggagcaagcgttactaagaagggaaagttaatcttactctggaatcttcataagtgtcttcgcgtccgtgattttcccacgaagatgaacatttatgctgatatacgtgatcatgaaccactgtaacataagtaatgctcaggcttgtcgttgttagtgagcttggatcaaagttgtgtcaactgtaatcgtactttagaatcttgatgagtgtctttgtgtccatgattttcccactcaaagacaagcatttatgctgatatgtgtgatcatgaactattttaaaataggtaatgctcaggcttgtcattgctagtgagctaggatcaaagttgtgcttcaaaatcccttgaggcgtgtccagtttgtgaatcttacgcccttttccttttcaggcacacactatcacattgttgttgcattttgcaattttgttcaagtctctatgcaaagatatttcatccttttcctctgttgtttagtatcatttccccccttttatatccacaattgctgtactagttactttaaacgacaattatatcatcgactgaagccaaatttctcacttcaagggcagtctcaa

SEQ ID NO: 58035 - DNA, 546 bp, Populus trichocarpa
  Intron number 2 from transcript POPTR_0007s03970.2 (locus POPTR_0007s03970) derived from phytozome v7.0 (chr-ID scaf fold_7; pos 2368650 to 2369195 reverse strand)
aatataaaagaacaagaaggtttgattatctgctcagcaccctttctgatacagctatttgcattcttgtcattgtcctgtttttcagtcaactcttgctatatctatctggtgcctagccgcaatggaacctgcatattatgcaatagtaatgatagtcttcaaataacttctatatcacgaaagagtcaagaatcacatactttaagttctgtagactcttttactggacatgcaatgctatactggctgcttgaaaatttggatttcttctagttactgcaaattttcttgttagtttatgtgttttggtgtttctgtttcatgcttttcatgtaccaggtgctcttcacaatatgtaacgagttcgttacctgttagaaactgctttacctcaatcaactctgcacacaacatttctattggtctccttggttttttactgtcaaagttgattaagctggttggcattgtttgtcttgtcctgtccctgatttgtttgcaaaagcaggagccagagccggagccggagccggagccggagcc

SEQ ID NO: 58036 - DNA, 499 bp, Populus trichocarpa
  Intron number 1 from transcript POPTR_0010s02860.1 (locus POPTR_0010s02860) derived from phytozome v7.0 (chr-ID scaf fold_10; pos 3350748 to 3351246 reverse strand)
cagctgtgtcagacccaacacccatcgctacaaaggtacttctttctcctctttgcttgcatgtttcctttctttctacgactccaattagcttggatgatgggagtttggttatggttcaagactagcgatgattttttttttcttttcatttcgatgatgttagatattctcgaattcacttgtttgttagccgatatcaagttgcaattaaaaaaatatgtattcaatttgatatattttaaaagatttaataaatattgaatttagaaaattaaaaaaaaaaaaccttttttttgtagttaataatgctgattttagcgaataataataaatattctttcaaaaaccatttcctttcctgaaaaatcttgatggatagtgaatccccatcacattttgtttcgactttttgagggttgcatctgggcttgtcacgtggcaatgggcctacttgtgccttcttttttttttgctatatcagtcctactttacctcc

SEQ ID NO: 58037 - DNA, 924 bp, Populus trichocarpa
  Intron number 1 from transcript POPTR_0010s18850.1 (locus POPTR_0010s18850) derived from phytozome v7.0 (chr-ID scaf fold_10; pos 16974287 to 16975210 reverse strand)
aggagaggaggaggaggagatagaacggaaaagtaatttcttgtaatcattactcctatcggattgctttgctcatcatcgtttttgctttctgtttgtttatttgcatagaataagaactgtctggaaaatagtctgtgtccacccatccttacagacgcgtctagggttttgttgttttgaaaggcttgtatgatatcaactgctcccatttgggctctacattttttccttattacaagcagattacaatgtagtaccagtgtttttgcttcgctattgttagtgatttgatgtattttggttttgtggtaattatggtgtaatagataggttctggaatttaaaagcagttttagagggattctcttagatggttattggaagtagtcttaaactttgatgacttagaatggttgtaaccagttctcaattctagcaattggcggatagtgaaatcaaatgtatttcaattccagcaaatgtgtttgatggcttgcagcgtctggattttttggttcacctagaattagctttggtgttagcctaatgttttaaaagctgccttttcagttctttccagtcagatagatgctttgaacttcgagctagatcgagatgtgttgttgattttttttttttgaagaatgagttttaggaattgaacaccaatcaatgcatttttgccatttacgtaagctgattgttagtgtgctcttatagtggaaactgggttgcattccaatgtgtcgtggaataagttttggaaaattgtttttttgggactattgaagatcttatcatgtttctgtttttctggaaaaatgctttgcttgtttctcttataactggtgatctggtgtatttggttttttactttcctaatagttcttagtctttttcattaacagccgaagcaaatac

SEQ ID NO: 58038 - DNA, 913 bp, Populus trichocarpa
  Intron number 1 from transcript POPTR_0001s08250.1 (locus POPTR_0001s08250) derived from phytozome v7.0 (chr-ID scaf fold_1; pos 6293162 to 6294074)
gataaggttagttttgatcaggaagtttatgctattctggttttaattgtgttttctgttgtttcagctcacagttttgttttttctgttatggggttttggtggattgggatttgcttgccttagggttatctattggcgctttttcttaaatgggctgttaatttcttacgggcaaggttgattttgtatctgaattttgatgtttttgtagttttgctaatgtatatatgtggttcgggtttatttattttgaactgatgcttccaattacatgtttctgtggtttcactggtattttttttccataaattggcaggttttgcttgtgagttttgatatattttgtaatgtagtgtgtttttcattcggagttttattacattgtcatgctattggaggtgttgttgtggttttatgctttgtgatacgggtttgtgttgtcccttaaaatatattttatgagatagattgccatgtactctgttatgtttaactgtttatagctcaggttgagaacatttgtctcatcacaaatgtgtatatatgctcaggttgagaattgtttacaagtcggagtcttatgaagtgtttcatgcatctgattttctttctgagcatggaggccatactgctttagaacatgatctactctttgtaatcttgtagatgtttcttttctgatacctcgtttcctctaattggattccaaattggtgctctgcagtactctctttgtaactaatcccactaaaaacttaccgtaggatatgatattactactctataccagctggagtttctagaagtgcattgtggttattggatatttaaacatattttaatttgttccctatctgacaaatgaattttttcaggagataatccctatcataaattgggagacaacgac

SEQ ID NO: 58039 - DNA, 890 bp, Populus trichocarpa
  Intron number 1 from transcript POPTR_0001s20340.1 (locus POPTR_0001s20340) derived from phytozome v7.0 (chr-ID scaf fold_1; pos 18109246 to 18110135 reverse strand)
aagaaaaattcaaggggaggaaaatacatcaccaggttagctttcaaagttcattttagtgttgggtaatgagttctaagttgtttaaacaagtttggatggaaagaaatagatttaatgcattgttcttagatttttgaattagcgttcttaggagagaatttggggaaaaatgtgaaattgttgaaattgatacatttgtgataggatatgttgaaaatgattcaaaataataaaggatagaatataaaaaaattgggtgttatggagacaacattggtcggtcatgttagaaataaaagatgatgaacatggaatgtaataaagcttgtataattgtgtgttgatgcatgaatgataaagttgtatatagggatataataatatatggaaaaagagtaaataaatggttgatgtcaatgcatgctaatatgtataggtagagaatttaatgtatttcaatgcaaaatattgaaaagagtattaaattatatgttcatgaacaagttagataattatgaaggtataaggaatggtgtgaggatttagagctctcagtaagaaagagctctcagtcgctagagagagaaactagagagagatgctctctttcattttgaaaatttctcctcccgatggtgcgctgcagctcaagagttcctgattgcagcctctttcttcattggccacttacgtggctatctatagaaagcaatctgagtctctcctctcttcgattcaactgaaatgaagccatgaggagtctgttcagaaggggtttcggtttaacctaattgtcttggtttcgtccccttctacccaagcttctgaggttttagattcttcatatttcagtctctctcacaccctcagagacaactcaggggctg

SEQ ID NO: 58040 - DNA, 301 bp, Populus trichocarpa
  Intron number 1 from transcript POPTR_0010s10830.1 (locus POPTR_0010s10830) derived from phytozome v7.0 (chr-ID scaf fold_10; pos 11240588 to 11240888)
gattacgaaaggatcgaaaagcctcaggtacttattaattcatcatcattttctttctttctttcttcattactctctcttcacccaatgtattttattagttgcttacattttccttttcaaaaaaataatgatctgtcttttctctcagcctttgatctttcatacacattaacgccaaacccaacagttgtgtttttttttttttgagaaaaaaaggaaagattcgtattactgatttagttgtgatttggggtggaaattagggaggaggaggattgtcgcctgggaaactgagaag

SEQ ID NO: 58041 - DNA, 884 bp, Populus trichocarpa
  Intron number 1 from transcript POPTR_0001s17955.1 (locus POPTR_0001s17955) derived from phytozome v7.0 (chr-ID scaf fold_1; pos 14915920 to 14916803 reverse strand)
tatctgtttctctccgttccaatcgacacaagaaggtgtgcttatttttattattctattttttttattgaatgttttaatctcgtttgtgatatgggttttttgtaataataacagtaatgtattagtttttttttaaaaaaaaaaattgtttggggtttttgagtagagaacagaggaagtgtaaaggtggtaaaggtggcagctttttttacatttttttatactgtatttaaagtcactgccctttgatttggtttctaagtagaatgtttaaaatgttgtgtttttattttgttttgattgatttaaagaacccttttgaagagaaaaaggaaaaggatgggctttttgagttattttactgaagattggttggtgcatatgcaaaccagagggtgttttatgatggttatttattttatttatttaataaagaactcttttcgaagagaaaaggaaattcaattttactacttcttttttttattgcttatttgttgcatttttatgacttattccaggggtaagcatttttcgattttacaagtttagttctttataggagacgttgcttggtgaattgctaaaaagtcttgagcctgcaaaaacagcagtgcaggccatacaaaaatgatgaaggaaaggactgtcttcaaattgagttttgggggaccaaaggtccaaaacctggatggctttttttttccctcgattaaagttttcttgaaaatctcttgcttgtagtaacatgtaaagttggaattatgatacgagagcagctcttgtttaagtacattctattaggcaaaagttgtatggaaattctggccatagtctttcggaactgtgtctgcagacctttgtcatcttccagggaactg

SEQ ID NO: 58042 - DNA, 791 bp, Populus trichocarpa
  Intron number 1 from transcript POPTR_0001s11590.1 (locus POPTR_0001s11590) derived from phytozome v7.0 (chr-ID scaf fold_1; pos 9004966 to 9005756)
agcaggcaggctctctctttctcttcctctggcaggtcagttggatttctatttctttctcatttattcatttcccttttattctcttcttattggaacctaaaaattattagttcgatcttgatttgtctcgtattgtttcgaagaaattacgttcagggtttgcataaggaagagttgaatttcaaatctattgaatttttagggttttcttttttgcgtgacctagaatggatcagcaaaccgtaccatggatcaactgtgaaatttgttcctataaaagctcattttgcatcattgttgtttgttttgtcaagtgctctttgtctactagctaaactgaataaaagattgaatttttaggttttactggctggaatttgcaatgtctttattacactgtttattgttgacattgctatttttcaatctgccggctatgttacaatctagttgaataaatggatcaagaagcagtaagaatacaaatcacctgcaaaatttcaccggacttctcaataggttaaatagaagagagtataaaaaagctaaaatttccgctaatatgagacatttttataggggttattaagtgctatttatttacaatgcttacctcgagaaaagtttctgtattattgttgttgttgttgttgttgttgttatttgtagtagtcgtgtttccattttatgggctggaacttgctatgcagttatggtgctgttttgacattgcccttctaactgatttgacttttgtgaaggatttgattatatcctacacttcggtg

SEQ ID NO: 58043 - DNA, 765 bp, Populus trichocarpa
  Intron number 2 from transcript POPTR_0001s37670.2 (locus POPTR_0001s37670) derived from phytozome v7.0 (chr-ID scaf fold_1; pos 36645204 to 36645968 reverse strand)
agctcagagcttcattatcgttgtgggggcaacaggtgtttattttgacacagcttccttcagaatttgatttgccttttaatttcaatgatggaaaagtttttccacaatttgattatatctatggtgcataatcactattgaaatgctcgtatatttcctgaaattaacatctggttgaaagaatgcaagttgagtaactaaggtctgagtaaagcacggagcagaatatgttcttgctaaccactaactactatgagctgttgctgaaaaatcttttttttttcatttatctcttactattatgaatcttgcgagtaaacaattgaagtctgtacagagtggtgatcggtaatatgcaattcttcaagactttaagtgagaattcattgatatgaggattgcagatgggtctataaattgatgagtaaacacacccaactaaagtcatctacaaataatatgatcttgtgggttgaaccacctttgaagagatgcatggcatctgatgaatgtaattggtcatgtttttttctcagcgtaataatagtgaactacctctctggacgctttgtaacatggcttgtttaaaagatcttgaagattgtctaacacttagtcacaaactctttagttatacagcagtgatactctttattttcatcttaatcttttttcccctgaacatattgagttggtggctagtttatcttttattttatctttgcaggggaagaagggaatttggatcaagttgccaatcgc

SEQ ID NO: 58044 - DNA, 551 bp, Populus trichocarpa
  Intron number 3 from transcript POPTR_0002s02160.1 (locus POPTR_0002s02160) derived from phytozome v7.0 (chr-ID scaf fold_2; pos 1197278 to 1197828 reverse strand)
aaatcttttcaagtcccaaaaggacctggtttgtaacagagagagagaaaatgctagcagcaaaggtgatttctatactgtggtggttgtttatgttatgccttgtactttcaaagacatatcagtcccagtcgtaatttggaatttgaatttgtttttctggccattgaaaagtgccagtaccatagccatctagaaaatgctgataaagaatgctaggatttatccactgtcatgcgccaaggaaccccgagtaatgcattaagtttatcctcttgctcctttctataattttacacgtgaaggggataagaatcatgtgaagatggtttttatgttagaggaagcatgcttcctaagaaataatgcttttcttctttacaaatggaatactcacaacctgagttattttctcttgtattaaatgattttcctctttcagttcaactttcaggactttatattaagcaatacaagtttaaggttagtttcgcctactaatcaaacggtgtgtacacttgcatgcagcagtcatcggttaggctctggaa

SEQ ID NO: 58045 - DNA, 441 bp, Populus trichocarpa
  Intron number 1 from transcript POPTR_0001s23960.1 (locus POPTR_0001s23960) derived from phytozome v7.0 (chr-ID scaf fold_1; pos 23340707 to 23341147)
gtggctgcctgcctgccaccttttgcttttgagttgcgaccaccctgcactccctctacctttttgaattccttttcaacattcttttctactctcaacttctttaatccaacactaagatatatgtccatccttctttagattaaaacgacacttccattctccattctggctagctcatacatttcttcttctatcctctctttctcaaaaccatcacattttcacttgcttcctatattcattctcattctgaagtttatttgatgatcatataataatcttttcaatatggtaaactctccctgatcatggttttttgtttaattcattctccattctttgatttgcaagcacaatgttgaaataatttaatttatgctcttcgtcttggatgatgatccagggaactccagtgaacatcatagttggatcccacgt

SEQ ID NO: 58046 - DNA, 803 bp, Populus trichocarpa
  Intron number 1 from transcript POPTR_0002s19900.2 (locus POPTR_0002s19900) derived from phytozome v7.0 (chr-ID scaf fold_2; pos 15837325 to 15838127 reverse strand)
tgggcaacttggcttattgcattcctgatatcaaggtaccaaatctatccatttctttctttcttttcatttgcttccaagtttattgctttgatcgctgttttctcgcgctggagatgagagttctgcgtaaatgtttctttcttatgaggtcttggatatgattggtagatttattggatcttggatcgacctgtacatggtggattttatagttttggtgatcggattttctatattaaaagaagatgatcttagttactctgctttgttgttagatgactttcaatcgtatggcttgttctttttagatattcaaattttctgttttcctccctgtttggggaattttttatttttttctgaattctcatttcaagtgtctttttgtcgaattttaattcgttggggagcaattttgagtatagatcattactgtgcttgcacgcgaatttcctgagtttgttgtgatcccttttgttaaacaatgttcgtaggacgccacagctgacatctgtgagatttgggatgctttagtttattaaggttgttgttttagctgttgcatgttgtgcctgtgagccaaaagtgtaactgggcaaaaaagtgctcaatttgatacttattttctctgaatttactgtctccgctgttcattatcttattttctgttccttgctgatcgagaaacttactgctttaacgttgcaatttaaatgtcttcaagttgatgaattgaacttttcttccttcttttggtaaattcagccagaaagtctcttgaaacgccgtggtctcttctt

SEQ ID NO: 58047 - DNA, 769 bp, Populus trichocarpa
  Intron number 2 from transcript POPTR_0001s11960.1 (locus POPTR_0001s11960) derived from phytozome v7.0 (chr-ID scaf fold_1; pos 9298451 to 9299219)
tatctactactgtaacggagatttccagggcactggtgagctttctatctttccacttcatctaaccagccagcgttatttcatgaaagcactgcttacgcatgaaccaatctcaatcaaaatactaaagttcttgttgaaaataatcgacatttctggtttctttaaaagcacaaaaatgtgacactaattatttctgaaaatcttaacagcaaaacaaaaatacctcttaaagtcattcagcatcactcttattacctgtttacttttattatcctatttcatttgggttttcattctaggttatcatcacatgcatggtagttttttcatgagattttgttttaggtgttcagcttttctaaattctgctgtcatatatattgaatttattagctgacgccaattcactaaaattaacctcatagaaataagtggcttgtacagaaaatacatatgatctggcaatctctatgaattgcttttgatgggtacaaaactcgtgcaccattagcaatatacaatagttttgcattatcattgcttactcttagaagaattcaatggaaatattgacctatacatcattatctttcatttttctcaagaggttttacattcgaatgcctcttttatagtaataataataagaagaaaatctctcagtattagtagaagtatagtttgaatattgattatttgtattattttatttatttattgcccctctatctcttttgcttccatgcaggctgagtcgaaatataat

SEQ ID NO: 58048 - DNA, 1041 bp, Populus trichocarpa
  Intron number 1 from transcript POPTR_0001s17100.1 (locus POPTR_0001s17100) derived from phytozome v7.0 (chr-ID scaf fold_1; pos 13966767 to 13967807)
ctttggggtggaactttcggtgaagtgtataaaaggtaggcatggatgattgaatggtttttcatttgttttgacttactattgatagaatactttgtgtgtttggtatgtgcgtggctgtccgttgaaatggaaatagaagtggtaggtatggatgattgttgggtttttcatttgttttcacttactattgattgaatactctgcgtgtgttggtatccgttgaagtggaaatagaagtggtttgttctttcaatgagtctatacatttctttgccaaatataatacatggggtttgttaatttggaggcgtttaggtgctcagtgtttcatgagctctgttgattaattgttttcattaagctttgcctgtcattgttttcattagggtttagtttttttgggcctcttttcctattcttagtagatttgatttcggcatatcactaattgattttgtgtgatgtaactatcacgggaaggaatgtggccagttgtcgaggagacaaattagtttgttcttggttgattagtcaacttgtttccgtttttggaaatcttggtatcagtatttcatttttaaatggctttcctttttcgcaagactggtgtttgagatgtagaatggaagaaggtggagaattattgtcaattaaaattgcttcttagttggtattgttccaactataaataggcaaatgcgatgtctgatatcatgtgcacttatgatgaagtcaggttcgatcaccttaactgatactttgagaaaatgaccttgcccttctcctggttaactaggaccttatactctacatgctacaccgcagaaaaagagtgaggcagtagctatctggaacaatagtctataaagacattcctaggggtaacactgctggtccagattagatatcattgccagctttctcactgttagttgtgtgtgaacttatggagtttcataaatgccttttgtgctttgtcaggtgattcttcattttctttgttgggtgttttttaggcctctctgctgggtagaacat

SEQ ID NO: 58049 - DNA, 892 bp, Populus trichocarpa
  Intron number 1 from transcript POPTR_0001s19130.1 (locus POPTR_0001s19130) derived from phytozome v7.0 (chr-ID scaf fold_1; pos 16556660 to 16557551 reverse strand)
tcgataatttgccttctgggtatatcttctttatttttttctttcaagtatgtatggatgtatgctaatgtctgaaatgtgtatatgagatccaattggactcgaattgtgtttgtttatgcatgtgtgatgaaactgatctgctcacttatgtctatttgattcatttttatatgtaaagaggcatcagacaatcacatatatatatactctctctctctacacacacacgcttgcatacatgatccggtttcacttgaatgtatgtgtacatacaccatttgatccattttgaattaatcaaggtgagtgcttgatattgttgtctagagtttattattgcacactcgcatatggctctaatacgtgttgttcaatctttgctgttgtgttgtatgaatgtatagacctttgatgcaatggaacttgagtgtcttgtggattttcttgtttttcattttcacattgttttttctaagtagattatttagatgtttaatttcatgccttccggaacgatatttaagcaccacaattgatttctgttgaggtgattaattttgttctggatcattttgagttaattcacgtcttttgattaatgttgaatcttaatcaaatgaatcttgacttgtgctgagtgcatgaaatctggaattaccttctttgcatggatcatagttttgtgataacaacttgcaagtattgtcttcgatggtgtgataaatgacagaacataagttgtacattgccatgtggataaacattgtaaaacctttttaatccatcaacaagtgggaacatgtatcagagaaagttttattctttccctgaagatttgtttagatatatgagacaagattttaaatttattgttatttttgtcacagtg

SEQ ID NO: 58050 - DNA, 849 bp, Populus trichocarpa
  Intron number 1 from transcript POPTR_0001s41770.1 (locus POPTR_0001s41770) derived from phytozome v7.0 (chr-ID scaf fold_1; pos 41471824 to 41472672)
tggagacaaagatttcgagtttctggttaccaattgtaagtatacttgttctattattattattattattattattgaattgttgtcttgtctaaacatcaattttgagtttttgagacaagaagctgtttttattttgaatttgagatttttatcttctttattgtttctggaaatttgtagttttgatccagattagggtttgtaagctgtcaagctgtccttaataaatcccaatttttcagcttttggtaacaattaacgacttgttgttgaattatagttttcttttcttcgttttttttgttcctctttaatatttgttttaatcacaaaaccaccccaagttagaaactttctgtatatataataatttattgcaaagatggtgtcaagttgagtttcttcccttttcttttgcatttcgggcctcataatcaccggtcattagttgttaatttaagtttgcgggtcccatgttgatcttaagcagatgatctaagctgttttgttttgtttttttgaaagtgttgtgtactgaattacaagtttctgagcttttggtgacaattttagagtttgttgttgaatcagttctttctatttttttattcaatttttgactcaatagagaaaaaacaaaacagaaaagaaaaacccaatttgtgtcatcttcttttaccttctgggcctcataaacgcaagcatcgatcccaagttgttacgagaaatcctgactgtaatctaattttggaggtcccactttgagcgttcttcttaaagattatgagttactggtgtgtcattttttcagggttttgacattggaagaaaaattggcgataaaaa

SEQ ID NO: 58051 - DNA, 940 bp, Populus trichocarpa
  Intron number 2 from transcript POPTR_0001s41770.1 (locus POPTR_0001s41770) derived from phytozome v7.0 (chr-ID scaf fold_1; pos 41473090 to 41474029)
ataacattggttattttatcaagaaggtaactgatgaaaaaaattaattaatgtgtttggtttttattcttattttgttggattaacttggttattggtgtgtaatattattattagtttgcaatttcgtgttgcaagaagaggaatgcttgggtgtttcttgttatgcatgttttgttagttaaggtttttgttataattacacggcagaaatagtaattttaagagttaaagaaagtttctaatcatggagaattcattggtgtcatgtgtagcagcaggggtacttaagctcgaagagaccagtagttcctattctatattgctgtacttactggaagactaactttgaagaaagagcagagttgttattgttaatggtttatggtgggtggggcagaatgcgaaagaagatacaagttaactttgttgtgttgttgagatgagttagtaggtatcacgtagtgtgtacttggatgacaccttttatcataaatgggtgtctaggattgtggtgcagggtgcttttcaaaatagctttttgcttgaaaatgcgttctttcaattttattttttatttttgacattagcacatcaaaatcatcagaaatcactaaaaaacatcaatttaatgcatttttaagcccaaagcacctaaaagcagtagcaaaagctgtgccaaacaccctcaaatagtaagtaatttaaattagaagatccactgtagctgaagtgtttagagaggctagatactaaggatttgttattttattgtcaattattacagtagcttcccagaaggcaccagatttgttttgagaagagcatatacttttgtgtgaaaattctctctctgctttttctttaaatttgtgagaattgaaacattaatttacacatttttttttccagaggctacgtgtctggtgtcggctcccaa

SEQ ID NO: 58052 - DNA, 567 bp, Populus trichocarpa
  Intron number 1 from transcript POPTR_0002s16500.2 (locus POPTR_0002s16500) derived from phytozome v7.0 (chr-ID scaf fold_2; pos 12351977 to 12352543)
aaggtttgattccctgttgtggaatctttatttatttatgtatttcctttgtaattctttattgggttttgattctttaagagtttcttggtttctaaaaggaatttaagacattctggttcatgggttcatttgattcctggtatctagaggagtccatgagtaccaggggtatctttctgggactggttaattaaagaaagaatcagtatcttgagtgctctttttaagaagagagtcttttgaatgtcaagttgaggttcagatttcgtacattagtcaagttctggtctctttatagataattgatcactaaaaagcttgttgattctgggttggtgctttcttacatttgtaacttgtttcgatttttgctacttgtaagagcgaaaaccatcgtatattttttagacaaaaaaaaagtaaatcaaattggctttgatcatttcattaagtacttttgctgacatgattaaggaaattctgaaagtagttaaattgaagtaagttctgaattagatctatttaatttatggttgcagaagtttgtgttgaagttggacttgc

SEQ ID NO: 58053 - DNA, 988 bp, Populus trichocarpa
  Intron number 2 from transcript POPTR_0002s16500.2 (locus POPTR_0002s16500) derived from phytozome v7.0 (chr-ID scaf fold_2; pos 12352573 to 12353560)
aagacagtgtctactctttcaggtgccaaattaatctcttatttttttaggatttcaatgttagttttttttccttttccttacatgtgtaatttggatatgtttgtgacaagggttgatgaagggaagcaaattgttttttttagagtgttgtaatagtagatttgtttaaaaatatattaagtatatttatttattttttaaaaattatttttgatattactatgattaaaaaaatataaaaataatttttattatttttcaccttaatattgaatttaagcccaccgcatgtttgtttaattactccttttctttgtttttttttttttgggtgggcgtaaaaacatttttattctttgtttccttttcgtgatgattgctccctctgtctatttttttagttgagatttcccttcaggtctgtcctttctctacttcaactatttctatcgagattcaagtaaatattctcctaaaatcatgaaaatcgtcgtgtagatccaatagttaaatgcacgtcctaatcaggcaaaagaatacaaatgcaaatcaaacttgcattgaagggagacatgcagggctgcataaaatgacttttccaaaacctatgttttcctttgtttgcggacaggctaaccatttgctttataatttgcatatattttgtatgtggtaggtgcaaattccaaatgggagatgaggttcttaaaagacagtttaattagtggttaaagcttacacatgtacagaggcctaactcatcccactgaaacaaaagggagttttattttttttttaaaaaataaaaaactctgaggaattttaacgaagagagggttcccaataaagaaaatggaaataaaaaacgatggatgtatcaatttgcaagtgtttgtgtgcttactaatttttagcgtgcgggacattgttattgttgttggggaaaataacgttttgcaattttataggaattgattccattgcc

SEQ ID NO: 58054 - DNA, 452 bp, Populus trichocarpa
  Intron number 1 from transcript POPTR_0001s12530.1 (locus POPTR_0001s12530) derived from phytozome v7.0 (chr-ID scaf fold_1; pos 9718106 to 9718557 reverse strand)
ccaggtatatacctcatagtattctatcctctgttatgtttgtggataaatgctcaagacatttctaattttacttttagcaatagttcttttgcaattccatttcatggttatgagaaagttttatgatgttaaaaaaggggggaatttaaagtatgggcataccgcataccttttactcgattggctaatttactcgacaacagcaaggtgtgggaaatacgcctgtatcaaatttgaagagaacaagaaacaaatatgtgcgaaaagctcaagaaccttaacataaacatgtccgtaaccaaaataattacacgagcaagaagtataatcattaggttctttccccggtcttgccggctcacctcgacattctgattttttaagaatatcgttttctgtcttattgcaaactttgatgtattatattttcagcagtgtttgctatcttg

SEQ ID NO: 58055 - DNA, 773 bp, Populus trichocarpa
  Intron number 1 from transcript POPTR_0010s00390.1 (locus POPTR_0010s00390) derived from phytozome v7.0 (chr-ID scaf fold_10; pos 175830 to 176602)
cgtccgtgacaagtgttcatcttatcatcaaaaaggtgaatctctctctctttgtacttgtgtttgcttgtctgtaaggaagtgaatatcaaaattacgtacacagatgatgatgatgatccttcctggatttctgcagggttttgttcttgtttcttcatctttctccttttgacatttcttcgttatttgaattgattgatcattcaaggaatttgcagtttgtcgatgatcctagtttttctgttccatgtaatcagtggctacttctctgattatttttcttgtactcctatcttggattcttgcttcttttgttttatcagggtaagttccttcttgttccttttgatcaatgaagcttcttgagggaaaaaatacaaagaatgtgcagttgctgcctctatgcaacaaaaccagtggactagactttaggctaataatctttcaattgattcctgcatgatgcatcatcctgagaagtagaaatgaggaatataaaatgtaattttatattgccctgaaatttgacacttcaattttgaatgtgaaagttaattagattgatgcagccaatgttgaacattattttgaatacacagagcatcatccaattggaattgaagcactagtagcaccatcttaattgctttctagtcctacaaatctatggcaatgatattagcctagttacatctttcaaggacatacccccctacatatgcaagctcaatttgtttttcaggtgaccagggggcatctttgaagagaga

SEQ ID NO: 58056 - DNA, 852 bp, Populus trichocarpa
  Intron number 1 from transcript POPTR_0001s31350.1 (locus POPTR_0001s31350) derived from phytozome v7.0 (chr-ID scaf fold_1; pos 29688542 to 29689393)
aatcattaattcatccaaggaacctgacactgaaggtatggtgttatctacaatttgctttactacaatgtcatttgttggctccaaatactaatactggtggaaagatacaaggcttggagatagtttgaaacttcaggcctgaaaatgtatcctggcctcaaaaagtggatcattggcatttaaaaaattatgggagtctctataagttttcatttcttttctttaagctttgttctccctctgtagtatcattccttggaaatagttttactgatttcaggctcaatgtaaatccatgaattaatatcttggtggaagtttggtagtcttgaaagaaagcatcacatttaaactctgttcagacatttctcagaatgttttgattttgaaagttatcgggacccaattattatgattttgatcttgagggaaagaagaaaacaatttctgtcatcatttagcatgtttctattgttgctcgagagcagaaaggcaagctacacttcttaaactcaattgctttatgtcttggaaaactgctattaattcactgtaatttcttcaaatctggatatatttatacaacattaccttgggaaagaaccttattggttggataattcacttacagaaatctaacttgtatagccaattatgcttatgaatgagaaaggtacaatatatagttgtctcttcctgttttcattttgaaaatattatctatttaatgaaatatggggagctgctgccagtcattaccttctaccgagcatcagatatttactgacacgtttcaactttctctaatgttcaggtggtgctttaagagatcttctactggcactaaat

SEQ ID NO: 58057 - DNA, 684 bp, Populus trichocarpa
  Intron number 1 from transcript POPTR_0007s15170.1 (locus POPTR_0007s15170) derived from phytozome v7.0 (chr-ID scaf fold_7; pos 14784949 to 14785632)
caccttggtccattcgaagactgattctgaaggtatgcacactccatttacacatgcactgcaaagtttattgattttgctttacattttgttttgattctcgaatgaggtaatggtgtttaggaacacgtaattacgtatgtttcaaggttccacacacacatgttggttatcaaggtgaaatttctgtacatgtttaatctcaggagagaatgaaatttgatttatataagggagatctatgatctttattgcctttactaatactttattcgtttgttgtttaatctatgggtaataaaagccagtctctttaaatgcaattaacttttgatggggtgttcttggttttcatggattggacccatcaagggatgttttcaactatttgttcatgtatatgtagataaactcattcaagaagaaaataactatggtgaaaagttcagtgcaattgcaacggggttactgaaaagtgcttgttttaactacaaatttgcaacaaaaaatggatactaataggattaacaactgcaaatattcaaagacagtattgaaactcagaacccttcttttatgatcttcagttacataatcataattttcttaagaatctattaaatttgcatttcagtattctgatgtttcccgtattgtgattgctgatttcagtttcggctttga

SEQ ID NO: 58058 - DNA, 533 bp, Populus trichocarpa
  Intron number 1 from transcript POPTR_0001s29670.1 (locus POPTR_0001s29670) derived from phytozome v7.0 (chr-ID scaf fold_1; pos 28312963 to 28313495 reverse strand)
gctgggaactctactgcctggagcacggcatccaggtatctttcgatagatctgtcaattctggtttcatatcttccaacattctgtagatcttatactttatacatttacacatttggttttgtgcttaaatctcgagttttatatgtgtttttgcttggatttgcggattgttttttggttttagttagatcaaaacttcacctgatgtgaaaatattttttcgatttttgggtttgtttgcttggtttccattggatctgtgagtttttgttctcattttggtcatatttgtttatcattgctttcaaatttgtttaatatctctagatctaagtttagttcttatagtgtatcgatctttcttagatctaaatgtatatctttgcaaacgaatgcttgaatcgcaaagtcttatttttgaatattttgtatattccactaaatattatcagaatatgaatagttttttttttgtatttattattgatatgagttgctgataaatgtctgtgcgttacttctgtagcctg

SEQ ID NO: 58059 - DNA, 866 bp, Populus trichocarpa
  Intron number 1 from transcript POPTR_0010s20940.1 (locus POPTR_0010s20940) derived from phytozome v7.0 (chr-ID scaf fold_10; pos 18386939 to 18387804 reverse strand)
gaggtgacgttttctacgaaaaggacacggtgaaatgccgatgctcagtgtacacgtacctaccttatgccaccataataaactcccctcatgggcccaggtacctgcttggcctaccaagcccataacctcagtccctgctacatatactaaacgtgtggtccagatttaaatccatcaattccttgaaccttctcgcgccgcgcccatcaaaggtgaacattctagaaacaagaagcgcctcctcattttaaataaacaaatcatatttccacgaagcttcaatgtaagcaaaaaaagtctgcatcatgagacctcaacattaaaactttgaaaaaaaataaaattattgaaatacaatatttaaatttgtttccatacacatcaaagtcaaattaatataaattgttgggtcgatcttgtaattaaaaaagtaattaccttccttcctgtggattttcgaatcattgtaacatatttaggtccaagaaaaaaaaaatcgggacatggtatgtaagcaaaaaaaagttgggtctttttggacctgggttcgtgaaagctttatggttagtaattgatttttaaagtatattaaaataatatttttaaactacaaaaataaaaaggttaaacagcacaccgtccttagcaagctggcgcgctgttttagcctcttaaaaaaggacaggcaggcatgcttaccccaaactgcagtagccgaaccagtcttctctaggttcagaccacaaacagctcaataaaacgaagtttcacttcgattacgaattcaatcttgtttgaactaattatggaagttgatgaaggatgcaggacaccaagacgcagcgaatatcagataccagcgg

SEQ ID NO: 58060 - DNA, 728 bp, Populus trichocarpa
  Intron number 3 from transcript POPTR_0010s00580.1 (locus POPTR_0010s00580) derived from phytozome v7.0 (chr-ID scaf fold_10; pos 316939 to 317666 reverse strand)
acatcagagtttaaggtaagtccaataagtcgtttattgagttgggctatacattcaccttcattagactagtccaattttcttagatcaattatctgtaagttgaaattatgaagtgtttatcaggatgaagaggaaagttaatgttattggaaatggggacattgagcatgatacaagaaaatgctggaacattcttttgctttttgttaataattttcagcaaaatgtgtttgaaaattcacaatgcaagaatgaatttgatagtattattagcttaagattaaatttacttcttgaatagacggtgttactactcaaatgtgagctcaaaataactattgtttgactatcctaatctcctctatgtacatctttacttaaggaaggcaataaatcaaacattgaacaatgtttcttttcattagctccctgcaaaatttagtaaatagcatggcaaggatggtgctctgtatcagtgtagtgtagataactaaatttcttaaaggtttttgatgtaatgtgccaaaaaaattgaacttgatgaattaatgagaaaatctagatgtctatatctgtgtttattcacttacaggtgtcggttaattatagagcttaacaaagttgtattctctatctttatgacttggctacatttggtccttgtatcaatatatttttttttttgttcaggttgtgattgcagacgagtcacacttcctgaaaaa

SEQ ID NO: 58061 - DNA, 501 bp, Populus trichocarpa
  Intron number 1 from transcript POPTR_0010s19520.1 (locus POPTR_0010s19520) derived from phytozome v7.0 (chr-ID scaf fold_10; pos 17402470 to 17402970 reverse strand)
tttcttgctctttccatcacaagtactgctcataggtatgtccttgtttatcttacagacaatgaaactagcatacttgctaatttaattttccatgaattgtagttgttggttaaagtctgaaactttttttctggggctgcttaatctgatttcttcttctttttaagtgttcttgttttgttggaaatagtagcgatcttagaataataagtctctttttgttcttttatgggtttaattctgtttgtaattttctcttggcttgtttggagaggaaatttgtggaaaaaagcattagaagtcgaggagaaaagtttgaaatgatttaattcttgtcttctttgtcatcattaaatagttttgctactagcaaatagttttccaagatttgatataggttttttgaccttgttatttcttgatttcattaatgaactgtatagaattcttgattatggtatattaagtatgcttgttataacgatgcaggacttgggt

SEQ ID NO: 58062 - DNA, 951 bp, Populus trichocarpa
  Intron number 2 from transcript POPTR_0007s01200.1 (locus POPTR_0007s01200) derived from phytozome v7.0 (chr-ID scaf fold_7; pos 647383 to 648333 reverse strand)
cctggagttcaaaagcttgctcttgagagtttgaggtagtggctgattcattcaaagtttgcaactttcgagtttttgtttctgctaattttgatgataatttgttggtgatgataaattggaaggaatttgaaactgtgaagctgacgtgaagggtgagtgatatttggtaatatataggaatgcaattggtttcttatgggaattgcactgatagtttggctgtgtttattaccgttgtaaaagggtatgggatttctcttggaatttagggcttgattttttggattaacaaatctagacttcaacatgaaagtcatttagaagatgggtcgtgactgccaatgtttataagatggagctttggaaggggtatgtgtgctcttggattgagctcccctcaagctaggggtaacatgatcgatcatgttagttaaatccaaaccattgattttgaaatcaatagttaggatctcatttcaccaagttagtgggtggtttgaatccttttaaaatttgtgattatttatttatataaaaaaacccaaaccattgatttcaaaatcaatgattttgatttacttaacttgagaggagccaaatctgtgtctcttggctacacttattgaatgggtggactggcttggtcttcgtcattaattattgtaccgattaagacggtgttttgacagccacaaatgctataatggttgtgagtatgttttttagtctatcgtggcttttcaagagtgaagaaatctcagcttctcgttttgtgtatcaaaagattgagaatgtcttgcatggcttcatgtgttgttgtgttaaaagtgtaatgatttttctaccagttaatatcaactttcaggaaacaaattttgaatagcgtgtggttattgacaatgcatttttttcccttgcagacaggaaattcgaagctcaacgagttca

SEQ ID NO: 58063 - DNA, 491 bp, Populus trichocarpa
  Intron number 1 from transcript POPTR_0001s11870.1 (locus POPTR_0001s11870) derived from phytozome v7.0 (chr-ID scaf fold_1; pos 9205205 to 9205695)
cgcaaaaatgtatgtatcttttccttttcttgatctgatctgtccgatttctgttagttgatgtttgtataccttttgaattcatttgtttgttaaatttggaagatagcatcattttgttgcaagaatgaggagagacttcttcaatgaatccgggattgtaactgtttaggggaacatgaatcatcaatcttaacaaacccagatcatgaatttattttactttactactgctctgttattggtaatcatctatattcaggaaagtagaaatcgttctttcttcctttctttttgtaaaaaaaaaaaaaccagtttgaatgtggcttacctttggtatcatggattgttgaagaaaatcattgatttgcacggattcagatcataagtttcagttactgttgctactgttattgataatgatcttgattttgtttatgttcgtgtattttgatggcaaattgcagcaggaaagcttccaaagcataata

SEQ ID NO: 58064 - DNA, 352 bp, Populus trichocarpa
  Intron number 2 from transcript POPTR_0515s00220.1 (locus POPTR_0515s00220) derived from phytozome v7.0 (chr-ID scaf fold_515; pos 3788 to 4139 reverse strand)
gcttcctccagcctctcagtcagttgcaccgcaaggtactttatgaataattgttcattttaagtatcatttctttaataattggttctcatgtgttctctgttacaaggtagaaattttgtctctgatgctatttacttacctgaatagtaacttcgatggcatgaggaatttagttattgcatttaatttgaagaagcatatgatttacaattaataacgaagaacatccgagtatgtttaaaaacaaaaaaacctgacagaaagtgaccatttggtattctttatttgatctttgaattccttttcagaagacataatgtaccctctacttaaatttcttctaggatat

SEQ ID NO: 58065 - DNA, 808 bp, Populus trichocarpa
  Intron number 1 from transcript POPTR_0002s20690.1 (locus POPTR_0002s20690) derived from phytozome v7.0 (chr-ID scaf fold_2; pos 16763871 to 16764678)
gccaatcctgtcctcaccattgttctggtgctcaattctattggacgtgatttttgtttttgtttttttatctgttctagtggttactttaaagggatgtaattagtttcatggctctcggttcttgtgctattcctttttattgtatgatggtatcttattgcgggttgatttgtctgaatttacagaagagtgtgaggttttccagtatttgtttcgtaatattcttatcagagtgctgttctcattggttttttttttcttcttcaaaagttggagaaacctccaatgagttttcatgtatggaacttaacggtgggttggagaaaatcacttctcagttgctgattctgctaaagattaggagttaggactgagatggtgatgttagagactaaatcaacctgtttttttttttttttttttcccaatggaagcagattaataactctgtttactttccaactccttgttagattgtcatctttgccttctatgagttcttgaatgttttctgcacaagaaagtgagtgagtcgtgaagctttttacatggtaaaaactcgtttctcaaatttctgatgatcaatctttaaaacacaacatgtgatgtgtaacaccagaattctgatctgttatagtcattgcagttagatgcaagacaaaaagaaaatttatttcatacttcttcatgaagtggaatcctatgttatttgttatagtgattttctttttctttttttcttttgataggttggttcttgctatctgttattccttctctaacttaaattcacttgtagtgtgcg

SEQ ID NO: 58066 - DNA, 654 bp, Populus trichocarpa
  Intron number 1 from transcript POPTR_0001s42390.1 (locus POPTR_0001s42390) derived from phytozome v7.0 (chr-ID scaf fold_1; pos 42257109 to 42257762)
ccatcaaaaacctagttcttttattattattattattattaatttgtataatgtaataggtcaatcatattacttgagtgtgtgacacagaaatgcttctcatagacaattactttcatttttttgagtttgatcctttgttgagttcgttccagtaattctacttttttgcaagtcttttcccttgttgatctgttttttttttaaaaagaaaagaaaagaaaactaaaaaaaactgaccggtcatagcttaggttaattatatttgttgttggaagcgagctggtatcatccagggaggcgtctatgtgattatcctgaacctttcattcgtttctttatttctctgtcactgtctctatattatcttaattatgtcatcaagatgcatttttaatgggaattactacttcaactcacaagtgtcagtttgaagcttgccttgcttttgaagctggattccatacagagctagaggccttctccttttcttcctcccgctatttcattgattgccagtgcttttcgcacatattttcccaaataaaggtaatgaaattcctattcccattctctctgcgcctgttttacttgtagtgactcactctcacgttctgtgtattcttatttctctgattttcaggtcggtggaaa

SEQ ID NO: 58067 - DNA, 619 bp, Populus trichocarpa
  Intron number 1 from transcript POPTR_0001s17000.1 (locus POPTR_0001s17000) derived from phytozome v7.0 (chr-ID scaf fold_1; pos 13815975 to 13816593 reverse strand)
ctcagttgaacttgccctcacagttgctggcttcagtatgtttttgattgctttaaagttctcaaagttatagtgttttgtttacaaagttgctgtttttggttaattggcttgtactgttagtgtaatctgtgcttttgaaaaagtttgttagccttagtaagaatttttggattgtgctagtgtcaatcaatttataaattattgctatttggggtatgaaatctatttattgcactactcacaagtgataaattacttgaaagttttacaaaggtatataaaagacatttctgtgtgataatcaattgacagtatatcacagtttaaatacttatatttttaaaaggatatccaattatataggatttctgagctgaatgaattgaattcagcgggtgataatctcaaaaatggtgtgcttcttctttaatcattacatgatttaatagttgattggatcaatagaatctgttggttcagtctcatgctcattatgcaacgcatttgtgattgagctagcaaaataatttaatgatcatagtagctatttttttctaaaataagtgcactcttggatgtagccaaggcagaaagctgggttagttcaagggtctca

SEQ ID NO: 58068 - DNA, 629 bp, Populus trichocarpa
  Intron number 1 from transcript POPTR_0007s11070.1 (locus POPTR_0007s11070) derived from phytozome v7.0 (chr-ID scaf fold_7; pos 11323130 to 11323758)
tgaatactatcagaaccagagcggtgcttctcaaggttctctttgcatcaaccgtggagtcgattcctctcctgtactctctctctctctctctcacacacacttacttgaagcgtatatggttttctaagaaataactttttttgatcttcctacagattaaacggggacaaatattaacaatttgaaaaaaaaactaccagcaattacgatattttttttggatgaattatattatatataggagtatgaatatgataatttttacacataggatgtgctcctctattaagttgcctgaattatatataggtgtatatcgctcagtatcttgtaattgactttgctggcaatctatacataaactgctaaggaaagtaaccattaaaaagtataacaaccataatattaaaaacgaaaaaaagaaaagaaaaaaccctcccctccctctagaatttgatatcattcaaccggtttaacttaaatcaattgaaacctgacctattctgatccgatggggtataaataaaaggaaatataataattatataatattaaaaaaactaatgattaattttttttttatgaaaccagattgatttcatattgtcgagttggctacacttgtc

SEQ ID NO: 58069 - DNA, 778 bp, Populus trichocarpa
  Intron number 1 from transcript POPTR_0001s08780.1 (locus POPTR_0001s08780) derived from phytozome v7.0 (chr-ID scaf fold_1; pos 6704405 to 6705182 reverse strand)
acgtttttatcgggattcggctatttaattggctggtatttttttttaatttgatttatttttgagattgaaagctcattttttatgaactaattgtttctttattaattggagctgagttataggagttttaatttattgaattattaattgttgtgctgtgatgatttgttgcttgattaaatgaatttgacgtgttaattattttgatttttcttgaagttttaatctttggtttctgttacaaattaatgcattaattgcaggctgaatgtaacacaagagaaaacatttgaatttggaaattacattgtttgtgagggtaaatgatagcattgctgttaattggatgcaaatatctggtttgaaatgatggaaagctcaaacgctgcacgttttgttttaccttgtttatgctggtggacgtaggagctgtcgagtgttgtttatttagtaattaatttttagaaaagaagggtttcaatgtacaagtacagattcgtatctactttttgctagaaaaaaggttttatcgtgaaaatgccgagtttgatcttcagtgtgcatctgtttgctgtgtatgtggaatatggtattgccttatgaatttcaagtgaccatgtttgtttcatttttgttatttgatgttcttttgaatacgtttctgaagtatattcatgttaatcaaatgggaccaaagaaaatctttttttttttggaaaagtatataccctttttatttctgaattcttgattattggtgtccatgtgtagccat

SEQ ID NO: 58070 - DNA, 594 bp, Populus trichocarpa
  Intron number 2 from transcript POPTR_0002s08400.1 (locus POPTR_0002s08400) derived from phytozome v7.0 (chr-ID scaf fold_2; pos 5849495 to 5850088 reverse strand)
atcaggtcggtggctgaatagccctcctcctgtgaaattttaatatgttctactaaagtctctaactcaatcaccatatatggtcacaaacaccattattcataccttggttcacaagagagttgcaatttattcatagcgaatcattcgaccctcccgcaaggtttctgtttttaattccatgaggttgtcaatctatttactgtttcaatctaatctcagtaatgcaagtgtttaacttgctcctgtttggaggcacctcacatcagctaaacactcctcctttgtagttttgagaaagagaggatgatgcactcttgctaggatcgttgttcagatcattaattggacatttactatgagcagaaaactcaaaatgttgcttcctctgttttcaagtatcaaataaaacactgttgaatatttcactccagtgagaaaaatggttgtcgagttgccttgctcttcctccatgagttggcttttctattttctcacaggcttcaaatttttcttttttgaataattggttttgcccactttctcattgttgaagcaggacccctcaaaggcatctcctactgatagtgctca

SEQ ID NO: 58071 - DNA, 722 bp, Populus trichocarpa
  Intron number 1 from transcript POPTR_0002s08400.1 (locus POPTR_0002s08400) derived from phytozome v7.0 (chr-ID scaf fold_2; pos 5850262 to 5850983 reverse strand)
atcactctggcttttgtttccatctccggtcaaaggtatttgatctgtatctttccaactctgttcctttcaactccactgtaattaaatattatttttatgtctttggaatcctcaacagtatttttgggttgtatgctttgatgggtaacccaaagttgggatcttttgaacagggtgtactgggtttttcttctttcttttctccttgtgagtttttttgttaacagttactgtttcattaatactcgttcatgtttttgctttgacggttgttttttggaagattcaaatgttctttgtccggtgggttgttcccattttgtaacaaataattgggtctctggtgatttctttgttatctgttcttaccaattccatttcttaacttctccatccatggctggtggtcaatttgtctctgtttcccgctggggtccttaaaggtgtcatcttttggtgttgttgttggggttggatggttattgggtggattcaaagcaaagctgataaaattagaagacaagtcatctttttgtttaatgttttagattgtcaacagaagctgttcgtttctgcatactaaaagggccttttcctgcctgcaccttttatcctgctatccaatataatttttcttgtgcatccatttttttgtctctgaatttcttgcaactcatgtattgacgcatagaaacatttttggtaattcggtgccaaag

SEQ ID NO: 58072 - DNA, 783 bp, Populus trichocarpa
  Intron number 3 from transcript POPTR_0002s17390.1 (locus POPTR_0002s17390) derived from phytozome v7.0 (chr-ID scaf fold_2; pos 13148949 to 13149731 reverse strand)
caggtatttcttagatcatgtcttctggtggtatttgttctccattagttctgtataatatataaatgcgtcaatctattgttcaaacacaacatggttttgaccagtcatccaggttttctctgagcttatatcttctggtgatatttattggatgaatattgcaacacttctcctattattttgctgcactacctctgctattattttgtaaaaaaaagaagctaatagcctaatatagctgtttattaacatgtagatacttctatttgcgtgtttgctactcatccatggtgttcaaatttcttacctctaaaaaaaatgaaagaattctaattctaaaaggttgagtaaataaaaaatccgattgattatttaatatgccgtgcttagtgtgtgattcgttggtttttcaaaggtcaagataaaaaaaaaataaagaccaatgcatactatgaactaatgaattcttacaatgaactcattgcttcacattatgtggatctggattttaaaaaaaaagaagtcaaagtcatgctactcatccatggtgttcaaatttcttatatttgttcttgaataagtttgcctgatatgtaaatgcatcaatttattggccaaatatctctacacttgtcctattatttcgctgcactacttctctgctattatgttgtaaaataaggctattgtagcagtttactaacatacaatacttctatgtgcatgtatgctactcatccatgatggtcaaatttcttacctgcaacctgaaatgaagtt

SEQ ID NO: 58073 - DNA, 705 bp, Populus trichocarpa
  Intron number 4 from transcript POPTR_0001s12480.1 (locus POPTR_0001s12480) derived from phytozome v7.0 (chr-ID scaf fold_1; pos 9696829 to 9697533 reverse strand)
aaattgtaaggacaatgatagagtcgtttaaatttgagtgccctattttcttttccatcccaatttgccttttttacctttttaaacatagccccttcaaacatttttcttttacttctgttggactaatgttcaccttgttctcatggagatttttactgcgccaaatatagttatagaatacaggaagctgcttatgattcagctttgagatttagggctaagtcaatgtcagtggattccctagttgcttgtattgacacagacgcctatgttctcaatgagaaaccttagttatcttcttagttcttgcatgttattcaggaaaaaaaatcgaagtaaattcatggactaatctgaagtgctgcaaataatgactcgcaccaaaaaccttctaacaatagacttggttattgtcaaattatggactaaggaaattttctgtttttaaatttttggtggatttctgctgtcaatagaaaatattttcagccaaccctttctaactgccttggcttaatttcctgcagattattttctgagaaaaaaatgaggctaattgggaatttgtttattgtttgtgcaatgatgtttgcagtagcaaaactctttggtccttttccatttaatattgattgcctccttactgaaatggatccttttgcattagttgatcaataaagcaagagattattttgggctatc

SEQ ID NO: 58074 - DNA, 124 bp, Populus trichocarpa
  Intron number 4 from transcript POPTR_0010s04740.1 (locus POPTR_0010s04740) derived from phytozome v7.0 (chr-ID scaf fold_10; pos 5878497 to 5878620)
tcatcagagaacgtggtggctcgaatcgaccggtatggtcttcattgctcaatcaaaatttccagttctgttttttttcttaattatacatgttcaaactaaatttagaatcgatcgaaaacag

SEQ ID NO: 58075 - DNA, 769 bp, Populus trichocarpa
  Intron number 1 from transcript POPTR_0001s38820.1 (locus POPTR_0001s38820) derived from phytozome v7.0 (chr-ID scaf fold_1; pos 38090013 to 38090781)
cttgtgttgtttaaaattagagcaatttttaatctgtttgctaaggaaggctatctgtagcagattgctggcttcctatctgtaaaatgtcaggtttataagcagtagctatttgctgtaactgttaaaaccttcaacttgcatgccgtccaagtctgttggatagtgttcttgttgttctagaaaagttacaaaagaatttgatgtagttggtatcatatggttggaagtcagtgattaaaaagaatcgatgtcatccttgataacccagggttgtgcataggaaaaaggatagttgggaactgccttgagctttgaaacggggagcatttgagattgttggaattacaagtattaatcactgcaaactagattctaatatgagatcgtataagcttgatttgctaaatttatcaggtccatagattaagaatagcagattatgaccagaaaaaaagaaggaaattaagaatagcttattaacaggaaagtatatcacaaagtatttatgattactgttaattcacttttatttacagtttctttaaacgagtgaggtaccatccatcgctcttctaatcccttcaatttttggtttggagagatggctagataccttaacacgtggatgaggatttactagtacatccaccatgtctgttaaaatgtttctggcagtgtgcttgagctttttgtgaatatttcttttgtaaaatgtttctttctgttttcaggtattaaatacactttttatagttacgtacaagga

SEQ ID NO: 58076 - DNA, 832 bp, Populus trichocarpa
  Intron number 1 from transcript POPTR_0002s06020.1 (locus POPTR_0002s06020) derived from phytozome v7.0 (chr-ID scaf fold_2; pos 4013668 to 4014499)
ctgccgttcaaaacctccttaatcaaggttactcgaatttttcttttgagtgtttttagtgcgtgttttgttgataaaaatagtggcattgagtggagtacagagttttgttttgtttttgtaaaaaaaaaaaaaattggcgttgtttagggttttgatagtggattttttttttataaggaagattttcttaattatgtttttagtattctctgttgaattctgtttggctgtcgggaaaactgttcaaaatgactagtaccgttgcctttttcctaaaggcttttttaatttaatttgattttcaattctttattttatgctataagaaaacgccgagtccccaatgcagttgcatcatattaattttttttaaaaacggaacttgatttactttctggttttaatttacatcaatgcattgataaatgctggtgattttgtatttgctattgttttcttgagtatggattgatgtttaactttttttattttagtgaaacatatactttttttgtaatcctttttctggtccagcgtgattttgcttgcagaaatagaatcaaagaaattgcaaagaaaaatttctcttggtgggcaatatgtagctttgataagatatttcggcttgagttacccttggtgccataatagagggtttatatatagatcttgttatttgaaaattcacttcttctatagttagttgatctaattcatttcttaaatgtaaagtttaccgattgtgatgtgctcggttagaagtccttattaaattagtattttcaattgtgtagatccttttcatcaagtgaagagcaaacgtgaaaga

SEQ ID NO: 58077 - DNA, 1040 bp, Populus trichocarpa
  Intron number 3 from transcript POPTR_0010s26160.1 (locus POPTR_0010s26160) derived from phytozome v7.0 (chr-ID scaf fold_10; pos 21485758 to 21486797 reverse strand)
gagtagaagctgggctgctcgctggttgagaattggtatgttaaacaataatctccgactctctttcttcctttttgtttctgctttcagatactttccgatccccagttttttcttttcttttcttttttgacttgtttgttgtgttagcttatgtgaattttcggagctgtttccaaccttccaaggacataattctgaatagttataggattgaggccaagtagtattcttccagacttgcgtagatgttataaagttagttgcttagatggtagaaagttaaaaccatgcaaggagattcgagggtgattctctctttagtcacaatctgattcactaactcatttgaataattatcacaagaaatcttttctttaggcgtaagttgtcatgatgctcctttcctatggtattcacacgttgattccaacacatattgagtgtggggtgaagctttttttatttaatgaagggcaattcagttggtgtggtttgagagttgttaggatggttgaggcttcttatcaaacaccacttgtgtcaaggtgcagcacagataaactattagttgaagtgtctttagtggtgcaacaggttctgcatattcatacaagtgaaggattttgggaattttgatattctgaacattgttcagttgatactactatagtccaattcatttccttttctgctttgaaaattctcctaattgatcttccctcatcaccatggacattttgggggcattccattactaggattagattgatcaggtatctagatgtagaagcatgcctatgcacgcagttcatgttctttccaagggatggtttgacacgcaatattgtcattgatactttagtacctcaatatatttctccttcttagattctgtagattctttttttctttgtaaagatttttgtccatctactgttctagatttgaatatgttattagaaaattggttctttttgcttgattcttttaaacctgtttcaggaagatttgtacctggttgttatacacttgctgtt

SEQ ID NO: 58078 - DNA, 324 bp, Populus trichocarpa
  Intron number 2 from transcript POPTR_0010s14240.1 (locus POPTR_0010s14240) derived from phytozome v7.0 (chr-ID scaf fold_10; pos 13912581 to 13912904)
aggtatgtggtttttggtaatgttagtgttagttgcttttagttttgatagatttgtgttttaagttaagagcaatatttgggtttttactgttggtgaataattgtggtcttgatgatgcattacccgtttgatgtttcccagttttccttgttttttattatatgtgtatgcatgtgaagagtgagtcaattttactaataagtaatttgcattagtttgatgctttaaccaaaaaagaagagaaaacagaaaattcttagttttattttcatgcatgttcttttaggagagtgcaaccattgacataaagctgccaaggag

SEQ ID NO: 58079 - DNA, 618 bp, Populus trichocarpa
  Intron number 2 from transcript POPTR_0010s10400.1 (locus POPTR_0010s10400) derived from phytozome v7.0 (chr-ID scaf fold_10; pos 10920650 to 10921267 reverse strand)
tgaagaaacttacgcttccattggaagaaaatgtttttttccgtttctttttatgctattactcctattattttacgttggggacaatatgttatttctggattagagtaaagtgattggcagcaggggatttgggtagtgtttgtaattgcggtattcttcatcaaaataatattttttattttttaaaatttatttttaacatcacattaaaatgataaaaaaaaaaacactagaaaaattaaaaattaatttaaaacaaaaaaaaatcaatttttttgaaaagcaaggcttggccgtaaagacaaataggctttttaacacactcaatagtttgatacttaagtagtggatttgaaatggatttatacagggttaggaaataggaacacttggtatgagtgaaataaatgccatacacgagatcttgatctcttcttcaaggattgctagcttccctgcttttggctgattatgtattatgtaatactatcttgtacttggtcataaaaatttgatctcaactcttttctctgctctccttgcaagttattttccaacctgactcttatcatggttacaggtctgactgcaagttctgctgatataaagcaagga

SEQ ID NO: 58080 - DNA, 754 bp, Populus trichocarpa
  Intron number 1 from transcript POPTR_0001s46750.3 (locus POPTR_0001s46750) derived from phytozome v7.0 (chr-ID scaf fold_1; pos 47154065 to 47154818)
tctggtctcttatcaagcgctctgttaaatccaaggtcctacttctcttccttctgtttcttcttctgctaatatgttcttcttagctgcccattttctgttcatttcagcttagttattctttacttattttttttaatttatacttgtaagatgattacttgagtattaattttataattaaatgataattctagtgccttgaattaggagtaaagtagattgtaaattctttctataatcttcacttagaggcgtagccatcaattagtggttttctatcttaattcctagtagaaattaagaatgagatgtggaaattcagcacctgctcttagctaatcattggcaaacgtcaaaaatgccctccaattattgagtttgattcaatttaatccccgaacaaattttagtatatctattgtccttaaacattttttatttcttaattaaggtcttatgttagaattccttaacataaaaagttaatttctctataaagaaacatttgtttcttgcaagaataagtacaatttggatggaatcgattatcaaatatagatgaaaagacttaattgaaaatttatgaaacttgggaataaaattgatacaaaatcttttttggtggcaaaattgagaccaattctatagttgttggaggggtttgtctttttgaggttttcccttaattagtgtgtgtgcgggggggcgtattgcagattgtgcagaaaacatttacaggggaaggggaagg

SEQ ID NO: 58081 - DNA, 966 bp, Populus trichocarpa
  Intron number 3 from transcript POPTR_0010s05200.2 (locus POPTR_0010s05200) derived from phytozome v7.0 (chr-ID scaf fold_10; pos 6642968 to 6643933 reverse strand)
caacgcatcaaaccagttgcagttgtttggtaattgtgagttcttatctcattaagttatattcttttttattcttagtgcttgattctataaattgtctatggtgtatgtgtctctactctggttgctcgtggtcctctctagcaaatgaattaattgatttactatgttaagtgtgatgtaacaaacctcctaggtatggtcatgtgataatgagcttcaggcaccaggtgttatgaaatgaattaatgttattagttcctggaaccagttttgtgggatgtgttgtgaaaggataacaaggcattatgcatgtgttgaaaaaggaatgggtatctgggcttcttctttttttttcctgaatatttcaggttttcatctacttctagtttattgtggagttcgaatttacataatagtgtataatactatctagtattcagagtcttaatttcttttaggatgttgacactgtttaggagttttctataatatttatcaattctcctgttatttcttatttgcatttctatttcctatctattatcctcgctttctatttagaactacaagaattgtggtgcctgtaagaagagaacctattctttatgatagttagggctttgacaatgaaaccttttttggaatcgaacacacagctttcattcccagaatgtgagggatctatgccagattgtcgtgaactcataattcaagttcataccttttatagtcctttcattacaggaatgggattaaataattaactaagtaaacagaaatcaagaataaaagattattaattgtcttaattactgaaaatggatatcaaatctataattacttctttggttatagtttgacagactcactctcttcctgctccttccttttctttttgttttttcaagataaagtggtttgattgatctgtaatatgccattggttgttttagtggcagctgg

SEQ ID NO: 58082 - DNA, 633 bp, Populus trichocarpa
  Intron number 2 from transcript POPTR_0010s05200.2 (locus POPTR_0010s05200) derived from phytozome v7.0 (chr-ID scaf fold_10; pos 6645265 to 6645897 reverse strand)
tgtgctctctgagcgaaatcatctagcatattgaggtatttttggccctgtttttgttttttttttcatctctttttctgggttggatggtttctgtttcttttgtgaatcttgatggtgatctgaatcttgttgcttctcagatatgctttttatatattttttccttattttttttcatatttatgaagtcaatttacatttccatttgtagttatcccaaaacaaaaacaaaatcttcctttttcttaatttatcttatgattttcaagagacttactttcaagttttcatcttttgttcacaaatcacataccaggagtccatcttgccacacagcatctttctttctgatgttaattcttctctatcagttaattttgtcgcttaacatcctcattcctcatcttatttgcttcaaaggtaaagggaaaacacttttttaattactattattattctatatatcaaatacttttagtagtataattagagatattattctgggttaattcccttttgtttattctttcatctttttgctttttatgatgatgcatggtgatcatctttaggccctttgcacttgattttgaaattgttgaatcctgttattttttattccatgtagtg

SEQ ID NO: 58083 - DNA, 584 bp, Populus trichocarpa
  Intron number 1 from transcript POPTR_0001s36900.1 (locus POPTR_0001s36900) derived from phytozome v7.0 (chr-ID scaf fold_1; pos 35678100 to 35678683)
ctcttcagctggttttaatccacaaacccacgaaggtctgtgtgtttaattattattgcctctctattctttttttcatttcatttttgcttcagctataattttggtggctgagtaaatgagatcttggaaaatcatatcatgcttggtcgatataatccacacttaaactttgattaagttcttcaaatttttttcttctttaattctgaattttctagtcctatgttcagagaacttactgtgtatccaagttttgaaccttttccaatgtttttttttaatttccctcaattttctcagggatcaagcagagtgttaatatagttcaccttgctgaatttacttcgtttggctttttatttttttcaaaaatatttgccctggtttggggtttgggagaagtgattttcatttagtttctgtttcaaagcccttgttcaacattcttaactacttcaagctaattggtggccatatttttttaaaaaagttttcttcgcaaaagtagcagtttttcatgtaattttatcacattactttggggattttgcagtggaaaagcgggtgctgaattctgaact

SEQ ID NO: 58084 - DNA, 844 bp, Populus trichocarpa
  Intron number 1 from transcript POPTR_0002s22640.1 (locus POPTR_0002s22640) derived from phytozome v7.0 (chr-ID scaf fold_2; pos 19439312 to 19440155)
ttacagttctttgaccgatcttcttgttccttcgggtaataattctgttttctttactctcttatccgagttgcttttctggatcttttccatcgttaattctgtttgtttgttgagaaggtaagaaatggattttttgtttgtgagcttgtttattaccaattcctttccatttttatcaccaggttatttgattctgtgtttcggtatttactatttttggatgctggctgattcttaaattttttgtgtgtatttttgggttgaattccattattggatttaattcctgttttcatgcaaaacatcaagtggaatcagttgattttcttttttaaagtagtaaacagttctgacacgaaaaggtatgctttgttgctttactggatttggttctgtttttcacacagtttttttttttcgttgaaagtaaaggtcagggcttggaaaagtagttaattttcatcaaagatttctgttttctttatttttttttaacttgcattgcttcatgcagtgttcataattaaagcctttgatttccctggatagatcatgctctttctgcttgtttaatttagttaaacatttgcagctgtctttttccgccccctcttttggttctttgtgaagcttaatttgttctagaactggccttttctttcttcttgtttttcactttcatattgtgtataaattattgtctaaaataaatgaagcttgcccatctagtcttgattgtagagtgacaatccagtagtctcattgaaatacatacctctcatctgatttcctgtaattcatctttgttagcataaataataacattttttcatgttaggta

SEQ ID NO: 58085 - DNA, 1063 bp, Populus trichocarpa
  Intron number 2 from transcript POPTR_0002s22640.1 (locus POPTR_0002s22640) derived from phytozome v7.0 (chr-ID scaf fold_2; pos 19440862 to 19441924)
agccaaccagatctccaaattcatctttgccaaaggtatgtggtacttctgtatatttaccgtcttgtaggtgtaattaaattattctgtagggatgtaggtgtctgtcatttggttgcatgaacaatctaataagcaacgtggtgatctaaattttggcttgcaggaaagtaaaattacttttctcagtcatcttcacattttaggtcccctttaatcgctttcacattttagatttctgggtatgaagaacgttataaatttaaacttcctgataagaaaatctttgttatcgtgtccaatcttttgtctatgcagtatgcttaacctttgacagtctggcttttaaaatttaaattgttaaataaagcctattctttctgagaaaatgtatgtagttgggaatctcatccctccttttaatgatatgatttttctgtttaacagttttaacaggttatattgtagtagtattctcgatcattcaaaggttcttttaatctcagaactaattttgtgatagtgtttgccttctacatgcatggtaatgatgcacttggaatgtctggtggtttgtccaattacagtttatgtgctatttgatttgaatctaaaatctctcgtgtcagatgaagcaacctcatatataacctaaaccttgcaaactctgtccactgaagcattactagtttgggaaatgtaacttcaactttgatgaggggctcgtacattacattgtaagagagagactgttttctttttcagctgttgtgaaatcagttgtctcctgtttgctttcacagctgttgactattctggtctttgagctttcttacatccatctaagctcatagttagtcaaagcctaacttcatttcatcgtttcaagttagcgaactgaaataaacacacatgcgtgatcatagagatagagagagagagttgttacctttgctttttggatatgtgaaaattttattttctgtttcttaaggaccttttgcaaatttcactctatccatctgcagttatactgtcctggtactaagtgtcctgcacgcta

SEQ ID NO: 58086 - DNA, 810 bp, Populus trichocarpa
  Intron number 1 from transcript POPTR_0007s05770.2 (locus POPTR_0007s05770) derived from phytozome v7.0 (chr-ID scaf fold_7; pos 3917415 to 3918224)
acaaggttaagaggctataaatacccctttaatcatccaggtacagggttcataatttttattctctaagtatttatattttaattctcaaaagatttatcatacaaaaataagaaaaaaaacactcttattcttgaaatttaaagtttattctctcattttgataagaaatctctatttacgtgggtgattgggtgcatggttagggtacagctgggtataaggcttacgcgggttactattgttttgtgttttattgaattagtcaattaataatgtaatgaggaataggagttgctaaaagcatttctagtcctcagctccactactggagtcctggttattttgatttattgttgtattgaggtggcctatttaggttcacgtttctgtattgaatgaggggcattgaataaacaaaaatactctccaaaacctctgtttttttcttctcatatcttccccaaattcttttcttatcacatttattataattctttacttaaaagtcacaaactttatcatcaaaagatatttaaacttcattaaaaaaaattattttacaagtgttgagtcttctactattaatcacctgcttctcgagctttgaagaataaaatttcatataaatatataattacttactgtacaaatactcaaaaaacctcattcgtgtgtatattaggttccagaacatcatctattaataaactaaacacatatacgcggattcctctaattaataatttgttaataacaaatagaacacggcaagggccccaaagtcttcgtcaagggtcccaaacccaa

SEQ ID NO: 58087 - DNA, 489 bp, Populus trichocarpa
  Intron number 1 from transcript POPTR_0007s03570.1 (locus POPTR_0007s03570) derived from phytozome v7.0 (chr-ID scaf fold_7; pos 2060211 to 2060699 reverse strand)
aaggtatggtgttacgttcacatccttccttagcattctctttgtccagtttctgtttgcttcctgggaaaatataagaaaacaaaaggaaagtggggtcttttccttcttcttttttcttttctttttgggattagatagtgagttaatggcattaactagaccaaacccacttatgttttagctttatttgagttgggtatttgcttttttcactgttagttccttctttttttccccagtttcaagcaaacaagttgggttttgtttaatttttttgttgtcgttggttttgttaagtagagagtttagttctgttaggtactaaataggtaaaagttcatatttgattatgggatctatcagtatattcctttatttgaaactgcttaggcaagtaaggcctttttgtttttgcttagactttttattctcatgttggggtatttttaatgactgcagattttgtttattaatccaagtcaatca

SEQ ID NO: 58088 - DNA, 358 bp, Populus trichocarpa
  Intron number 2 from transcript POPTR_0001s28850.1 (locus POPTR_0001s28850) derived from phytozome v7.0 (chr-ID scaf fold_1; pos 27630589 to 27630946)
gccattatgtcagtactcaacaaacttattattcctttccctttttctttgcgctcttccttttgaattgtatcttgaaaatggaaaatctctcatcacctgcatattcaatcgctatgatttcaagcttagaaactgttgtttgtgaatggctgctagtttaagggaagagaaagggtagactgatgcattttttgagtggaacttttattttctgttgtgagcatttaagtttcttctttttccttttttatgcccaagccagtactatataaacgtattagcattcttaaaatttgacttgtgtttaatttagctgtgaaattaatgttgaagaattagtttaaatactgatcag
